United States Patent Application Publication US 2024/0327476 A1 - sequence listing, part 128

SEQ ID NO: 243046 - DNA, 711 bp, synthetic construct
  misc_feature 1..711: note = Description of Artificial Sequence: Synthetic coding sequence
  source 1..711: mol_type = other DNA
atggtttcttcaggcaaaaagtactcccgcaaatctgggaagccttctgtcgaggaccaatttaccagggcctacgacttcgaaacagaggataagaaagaccttagtggaagcgaggaggatgttatcgagggcaagaccgccgttattgagaaacgtcggaagaaaaggagtagcgctggcgttgtcgaggatatgggtggagaggtccagaatatgcttgagggggttggggtggatatcaacaaagctctgttggcgaagcgcaaacgcttggagatgtatacaaaggcctccctgaaaacatctaaccaaaagatagaacatgtgtggaagactcagcaggatcagcgtcagaagcttaaccaagagtactcccagcagtttctgacacttttccagcagtgggatctagatatgcaaaaggcagaggagcaggaggaaaaaatcttgaatatgttcaggcagcagcagaagatcctccagcagagcaggatagtgcagagtcagagattaaaaaccattaaacaactctacgaacaatttatcaagagtatggaagagctcgagaagaatcatgataatctactgacgggggcacaaaacgagttcaagaaggaaatggccatgctacagaaaaaaattatgatggaaacacaacagcaggagatcgcctccgtgcgtaagtctctgcagagtatgttgttctag

SEQ ID NO: 243047 - DNA, 942 bp, synthetic construct
  misc_feature 1..942: note = Description of Artificial Sequence: Synthetic coding sequence
  source 1..942: mol_type = other DNA
atgcttctcctagcagatatggatgtcgtgaatcaactcgtggccggtggccagttcagggtcgtaaaagaaccgctaggcttcgtgaaggtgttgcagtgggtgtttgccatcttcgcctttgccacctgtggatcctacagtggagagctccagttgagcgtggactgcgctaacaagaccgagtctgatctgtccatcgaggtggagttcgaatacccatttcgactgcaccaagtgtactttgacgctcccacctgccggggtgggaccacaaaagtgttcttagttggggactacagctcgtcagccgaatttttcgtgaccgttgctgtgtttgcgttcctgtattccatgggcgctcttgcaacctacatatttctgcagaacaaataccgggaaaacaataaaggaccgatgttggattttctagccactgccgtctttgcttttatgtggctggtgtcttcctcagcttgggctaaagggctttctgacgtgaagatggccacggatcctgaaaacatcataaaagaaatgcccgtgtgccgacaaacaggcaacacgtgtaaagaactaagagaccctgtgacaagtggtctcaacacgagtgttgtcttcggttttttgaatctggtcctatgggtcggcaacctatggttcgtctttaaagagacaggttgggcagctcccttcctaagagctccccctggggcacctgagaaacagccagccccaggtgacgcttacggggacgccggttatggtcaagggccaggtggctacgggcctcaggactcctacgggcctcagggaggctaccagcctgattacgggcaaccagctggatctggaggttcaggatatggcccacagggtgactacggccagcagggatacggcccacagggggcacctacgagcttctccaaccagatgtag

SEQ ID NO: 243048 - DNA, 942 bp, synthetic construct
  misc_feature 1..942: note = Description of Artificial Sequence: Synthetic coding sequence
  source 1..942: mol_type = other DNA
atgcttttgctagccgatatggatgttgtgaaccagctggtcgccggaggacagtttcgagtggtgaaggagccactcgggtttgttaaggtgctgcaatgggtattcgccatctttgcttttgcaacatgtggctcatactctggggaattacaactcagcgttgattgtgctaacaaaacagagagcgacctatctattgaggtcgaattcgagtacccgttcagactgcaccaagtgtacttcgacgcccctacatgcagagggggtaccaccaaggtgttcctcgtaggggactacagctcgagcgcggagttctttgtgaccgtcgcagtcttcgctttcctttatagtatgggagcgctggctacttacatcttcctgcaaaacaagtatcgggagaacaacaaaggccctatgttagacttcctggctaccgcggtcttcgcattcatgtggctcgttagtagctcagcttgggccaaaggcttgtccgacgtcaaaatggcaactgatcctgagaacattattaaagagatgcccgtctgtagacagaccggcaacacttgtaaggaactgcgcgaccctgtgacctctggcctgaataccagtgtcgtgtttggattcctgaaccttgtgttgtgggtgggaaatctctggttcgtgttcaaagaaactggatgggctgcaccttttctgcgagcacctcctggggctcccgaaaaacagccggctcccggtgacgcctacggagatgccggatacgggcagggaccagggggatacggacctcaggactcctacggacctcagggcggttaccaacccgactacggccagccagcgggtagtgggggatctggatatggaccacagggagattacgggcagcagggttacggtccacagggtgctcccacctcgttctcgaatcaaatgtag

SEQ ID NO: 243049 - DNA, 588 bp, synthetic construct
  misc_feature 1..588: note = Description of Artificial Sequence: Synthetic coding sequence
  source 1..588: mol_type = other DNA
atgggcgcattagctacatacatatttctgcaaaataaatacagggagaataacaagggcccaatgctggattttctcgcaactgccgtctttgcgtttatgtggctggtaagttcctcggcatgggctaagggtctctccgacgtgaagatggcaaccgatccagaaaacattattaaagagatgcccgtatgcaggcagacaggtaatacttgcaaggagctgagggaccctgtgacgtccggcctgaatacatcagtcgtctttggatttctgaacctggttctgtgggtcggcaatctttggttcgtgtttaaagaaactggatgggccgctccgtttctgcgcgctcccccaggggcacccgagaaacagcccgcacctggcgatgcatacggggatgccggatacggccagggtcctggtggttacggcccacaggatagttatggcccacagggcggatatcagccagattacggccagccagcaggatccggaggcagcggctatggcccacagggggattacgggcagcaggggtatggcccacagggtgccccaacatcttttagtaaccagatgtag

SEQ ID NO: 243050 - DNA, 2712 bp, synthetic construct
  misc_feature 1..2712: note = Description of Artificial Sequence: Synthetic coding sequence
  source 1..2712: mol_type = other DNA
atggaaggctacagtgaagaggcaagcctgctgcggcacctcgagaaggtagcaagtgaggaagaggaggtgcctctggtggtgtacctgaaagagaatgccgctctccttactgccaacggcctccacttgtcccagaacagagaagcacagcagtccagcccagcccctccacctgcagaagtgcactcacctgcagccgatgtaaatcaaaacctggcatctccgtcagcgactctcaccaccccaacgtccaacagctcacataatcccccagcaaccgacgttaatcaaaaccctcccgcaaccgtagtgcctcaatcattgccactgagtagcatccaacagaacagctctgaagcgcagctgccatcaaatgggacagggccagcatctaaaccatccacactgtgtgccgacggccaaccccaagctccagcagaggaggtccgatgttctacactacttatcgacaaggtgagcacaccggcaaccaccacctctacattttcacgtgaggccaccctgatcccatccagccgaccgccagctagcgatttcatgtccagcagtctgctcatagatatccagcctaacacgttggtcgtctctgccgatcaggaaatgtccggacgagccgctgccaccactccaactaaggtgtattctgaagtgcacttcacgctggccaagcctccctccgtggttaacaggaccgcccgtccatttggtatccaggcgcctggaggaacgtcacagatggagaggtcccctatgctcgaacggagacactttggcgaaaaggcgccagcccctcaacctccatcattgcccgatcgtagcccaagaccccagcgccacatcatgagtcgatcacccatggtagaaagacgcatgatgggacagcgtagtcccgctagtgaaaggcggccactgggaaacttcacagccccacccacctacaccgaaaccctctccaccgcacccctcgcctcatgggtgaggtcaccaccctcgtactccgtgctctacccgtcaagtgatcccaaaagttcccatctgaaaggccaggccgtccccgcttcgaagaccggaatcctcgaggaaagcatggccaggcggggttcgagaaaaagcatgtttaccttcgtggagaaaccaaaggtcacacccaatcccgacctcctggatctggtccagaccgccgatgaaaagaggagacaaagggaccaaggggaagtcggagtggaggaagagccattcgctcttggagcagaggcctctaactttcagcaagagcctgcccctagagatcgagcctctccagccgctgccgaggaagttgtaccggaatgggcctcttgtctgaagagtcccaggattcaggccaagcctaaacctaagccaaatcagaatttgagtgaagcgagtggtaagggggctgagctctacgccagacggcagagccgtatggaaaagtatgtcatcgaatcatcatcgcacactccagagctcgctagatgcccttcaccgaccatgagtctgccatcgtcctggaagtaccctacgaatgcgccaggtgctttccgtgtagcatcaagaagtcccgctcgtacaccaccggctagcttataccatggctacctcccagaaaatggagtccttaggcctgagcccacaaagcagcccccataccagttgagacccagtctctttgtgctgagtccgattaaagagccagctaaggtctccccgagggcggcaagcccagcgaaaccatcctccctcgatcttgttcctaatctgcctaagggtgctctgcccccaagtccagcccttcctaggccatcacgctcctcaccagggttgtatacttcccccggacaggattcactccagccgaccgcagtgtccccaccttacggtggagatatctccccagtgagtccatcccgcgcttggagtcctagggccaaacaggccccacggccttccttcagcactaggaatgccggtattgaggcccaggacaggcgagaatctctgcccacatcacccccatggacaccaggcgcttctaggcctccctccagcctggacggctgggtttcacccggaccttgggaaccaggcagaggctctagcatgagtagcccacctcctttaccccctccccctcccatgagccctagttggtctgaacggtctgtatcacctttacggcctgagaccgaggcgcgacccccatcaagacagctgcaggccttgctcgcgagaaatataattaacgccgctagaagaaaatccgcctctccacggtctgcgggtgccgagaaccctcgaccgttcagtccccctcgcgctcctcctcccccacctccaccacctccccctcctcccagaatgcggagcccccagcccgctcgccctggcagcgctgctgtgcccggagcagcatttgccccaattcccaggtcaccactgcccgcagggcctagtagctgcacatcgcctagatcacctctgccggctccacccaggccctttctctaccgtcgatcgccaaccgattcagacgtgagcctggactcagaagattccggagctaaaagcccagggattctggggtacaacatttgtccccgagggtggaacggttcgctgaggcttaaaaggggtagcttgccagcggaagcctcttgcaccacttag

SEQ ID NO: 243051 - DNA, 2790 bp, synthetic construct
  misc_feature 1..2790: note = Description of Artificial Sequence: Synthetic coding sequence
  source 1..2790: mol_type = other DNA
atgctgggaccacacctccctccaccgcctctcgcaccttctgaaggcagacccaccccctgcgcttttcagatccctgacggaagctatcggtgcttagccctggaggccgaagagagttccggagaggagggactgcaaggagaagttggaccaacggacctggaggaagacgagggcgtctctaggagtggcgacgattctgcttgtcgtgtgacacagggcacccctcagctgcccaaggccctggggatacagcccccaagctgttcccgagaggaacaaggcgctagccaacatgatgaccgagcgagccaggactgggatgttgtgaaggccggacagatgatgacagctagcccctcccccggaccagggccaagggtggctcagaaacccgcactgggacgatccacttctctcaccgagaaggacctgaaggaggctaaggcaagatcacagcagattgcagcacaactcaccactcctccctcctccaacagccgaggtgtgcagcttttcaaccgcaggagacagagagttaacgagttcacccttgaaagccacggtcaacgcggacagaagcccagccaggagagtctgcgggtcctcccttcaagcttgccaggacatgcccctgggctgagtctctcctccacaagtctgccggagccaggcccacctaggcatccatcgccccaatccccagatcgcggagtgcctggccactcaatggagggttatagtgaagaggccagtctgcttaggcacctggagaaggtcgcatcggaggaggaggaggtccccttggttgtatacttgaaagaaaatgcagccttgttgacggcgaatggacttcacctgagtcaaaatcgggaagcgcagcagtcgagcccggcaccgccaccagcagaagtgcattctcccgctgccgacgtgaatcaaaacttggccagcccgagcgccaccctgacaaccccaacgtctaactcttcccataaccctccagctaccgatgttaatcagaatccaccggctaccgtcgtgccgcagagtctacctttgtcctctatccaacagaactcctccgaggcacaactgccatcaaatggcaccgggccagcgtccaagccctcaaccctctgcgcagacggtcaaccacaggcccctgcggaagaggtacgttgttccacactcttaatcgataaagtctccactccagctacaaccaccagcaccttttcacgcgaggccacactaataccatcttcccgacctccagcctccgacttcatgtccagctctctacttattgacatccagcctaatactctggtcgtcagcgccgatcaggaaatgagcggcagggcagctgccacaacaccaaccaaggtgtattctgaagtgcactttacacttgccaaacccccatctgtggtaaaccggactgctcggccatttggcatccaggcaccaggaggaactagccagatggagaggtcacctatgctggagcgaagacactttggtgagaaggctcctgctccgcagcctccttcgcttccagacaggagccccaggccgcagagacatatcatgtctagatcacctatggttgaacgtcggatgatgggtcagcggagcccagcaagtgagcgacgcccactgggcaactttactgccccacccacttacactgagactttgtcaactgcccctctggcaagttgggtgaggagccctccctcctactctgtgctctatccgtcctccgatcctaagagctcacatctgaagggccaggctgtccctgcatctaagacgggaatcctggaagaaagcatggccagacgtggctcccgcaagtcaatgttcacttttgtggagaaacccaaggtaacacctaaccccgacctgctcgacctggtgcagaccgctgatgagaaacggagacagcgagaccagggagaagtgggagtcgaggaggaaccatttgctctcggtgctgaggctagtaacttccagcaggagcccgcaccgagggatagggccagtccagcagcagccgaagaggtggtgcccgagtgggccagctgcctgaagtctccacgaatccaggcgaagccaaagcccaagccgaatcaaaacttgtcagaagctagtgggaagggggctgagctgtatgccaggaggcagtcacggatggaaaagtatgtgatagagagctctagccataccccagaactagctcgatgcccttcacctacaatgagcttgccaagttcatggaagtacccaacaaatgcgccaggcgcattccgcgtggcatccagaagccccgcacgaaccccacctgcgagcttatatcacggctatctgcctgaaaatggggtccttagaccagagcctactaaacagcccccatatcagctgcgcccttccctgttcgtgctatctccaataaaagagccagccaaagtgtctccccgagctgcctcaccagcaaagccttcctcattagaccttgtgccaaatctcccaaagggagcactccctccaagtcctgcgctgcctcgaccgagcaggtcgtcgcctggtctctacacgtccccagggcaggactcccttcagcccacagccgtgagcccaccttatggaggcgacatctctcccgtgtccccctcacgggcatggtctcccagggccaagcaggcaccaagaccaagctttagcactagaaatgccggtattgaggcccaagtgtggaagccatcattctgctttaagtag

SEQ ID NO: 243052 - DNA, 2058 bp, synthetic construct
  misc_feature 1..2058: note = Description of Artificial Sequence: Synthetic coding sequence
  source 1..2058: mol_type = other DNA
atggaagggtacagcgaggaggcatccctcctgagacatctggaaaaagtcgcctctgaggaggaggaggtgccactcgttgtttatctcaaggagaacgccgcactcttgaccgcaaacggattgcatctgagccaaaaccgcgaagcccagcagagttccccagctcctccaccagctgaggtgcactctcctgccgctgatgtgaatcagaatttagcctctccttccgctactctgactaccccaacaagcaactcctctcacaaccctccagctacagacgtaaaccagaatcctcccgcaacagtcgtcccccaaagcctgcctctcagctcaatccagcagaattccagtgaggcccagctgccctccaacggaaccggaccggcttctaagccctccactttatgtgccgatggccagccacaggcacccgcagaggaagtgcgctgttccaccctgctgatagacaaggtgagcacaccagctacgactacttcaactttcagtcgggaagctaccctaatcccatctagccgtcccccagcatctgactttatgtcttcaagtttgctaattgatatccagcccaatacgcttgtcgtgtccgctgaccaagaaatgtctggacgcgcagcagcaacaacaccgaccaaagtatacagcgaagtgcacttcactctggccaagcccccatctgtcgtgaaccggacagcccgtccctttggaatccaggcacctggaggcaccagccaaatggagaggtctcctatgctggaacggagacattttggtgaaaaagctcctgctccacaaccaccatcgctgccagaccgtagccctcggcctcagcgccatataatgtctcgatccccgatggttgaaaggcgcatgatgggccagcgaagccccgcaagcgagcgcaggcctctcgggaatttcacagcccctcccacctatactgaaacccttagcacggctcccttggcttcgtgggtgagaagccctccttcctactccgtattgtaccctagcagtgaccctaagtcaagtcatctgaaagggcaggcggtccccgcatctaaaacagggatcctggaggagagtatggctagacggggtagccgcaaatcaatgttcaccttcgtggagaagcccaaggtaactcccaatcccgacctcctagacctggtgcagacagccgatgagaaacgaagacagagagatcagggcgaggtcggtgtggaggaagagccattcgctctgggcgctgaggcatccaactttcagcaggagcctgctcctagagatcgagcctcacctgcagctgctgaggaggtggtgcctgaatgggcgagctgcttgaaaagtcccagaatccaagcaaaaccaaagcctaagccaaaccagaatttaagtgaggccagcgggaagggcgctgagctctatgcaagacgccagtccagaatggagaaatatgtgatagaaagcagcagccacacgccagagttggccagatgtccttcaccgacgatgtcccttccttcaagctggaaataccctactaatgctcccggagccttccgagtcgccagtagatctcccgcaaggacccccccagcctctctttatcacggatacctgcctgagaacggggtgctaaggccagagccgaccaaacagcctccttatcaacttcgaccttccctttttgtcctctctccaatcaaggaaccagctaaggttagtccacgcgcagcgtcacctgccaagccaagcagtctcgaccttgtccctaaccttccgaaaggcgctctccccccatcaccagccctgccgcgaccaagtaggagctcccctgggctttacacctccccgggacaagattctctccagcctaccgcagtgtcaccaccgtacgggggagacatcagtccagtatcacccagtcgggcttggagccctcgcgcaaaacaggctcccagaccatcattttcgactaggaatgcaggcatagaagcccaagtgtggaaaccttccttctgcttcaagtag

SEQ ID NO: 243053 - DNA, 2790 bp, synthetic construct
  misc_feature 1..2790: note = Description of Artificial Sequence: Synthetic coding sequence
  source 1..2790: mol_type = other DNA
atgcttgggcctcacctccctcccccacctttggcaccaagcgaggggaggccaacaccatgtgcattccagattcccgatgggtcatacaggtgcctcgctctcgaggccgaggaatcatcaggcgaagagggtctccagggagaagtcgggcctaccgacttggaggaggatgaaggcgtctccagatcgggggacgacagcgcttgtcgggtcacgcagggcacgccccagttacctaaggcgctggggatacaacccccaagctgttcaagggaggagcagggagcgagccagcacgatgacagggcttcccaggactgggacgttgtgaaggccggacagatgatgaccgctagcccgtcaccgggacctggacctagggtggcccagaaacctgctttgggcagatccacctccctaacggagaaggacttaaaagaggccaaggcacggtcacaacaaattgctgcacagctaactactccaccaagtagcaatagcagaggggtccagctttttaaccggaggaggcagagggtgaacgagttcaccctcgagtctcacggacagcggggacagaagccctctcaggagtcattaagagtgcttccatcatctctgccgggacatgcaccaggcttgagcctatcctccacctcccttcccgagcccggtccaccgagacaccctagcccacagtccccagatagaggcgtccccggtcatagcatggagggatactcggaagaagccagcctattgcgccacctagagaaggtggcttccgaagaagaggaagtccctctcgtagtgtatctgaaggaaaacgccgcactcctcaccgcgaacggactgcatcttagccagaatagagaggcacagcagagcagcccagctccccctccggcagaggtgcattcaccggcagcagatgtgaatcagaacctggcctccccctctgccactcttacaactcctaccagcaattccagtcacaacccccctgcgactgacgtgaaccagaatccgccagctacagtcgttccacagagcttgccactgtcttccatccagcagaactcaagcgaggcccagctgccatccaacgggacaggccctgcctctaagccatccacgctctgtgcggacggtcaaccacaggcaccagcagaggaagtgcggtgttccactttgctgatagacaaagtaagcacccctgctactacaaccagcacatttagccgcgaagctacactgattccaagtagtagaccacctgccagtgatttcatgagctcatccctgctgatagacatccagccaaacactcttgtggtgtctgcagatcaggagatgtcgggacgggcagccgcaactactcccacgaaggtgtactccgaagttcacttcactctggccaagccgccttctgtggttaatagaactgcacgacccttcggaatccaagctccgggaggcacaagtcaaatggagcggtcccctatgttggaacgcaggcacttcggggaaaaagcacccgctcctcagccacccagtctgcccgatcggtcccccagaccccaaagacacattatgagcaggtcgcctatggtcgagcggaggatgatggggcagcgttcaccagctagcgaacgtagacccctgggaaattttacggcccctcctacatacaccgagaccctgtctaccgcaccactagcgtcatgggtgaggtctcccccatcttactccgtgctctacccttcctcagaccccaagagttcgcaccttaaaggccaggctgtgccagcctccaaaaccggcatactcgaggaaagcatggccagacggggatcccggaaaagtatgttcacttttgtagaaaagcccaaggtaaccccaaacccggacctcctcgatctggtccagacagccgatgaaaagagaaggcagagagaccaaggcgaagtcggagtggaggaggaacctttcgcgcttggagctgaggcttccaacttccagcaggaacccgcacccagggaccgagctagtccggctgcagcagaagaggtggtgcccgagtgggccagttgtcttaagagtcccagaatccaagcaaagccgaaaccaaaaccaaatcagaatctttctgaggcttcgggcaagggagccgagctgtatgccaggaggcagagtcggatggaaaagtatgtcatagagtcctcaagccatactccagaattggcaagatgtccttcccctactatgtcgctgccttctagttggaaatatcccaccaatgcccctggtgcgtttagagtggcaagccgaagccccgcaagaacgccgcctgcatcgctctaccacgggtacctgccagagaacggggtgctgagaccagaacctacgaaacagcccccatatcagctgaggccctccctgttcgtgctttctcccataaaggagcccgctaaagtgagtccgagagccgcatcaccagccaagccctcatctctggacttagttcccaacttaccgaagggggcactgcctccctcgcctgcgttgccacgtccaagtcggagctccccaggcctttacacgtcccctggacaagattcgctacaacccactgctgtctctcctccgtatggaggggacatctctccagtgtccccaagtcgcgcatggagccctagagcaaagcaggcaccacggccaagcttctcaacacggaatgcgggaattgaggcccaagtttggaaaccctctttttgctttaagtag

SEQ ID NO: 243054 - DNA, 636 bp, synthetic construct
  misc_feature 1..636: note = Description of Artificial Sequence: Synthetic coding sequence
  source 1..636: mol_type = other DNA
atggataacttgagctctgaagaaatccagcaaagggcacaccaaatcaccgatgaatcactggagagcaccaggagaatccttggccttgcaatagagtctcaagacgccggtataaaaaccataaccatgctggatgagcaaaaggagcagcttaaccgcatcgaggagggacttgatcagatcaacaaagacatgcgtgaaaccgagaaaacattgacagagttgaacaagtgttgcggtctgtgtgtgtgtccatgtaatcggactaagaattttgaatcagggaaggcctacaagactacctggggagacggaggcgagaatagcccatgtaatgtggtttccaagcagcccggtcccgtcactaatggccagcttcagcagcccacaacaggcgctgcatcagggggatatattaaaaggattacaaacgacgccagagaggacgagatggaagaaaacctaacacaggttggaagcattttaggtaatctcaaagacatggctctgaatatcggcaacgaaatagatgctcagaacccacagatcaaacgtattacggataaagccgatacaaatcgcgaccggatcgacatcgccaacgctcgcgctaaaaaactcattgatagttag

SEQ ID NO: 243055 - DNA, 477 bp, synthetic construct
  misc_feature 1..477: note = Description of Artificial Sequence: Synthetic coding sequence
  source 1..477: mol_type = other DNA
atggacaatttgtctagcgaggaaatacaacagcgtgcccaccaaatcaccgatgaatccctggagtccacccgccgtattctgggcctcgctatcgaaagccaggacgccggaatcaagaccattacaatgctggacgaacagaaagaacagttaaatcggatagaggagggacttgatcagataaacaaggacatgagggagactgagaaaactcttacagagctgaataagtgttgtggcctctgtgtttgcccctgtaattccattaccaacgatgcaagggaggacgagatggaagagaacctgactcaggtcggttccatattgggtaacttgaaagatatggcgctgaacatcggaaatgagatcgatgcccagaacccacaaattaaaagaattacggacaaggcggataccaatcgggataggattgacattgcaaacgcaagagctaaaaaactaatcgacagctag

SEQ ID NO: 243056 - DNA, 477 bp, synthetic construct
  misc_feature 1..477: note = Description of Artificial Sequence: Synthetic coding sequence
  source 1..477: mol_type = other DNA
atggataatctgtcatctgaagagattcagcagcgcgctcatcaaattaccgacgaatccttggagagcacccgcaggatcctgggactggctattgaatcccaggacgctggtatcaaaacgatcaccatgcttgacgagcagaaagaacaactgaatcgcatcgaggaaggcctggatcagatcaataaggacatgcgtgaaactgaaaaaactctgacagagctgaacaaatgttgtgggctctgcgtctgcccatgcaattctataacgaacgacgccagggaggacgaaatggaagaaaatctgactcaagtgggaagcatactgggcaacttaaaagacatggcattgaacatcggaaacgaaatagatgctcaaaaccctcagataaagcgcatcaccgataaggctgatacaaatagagaccgaatcgatattgccaatgctcgtgcaaagaagctgatcgactcgtag

SEQ ID NO: 243057 - DNA, 621 bp, synthetic construct
  misc_feature 1..621: note = Description of Artificial Sequence: Synthetic coding sequence
  source 1..621: mol_type = other DNA
atggccgaggacgccgatatgcggaacgagctggaagagatgcaaaggcgggcagatcagctggccgacgagtctttagagtccactcgcaggatgctccagcttgtagaggagtcaaaagatgcaggcatccgcaccctcgtgatgctggacgagcagggagagcagctcgaacgtatagaagaaggaatggatcagataaataaggacatgaaggaagccgagaaaaatctgactgacctcgggaaattctgtgggctctgtgtgtgcccatgcaataagttgaagtcttcagatgcctacaaaaaggcatggggcaataaccaagacggggtggttgcttcacaaccagctagagttgtggacgaacgagagcagatggcaatctcaggtggtttcattcggcgagttacgaacgacgctcgcgagaatgagatggatgaaaatctagaacaggtctcagggatcattgggaacttgagacacatggcccttgacatgggcaacgaaattgatactcagaatcgtcagatagaccggattatggagaaagccgattcaaataagaccagaatcgacgaggcaaatcagagggcaaccaaaatgctgggctccggatag

SEQ ID NO: 243058 - DNA, 621 bp, synthetic construct
  misc_feature 1..621: note = Description of Artificial Sequence: Synthetic coding sequence
  source 1..621: mol_type = other DNA
atggccgaggatgcggacatgaggaatgagctggaagaaatgcagcgacgggcagaccagctggcagacgaaagtctggagagcacacgccgaatgctgcaattggtcgaggagagcaaagatgccggaattagaacactggtgatgctcgatgagcagggagagcagctagaccgcgtcgaggaagggatgaatcatattaatcaggatatgaaagaagccgagaaaaatctgaaagacctaggaaagtgttgtgggctgtttatctgcccctgtaataaactgaagtctagcgatgcctataagaaagcttggggtaacaaccaggacggggtggtagcatcacagcccgctagagttgtggacgagagggagcagatggccatttccgggggatttataagacgcgttacgaacgacgcccgtgagaacgagatggatgaaaacttagaacaagtatcaggcataattggaaatctcagacatatggctctagacatgggaaacgaaatcgacactcagaataggcagatcgaccgtattatggaaaaagccgattctaataaaacacggattgatgaggccaaccaacgcgctactaaaatgctgggcagtgggtag

SEQ ID NO: 243059 - DNA, 282 bp, synthetic construct
  misc_feature 1..282: note = Description of Artificial Sequence: Synthetic coding sequence
  source 1..282: mol_type = other DNA
atggctgaggacgcggacatgaggaatgagcttgaagaaatgcagcgtagggcggaccagctagcagacgagagtctggaaagcacaaggcggatgctacagttggtggaggaaagcaaagatgcgggtattaggaccctcgtgatgcttgacgagcaaggagagcagctggagagaattgaggagggtatggatcagatcaataaagatatgaaggaggcagagaagaacctgacagacctaggtaagttctgcggactttgtgtgtgcccctgcaactag

SEQ ID NO: 243060 - DNA, 1500 bp, synthetic construct
  misc_feature 1..1500: note = Description of Artificial Sequence: Synthetic coding sequence
  source 1..1500: mol_type = other DNA
atgaaacacagtctgaacgctcttttgatctttctcatcattacttcagcttggggcggaagtaagggacctcttgatcagctggagaagggcggtgagacagctcagagcgcggatccgcagtgggagcagctaaataacaagaacttgagcatgccactcttacccgctgatttccataaagaaaacaccgtgaccaacgactggatcccagaaggcgaggaggacgatgactacctcgatctggaaaaaatcttctccgaagatgatgactatatcgacattgtcgattctcttagtgtttcccccacggactcagacgtgtctgcagggaacatcctgcaactgttccatgggaaaagtagaatacaaagactcaacattctgaacgctaaattcgcctttaatttgtatagggttctaaaggatcaggttaacactttcgataatatctttatcgccccagtgggtatcagcactgccatggggatgattagtctcggcttgaaaggcgagacccacgagcaagtgcattccattttacacttcaaggatttcgtgaatgcatcatctaaatatgaaattaccactatacataatctcttcagaaagcttacccaccgccttttcaggcgaaactttggatataccctccgttcagtgaatgacctttacatccagaaacagttccccatcttacttgatttcaaaacgaaagtgcgggaatattattttgctgaggcccagatcgctgatttttccgaccccgctttcatttctaaaaccaataaccacatcatgaaactgacaaaaggactgatcaaggacgctttggagaacattgaccctgctacccagatgatgattctgaattgtatttacttcaagggatcgtgggtcaataaattcccagtcgagatgacccacaatcacaatttccggttgaacgagcgagaagtcgtgaaagtgtctatgatgcagacgaaagggaattttctcgccgctaatgaccaggagctggattgcgacattctgcaactggaatacgtcggcggaattagtatgctgattgtggtaccacacaagatgtcaggcatgaagaccctggaggctcagctcacccctagggtagtagaaagatggcagaagagcatgacaaaccgaacccgggaggtgctgctgcccaaattcaagctggagaagaactataacttagtggagtcccttaaattgatgggaatcaggatgctgttcgacaagaacggcaacatggctgggatttctgatcaacgtatcgccattgacctgtttaaacatcaaggcaccatcactgtaaatgaggaggggacccaagcaacaacagtcaccactgtgggttttatgccactgtctacacaagtcaggttcactgtggacaggcctttcctttttctgatttatgagcacagaacatcatgtctcctttttatgggccgagtcgctaacccttcccgaagctag

SEQ ID NO: 243061 - DNA, 1269 bp, synthetic construct
  misc_feature 1..1269: note = Description of Artificial Sequence: Synthetic coding sequence
  source 1..1269: mol_type = other DNA
atggtgtccgaaagccatcacgaggccctggctgccccaccagttacaaccgttgctactgtgctcccgtccaatgcaacagaacctgcctcccccggagaaggtaaagaggacgctttttctaagctgaaagaaaagttcatgaatgaattgcataagatacctctcccaccttgggcactgatagcaatcgcgatcgtggccgtcctgctagtcctgacctgctgcttttgtatatgcaagaaatgcttatttaagaagaaaaataagaagaaggggaaagaaaaagggggaaagaacgcaattaatatgaaggatgtcaaggatctaggcaaaacaatgaaggaccaggctctgaaagacgacgacgccgaaacaggacttactgacggggaagaaaaagaagagccaaaggaggaggagaagctaggcaagctgcaatactctctggactacgactttcagaacaaccagctcctcgtaggcatcatccaagccgctgagcttccggctcttgacatgggaggcacttcagatccttacgtgaaggtatttctactgccagataaaaagaagaagttcgaaacgaaagtgcatcgtaaaaccctgaacccggtgtttaacgagcagttcacgtttaaggttccatattcggaactcggaggcaagactctggtgatggccgtgtatgacttcgaccgattctctaaacacgatattataggagagtttaaggttccgatgaacacagtggacttcgggcatgtgactgaggagtggagagacctccagagcgctgaaaaagaggaacaggagaagctgggtgatatttgcttttccctccgctatgtccctaccgcaggcaaactcacggtggtgatcctcgaggccaagaacttgaaaaagatggatgtggggggtctgtccgacccgtacgtgaagatacacttgatgcagaacgggaagcgactgaaaaaaaaaaagacaacaattaagaagaacactctgaacccatattacaacgagagtttcagctttgaagtaccatttgagcaaatccagaaggtgcaagtcgtggtcactgtccttgattatgataaaattggtaaaaatgacgctattggaaaggtgttcgtgggatataattctaccggagccgagctcaggcactggtcagatatgttagcaaacccacgacgtccgattgcccaatggcacacgttacaggtggaagaagaggtcgacgccatgctcgctgtgaagaaatag

SEQ ID NO: 243062 - DNA, 1269 bp, synthetic construct
  misc_feature 1..1269: note = Description of Artificial Sequence: Synthetic coding sequence
  source 1..1269: mol_type = other DNA
atggtttcagagtcacaccacgaggccctcgccgctccacccgtgacaaccgtagctaccgttcttccgagcaatgcaacagaacctgccagcccaggagaaggcaaagaggatgcctttagtaagcttaaagagaagttcatgaacgaattgcacaaaatccccctcccaccgtgggctttaatcgcaatcgctatagtggctgtgctccttgtcctgacttgttgcttctgcatttgcaagaaatgcctgtttaagaagaagaataaaaagaaaggcaaagagaagggaggcaaaaacgccatcaatatgaaggacgtgaaggacttgggcaagaccatgaaggatcaagctctgaaagatgatgacgccgaaacagggctgaccgatggggaggagaaagaggaacctaaggaagaggagaagttgggaaaactgcagtattccctcgactacgattttcagaacaatcagctcctggtagggatcatccaggcagccgagttgcccgcattggacatgggtggcaccagtgacccttacgttaaagtgttcttactgccagataagaagaagaaattcgagacaaaagtccatcggaagacacttaaccccgttttcaacgagcagttcacttttaaggtgccctattctgaattggggggtaaaacactcgttatggccgtctacgactttgacaggttctctaagcatgacataattggcgagttcaaagtcccaatgaataccgtggacttcgggcacgtgacggaggaatggagagatctccagtccgccgagaaggaggagcaagagaagttaggggacatctgcttttccctccggtacgttccaactgccggtaagctaacagtggtgatactggaggccaaaaatctgaagaaaatggacgtcggaggtctgtctgacccctatgtcaagatccacctgatgcagaacggaaagcgccttaagaagaaaaagactacgatcaaaaagaatacactcaacccttactacaacgaatcctttagcttcgaagtaccattcgagcagattcagaaggtgcaagtagtggtgacggtcctggactatgacaagattggcaagaatgatgcgatcgggaaggtcttcgttggctataactccacaggggctgagctgaggcactggtccgatatgctggcgaacccaagacgtcctattgcacaatggcatactctccaggtcgaagaggaagtggatgccatgctggccgtaaagaagtag

SEQ ID NO: 243063 - DNA, 549 bp, synthetic construct
  misc_feature 1..549: note = Description of Artificial Sequence: Synthetic coding sequence
  source 1..549: mol_type = other DNA
atggtgagcgagagccaccacgaggccttggctgcccctccagtgacaaccgttgccaccgttttgccatccaacgctactgagccagcgtcaccaggggaaggaaaggaagatgctttctccaaattgaaggagaagttcatgaatgagctccacaagattcctctccctccctgggcactaatagcaattgctatcgtggccgtgctccttgtgctcacatgttgtttctgcatttgtaagaaatgtttgtttaaaaaaaagaataagaaaaagggcaaagagaaaggcggaaagaacgctataaatatgaaggatgtaaaagatctggggaaaacgatgaaggatcaagcactgaaggacgacgatgctgagacaggcctaaccgatggtgaggagaaggaggagccaaaagaggaggagaagcttgggaaactgcagtattcccttgattacgacttccaaaacaaccagctgctggtgggtattatccaggctgcagaattacccgcactggatatgggagggactagcgatccatacgtttag

SEQ ID NO: 243064 - DNA, 177 bp, synthetic construct
  misc_feature 1..177: note = Description of Artificial Sequence: Synthetic coding sequence
  source 1..177: mol_type = other DNA
atggtgtccgagtcacaccacgaagcactagcagcccctcccgttaccactgtggcaaccgttctgccctcgaacgccaccgaacccgctagccccggagaggggaaagaggacgcttttagcaaattgaaggaaaaattcatgaacgaattgcacaaaattcctctccctccctag

SEQ ID NO: 243065 - DNA, 219 bp, synthetic construct
  misc_feature 1..219: note = Description of Artificial Sequence: Synthetic coding sequence
  source 1..219: mol_type = other DNA
atggtgtccgagtcccatcacgaagctctggccgcacccccagttacaaccgtggcaactgtgttaccatctaacgctaccgagccagctagtcccggtgaggggaaggaggatgccttcagcaagctcaaggagaagtttatgaacgaactgcataagatccctcttcctccttgggcccttatcgcgattgccatcgtggctgtgctcctggtatag

SEQ ID NO: 243066 - DNA, 222 bp, synthetic construct
  misc_feature 1..222: note = Description of Artificial Sequence: Synthetic coding sequence
  source 1..222: mol_type = other DNA
atggtgtccgagagccaccatgaggccttggcagcgcctcccgtgactaccgtagcaactgtgctgccttctaacgctacagaaccagcttcccccggtgaggggaaagaggacgcattctctaaacttaaagaaaaattcatgaatgagcttcacaagatacctttacccccttgggctcttattgccatcgccatagttgctgtgttactagtgctgtag

SEQ ID NO: 243067 - DNA, 285 bp, synthetic construct
  misc_feature 1..285: note = Description of Artificial Sequence: Synthetic coding sequence
  source 1..285: mol_type = other DNA
atggtcagtgaatcccaccacgaggccctcgcagctcctcctgtaactactgtggccacagtcttgcctagcaacgccaccgaaccagctagccccggagagggaaaggaagacgcgttttcaaagctgaaagagaagttcatgaacgaactgcacaagatccctcttcccccatgggcacttatagccatcgctatcgtggctgtgctcttggtgctcacctgctgcttctgtatttgcaagaaatgtctttttaagaaaaagaataagaaaaagggtaagtag

SEQ ID NO: 243068 - DNA, 1269 bp, synthetic construct
  misc_feature 1..1269: note = Description of Artificial Sequence: Synthetic coding sequence
  source 1..1269: mol_type = other DNA
atggtatcagagtctcaccatgaggcgctggcagcccctccagtgacaactgttgctaccgtattaccaagcaacgctacagaacccgcttcccccggtgagggaaaggaggatgccttttccaagttgaaagagaaatttatgaatgagctacacaagatcccactgccaccctgggctttgatcgctatcgctatcgtggcagtgctgctcgttcttacctgttgtttttgcatttgcaaaaagtgcctgttcaaaaagaagaacaagaagaagggaaaggagaaaggagggaaaaacgctatcaatatgaaggacgttaaggatctcggcaagaccatgaaggatcaagcactaaaagacgacgatgctgagactgggctgaccgacggggaagagaaagaggagcccaaggaagaggagaaacttggcaagcttcagtattcactggactacgattttcaaaataatcagctgctggttggcatcattcaggccgcagaactcccagccctggacatgggaggcacaagcgacccttatgtaaaggtatttctcctgcctgacaagaagaagaaatttgaaaccaaagtgcatcgcaaaactcttaaccctgtgttcaatgaacagttcaccttcaaggtgccctacagcgaactcggaggcaagaccctggtcatggccgtgtacgatttcgaccgtttcagcaagcacgatataattggcgagttcaaggtccctatgaacacagtagattttggtcatgtgaccgaagaatggcgagacctccagtccgccgagaaggaggaacaggaaaagctgggggacatttgtttcagcctgcgctatgtccctaccgcgggtaaactgacagtcgtgattctggaagccaagaatctgaagaagatggacgttggcggtttgtcagacccttacgtgaaaatacacctgatgcagaatggcaaacgcttaaagaaaaagaagactactattaaaaagaataccctcaatccctactataacgaaagcttcagcttcgaagtgccatttgagcagatccagaaggttcaagtggtggtgaccgtgctcgactacgacaaaatcgggaagaatgacgccatcggcaaggtgtttgtaggttataatagcacaggggcagagctccggcactggagcgacatgctcgctaacccgcgaagacccatcgcccaatggcatactcttcaggtggaagaggaagtggacgcaatgctagctgttaaaaagtag

SEQ ID NO: 243069 - DNA, 1773 bp, synthetic construct
  misc_feature 1..1773: note = Description of Artificial Sequence: Synthetic coding sequence
  source 1..1773: mol_type = other DNA
atgtccggtgactacgaggatgacctatgccgtcgcgctctcatactggttagtgatctgtgcgcaagggttcgcgacgcagatacaaacgacaggtgccaggagttcaatgacagaatccgaggttacccaagggggcctgatgctgacatctcagtttcgttgctaagcgttatcgtcaccttctgcggcattgtattgctcggcgtttccctgtttgtatcttggaagctttgttgggtgccctggcgcgataaggggggaagcgccgttggcggtggacctttacggaaagatcttgggccaggggtgggactcgccggactggttggaggagggggtcaccacctagcagccggactgggaggtcacccactgttggggggtccccaccatcacgcgcatgctgcccaccacccgccattcgcagagcttctggagcctggtagcttaggtggctcggacactcccgagccaagctatttggacatggatagttatcccgaagctgcagcggcagctgtggcagctggcgtgaagccctcccagacgagtccagagttgcccagtgaaggaggggcaggctccgggcttctcctcctgcctccttctggcggaggactcccttcggctcagagccaccagcaagtgacctcccttgctcccaccacccggtatcctgccctgcctaggccactgacacagcagacattgacttcgcagcccgatccgagcagcgaggagcgacccccagccctgcccttacccctgcccggtggagaggagaaagcaaagttaattggccagattaaacccgaactataccagggcaccggacccggagggcgtcgctccggcggaggtcccggatctggcgaggctgggaccggggctccctgtgggcgaatctcattcgcactgagatacctgtacggctccgaccagctcgtggttcggattctgcaggcacttgatcttcctgctaaagacagcaatggttttagtgacccttatgtgaagatctatttacttcccgaccgaaaaaagaagttccagaccaaggtgcacaggaaaaccctcaatcctgtgttcaatgaaactttccaattttccgtgccactcgctgaactggctcaacggaagctccatttttcggtgtacgatttcgataggttttctcgacacgacctaatcgggcaagtggtcttggacaacctcttggagctcgccgagcagccgcctgacaggcccttgtggcgggatatcgtcgaaggtggatccgagaaagctgacctgggcgaattgaacttcagcctgtgctatcttcccacagccggtcggctgaccgtaaccataatcaaggcatccaatcttaaagctatggatctcacaggattttcggacccttatgtaaaggcctcactgatctcagaaggcagaagactgaagaagagaaagacctcaatcaagaagaacacactcaatcctacatacaatgaagccctcgtctttgacgttgctcccgagtccgtcgagaatgtaggactatcaattgccgtggtagattatgactgtatcgggcacaatgaagtgattggggtgtgtagagtaggaccagacgcagcggacccgcacggacgggagcactgggctgagatgctggcaaatcctcgaaagcctgtagagcattggcatcagctcgtggaagaaaaaaccgttactagcttcacaaaggggtcaaaaggattatcagaaaaggagaactctgagtag

SEQ ID NO: 243070 - DNA, 1773 bp, synthetic construct
  misc_feature 1..1773: note = Description of Artificial Sequence: Synthetic coding sequence
  source 1..1773: mol_type = other DNA
atgtctggtgactacgaagacgatctgtgcaggagggcactcattctggtctcggacctgtgcgcaagggtaagggatgcggacaccaatgaccgttgccaagaattcaacgatcggattcggggttaccctagggggccagacgccgatatctcggtgtcgctgctctctgttatcgtcaccttttgcgggattgttcttttgggtgtcagcctgtttgtctcctggaaattgtgttgggttccatggcgcgataaaggcggatccgccgtggggggagggccattacgcaaggacctcgggccaggggtaggattggcaggactggtagggggaggcggacatcaccttgccgctggacttggtggacatcctttgcttggaggcccacatcatcatgcccatgcagctcaccacccaccctttgcagaactcctggagcctggatccctgggcggtagtgacacgcctgagccatcttacctcgacatggatagttacccagaggccgctgctgccgcagttgcagccggtgtgaagccttcccagacaagccccgagctcccaagcgaggggggagctggaagcggcctcttgttgctgcccccatccggcggaggacttccgagtgcccagagtcaccagcaagtgacgtccctcgcaccaacaactcggtacccagcgcttccccgtccattaacccagcaaaccctgaccagccagccagacccttcttcggaggagagacctcccgcactgcccttgcccctgccagggggtgaagagaaagccaagttgatcggccagatcaagcctgagctgtatcagggaaccggaccagggggtaggcggtcaggtggaggacccggttcaggggaagcgggtaccggtgcaccttgcgggaggatctccttcgcactgcgttacttatatggttctgaccagctggtggttcgaatacttcaggccctggatctccccgcaaaagacagtaacggtttctcagacccatacgtgaaaatatacctgcttcccgacaggaagaaaaagttccaaacaaaagtgcaccgaaaaaccctgaaccctgtatttaacgagacctttcagttctctgttccgctagctgaactcgctcagagaaagctgcacttctctgtgtacgattttgacaggttctcaaggcacgatctcattggtcaagtggttctggacaatcttctggaactcgcggagcagccaccagacagaccgctgtggcgggatatcgttgagggaggctctgaaaaggccgacctaggagagttaaacttttccctgtgctatctgcctacagcgggacgccttaccgttactattatcaaggccagcaatctgaaggcaatggaccttaccggattttctgacccatatgtgaaggccagtttgatttccgaggggcgaagactcaaaaagcgcaaaacatcaatcaaaaaaaatactttgaatcccacatacaacgaagccttggtgtttgatgtagcccctgaaagtgtggagaacgtcggcctgtccattgccgtggtcgactatgactgcatcggccacaacgaagttatcggggtgtgcagagtgggcccagatgcagccgatccccacggacgcgagcactgggctgaaatgctagctaaccccagaaaacccgtggagcactggcaccaattagtcgaggagaaaactgtgacatctttcacgaaggggtctaagggcttgagtgagaaggaaaacagcgagtag

SEQ ID NO: 243071 - DNA, 1773 bp, synthetic construct
  misc_feature 1..1773: note = Description of Artificial Sequence: Synthetic coding sequence
  source 1..1773: mol_type = other DNA
atgagcggtgattatgaggacgacctctgtagacgggctctgattcttgtctctgacctgtgcgctagagtccgggacgcagataccaatgataggtgccaggagttcaacgatcgcatccgcggttaccctcggggaccggatgccgatatcagcgtgagtctgctgtccgtaatagtcacattttgtgggattgtactgctcggggtctcactatttgtgagctggaagctctgttgggtaccatggcgcgacaaggggggatctgccgtcggcggaggacccctcagaaaagaccttgggcctggtgtgggactggcaggtttagtggggggaggagggcaccacctggccgctgggctgggcggacaccctctgctggggggaccgcaccaccatgcgcacgctgcgcatcatcccccttttgctgagctgctcgagccgggatcgctgggcggttccgatacgccggagcccagttacttggatatggacagctatccagaggccgctgcggctgccgtcgctgccggtgtcaaaccctcccagacaagccccgagttaccatctgagggtggcgctggtagtggcctgcttctgctacccccttctggtgggggacttccaagcgctcagtcccatcaacaagtgacttccttggccccaactactcgctatccagctctaccgaggccactcacccaacaaacccttactagtcagcctgatcccagctccgaagagcggcctccagctctccccctcccattacccggaggagaagagaaagccaagctcatcggccagattaaacccgaattataccaaggcaccgggccaggcggaagacgatccggcggtggcccagggtccggtgaggccggaactggagccccatgcggaagaatatcttttgcgctgcggtatctttacgggtctgatcagctagttgtccgcattctgcaggcactggacttgcctgcaaaggattccaacggctttagcgacccatacgtgaaaatatacctgctgcccgacaggaagaaaaaatttcagacgaaagtgcatcgtaaaaccctcaaccccgtgttcaacgagacctttcaatttagtgttcccttggctgagcttgctcaacggaagttgcatttctcagtctacgattttgatcgcttcagtcggcacgacctaattggtcaagtagtcctggacaatttgctggaactggccgaacagccacctgaccgccctctttggagagacatcgtggaaggcggaagcgagaaggcggatctgggcgaactgaactttagtctttgctatctgcccacagctgggaggttgaccgtcaccattatcaaagcctccaatctcaaagcaatggacttgaccggcttttctgacccatacgtcaaggccagcctcatatctgagggcagaaggctcaaaaaaaggaaaacttccatcaaaaaaaataccctgaatccaacatacaacgaggcacttgttttcgacgttgcacctgagtcagtagagaacgtgggcctctcaatagctgtggtcgattatgactgtatcggccataacgaagtgattggagtgtgccgcgtcggcccagacgcggctgatccacacgggagggagcactgggctgagatgctggcaaaccccaggaaacctgtggaacactggcaccagttggtggaagagaagacggtgacttcttttacaaaaggttccaagggcctctccgagaaggaaaacagcgaatag

SEQ ID NO: 243072 - DNA, 1773 bp, synthetic construct
  misc_feature 1..1773: note = Description of Artificial Sequence: Synthetic coding sequence
  source 1..1773: mol_type = other DNA
atgagtggcgattatgaagacgacctttgtcgacgggcacttattcttgtgagtgatttgtgcgccagggtgagagacgctgataccaacgatagatgtcaggagttcaatgaccggatccgcggttaccccaggggcccagatgcagatatttccgtgagccttctaagcgtcatagttactttctgtgggatcgtgctcctgggggtgagcctgttcgtttcatggaagctctgttgggttccctggcgcgataaggggggtagcgcagtgggcggtggcccactgagaaaggatctggggcctggagttggcctcgcagggttggtcggtggtggagggcatcatctggccgcaggcctgggcggtcaccctctgcttggtgggccacatcaccacgcccacgcagctcatcaccctccctttgctgagcttcttgaaccaggttccctgggtggatctgatactccagagccttcttaccttgatatggattcttaccccgaggctgcagcggctgcagtcgctgcaggtgtgaagccatcccagacctctcctgaactgccaagtgagggaggggctgggtccggtttgctgctgcttcccccaagtggcggtggccttccatcagcacagagtcaccaacaggtcacctcactggctccaaccacacgttatcccgctttacccagaccactaacacagcagaccttaacttcccagcctgatccctcttccgaggagcggcctcctgccctcccattgcccctcccgggaggcgaggaaaaggctaagctgattggacagatcaagccggagctctaccagggcacaggtccgggaggcagacggtcagggggaggcccaggctctggcgaggctgggacgggtgcgccttgcggtcggatctcctttgcactcaggtatttgtacggctcagatcaacttgtggtgcggattttgcaagctcttgatttacccgctaaagacagtaatgggttttctgacccatatgtcaagatatatttgcttccagaccgcaaaaagaagtttcagaccaaggtgcatcgcaagacgctgaacccggtatttaatgaaacctttcagtttagtgtgccgctagcggagctcgctcagcgaaagttgcacttttccgtgtacgatttcgaccggttttcccgtcacgacctcatcggtcaggtggtcctcgataacctcctggagcttgccgagcagccacccgatagaccattgtggagggacatcgtggagggaggctccgaaaaggctgatttaggggaactcaatttttccctttgctatcttcccactgctggaaggctgacggttacaatcatcaaagctagcaatttgaaagccatggatctgaccggatttagcgacccatacgttaaggcaagcctcatcagtgagggaaggagactgaagaagaggaaaactagcattaagaaaaataccctcaatccaacatacaacgaggccctggtctttgatgtcgcacctgaatcagtggagaacgtgggtttgtcgatcgccgtagtcgattacgactgcatcggacacaacgaagtgatcggagtgtgtcgggtggggcctgatgccgctgaccctcacgggagggagcactgggccgaaatgcttgccaatccccgtaagcctgtcgagcactggcaccagctcgttgaggagaagaccgtaaccagcttcaccaaggggtctaagggcctcagcgagaaggagaactctgagtag

SEQ ID NO: 243073 - DNA, 1278 bp, synthetic construct
  misc_feature 1..1278: note = Description of Artificial Sequence: Synthetic coding sequence
  source 1..1278: mol_type = other DNA
atggctcctattaccaccagtagagaagagttcgatgaaattcctacagtcgttggcatctttagcgccttcggattggtatttaccgtgagcctgtttgcctggatctgttgccaacgaaagagctctaagtcaaacaaaactcctccttataagttcgttcacgtcctgaaaggggtggacatctaccctgaaaatctgaactctaaaaaaaaattcggcgctgacgataaaaatgaagtgaaaaacaaaccggctgtcccgaaaaactccctgcaccttgatctagaaaagagggacctgaacggaaatttcccaaaaaccaacctgaagccaggatcgccttcagacctggaaaatgccacacccaagctttttctggaaggcgaaaaggagtccgtgtctcctgaatccctgaagagtagtacctcccttacctcagaggaaaagcaagaaaagctggggaccctgtttttcagtctggagtataatttcgagcgcaaagccttcgttgtcaacatcaaggaagccaggggtctgcccgcaatggacgagcagtctatgacatctgacccctatattaagatgaccatcctaccggagaagaagcacaaagtcaagactcgggtcctgaggaaaacactggatcccgcttttgacgagacctttactttctacggcataccatacactcagattcaggagctggcccttcactttacaattctatcctttgaccgcttcagccgtgatgatatcattggcgaggtcctgatccccctaagcggaattgagctgtctgagggaaaaatgttgatgaatcgcgagattattaaaaggaacgtccggaaaagtagcggtagaggtgaactgctgatatccttatgctatcagtcgaccaccaatactttaactgtggtcgtgctcaaagccaggcacctgcccaaaagtgatgttagcggtctctcagatccttacgtcaaagtcaatctttaccacgcgaagaagaggattagcaagaaaaaaacacacgtgaaaaagtgtacaccaaacgctgtgttcaatgaattgtttgtgttcgacatcccctgtgagggcctcgaagatataagcgttgagtttctggtactggactctgaaagaggtagcagaaatgaggtgatcggccaactggtgctcggagccgcagccgagggtacaggtggggagcactggaaggagatttgtgactatcctagaagacagattgccaaatggcacgtgctttgcgacgggtag

SEQ ID NO: 243074 - DNA, 693 bp, synthetic construct
  misc_feature 1..693: note = Description of Artificial Sequence: Synthetic coding sequence
  source 1..693: mol_type = other DNA
atggatctcctttctgaaaagaagcacaaggtcaaaacacgtgttctgaggaagaccttggatcctgcctttgacgagacgtttaccttttacggaattccttacacccagatacaggagctggcgcttcatttcactattctttcttttgataggttctcccgagatgacatcatcggtgaagtgttgatcccgctgtccggcatcgagttaagcgaaggaaaaatgttaatgaacagggagataatcaagcggaacgtgcggaaaagcagcggtagaggagaactattgatcagtctgtgctaccagtcaactacaaataccctaacagtggttgtgctcaaagcacgccatctcccaaagagtgacgtctcaggcctgagcgatccttatgtgaaggtaaatctttaccacgccaaaaagcgcatttccaagaagaagacacatgtgaagaagtgtacgccaaacgctgtctttaacgaactgttcgtgtttgacattccgtgcgagggattggaggacatatctgtcgagttcctggtgctggattctgaaaggggttctaggaacgaggtgattggacagttggttctgggggctgccgctgaaggcaccggtggagaacactggaaagagatctgtgactacccccgacgacagatcgctaagtggcacgtcctctgcgatggatag

SEQ ID NO: 243075 - DNA, 1476 bp, synthetic construct
  misc_feature 1..1476: note = Description of Artificial Sequence: Synthetic coding sequence
  source 1..1476: mol_type = other DNA
atgccaggcgctagggacgcgctgtgccatcaggcgctgcagctgcttgccgagttgtgcgctcgcggagcgttggaacacgacagctgccaggacttcatctaccatctgagagaccgggcaaggccaagactccgcgatcccgacatctctgtctccctacttaccttggtcgttacagcctgtggactggcattgtttggagtgagcctgtttgtgtcctggaaattatgttgggtgccctggagggaacgtgggctgccctccggcagcaaggataacaaccaagagccactgaattacatggatactgagacaaatgagcaagagaacagcgaggactttctggatcccccaactccctgtcccgatagtagcatgaagatttctcacacctcgcctgatatcccgcttagcacacagactgggatacaggagaactgcgcacacggcgtccgggttcagagacaggtgaccgagcccactagtagcgcacggcacaacagcatcagaagacagttaaatctgtccaaccctgactttaacatccagcagcttcagaagcaggaacaactgaccgggatcggacgcatcaaaccagagctttacaagcagcgttccctggataacgatgacggcagaagaagcaacagtaaggcttgcggtaagctgaactttatcttgaaatacgattgtgatctggaacagctcatagtgaaaattcacaaggctgtaaatcttccagccaaggacttctcaggtaccagtgacccttatgtgaaaatctacttactgcccgaccgcaagacaaaacaccaaaccaaggtgcatagaaagacactgaacccagtgttcgatgaagtcttcctcttccctgttccctataatgacttggaggcacgaaagcttcacttctctgtgtacgacttcgatcggttttcgaggcacgacctcatcggacaagtggtcgtcgaccatttccttgacctcgccgacttccccagggaatgtatcctttggaaggatattgagtacgtaacaaacgacaatgtcgatctgggcgagcttatgttttccctatgctatttgccaacggcaggcaggctgaccatcactataataaaggcacgaaatctgaaggctatggacattacaggagcttccgacccttacgtaaaggtgtccctgatgtgtgacggcagaagactgaaaaagaggaaaacctccaccaagagaaataccctcaaccccgtctataatgaggctatcgtgtttgatgtcccaccagagaatatagatcagatccatctaagtatcgccgtgatggactacgaccgcgtgggccacaacgaaattatcggcgtgtgtcaggtgggaaatgaggctgagcggcttggacgggatcattggagtgaaatgttgtcctatcccagaaaacctatcgcccactggcactccttggttgaaaagaggtag

SEQ ID NO: 243076 - DNA, 960 bp, synthetic construct
  misc_feature 1..960: note = Description of Artificial Sequence: Synthetic coding sequence
  source 1..960: mol_type = other DNA
atgttggccaaggtggtcgaaggggatttagcttttaaagggggtcgggacatttctgtgagccttctgaccctggtagtgacagcttgtgggctggcgctgttcggggtctcactgttcgtgtcctggaaattatgttgggttccttggagagaacgcggtctccctagcggctcgaaagataataaccaggagccactgaattacatggatactgaaacaaacgagcaggagaacagcgaggatttcctagacccgccaaccccctgccccgattctagcatgaagatctcccacaccagccctgatatcccattgtcgacacagactgggatacaagagaactgcgcacatggggtacgggtgcagcgtcaggtaactgagccaacctctagcgcgaggcacaatagtatccggagacagctgaacctgtccaaccctgatttcaacatacagcagctacaaaagcaggaacagctgacggggatcgggagaataaaaccagagttatacaaacaacggagccttgataacgatgatggcaggaggagcaattccaaagcgtgtggcaagttgaacttcatcctaaagtacgactgtgacctcgagcaattaatcgtgaaaattcacaaggcagttaatttacccgctaaggatttttccggaacctcagatccatacgtgaaaatctacttactccctgacaggaagactaagcatcaaaccaaagtccaccggaaaaccttaaaccccgtctttgatgaagtgttccttttcccagtgccttataatgatctggaagccaggaaactgcattttagtgtttacgattttgacagattcagccgacacgacttgatcggtcaagtggttgtcgaccactttctcgatctcgcggatttcccgcgagagtgtattctgtggaaggacatcgagtacgttacaaatatcctgtcatag

SEQ ID NO: 243077 - DNA, 1161 bp, synthetic construct
  misc_feature 1..1161: note = Description of Artificial Sequence: Synthetic coding sequence
  source 1..1161: mol_type = other DNA
atgtttccggagccgcctaccccaggtccaccctccccagacacccctccggactccagtagaatcagccacgggcctgtccccccatgggctctcgcaaccattgttctggtgagtgggctcttaattttttcctgttgtttctgcctctacagaaaatcctgcaggaggcgaacggggaaaaagagccaggcccaggctcaggtacacctccaagaggtgaaaggcctgggacagtcttacatcgacaaggtacaacccgaggttgaagagctggagcccgcaccgtcaggccctggccagcaggtggccgataagcacgagcttggacggctgcagtactccctggattatgattttcaatcaggccagttactggtagggatcctccaggcaatgggcctggccgcattggatctgggcggtagtagcgatccttatgtgcgcgtgtacctgctccccgacaagcgtaggcggtacgaaacgaaagtgcatagacaaacactgaacccacatttcggtgagacatttgccttcaaagtgccctacgtggaacttggcggaagggtacttgtcatggccgtgtatgatttcgaccggttctccaggaacgacgccatcggcgaagtcagagtacccatgtctagcgtggatttggggcgtcctgtgcaggcctggcgagagttgcaggctgcgccacgcgaagaacaggagaaattaggcgatatctgtttcagcttacgatacgtaccaaccgcaggcaagctaacagtaattgtgctggaagctaaaaacctgaagaaaatggatgtcggaggcctttccgacccctacgtcaaggtgcatctgcttcagggtgggaagaaggtgcgcaaaaagaagacaaccataaaaaaaaatactcttaatccatattacaacgaagcattttctttcgaagtcccgtgtgaccaagtgcagaaagtgcaggtcgagctcacagtactggattatgacaaactcggaaagaatgaggccatcgggagggtcgcggtcggagcggctgctgggggtgcagggttgaggcattgggcagacatgctagcaaatccgcgacggccaattgcgcagtggcattccctccgcccacctgaccgagtccggctgttgccagctccgtag

SEQ ID NO: 243078 - DNA, 1161 bp, synthetic construct
  misc_feature 1..1161: note = Description of Artificial Sequence: Synthetic coding sequence
  source 1..1161: mol_type = other DNA
atgttcccggaaccacccacgcctgggccaccgtcacctgacaccccccctgatagctccaggatcagtcatggaccagtgcctccatgggcgctggcaacaatcgtactcgtgtctgggcttctcatcttttcatgctgcttctgcctgtataggaaatcctgcaggcggaggaccggcaaaaaatcacaggcgcaggcgcaagttcatttgcaggaggtgaaagggctgggtcagtcttatatcgataaagtgcagccagaggtggaagagcttgagccagcaccgagcggcccaggtcagcaggtggctgacaagcatgaactcggcagactgcaatacagtctcgactatgactttcagtctggccagctcttggtgggtattctccaggctatggggttagctgccctggatttgggcggtagcagcgatccctatgtcagagtgtatctcctccctgataaaagaagaaggtacgagacaaaagtgcaccggcagaccttaaatccacacttcggagaaaccttcgcttttaaggtcccctatgttgagttagggggtcgcgtactagttatggcagtttacgacttcgacaggttttcaaggaacgacgctattggcgaggtcagggtgcctatgtcaagtgtagacctcggcaggcctgtccaggcctggagagaattacaggccgcaccgagagaggagcaggagaagctgggagacatatgcttttctcttcggtacgtgccaacagcagggaagctcactgttatcgtccttgaggccaagaacctaaaaaagatggacgtgggcggtctctccgacccttacgtaaaggtgcacctgctacagggtggcaaaaaagtacgcaaaaagaaaacaacaatcaaaaaaaacactctgaacccctactataacgaagcattctccttcgaggtgccttgcgaccaagtgcagaaggttcaggtggaactcactgtccttgactatgacaaactcggaaagaacgaagccatcggcagggtggcagtaggcgctgccgctggcggagccggtctgcggcattgggctgacatgctggccaatccacggagacctatcgcgcagtggcacagtctgcggccacctgatcgggtacgcctgctaccagcaccctag

SEQ ID NO: 243079 - DNA, 1149 bp, synthetic construct
  misc_feature 1..1149: note = Description of Artificial Sequence: Synthetic coding sequence
  source 1..1149: mol_type = other DNA
atgacacggggaggatgccctgtttccgcacgtttattcgcacaacgcccacatggctcatggtcttcactcctgtgtgttggcctaaaaggcagattgggatgggagtggggcacgcgcgtcctggaatgtctgtgtcggaaggactcgaggacccctccaccttgctcccgcagtccccagcctagggggctgcatcgccctacaagactgcctaccccagtggcttcagcaaccgcacaggttcaacccgaggtggaagagctggaacccgctccatccggccctggacagcaggtggccgataagcacgaattaggcagactccagtattccctcgactacgactttcagtcgggccaactcctggttgggatccttcaggccatgggcctggccgcactcgatcttgggggaagctctgacccctacgtgcgcgtgtatctgctccctgacaagcgacggagatacgagaccaaggttcaccgccagactctgaacccgcattttggggagaccttcgctttcaaagtcccatacgtggaactgggaggcagagtgttggtgatggctgtatatgatttcgaccggttttcaagaaatgatgccatcggagaggtgcgtgtgccaatgtctagtgtagatctggggagacccgtgcaggcctggcgtgagctacaggcagcacctcgcgaggaggagaagctcggcgacatttgttttagcttgcgctacgtacccaccgccggaaagcttaccgtcatcgtgttggaggcaaaaaatctaaagaagatggatgtggggggactatcggatccctatgtcaaggtacatttgctgcagggcggtaagaaggtccgtaagaagaaaactaccatcaaaaaaaacacactgaatccttactataatgaggccttctctttcgaggtcccttgcgatcaggtgcagaaagtgcaggtggagttaacggttctggactacgataagctggggaaaaatgaagccatcggcagggtcgccgtaggtgccgctgcagggggagccggtcttagacactgggcagatatgctggctaatccaaggaggcccatagcccagtggcactccttgagaccccctgacagggtcaggctgcttcctgccccttag

SEQ ID NO: 243080 - DNA, 1533 bp, synthetic construct
  misc_feature 1..1533: note = Description of Artificial Sequence: Synthetic coding sequence
  source 1..1533: mol_type = other DNA
atgtcaggagtatggggcgcaggtggacctcgatgccaggaggctctagccgttttggccagtctttgccgtgcacggccacccccacttggactcgacgtggagacctgccgatccttcgaactccaaccacccgagagatccccgagcgccgctggtgccggtacatcggtctctctgttagcagtcgtagtaattgtctgtggggttgccctcgtcgcggtcttcttgttcctgttctggaagctttgttggatgccgtggcgtaataaagaggctagttctccaagttcagccaatccgccattagaagcgctacagagtcccagctttcgaggcaacatggccgataagctgaaggacccatcgactctgggattcctcgaagctgctgtgaaaatctctcacacctctccagacatccctgccgaggtccagatgtccgtgaaagaacacataatgaggcacacccgcctacaacgtcaaaccaccgagcctgcttcgtctactcgacacacctccttcaagcgccacttgcctagacagatgcacgtgtcctctgtggactacgggaacgaactaccccctgcagccgagcagcccacaagcattggccgaatcaagcctgagctatataagcagaagagcgtggatggagaagacgccaaaagcgaagccactaagtcatgtggtaagattaacttcagtctgagatacgattatgaaacggagacactgatcgtgcgtattcttaaggccttcgatttgccagcgaaggatttttgcgggagctcagatccttacgtcaaaatttacctgctgcccgatcgcaaatgcaaactccagacaagggtacaccgcaagaccttgaatccgacgtttgacgaaaacttccacttcccagtcccctacgaggagttagccgatcgtaagttacatctgagcgtatttgactttgatcgcttttcccgccatgacatgatcggcgaagtcattctcgacaacctgttcgaggcttccgacctgtcccgcgagacaagcatctggaaagatatccagtacgctacctcagagtctgtcgacctgggcgaaattatgttcagcctgtgttatttgcctacagctggacgcctcactctcactgtgatcaagtgccggaatctgaaagcaatggacattacagggtactctgacccctacgtgaaagtgtctctcttatgtgacgggcgacggcttaagaaaaaaaagacaactatcaaaaaaaatacgctgaaccctgtctacaatgaggccatcatttttgatatcccgcctgaaaacatggatcaggttagtttgttaatttctgttatggactacgaccgcgtgggccacaacgaaattattggggtctgccgcgtgggtataacagcggagggactaggcagagaccactggaatgagatgctggcctatccacgcaagcccatagcacattggcacagcctagtggaggtgaaaaagtcatttaaggagggtaacccaaggctatag

SEQ ID NO: 243081 - DNA, 1278 bp, synthetic construct
  misc_feature 1..1278: note = Description of Artificial Sequence: Synthetic coding sequence
  source 1..1278: mol_type = other DNA
atgccctggcgcaacaaggaggcatccagcccaagcagtgcgaacccacctcttgaggcgctccaaagccccagcttccgcggaaacatggctgataaactgaaggacccctccaccctgggattcctcgaagcagcagtcaaaatatctcataccagccctgatattcccgctgaggtgcagatgtctgtgaaagagcatatcatgcgtcatactcgtctgcagcgacagacaacagaacccgcttcttctacgcggcacacgagcttcaagcgccatctccccaggcagatgcacgtatcgtccgtagattacggcaacgaactgcccccagccgctgagcagccaacaagcatcggacgtattaaaccggaactgtataaacaaaagtcagtcgacggggaggatgccaagagcgaagccactaaatcctgtggcaagatcaatttctcgctacgctacgactacgagaccgaaactctaatcgtgcgcatcctgaaggctttcgacctccccgcaaaggatttctgcggaagcagcgacccttacgtgaaaatctatctgctgcctgaccgtaaatgtaagctgcagactagagtccaccgtaagaccctgaatccgacctttgacgagaactttcactttccagtcccttatgaggagctggccgatcgaaagctccacttgtcagtgttcgacttcgaccgcttctctcgtcacgatatgataggtgaagtcattctggacaacctctttgaggcaagcgatctgtctagggaaacctcaatctggaaggacatccagtacgctacgtcagagagcgtcgaccttggggagatcatgttcagcctgtgctacctgcctaccgctggaagattgactcttactgtcatcaagtgtcgcaatttgaaagcaatggacattactggatattctgatccctatgttaaggtgtccttactctgcgacgggaggcgattgaaaaagaagaagaccactatcaagaagaacactctgaaccccgtgtataatgaggctatcatttttgacatcccgccagagaacatggaccaggtgtccctcctgatttctgttatggactatgacagagtgggccacaacgaaatcataggggtttgcagggtgggaattacagccgagggcctgggccgtgatcactggaatgagatgttagcctacccgcgtaagccaatagcccactggcactccttggtcgaagtaaagaaatcatttaaagaggggaaccctagactatag

SEQ ID NO: 243082 - DNA, 1278 bp, synthetic construct
  misc_feature 1..1278: note = Description of Artificial Sequence: Synthetic coding sequence
  source 1..1278: mol_type = other DNA
atgccgtggcggaataaagaggccagctccccaagcagtgctaatccacctctggaagccttgcaaagcccaagcttccggggtaacatggctgataaactgaaggacccatctacactggggttcctggaggctgcagtaaagattagtcacacgtcccccgatattcccgctgaagtgcagatgagcgttaaagaacacattatgcggcacactaggttgcaacgccagaccaccgaacctgccagcagcactaggcacaccagcttcaaaagacacctgccgagacagatgcacgtcagttctgtggactacggaaatgaattaccccctgcggcagaacagccgactagtatcggcagaatcaagccggagctgtataaacaaaaaagcgtggacggagaagacgctaagagcgaggcaacgaagagttgcggaaaaatcaacttctccttgagatacgactacgagacggagactttgatcgtgagaatcttaaaagccttcgacttacccgcaaaggatttctgcggctcgagcgacccgtacgtaaagatctatctcctccccgaccggaaatgtaaactccagacacgggtgcataggaagaccttaaaccccactttcgacgagaactttcattttcctgttccctatgaagagctcgccgacagaaagctgcatctgagtgtgtttgatttcgaccgtttctctcgtcatgacatgatcggcgaggtgatactggataacttgttcgaagccagtgacctgtcaagagaaacaagtatctggaaggatatccagtatgccaccagtgaaagcgttgatctcggagaaattatgttcagcctgtgttatctccccaccgccggacggctcacgcttacagtaatcaaatgtagaaacctgaaggccatggatatcaccggctacagtgacccatatgtgaaggtatcactgctttgtgatggacgcaggttgaagaagaaaaagaccactattaaaaagaacacgctgaaccccgtttataacgaggctatcatcttcgatatcccacccgaaaacatggatcaagtcagcttgctcatctcggtcatggactacgaccgcgtcggccataacgaaatcatcggggtgtgtagggttggcatcacggccgaaggccttggtcgcgaccattggaatgagatgctcgcctatccacgtaaacccattgcccactggcacagcttagtggaggttaaaaagtctttcaaagaggggaacccacggttgtag

SEQ ID NO: 243083 - DNA, 1533 bp, synthetic construct
  misc_feature 1..1533: note = Description of Artificial Sequence: Synthetic coding sequence
  source 1..1533: mol_type = other DNA
atgtctggggtgtggggggcaggagggccacggtgtcaggaggcactggccgtgctggcttccctctgccgcgctcggccaccacccctcgggttggacgtggagacatgtcgaagtttcgaactgcagccaccagagcgctccccgtctgctgcaggagctggaacctccgtaagtttgttggccgtggtcgtcattgtgtgcggcgtagccttggtcgccgtttttctgtttctgttttggaaactgtgttggatgccttggagaaataaggaggcttcgtcaccttctagtgccaaccccccactagaggccctgcagagcccctcctttcgcggaaacatggctgataaactgaaggatccttcgaccctaggctttctagaggcagctgtcaaaatctctcacactagtccggacattccagcagaagttcagatgtcagtcaaagaacatatcatgcgacatacgcggctgcagcgccagacaaccgagccagcgtcttctactcgccatacttctttcaaacgccatctcccacggcagatgcatgtctcctccgtcgactatggtaatgaattgcctccggctgcagagcagcctaccagcattggtcggatcaagcctgagctgtacaaacagaaatctgtagatggcgaggacgccaaaagcgaggctaccaaaagctgtggaaagataaatttcagtctgagatacgattatgagaccgaaacactaattgtgcggattctgaaagcattcgacttgcctgccaaggatttctgcggttcgagtgacccatacgttaaaatttacttgctaccagaccgcaagtgcaaactgcagacccgagtacacaggaagaccttgaaccccacatttgacgaaaacttccattttccagtcccttatgaggagcttgctgatcggaagctacatctctcagtgttcgacttcgaccgatttagtaggcatgacatgataggggaagtgatcttggataatctgttcgaagccagtgacctgagccgtgagacctccatttggaaagacatccagtatgccacttccgagtcagtggatctaggtgagatcatgttttccttgtgctatctgcctacggcaggtcgcttgacgctcactgtgattaagtgcagaaacttgaaagcaatggatatcaccggctacagcgatccatacgttaaagtttcactgctttgtgatggtagaagacttaaaaagaaaaagaccacaatcaagaagaacaccctgaacccagtctacaacgaggccattatctttgatatcccacctgaaaacatggatcaagtgtctctgctcatttcggtcatggactatgacagggtgggacataatgaaattattggggtgtgtagagtgggtatcaccgccgagggattggggagggaccactggaacgagatgttggcttacccgagaaagcctatcgcgcactggcactctctagttgaggtgaagaaaagttttaaagaaggcaatcccaggctgtag

SEQ ID NO: 243084 - DNA, 288 bp, synthetic construct
  misc_feature 1..288: note = Description of Artificial Sequence: Synthetic coding sequence
  source 1..288: mol_type = other DNA
atgccatggcggaataaggaagcatcaagcccatctagtgccaatccacccctggaggcattacagtctcccagttttcgtggcaacatggcagataaactcaaagatccctccacattgggctttctcgaagcagcggttaaaattagtcacacatcaccagacatacccgctgaagttcagatgagtgtgaaagaacacatcatgaggcacacaaggctgcagagacagacaacagagcccgcatcatccaccaggcatacttcctttaaaagacacttgccatag

SEQ ID NO: 243085 - DNA, 261 bp, synthetic construct
  misc_feature 1..261: note = Description of Artificial Sequence: Synthetic coding sequence
  source 1..261: mol_type = other DNA
atgccctggcggaataaagaggcctcaagcccctcaagtgcaaacccaccactggaggcactccagagtccttcattccgtggtaacatggccgacaaacttaaggaccccagcactctcgggttcctggaggcagcagtgaaaatttctcacacctccccagatatcccagccgaggtccagatgagtgtgaaggagcacattatgcgacacacccggctgcaacgacagacaacagagcctgccagcagtacgcgatag

SEQ ID NO: 243086 - DNA, 1212 bp, synthetic construct
  misc_feature 1..1212: note = Description of Artificial Sequence: Synthetic coding sequence
  source 1..1212: mol_type = other DNA
atgtaccgcgaccctgaagctgcgtcaccaggagccccttcaagagacgtgctgcttgttagcgccatcatcactgtgagcctcagcgtcaccgtggtgttatgcggcctgtgccactggtgtcagcgcaagctcgggaagaggtacaagaatagcctagagacagtcgggacccctgacagtgggcgtgggaggtcagaaaagaaagccataaaactaccagccggaggcaaggccgtgaatacagctcctgtccctggccagacccctcacgatgagagcgacagacgaaccgagccacgctcctctgtgagtgacctcgtgaattccctcacgtccgaaatgttgatgctcagccctggttcagaagaagatgaggcacacgaaggttgctccagggagaacttaggtcgcattcagtttagcgttggttataacttccaggagagcaccctcacagtgaagatcatgaaggcccaggagctgcccgctaaggacttcagcggtaccagtgacccctttgtgaagatatatctgctcccagataagaagcacaagcttgaaaccaaagtgaagcggaagaatctgaatccccactggaacgagactttccttttcgaaggcttcccctacgagaaagtcgtgcagcggatcctctacctacaagtgctggactacgatcggttctctaggaacgacccaattggagaagtctctatcccactcaacaaagtggatctcacccagatgcagacgttctggaaagaccttaaaccatgctcagacgggagcggctctcgtggcgaacttctcctcagtctgtgctacaatccttcagcgaattccatcatcgtgaatatcatcaaggctagaaacttgaaggctatggatatcggcggtacaagtgacccctacgtaaaagtgtggttgatgtacaaggataaaagagtggagaagaagaaaactgtcaccatgaaacgcaatctgaatccaatttttaacgaatccttcgcatttgatattccaacggagaaattgagagagactacaattattatcactgttatggataaggacaagctgagtagaaacgatgtgatcggcaagatctatttgagctggaagtccgggcctggagaggtgaaacattggaaagacatgatagccagaccaagacaaccagtggcacagtggcaccaacttaaggcttag

SEQ ID NO: 243087 - DNA, 1266 bp, synthetic construct
  misc_feature 1..1266: note = Description of Artificial Sequence: Synthetic coding sequence
  source 1..1266: mol_type = other DNA
atggcagttgacgtggcggagtaccacctgtcagtaatcaaatcaccccctggatgggaggtgggtgtatacgcagcaggggctctggccctccttggcatcgctgcagtgagtctatggaaattgtggactagtggatcttttccatccccttcaccatttccaaattatgactaccgctacctccagcagaagtatggcgagtcatgcgcggaggctcgggagaagcgggtcccagcctggaatgcccagagggcatcaacaaggggccctccatccagaaaggggtccctgtctattgaagataccttcgaatccatctctgaactgggaccactcgagctgatgggcagagagcttgacctggctccctacggaaccctgcgtaaaagccagtcagcggacagccttaattcaattagcagtgtgagcaacactttcgggcaagacttcacattgggccaggtagaggtctccatggagtacgatacggcctctcacacattgaacgtagccgtgatgcagggtaaagacctcctcgagagagaggaagcctccttcgaatcatgctttatgagggtttctctgttgccagatgagcagatagtcgggatctcacggattcagcgaaacgcctattctatcttctttgacgagaagtttagcattcctctggatcctacagctctggaggaaaaatctctgcggttctccgtgtttgggatcgatgaagatgagagaaatgtctccacaggtgtcgtcgaactgaagctctctgtcctggacctccccctccagcctttcagcggttggctatacctgcaggatcagaataaagccgctgacgccgtgggtgaaattctgctttccctaagctatttgccaactgctgaaagactgacagtcgtggtggtcaaagcaaaaaatctgatttggaccaatgataagactaccgccgacccatttgtcaaagtatatctgctccaggatggacgaaagatgtcgaagaaaaaaaccgcagtgaagagagacgatccaaacccagtattcaatgaggccatgatcttcagtgtgcctgccattgtgctgcaggatttgtcattgagagtgacagtagcagagtcctcttccgacggtcgcggagataacgtcggccacgttatcatcggaccgtctgcgtctggaatgggaacgactcactggaaccagatgctcgctacgctccgaagacctgtatcaatgtggcacgcagtgaggcggaattag

SEQ ID NO: 243088 - DNA, 1266 bp, synthetic construct
  misc_feature 1..1266: note = Description of Artificial Sequence: Synthetic coding sequence
  source 1..1266: mol_type = other DNA
atggcagtcgacgtcgcggaatatcatctcagcgtgattaagagcccacctggatgggaggtcggggtgtacgccgctggggctcttgcactgctaggcatcgccgctgtgtcactctggaagctgtggactagtgggagcttcccgagtccctcaccatttcctaattatgattaccgatatctccagcagaaatacggcgaatcatgtgctgaggcccgtgagaagagggtacccgcatggaatgcgcagagagcttccacacgcggacccccaagccggaagggaagtttgagcattgaggatacgtttgagtcgatttctgaactcggccctctcgagctgatgggacgggagctagacctcgcaccctacggtacactgcggaaatcccaatcagccgacagtctcaactcaattagttctgtttccaataccttcgggcaggacttcacattgggtcaggtggaagtgagcatggaatatgacacagcatcacacactcttaatgtcgccgtcatgcagggcaaggacctcctcgaaagggaagaggcttccttcgaaagctgttttatgagggttagtcttctgcccgacgaacagatcgtcgggatctcacgaatccagcgaaatgcgtactccatcttttttgatgagaaattctcgattcccctagatcccacagctctggaggaaaagagcctcagatttagtgtatttgggatcgacgaggatgagcggaatgtaagtaccggcgttgtggagcttaagctgagcgtcctggacctgcccctgcagccatttagcggctggctgtacctacaggatcaaaacaaggccgcagatgctgtcggggagatattactgtcattgtcgtacctgcccaccgctgaaagactgaccgtggtggtcgtgaaagctaaaaatcttatctggaccaacgataaaacgaccgcagaccccttcgtcaaagtttacctgctgcaagacggcagaaagatgtccaagaagaagacagccgtgaaacgcgacgatcccaatccagtcttcaatgaggccatgattttttctgtgcctgccattgtgttacaggatctgtccctgcgagttacggttgctgagagctcctccgacgggagaggcgacaatgtgggccatgtgattataggacccagcgcgagtggcatgggtactactcactggaaccagatgctggcaactttacggagaccagtgtccatgtggcacgccgtcagaagaaactag

SEQ ID NO: 243089 - DNA, 1266 bp, synthetic construct
  misc_feature 1..1266: note = Description of Artificial Sequence: Synthetic coding sequence
  source 1..1266: mol_type = other DNA
atggcggtcgacgtggccgaataccatctgtctgtgatcaagagccctcctggttgggaagttggtgtatatgcagcaggtgcactggccctgctggggattgcagcagtgtcactctggaagctgtggacttcaggatccttcccttctccgtcccccttcccaaactacgactatcgctatctgcagcagaagtatggtgagtcgtgtgccgaggcaagggagaaacgggtacccgcatggaatgcccagcgcgcatcaactagaggccctcctagcaggaaagggagtttgagcattgaggacacattcgaatccatctcagagttgggacccctagaattgatgggccgagaactggatctggccccatacgggacgctgcggaaaagccagagtgcggactcacttaactcgatatctagcgtgtccaacacattcgggcaggactttactttgggtcaggtggaagtttcaatggagtatgatacagccagtcacactctgaacgttgctgttatgcagggtaaggacctgctggagcgtgaagaagcctcatttgagagctgcttcatgcgggtctcactgctgcctgatgagcaaatagttgggattagcaggatccagcgcaatgcgtacagcatctttttcgatgagaaatttagtattcctctagaccctaccgcccttgaagagaagtcattgagattctccgtcttcggaatcgacgaggacgagcggaacgtgtctaccggggttgtggagttaaagttgtccgtgttagacttaccattgcaacctttctcaggatggctgtacttgcaggaccaaaacaaggctgccgatgcagtcggggaaatcttgctcagcctttcctacctacctacagccgaaagactgacggtggtggtcgtgaaagccaaaaatctaatttggactaacgataagactactgccgacccattcgtaaaagtgtaccttctacaggatggccgtaagatgtcaaaaaagaaaacagccgtgaaacgtgacgacccgaacccagtgttcaacgaagctatgatattttcggtacccgctatagttctgcaggatctctcactgagggtcacagtggctgagagctcaagtgatggtagaggggacaatgtcggccacgtcattatcggcccttccgctagtggtatggggaccacccactggaatcagatgctggctactctccgcagaccagtgagtatgtggcacgcagtgcgcagaaattag

SEQ ID NO: 243090 - DNA, 1281 bp, synthetic construct
  misc_feature 1..1281: note = Description of Artificial Sequence: Synthetic coding sequence
  source 1..1281: mol_type = other DNA
atggtgctgagcgtcccggtgatagcgctcggcgctaccctgggaaccgcaacctccattctagccctgtgtggagtcacatgcctgtgccgtcacatgcaccctaaaaaaggtctgttgcccagggaccaggacccggatctcgagaaagccaagccctccctccttggttccgctcaacagttcaatgttaagaagtccacagagcccgtgcagccaagagcccttctaaagttccccgatatctatgggcctcggcctgccgtgacagccccagaggtcatcaattatgctgattattcccttaggtcaacagaggagccaacagcccctgcctccccgcagcccccaaatgatagccggctcaagcggcaagttactgaggagctgtttatcctcccccagaatggagtggtggaggacgtctgcgtcatggaaacttggaatcccgaaaaggccgctagctggaatcaggctccaaaactgcattattgcctggactacgattgtcagaaagcagagctttttgtgactcggctggaggccgtgacatccaatcacgacggcggatgtgactgttacgtgcaaggatcagttgctaaccgtactggaagcgtcgaggcacagactgccttgaagaagagacagctgcatactacatgggaagaaggtttggttttgcctctggcggaagaggagttgcctaccgccacgctgacactgaccctgagaacctgcgataggttctcccggcactccgttgctggcgagctgcgactaggtctcgatggaacaagcgtgccgctcggtgccgcacagtggggcgaacttaaaacatcggccaaggagccgtcagctggggctggggaggtgttactgtcaatttcttatctgccagcggcaaaccgattgctggttgtcctaatcaaggccaagaatctgcacagtaatcagagcaaagaactgttgggtaaggatgtatcggtgaaagtgactttaaaacaccaagccaggaagctgaagaagaaacagactaaaagagctaagcataaaattaacccagtgtggaacgagatgatcatgttcgaactgcccgacgacctgctgcaggcttcttcagtagagctcgaagttctggggcaggacgacagtggacaatcttgcgccttggggcactgttcactcgggctgcatacatccggatcagagcggtctcattgggaagagatgctgaagaatccgagaagacagatagcaatgtggcatcagttgcatttgtag

SEQ ID NO: 243091 - DNA, 1554 bp, synthetic construct
  misc_feature 1..1554: note = Description of Artificial Sequence: Synthetic coding sequence
  source 1..1554: mol_type = other DNA
atgttactgttgtttctgtacattaataagaagttctgttttgagaacgtgggtgggtttcccgatttggggtctgagtacagtactaggaaaaattcgcaggacaagatctacaactcttatatggataaagacgagcacggctccagcagcgagagcgaggatgaggctctcggaaagtaccacgaggctctgagtaggactcataattcccgcctgccacttgctgattctagacaacgaaattacgcctgggaaacccggcaaaaatactctcccctatccgctgagtacgacggatactcctctgaagcttctatcgatgagggcaactgcatacagcggatgcgtagaacacctccattagatgagctgcagcctccaccatatcaggacgatagcggcagccctcacttgagctgcactccgagtgaaatcggagatagcaagtgtgagtttagtcactgtagtaattccccaaggtgctcctataataagtgcccttctgagggcagtacagggcatgaaatcgaaagttttcacaacaagggctacgaggaagacgtgccaagtgatagcacagctgtcctttccccggaagacatgagcgcacagggttcatccagccaactgccaaagccctttgacccagagcctgaggctaaatacggaacacttgatgtcacattcgactatgacagccaagagcagaaattgcttgtgacagtgaccgctgtgactgatatacctacatacaacaggaccgggggaaatagctggcaagtgcatttggtgttgctgccaatcaaaaagcaacgggctaagacttctattcagcgtgggccatgtccagtctttaccgagaccttcaaattcaatcacgtagagtccgaaatgatcggcaattacgcggtgcgatttcgactatacggggtacatcgcatgaaaaaagagaagatcgtgggcgaaaaaatcttttacttaaccaagctgaacttacaaggaaagatgtccttgcccgttattctcgagcccagctacaaccattcgggatgcgactcccagatgtcagtatcagaaatgagctgctctgagtcgacgagctcatgtcaatccttggaacatggtagcgtgcccgagatcctcattggtctcttatataacgccactactggtagactcagcgctgaggtgatcaaaggctctcacttcaaaaacctagcggctaaccggccaccaaatacttatgtgaaactgaccctcctcaatagcatgggacaagagatgtctaagtgcaaaacatctattcgacgcggacaaccaaacccagtgtataaagaaactttcgtgtttcaggtggctctatttcagctgagcgatgtaaccctaatcctgagtgtgtacaacaaaaggtccatgaaacgaaaagaaatgatagggtggatctcactcggacttaattctagcggtgaagaagaactcaatcactggacagagatgaaggaatccaagggccagcaggtgtgcaggtggcatgcactgttagaatcctag

SEQ ID NO: 243092 - DNA, 1725 bp, synthetic construct
  misc_feature 1..1725: note = Description of Artificial Sequence: Synthetic coding sequence
  source 1..1725: mol_type = other DNA
atggccatcgaggggggtgaacgcacttgtggcgtccacgaactcatctgcatcagaaaagtgagcccagaagccgtggggttcctctccgctgttggagtcttcattatcttgatgcttctcctgttcctgtatatcaacaagaagttctgttttgagaacgtgggtgggttcccggatttggggtctgaatactctacccgaaagaactctcaagacaagatatacaattcctatatggataaggacgaacatgggagtagctccgaatccgaggacgaggcactcggcaaataccacgaagccctgtctcgaacgcataacagtaggctgcctctggcagatagtaggcaaagaaactacgcatgggagacacgacaaaagtactccccactgtccgcagagtacgacggttacagttccgaagcttcaattgacgaaggcaactgcattcaacggatgaggagaactccaccccttgacgagctccagccacctccttaccaagatgattcggggagcccacatctttcttgtactccctcagaaattggagacagcaagtgcgaatttagtcactgctcaaattcccccaggtgtagttacaacaagtgtccctctgagggctcaactgggcacgaaatagagtcatttcataacaaggggtacgaagaggacgtcccctcagattcaacagccgtgctgagcccggaggacatgagtgcccagggatcctccagccaattacctaaaccattcgatcccgaacccgaggccaaatacggaaccctcgatgtgacatttgactacgactcacaggaacaaaagctgctcgtgaccgtcaccgcagtgaccgacattccgacttacaatcggactggaggaaattcttggcaagttcacctggtgctactgcctatcaagaagcagagagccaaaacatcaatccagcggggtccatgtcctgtgtttactgagaccttcaagtttaaccacgtggaatctgagatgattggaaactacgctgtgagattccgcctttatggtgtccaccggatgaagaaagaaaaaattgtcggtgagaagatcttctacctgaccaaactgaatctgcagggaaaaatgtcgttaccagtgatcctagagccttcttataatcactctggctgcgatagtcaaatgtccgtgagtgaaatgtcttgcagcgagtccactagctcatgtcagtccttggaacacggttccgtccccgaaattctgattggcctactgtacaacgcgactacaggcaggctgtcagctgaagtaattaaaggatctcactttaaaaacttagcggcaaataggcctccaaatggcttattctgctgcctgaagcacctcatagggggtcaggtgtacatcattagagatacctacgttaaactaaccctcctgaactccatgggccaggaaatgtccaaatgcaagaccagcatccgtagaggccagcctaatcccgtttataaggagacttttgttttccaggttgcattattccaattgagcgacgtcactctgatcctgtccgtgtacaacaagcgttcgatgaagagaaaagagatgatcggttggatctcgctcggcctcaactcctctggcgaggaagagcttaaccactggactgaaatgaaggagtcaaagggtcagcaagtctgtcgctggcatgcgctcttagaatcatag

SEQ ID NO: 243093 - DNA, 1377 bp, synthetic construct
  misc_feature 1..1377: note = Description of Artificial Sequence: Synthetic coding sequence
  source 1..1377: mol_type = other DNA
atggccatcgaaggtggcgagcggacctgtggcgtccatgaactcatctgcataagaaaggtgtcacccgaggcagtgggatttctctccgcagtgggtgtgttcattatcctgatgttactcctgttcctatacatcaacaagaagttttgcttcgagaacgtagggggtttcccagaccttggctccgagtattctacacgtaaaaactcccaggacaagatctacaacagttacatggataaggacgagcacggtagcagcagtgaatccgaggatgaggcccttggcaaatatcatgaagctctgagccgcacacataattctcgcctgcctctagccgactcgcggcagcggaactacgcctgggaaacccgacagaagtactcacccctgtctgcagagtacgacggttactcgagtgaagcaagcatcgatgaggggaattgtatacaacgcatgaggaggacaccccctctcgacgagctgcagcctcccccttaccaggatgattctggatctcctcacctcagttgcaccccttccgaaattggagattcaaaatgtgaattcagccattgctcaaacagtcccagatgctcatataataaatgtccctccgaggggagcaccgggcatgaaattgagagctttcataacaaaggctatgaggaggacgttccatcagactccacggccgtgttatcccctgaagacatgagcgcacaaggctctagctcacagttacctaaaccttttgatcccgagcccgaagctaagtatggcactctggatgtgacctttgattacgatagccaagagcagaagctacttgttaccgtcacagcagtgaccgacataccaacctacaaccgcacaggaggaaatagctggcaggtacacctggtgctactccccattaagaaacagcgggctaagactagtattcagagaggcccttgtcctgtctttaccgagacattcaaattcaaccacgtggaaagtgagatgatcggcaattatgcggtcagattcagactgtacggagttcacaggatgaagaaagagaagatcgtcggggagaagatattttatctcaccaaactgaacctgcaaggaaagatgtcactccccgtcattctggaaccctcttacaatcactctggctgcgactctcagatgtccgtgagtgaaatgtcttgcagcgagtccacgtcctcttgtcagagtctggaacatgggagcgtacccgaaatactgattgggctgctgtacaacgctaccacaggtcggctgtctgcagaagtgattaagggaagccactttaagaacctagcagccaatcgccctccaaaaatggactgtagtgtcgtatag

SEQ ID NO: 243094 - DNA, 1860 bp, synthetic construct
  misc_feature 1..1860: note = Description of Artificial Sequence: Synthetic coding sequence
  source 1..1860: mol_type = other DNA
atggcctcggcatcttggcggttgaaggtcgagcgggagcccgtagaatacatgaacctgtccgtgctcgagaaaattggctacttttccgtggcccgactggaatactctggaacaatcttggcacattgcaatttcagactgctgggcagcaacgattcttccgcgtctgcatcccaggtcactggcaccacagtgtcaccagaagccgtcggtttcctctccgcagtgggggtgtttataattcttatgctgttgttgtttctgtacatcaataagaaattttgctttgaaaatgtcggaggatttcctgatctaggtagtgagtactccacccggaagaacagccaggacaagatatataatagctacatggacaaggacgagcatggatcttctagcgaatcggaggacgaggctctgggaaagtaccacgaggccttgtctcgcacgcacaacagtcgtctgccgctggctgattcccggcaacgcaattatgcgtgggagacacgacagaaatatagtcccctgagcgcagaatacgacggctattcctccgaagcctcgatcgatgaaggtaattgtatccagaggatgaggaggactccccctctggacgaattgcagccccctccataccaggacgattctgggtctcctcatctgtcttgtacccccagcgaaattggggattccaagtgcgaattctcgcattgtagcaacagccctagatgttcatataataagtgtccttccgagggtagtactgggcacgagatcgaatcctttcataataaaggctatgaggaagatgtgccttcagatagcacagcagtcctgtcaccggaggacatgagcgctcaggggagctcatcacagcttcctaaaccttttgacccagaacctgaggccaagtatggcacgctggatgtaacattcgactacgactctcaggagcagaaactcctggtcacggttacggctgtgacggatataccaacttataatagaacaggtgggaattcatggcaggtgcacctcgtactactgcccattaagaagcagcgcgctaaaacatcgatacagcggggaccctgccccgtgtttaccgagacctttaaattcaatcacgtcgagtccgagatgattgggaactatgctgtcagatttaggctctatggcgtgcacaggatgaaaaaggaaaaaatcgtcggtgagaagatcttttaccttaccaagcttaacctgcagggcaaaatgagtctcccagtgatcctcgagccatcctacaatcatagcgggtgtgatagtcaaatgtcggtgagtgaaatgagctgctctgaaagcactagttcctgtcaatccctggagcacggaagcgtgcctgagatcctgattgggctgctatataacgccacaacaggtcgactgtccgcagaggttataaagggtagccactttaagaaccttgcagctaacagaccaccaaatggcctgttctgctgcctgaaacacctgatcgggggacaagtatacataatcagggacacctacgtgaaactgaccctgcttaacagcatgggccaggagatgtccaaatgcaaaacaagcattcggcgaggccaacctaacccagtgtacaaggaaacttttgtattccaggttgccctgtttcaactaagcgatgttactctgatccttagtgtttacaataaacgttcaatgaaaaggaaggaaatgattggctggatttccctggggctcaattcttccggagaagaggagttgaaccactggactgagatgaaggagtcaaaagggcagcaggtctgcaggtggcatgctctgctggagagttag

SEQ ID NO: 243095 - DNA, 1668 bp, synthetic construct
  misc_feature 1..1668: note = Description of Artificial Sequence: Synthetic coding sequence
  source 1..1668: mol_type = other DNA
atggccatcgaaggcggagagcggacctgcggcgtgcatgagctgatttgcattagaaaggtttccccagaggcggtcggatttctatccgcagtaggagtattcatcatattgatgctgttactgtttctctacattaataagaaattttgctttgagaacgtgggtggctttcctgacctgggcagcgaatatagcacgcggaagaactcacaggacaagatatacaattcttacatggataaggatgaacatggatcctctagtgagtccgaagacgaagccctggggaaataccacgaagctttgagcagaactcataactctcgtctgcccttagccgacagccgacagcgcaactacgcttgggagacgcggcagaaatatagccctctgtcagccgagtatgatggctattctagtgaggcgtctatcgatgaaggcaattgtattcaaaggatgcggaggacgccgccacttgatgaactgcagcctcctccgtaccaagacgacagtggctccccccacctatcatgtactcctagcgagatcggcgatagcaaatgtgaattcagccactgcagcaatagccctaggtgctcctacaacaagtgccccagtgaaggctccacagggcatgagattgaaagcttccacaacaaaggctatgaggaagatgtcccttctgattcaactgcagtgctgtcaccggaagatatgtcggcccagggatccagctcacagcttcctaaaccttttgaccctgaaccggaggccaaatacggcaccctcgatgtgacattcgattatgattcccaagagcagaaactgctggtgacggtcacagctgtcactgacatacctacatataatcggacagggggaaatagttggcaagttcacctcgtgctgttgccaattaaaaaacagagggccaagacttccatacaacgtggaccctgtcctgtgttcactgaaacattcaaattcaatcacgtcgagtcggaaatgatcggcaactatgcggtgaggtttcggttgtacggcgtgcaccgtatgaagaaagagaagatcgtcggtgagaaaatattttatctgacgaagctcaatctgcaagggaagatgtctctcccagtaatactggagccgagttacaatcacagtgggtgcgactcgcagatgtccgtctcagagatgtcctgctctgaaagcacctcgagttgtcagtcccttgagcacggatctgtgccagaaatcttaatcgggctgctatacaatgctactacaggacggctatctgcagaggtcattaaaggatcccacttcaagaatttggctgcaaataggccccctaacacctacgtaaagctaactctgcttaactccatgggccaggagatgtcaaaatgtaagacaagcatacgccgaggccaacccaatcccgtgtacaaggagacgttcgtgtttcaagtggccctgttccagctgtccgacgttacactcatactctcagtgtataataagagaagtatgaagcgcaaagagatgattggctggatttctctcgggttgaattccagcggcgaagaagaactgaaccactggactgagatgaaagagagcaaggggcagcaggtgtgcaggtggcacgctctgctcgagagctag

SEQ ID NO: 243096 - DNA, 1746 bp, synthetic construct
  misc_feature 1..1746: note = Description of Artificial Sequence: Synthetic coding sequence
  source 1..1746: mol_type = other DNA
atggccatcgagggcggagagcgcacatgtggcgtgcacgaacttatctgtatccggaaggtaagcccagaggctgttggctttctgtccgccgtcggcgtattcatcatcctcatgttgctgctctttttgtatatcaacaaaaagttttgcttcgagaatgtggggggttttcccgatctgggctctgagtactccacacgtaagaactcccaagacaaaatatataatagttatatggataaagatgagcacgggtcctcctcagagagcgaggatgaagccctcggcaagtatcatgaagccctaagtagaacacacaactcacgcctgcccctggctgacagtcggcagagaaattacgcctgggaaacccggcagaagtatagcccattgtctgctgagtatgacggttacagctccgaggcttcaatcgatgagggaaattgcattcagcgtatgcgtcgcacccctcctctggatgagctccaacccccaccttatcaggatgactctggctcacctcacttgtcctgcactccatctgaaattggcgactcgaagtgcgaatttagccattgcagcaatagcccaaggtgcagctataacaagtgcccatcagaagggagcaccgggcatgaaatcgagagttttcataataaaggttacgaagaggatgtaccgagcgacagtaccgcagtactgtctccggaggacatgagtgcccaggggtctagctctcagctcccgaagccatttgacccagagccagaagcaaagtatggtacactggatgtgaccttcgattacgactcccaagagcagaaactcctggttacggtgacggccgttaccgacattcccacctacaaccggaccggaggcaactcctggcaggtgcacctcgtcttgctccccataaagaagcagcgggcaaagacaagcattcagcggggaccttgcccagtcttcacagagacctttaagttcaaccacgtcgagtctgaaatgatcggaaattatgccgttcgtttccgactgtatggcgttcatagaatgaagaaagaaaagatcgtcggggaaaagatcttctacctgacaaagctgaacctgcagggaaagatgagcctgcccgtgatcctggagccaagctataaccacagtggctgcgactcccagatgagtgtctcagagatgtcatgttccgaatctacgagctcttgtcagtcgttggaacatggctctgtgcctgaaatcttaatcggtctgctctataacgcaaccaccggtcggctttccgctgaagtgattaaaggatctcatttcaagaatctggctgccaaccgtcctcctacctttcaccctctcctgtccgatggcttgttctgctgccttaaacacttgattggaggccaggtgtacatcattcgcgacacttatgtcaaactgactctccttaacagcatgggtcaggagatgagtaagtgtaagaccagtattcgcaggggtcagcctaaccccgtctacaaagaaacatttgtatttcaggtggccctgtttcagctgtctgatgtcacacttatactaagcgtttacaataagcggagcatgaagcggaaggagatgattgggtggatcagtcttgggctgaattcatcaggggaggaggagctgaatcattggaccgagatgaaagaatcaaaaggccagcaggtgtgccggtggcacgccctccttgagtcatag

SEQ ID NO: 243097 - DNA, 1554 bp, synthetic construct
  misc_feature 1..1554: note = Description of Artificial Sequence: Synthetic coding sequence
  source 1..1554: mol_type = other DNA
atgctcctcctgtttctttacataaacaagaagttctgctttgagaacgtgggcggtttcccggatctgggaagtgaatactccaccagaaagaactcacaggataaaatatacaatagctacatggataaggacgaacatggttctagctcagaatccgaagacgaggcattgggaaaatatcacgaggcactctcccgcacacataactcaagactccctctggccgactcccgccaaagaaactatgcgtgggaaacacgccagaaatatagtccactctcagcagaatacgatggctattcctcggaagcctccatagacgaggggaactgtattcagcgaatgcggaggactccccctctagacgaactgcagcctcctccataccaggacgacagtggctcaccacatttgtcatgcaccccctccgaaataggggacagcaagtgcgagttctcacactgtagcaattctccgcgatgctcatataacaagtgcccatctgaaggatccacaggacacgaaattgagagctttcacaacaagggctacgaagaggatgtcccaagcgacagcacagctgttctgtcccccgaagacatgagcgcccagggcagctcctctcagctgcctaaaccctttgatcccgaaccggaagcaaagtatggtacgttagatgtgaccttcgactacgacagccaggaacagaagcttctggtcaccgttaccgctgttaccgacattcctacatataataggaccgggggtaacagctggcaggtccacctggtcttactaccgataaagaaacagcgagccaaaacatcaattcagaggggaccatgccctgtcttcacggaaacatttaaatttaatcatgttgagtctgaaatgattggcaattacgccgtgagattccggttgtatggcgtgcatagaatgaagaaagaaaaaatcgtaggggagaagattttttatctgaccaaactcaacttacaaggcaagatgagcctgcctgtcatcctggaacccagttataatcacagcggatgtgactcacaaatgtccgttagtgagatgtcgtgtagcgagagtaccagttcttgtcagtcgctcgagcacggatccgtacctgagattcttatcggactgctctataacgcgaccaccggacggttgtccgcagaggtgattaaaggcagccattttaaaaacttggcggctaaccgccctcccaatacatatgtgaagctgactctcctgaactcgatgggacaggaaatgagtaaatgcaagacttccattcgacggggacagccaaaccccgtctacaaagagacattcgttttccaggtggcactgttccagctgtctgacgtcaccttgattctctccgtgtacaacaagagaagcatgaaaaggaaagagatgatcggctggatatcactaggcctgaacagttccggcgaggaagaactgaaccactggaccgagatgaaggagtccaaggggcagcaggtctgccgatggcatgccttgctggagtcatag

SEQ ID NO: 243098 - DNA, 1266 bp, synthetic construct
  misc_feature 1..1266: note = Description of Artificial Sequence: Synthetic coding sequence
  source 1..1266: mol_type = other DNA
atggccgaacagcttgccctggtgattgggggtactatcggcggactcctactgctgctgctgatcggagccagctgctgcctgtggcgcaggttctgtgcgaccctgacttacgaggagcttcccggaactcctgccatggccactaccgcagcttcttccggtcagcgggacagaccatgccagcctcatgctcggacgcaactcagccggcctcccgctgttcctttcgtggttccacctactctgcagggcagagattgggtgcccttacatagcggggagtgggctgacgccccttgggacccctgcccagcttccgaattactccctcacacatccagcggcggactcggcgacgcctgcatggtgggcgcaatcaaccctgaactatacaagtttcctgaggacaaatctgagactgatttccctgatgggtgcctcggacgcctgtggttctccgtagaatacgagcaggaagcagagagactgctggttgggctgatcaaagcccagcacttacaggccccaagtgagacatgttccccactggtgaagctgtatctgctacccgatgaacgtcgatttctacagagtaagaccaaaagaaagacttctaacccacagttcgacgaacattttatctttcaggtgtcatccaagaccattacccaaagggtgctgaagttctcagtatatcacgtcgaccgccagaggaagcatcagctcctcggccaggtcctgtttccactgaaaaatgaaaccctggtgggagattgtcgacgcgtaatttggcgggacctcgaagcagaatcactggaacctccttcagaatttggagacctgcagttctgcttgtcttataatgattatctgagtcgcctcacagtcgtggtcctccgtgctaaagggcttcgtttgcaggaggatagaggtatcgtctcagtgttcgtcaaggtgagtcttatgaatcataacaagtttgttaagtgcaaaaaaacctccgcagtgctaggaagcatcaatccagtgtataacgagacgttctccttcaaggccgacgcaacagagcttgataccgccagcctcagtcttacagtcgtgcagaacatggagggagacaagtcacagcagctagggagagttgtcgtcggcccttacatgtatacacgcggtcgggaactggagcactgggacgaaatgttgtcaaagcccaaggagctggtgaagaggtggcacgcactttgccgaacgacggaaccctag

SEQ ID NO: 243099 - DNA, 1425 bp, synthetic construct
  misc_feature 1..1425: note = Description of Artificial Sequence: Synthetic coding sequence
  source 1..1425: mol_type = other DNA
atgggagtagttctgtctccccaccctgctcctagcagacgcgaacctctagcccctctggctcccggtacccgacccggatggagtccagctgtctctggctccagtcgatccgcactgagacccagcactgcaggacctgggcctgggcctgggaccgggtggggtgggacagctgcgtccggacggtgggtccctgcgccagctgtacattgcgctgcgcctagagcagctgctggtcaccagcagcatcatgggccacctctatgttccccagatggcgctcccagaaggtttaagcgcagaccaggaagccctgctcccgcagcacagaccggggaaacctcgttaagagagcaaccccatgggggaccaccggctgtgccttttgtcgtgcccccaaccctccagggccgtgactgggtccccctccattcaggggaatgggctgatgctccttgggatccttgtccagcttcagaactgctccctcacacaagctcaggcggtttaggcgatgcttgtatggtcggtgctattaacccagagctctataagtttcctgaagataaaagtgagaccgattttccagacgggtgcttggggagactttggttctcagtggagtatgagcaggaggctgagaggctgcttgtgggactgatcaaggcgcagcatttgcaggccccaagcgagacatgctccccgctggtaaagctgtaccttctacccgatgaacggcgattcctccagagcaaaacaaagagaaagacatcaaacccacagttcgatgagcactttatcttccaggtgtcaagcaaaacgattacccagagagtgctaaaattctccgtgtatcacgtggaccgccagcgcaaacaccagctgctgggacaggtgttgttccctctgaagaatgagacgctcgtcggggactgcaggagggtgatctggcgggacctggaggccgaatcgctcgagcccccttctgaattcggcgacctgcagttttgtctgagctataacgattacttatcgcgcctgacagtggtcgtgctacgcgctaagggcctgcgcctacaggaggacagggggatagtgagcgtgtttgtaaaagtgtccctgatgaaccacaataaattcgtgaaatgcaaaaagacaagcgccgtgttgggttcaatcaatcctgtctataatgaaacctttagcttcaaagcggacgccacagagctggataccgctagtttgtcccttacagtcgtgcagaacatggagggggacaagagccagcagttgggacgcgtggtggtagggccatacatgtatacccggggtagagagctggagcactgggacgagatgttgtcaaagcctaaagagctggttaagaggtggcatgcgttatgcagaacaacagagccctag

SEQ ID NO: 243100 - DNA, 1173 bp, synthetic construct
  misc_feature 1..1173: note = Description of Artificial Sequence: Synthetic coding sequence
  source 1..1173: mol_type = other DNA
atggctgagcagctagcacttgtgattggagggacaatcggtggtttgctgcttctactactcatcggtgccagttgttgtctatggcgccgattttgtgcaactcttacttacgaggagctgccgggaactcctgccatggcaaccacagctgcctccagcgggcagagagatcgtccatgtcaacctcatgcacgtactcagctctctagacctccagccgtgccctttgtggtccctccaacgctccagggcagggactgggtgcccctgcacagcggcgaatgggcggacgccccatgggatccctgtcccgcttcggagctgcttccccacacatcatcaggtggactgggcgacgcctgtatggtgggagcaattaatccagagctgtataagtttcccgaagacaaaagcgagacagactttccagatggctgtcttgggaggttatggttctccgtggaatacgagcaggaagcagaacgcttgcttgtgggtttaattaaagctcaacatttgcaggccccttcagagacctgctcacccctggttaagttatacctgctgccagacgagcgcaggttcctccagtccaaaacaaagcggaagacctcaaatccacagtttgatgagcacttcatcttccaagtatcttcaaaaaccattacgcagcgagtgttaaagttctctgtctaccacgtcgacagacaacgcaaacaccaactgctcgggcaggtcctctttcccctcaaaaacgagactctggtgggggattgcaggcgagtcatttggagggacttagaagccgagagcctcgagccaccctccgagtttggtgatctgcagttttgcctgtcgtacaatgattatttgagtagactgaccgtcgtagtgctgcgcgcaaagggtctgagattgcaagaagacagaggcatcgtgagcgtgtttgtgaaggtgtccctgatgaatcacaacaaattcgtcaagtgcaagaagacgtctgctgtgttggggtcaatcaatccagtttacaacgagaccttctcatttaaggcggacgccacagagctcgataccgctagccttagtctgactgtcgtgcaaaacatggaaggagacaaacaggcgactactgtcgagctcttcctcttccaccttaccagtgggtag

SEQ ID NO: 243101 - DNA, 543 bp, synthetic construct
  misc_feature 1..543: note = Description of Artificial Sequence: Synthetic coding sequence
  source 1..543: mol_type = other DNA
gacgagcactttatctttcaggtgtcgagtaaaaccatcacccagagagtcctcaagttcagcgtatatcatgtggatagacagaggaaacatcagctgctggggcaggtcctcttccccctgaaaaatgaaacgcttgtaggggattgccgccgtgtgatttggcgcgacctcgaagccgaatctctcgagcctccatcagagttcggggacctgcagttttgcctgagctataatgattacctctcccggctgaccgtggtggtgctgagggcaaaaggtctgagactgcaagaggatcgcggaattgtctcagttttcgtgaaggtgtcactgatgaaccataataagttcgtcaagtgtaaaaaaacgagcgctgtgctcggtagcatcaatccggtgtataacgagaccttttccttcaaggctgacgcaaccgagttagacacagcgtcgttgagccttacagtggtgcaaaatatggaaggcgataagcaggctacaacagtagaactcttcctcttccatctgacctctgggtag

SEQ ID NO: 243102 - DNA, 783 bp, synthetic construct
  misc_feature 1..783: note = Description of Artificial Sequence: Synthetic coding sequence
  source 1..783: mol_type = other DNA
atggttggcgcaataaatccagagttgtacaagtttcccgaggacaagagcgagacgtgttcccccttggttaagctttatcttctcccagatgaaagacggtttctgcagtcaaagaccaagcgtaagaccagcaatccccaattcgatgagcactttattttccaggtatccagcaagaccatcactcagcgagtgctcaaatttagcgtttatcacgtggaccggcagcggaagcatcaacttctcggccaggtcttattccctctgaagaacgaaaccctggtcggggattgcagaagagtgatctggcgggatctggaagcagaaagcctcgaacctcctagcgagtttggtgacctgcagttttgtctgtcatacaatgattatttgagcagactcacagttgtcgtactccgcgcaaaaggcctcaggctccaggaggacagaggaatagtcagtgtctttgtcaaagtgtccctcatgaatcataacaagtttgttaaatgcaaaaaaacgtccgctgttctcggaagcattaaccctgtgtataacgaaacgttcagtttcaaagccgatgccacagaacttgatacagcctccctgagcctgacagtggtgcagaatatggagggtgacaaatctcagcaactcgggcgagtcgttgttggcccatacatgtatacccgcggtagggagttagaacactgggatgagatgctgtcaaagccaaaagaacttgtaaaaaggtggcacgcactgtgtcggaccacagagccctag

SEQ ID NO: 243103 - DNA, 1047 bp, synthetic construct
  misc_feature 1..1047: note = Description of Artificial Sequence: Synthetic coding sequence
  source 1..1047: mol_type = other DNA
atggctgaacagctagccttggtaataggagggacaattggtggactgctgctcctgttattaatcggggctagctgctgtctgtggcggaggttttgcgcaactctgacttacgaggagttgccgggaaccccggcaatggcaacaacagccgcttctagcggccaaagggatcggccatgtcagcctcacgccagaacccagctgagtcggccaccagcggttccctttgttgtcccacccacgcttcaaggcagggactgggtgccactacattctggagagtgggcagacgcaccatgggatccgtgtcctgcatccgaactgctgccccacacctccagtggcggattgggtgatgcctgcatggtcggagcgatcaacccagaactgtacaaattccccgaggataaatcggaaaccgacttccccgatgggtgtctgggtagactatggtttagtgttgagtacgagcaggaggcagaacgccttctcgttggcctgattaaagcccagcacctccaggctcccagcgagacttgttcccccctggtaaaactgtatctcctcccggatgagcggagatttcttcagagcaagaccaaacggaagactagtaacccacaattcgatgaacactttatattccaggtttcttcgaagaccatcacgcagcgcgttctgaagttctctgtgtatcacgttgatagacaacgcaagcaccaactgctgggacaggttctgtttcctcttaaaaacgaaactctcgtgggggactgccgtcgtgtcatctggcgggatttggaggcagaaagtctggagcctccatccgagtttggtgacctgcagttctgcctgagttacaacgattacttgtctcggctgacagtcgtagtcctgagagccaagggcctgaggctccaagaggaccgaggcattgtatccgtcttcgtgaaggtctctttgatgaatcataataaattcgcaaaatgtaagccaggcccagacctgggagaggaatcacgagggagtctcaacctaaagtag

SEQ ID NO: 243104 - DNA, 1173 bp, synthetic construct
  misc_feature 1..1173: note = Description of Artificial Sequence: Synthetic coding sequence
  source 1..1173: mol_type = other DNA
atggccgagcaattggccctggtgatcgggggaactattggcggactcctgctgctgctgctgattggggcatcctgttgcctatggcggagattctgtgcaaccttgacttatgaggagcttcccggaaccccagccatggccacgacagctgcctcctccggccaacgggacaggccatgccagcctcatgccagaacccagcttagcagaccccctgccgttcccttcgtcgtgccacctaccttgcaagggagggactgggtgccattacatagcggcgaatgggcggatgccccatgggacccttgcccggcatcagaactgctcccacatacatcatctggaggcttgggcgatgcttgcatggtgggtgctatcaatcccgagctctataagtttccagaggacaagtccgagacagacttccctgatggatgcttgggtaggttatggttctccgtcgagtacgaacaagaagccgagcgcctccttgtgggactgattaaagcacaacacctccaagcaccaagcgaaacatgctcccccttggtgaagctctacctgctgcctgacgagcggagatttcttcagtcaaagacgaaacggaaaacatcaaatccccagtttgacgagcacttcatattccaagttagctctaagaccatcacccagagggtgctgaagtttagcgtctaccatgtggataggcaacgcaagcatcaattacttggccaggtgctttttcccctgaaaaacgagaccctcgtaggcgattgcagacgagtgatctggagggaccttgaagcagaaagtctggaaccgccaagcgagttcggggacttgcaattctgcctgtcttacaacgactacctgtcgcgcctgaccgtggtggtgctgcgcgcaaaaggcctacgtctacaagaagatcgtgggattgtgagcgtctttgtaaaagtatccctgatgaaccataacaaattcgtcaaatgcaaaaaaacttccgcagtgctggggagcatcaacccagtctacaatgaaacattctcattcaaagcggatgcaactgaactggacactgccagcctaagtttgacagttgtgcagaacatggagggcgataagcaggccacaactgtcgagctgttcctctttcatctgactagcggctag

SEQ ID NO: 243105 - DNA, 1152 bp, synthetic construct
  misc_feature 1..1152: note = Description of Artificial Sequence: Synthetic coding sequence
  source 1..1152: mol_type = other DNA
atggtgttggccatggcatctcaggatgtccaaaatttcttccagccattcagttcatggatctctagggtttatgaagccctgcaacaggccggagacatgctgtctgcctctctggttaacatttctaagcaggacagtaaactaagcgacaagttagatcaggatcttgacaacattcagatacaggagacctatttcgaagacgaggagcaagataatgactggagccaggaagatgcaaactccctctttttggaagtagaccacttttcctgttgtaacagcgatctgcaagattctgcccagaacagctctccgagcctgtcccagcatgccaaggatagttgttctaccatgagccagtggcctaattgggcgtctgatgacagaaagctgccccacgtcctgtcatcgattgcggaggaggaacatcatttggagaaacagagatcagggctgcagcatggtttcgactcgcaattgcctggtaccttggagacagtcaacggaaaaaaacaggttaactctttcggcgatgatgaggaactttctactagtagtgattctgacgaggaggtgatcaagcaattcgagataagcgttagcagatcacaaagcttcagaagcgtaacaagcgagaagggaaaacaaaccggcttggaacaaaagcctaagtttagcagatcacttctgacccacggagaagacggtactgaagtctccgcttgtgaggacctggatggggctagccagagaagatatagtgagaacctgagttatggagaggatgaccacattccggcacactcccagtcaccgtgtgagcgcggtgatgcaaagcatcacggtacttcacatcaagagagctcagttgtgcagtctctgcggcgacaatccactgaggggtctcttgagatggaaacagcattcaacagccggggattcgaggattcgtacgccaccgacagctcctcaatgtggtccccggaggccaacctgaacctgaagcggaaggggtatttgttggacgtctattgcctctctagcccgctgctgttcacgacatcccttcatcgacgtaacaggacaggaccaatatgcagatgtcatcctgggtcacaatctcccagtcagtcggtggtgacgtag

SEQ ID NO: 243106 - DNA, 1938 bp, synthetic construct
  misc_feature 1..1938: note = Description of Artificial Sequence: Synthetic coding sequence
  source 1..1938: mol_type = other DNA
atggtgctcgcaatggcgagtcaagacgtgcagaatttttttcagcctttcagctcatggatatctagagtgtacgaggcgctccaacaggctggagacatgttgtcagcttcattggttaacatctctaagcaggattccaagctctccgataaactggaccaggatttagacaacatccagattcaggagacatacttcgaagatgaggagcaggacaatgactggagccaggaggacgcaaactctctgttccttgaagtggaccacttctcctgctgtaatagtgacctccaggactcagcacagaacagttcaccaagcctgtctcaacatgctaaggacagttgtagtaccatgtcacaatggccaaattgggcctcagatgatcgcaaactccctcacgtgctgtcctctattgctgaggaggaacatcaccttgagaaacagcgatccggcctgcagcatggcttcgacagccagctgccaggtacactggagaccgtgaacgggaagaaacaagtgaattccttcggtgatgatgaggaattgtccacctctagcgatagtgatgaagaagtgatcaagcaattcgaaattagcgtgagtcgcagccagtcattcaggtccgttaccagcgaaaaagggaaacagacgggtctggagcaaaaacctaaattttcacggtctcttctgactcacggtgaagacggcaccgaagtgtctgcctgtgaggacttagacggcgcaagccagcgtcgttactctgaaaatctctcctatggagaggatgatcatatacccgctcatagccagagtccgtgtgagcgtggcgatgctaaacaccatggcacatcacaccaggaatcaagcgtcgtccagagcctccgtagacagtccacagagggatctctggaaatggagaccgcctttaactctcggggatttgaggacagctatgcgacagacagctcttccatgtggtcaccagaggagcaggatagaactaacctccaggttccttctggagtcagcgagcccatctctaagtgcggcgatctcgatgtgatcttcgaatatagagccgcatcccagaaactgacagtcacgatcgtgcgcgcacaggggttgccggataaagatagaagcggcgtcaacagttggcaggtgcatgtggtcctcctcccaggtaagaaacatcggggtcgaactaacatccagaggggtcccaaccccgtgttccgggaaaaagtaactttcgcgaagcttgaaccccgagacgtcgccgcatgcgcagtgaggtttcggctgtatgcggctagaaagatgacgcgcgaacgcatgatgggtgagaagctgttttatctgagccatctgcatccagagggagaaatgaaagttacactcgtgctggaaccacgtagtaatatctcttctggcggaagcccactgtccccctccgccgtctcccactccgattctacgagcagtacccaatctctctctcatggcggtgcaccggagcttctggtgggcctgagctacaacgccacgacggggcgactgtccgtggaaatgataaaaggctcacattttaggaacttggccgtcaacagagcaccagatacctacggcaagctgtttcttctgaacagtgtcgggcaggagatgagtagatgtaagaccagcataagacggggacagccaaatcccgtgtataaggagaccttcgtgttccaagtggcactatttcagctctccgatgtcactctgatgatttcggtatacaatagacggacaatgaaaaggaaagaaatgattggctggattgccctaggccaaaactcctctggggaggaggaacaggatcattgggaagagatgaaggagacaaagggtcaacagatctgtagatggcacacacttctggagagttag

SEQ ID NO: 243107 - DNA, 1653 bp, synthetic construct
  misc_feature 1..1653: note = Description of Artificial Sequence: Synthetic coding sequence
  source 1..1653: mol_type = other DNA
atgccacagcggggtcaccccagtcaggagggcctgtgggcacttcccagcctccctatggcccacggacctaagccagagactgaaggtctgctggatctgagcttcctcactgaggaggaacaggaagctattgcgggtgtactgcagcgtgatgcgaggcttagacaattggaggaagggcgagtatccaaactccgcgctagcgtcgctgaccctggtcagctgaagatcctcactggcgactggttccaggaagccaggtctcagcggcaccacaatgctcatttcggtagcgatttggtgcgggctagcatgaggaggaagaaatccacgcggggtgaccaggctccgggtcacgatcgagaggccgaagccgcagtaaaagagaaagaagagggaccagagccccgtctgacaattgatgaggcacctcaggagcggctgcgagaaaccgaggctagcgacccggaagaagctagccaagctcaagaggaccccggtcagggggatcagcaggtttgcgctgaagaggccgaccccgagctggaacccgcaagcggaggggaacaggagccgagaccacagcaagctcagactaaggccgcatcccagattctggagaacggtgaagaagcgcctggcccagaccccagcttggaccgcatgctcagctcttcctcctccgtgtcctccctgaattcttccaccctatctggatcacagatgtctctctctggggatgccgaagccgtacaagtgcgcggatctgtacacttcgctcttcattacgagccaggagctgccgagttgcgggtgcacgtcattcagtgccaagggctggccgcagcccgacgtcgtagatccgacccatatgtgaagagctacctacttccggataagcaaagcaagagaaaaacagctgtgaagaaaaggaacctgaatccagtttttaacgaaacactgcggtattcagtgccccaggccgagctgcagggtcgggtgctgtccttgtccgtgtggcaccgagaatcgctaggcaggaacatcttcttgggggaagtggaagtgccactcgacacatgggactggggatcagagcccacttggctgccacttcagccaagagtgcctccgtcccccgacgacctcccatctcgcggactattggcgctctccctgaaatatgtgccggctggcagcgagggcgcaggtctcccgccaagcggggaactgcatttctgggtgaaggaagcacgcgacctgctgcccctccgtgccggatctctcgacacttacgtgcagtgttttgtcctgcccgatgactcccaggcaagcagacaacggacccgagtcgtaaggcgcagcctctctcctgtattcaaccatacgatggtctacgatggcttcggtccagctgacctaagacaagcatgcgctgaattgtcgttgtgggaccatggagccttggccaatagacaactcggaggtactcgccttagtctcggaacaggaagctcttacggcctgcaagtcccgtggatggacagcacaccagaggagaaacagctgtggcaggctctgttagagcagccttgtgaatgggttgatggactcctgccccttcggactaacctggcccctagaacttag

SEQ ID NO: 243108 - DNA, 231 bp, synthetic construct
  misc_feature 1..231: note = Description of Artificial Sequence: Synthetic coding sequence
  source 1..231: mol_type = other DNA
atgcctcagaggggacatcctagtcaggaggggttatgggcccttccctccctccctatggctcacggacctaagcccgagactgaggggcttctcgacctctcctttctgaccgaagaagaacaagaggctatcgccggagtccttcagagggacgctcgcttaagacagcttgaggaggggcgagtgtccaagcttcgcgcaagcgttgccgacccaggtcaattgtag

SEQ ID NO: 243109 - DNA, 1065 bp, synthetic construct
  misc_feature 1..1065: note = Description of Artificial Sequence: Synthetic coding sequence
  source 1..1065: mol_type = other DNA
atgcctcaacggggtcacccaagtcaggagggtctttgggctctgccgagcctccccatggcacacgggccaaagccagagactgagggactgctggatttgtcttttctcaccgaggaagagcaggaggcaattgcaggagtgctgcagcgggacgcacgccttaggcagttggaggagggtcgggtcagtaagttgcgtgctagtgttgcggatcctggccagctcaagattctgacgggcgactggtttcaggaggctagatctcagcggcaccataatgcccattttggatcagatttggtgagggctagcatgcgaagaaagaagtccacaaggggcgatcaggcccctgggcacgaccgggaggccgaagcggctgtgaaggagaaggaggaaggccctgaaccaaggcttactatcgatgaagccccacaggagagattacgggagacagaggggcctgatttcccaagcccctctgtcccactgaaagcaagtgatcctgaggaggccagccaggcccaggaagaccctggccagggagaccagcaggtgtgtgctgaggaagccgaccccgagctagagcctgcctctggcggagagcaggagccccgaccacagcaggcccaggtcgggggttctggaccatggctgctgagcacaagcggagccgattctggcagaggggctctcctgccaagggcagcatcccggccacggcctcgggcattaggcgcaggggtggggaaggaaggggctccccgtcatctcccgcctctccagaccaaggcagccagccagatcttggaaaatggcgaggaggccccagggccagacccatcccttgaccggatgctgtcctcttcatcctctgttagtagccttaatagcagcactctctcaggaagtcagatgtcactgagcggagacgccgaggcagtccaggtaagggggagcgttcacttcgctcttcattatgaacccggagcggctgaactgcgcgttcatgtgatccagtgccagggcctggctgcagccaggagacgcagatctgatccttag

SEQ ID NO: 243110 - DNA, 606 bp, synthetic construct
  misc_feature 1..606: note = Description of Artificial Sequence: Synthetic coding sequence
  source 1..606: mol_type = other DNA
atgggcaccacagccctgctgggcggagtccggttgtccgagacaatccctgtgaagaggctggccagggggctcgccagagtgcgagacggagggtggggctccccacaggcaggggaaaaagccctgggtgggcctctgctcaccagtgggtcacacctgccaagctatgtgaagtcctacttgctgcctgataagcagtccaaaagaaaaaccgccgtgaaaaagcgcaacctgaatcctgtcttcaatgaaacattgagatattcagtccctcaggccgagcttcaaggacgcgtcctctcccttagcgtttggcaccgtgagagccttggcaggaacatatttctgggcgaggtggaagtgccgttggacacctgggactggggaagcgaacctacttggctgccactccaacctcgcgtacccccaagccctgacgatctcccttccaggggcctcctcgccctgtctcttaaatacgtgcctgcaggttcggagggagctgggctccccccttccggcgagttacacttctgggtcaaggaggcacgcgacctgctgcccttgcgcgcagggtcactggatacctatgtccaatggtag

SEQ ID NO: 243111 - DNA, 1083 bp, synthetic construct
  misc_feature 1..1083: note = Description of Artificial Sequence: Synthetic coding sequence
  source 1..1083: mol_type = other DNA
atgccacagaggggccacccttcccaggaaggactgtgggccctgccatctctgcccatggctcacggcccaaagcctgaaaccgaaggcctgttagatctctctttcttaaccgaagaagagcaagaggctattgccggagtgctgcagagagacgccagactgagacagcttgaggaaggacgtgtgagtaagctgagggctagcgtagcagatcccggtcaactcaagatcctaactggagattggtttcaggaagccaggtcgcagcgacaccacaatgcccacttcggttccgatctggttcgggctagcatgcgccgtaaaaagagtaccagaggcgaccaggccccaggacatgacagagaggccgaggccgctgtgaaagaaaaggaagaggggccagagcctcggttaacgattgatgaagcccctcaagagcgactccgcgaaaccgaaggacccgattttccctcaccatcggtacctctgaaggccagtgatcctgaagaagcaagccaggctcaggaggatccgggacaaggggatcaacaggtttgcgctgaagaggcagaccctgaactcgaaccagccagtggaggtgagcaagaaccgcgaccgcagcaggctcaagttggcggatcaggcccatggttgctgagtacctccggggctgacagcggcaggggtgccttgctgcccagagccgcttcccggcctcgccctcgggctctgggcgctggcgtgggcaaggagggagcacctcgccatcttccacccctacagaccaaagcggcttctcagatactggaaaacggagaagaggcccctggaccggacccttcattagatcgcatgttgtcttccagcagttctgtgtcatcgctgaattccagcacggtcaggcgcgagggaggggaccctggtgggaggggcgttgatcccttccggtgcgtggcacccgcttgcccttccctcgccgctggcccaaccgccgcagctccccagcccgctacgtatgacccaggtctcaaacccccaagatgcccacgcccacgacgcgagccatgcgagcggccttag

SEQ ID NO: 243112 - DNA, 879 bp, synthetic construct
  misc_feature 1..879: note = Description of Artificial Sequence: Synthetic coding sequence
  source 1..879: mol_type = other DNA
taaccacgcccacagcaggcacaggtcggtggttccgggccatggctgctctctacctccggagccgacagtggtcgcggagccctgctgccccgagctgcctccaggccgagacctagagcccttggcgctggcgtcggaaaagaaggcgcaccccgacatctgcctcctctccagaccaaggccgctagccaaatcctggaaaacggggaggaagccccaggcccagatccctcgctggaccggatgctgagctcttcatcttctgtttcaagcctgaactcctccaccctatccgggagtcagatgagcctgtcgggagacgctgaggccgttcaggtcagagggagtgtccactttgccctacattatgagccaggcgcagcagagctcagagtgcacgtcatccagtgtcaagggctggccgcagctcggaggagaaggtcagatccgtatgtcaaaagctacctgctgccagacaaacaaagcaagagaaagacagcggttaaaaagcggaatctgaatccagtctttaatgagacgctccgctatagcgtccctcaggcagaactccaaggtcgtgtgctctcactcagcgtctggcatcgggagtcgctcgggagaaacatctttcttggcgaagttgaggtcccgctggatacttgggattggggcagcgagcccacatggcttcccttgcagccacgggtcccccctagcccagatgatctgccgagccgaggattgctggccctgtctctgaagtacgtgccagctgggagcgagggagcaggcctgccaccaagcggcgagttacatttttgggttaaggaggccagggatctgctccctctgcgtgcgggttctttagatacatag

SEQ ID NO: 243113 - DNA, 1689 bp, synthetic construct
  misc_feature 1..1689: note = Description of Artificial Sequence: Synthetic coding sequence
  source 1..1689: mol_type = other DNA
atgcctcagagggggcatccctcccaggaaggactgtgggccctgccttccctcccaatggcccatggccctaagccagagacagagggccttcttgacctgagctttctgacggaagaggaacaggaagccatcgctggagtgctgcaaagagacgcccgactgcgccagcttgaagagggcagggtgtctaaacttagagcaagcgtggccgacccgggtcaattgaaaatattaacgggtgattggtttcaggaagctcgctcccagagacatcataacgctcactttgggtctgatctagttcgagcaagcatgcgaagaaagaaatccaccaggggagaccaggctcccggacacgacagagaagctgaggccgcagtcaaagaaaaagaagaggggcctgagccgcgactcactatcgacgaagcaccccaggaaagactgagagagacagagggtccagactttccatcgccctcggttcccttaaaggcttcagatccagaagaggccagccaagcccaggaagacccagggcaaggggaccaacaagtgtgcgcagaggaggccgatcccgagttggagccggcatccggtggcgagcaagaacctagaccgcagcaggcgcagacaaaggcagctagccagatcttggaaaacggggaggaggcgccaggaccagacccctccctcgatcgcatgctgtcttcatctagctccgtatcgtcattgaactcctccactctgagcgggagccagatgagtctttcgggagacgctgaagcagtccaagtacggggaagcgtgcactttgcgctccattatgagccaggcgctgctgaactccgagtgcacgtcatacagtgccaagggctagctgccgctcgtaggcggaggtccgatccatacgtcaagtcttatctcctccctgataagcagagcaagcggaaaaccgctgttaagaaacggaaccttaaccccgtgtttaatgagaccctgcgatatagcgtcccccaggcagagctgcaggggcgagtgctgtctctttcagtatggcacagagaatcgctgggtaggaacatcttcttaggggaagtggaggtgcccctggacacgtgggactggggcagtgaacccacgtggctgcctctccagcctcgcgtgcccccaagtccagatgatctcccctcaaggggattgctggcactcagcctaaagtacgtgcctgccggttctgaaggggcagggttgcctcccagtggagagctgcacttttgggtaaaagaagccagggacctcctgcccttacgggcaggcagcttggacacgtatgtgcagtgcttcgtgctgcctgatgacagccaggcctcccgacagcgtactagggtagtacgcaggtcattgtctccagtctttaaccacactatggtttacgatgggtttggccctgccgatctcaggcaggcatgcgcagaactgtcactgtgggaccatggggcactggcgaatcggcaacttgggggaacccgactgagtttagggacaggctcaagctatggactgcaagtgccttggatggactcaacccctgaggagaaacagctctggcaggctctcctggagcaaccttgtgaatgggttgacggcctcctccctctccgtaccaatttggctcctcgaacctag

SEQ ID NO: 243114 - DNA, 2808 bp, synthetic construct
  misc_feature 1..2808: note = Description of Artificial Sequence: Synthetic coding sequence
  source 1..2808: mol_type = other DNA
atgatcgaccttagttttctaactgaggaggaacaggaagctataatgaaggtgttgcagcgtgacgctgcccttaaacgggcagaggaagagagggtgcggcatctcccggaaaagatcaaggatgaccagcaactgaaaaacatgtccggccagtggttttacgaggccaaggccaagcgacaccgggacaagatccacggcgctgacatcatcagagcgtcgatgagaaaaaaacgcccacagatcgccgcagaacagtctaaagacagagaaaacggagccaaggagagctgggttaataatgttaacaaggacgcgttcctacctcctgagctagctggcgtggtggaggaaccagaagaagacgccgcaccggcatccccatcctcatcagtggtcaacccagcctcttctgtgatcgacatgtcccaggagaacaccagaaagcccaacgtttcaccagaaaagcagcggaagaatccatttaacagttctaagctcccggaggggcactcatctcaacagacgaaaaatgaacagtccaaaaatgggagaacgggcctgtttcagactagcaaggaagacgaattgtctgagtctaaggagaagagcacagtggctgacacttctatccagaaacttgaaaaatcgaaacaaaccttacctgggctgagcaacggcagccagatcaaggctcccatcccaaaggctcgcaaaatgatctacaagtccacagatctaaataaggatgataaccagtcattcccccgacagcgtaccgactccctcaaggccaggggcgcaccacgcggaatcctcaaacgaaattctagcagctcttcaaccgattcagagacactgaggtataatcataatttcgagcctaagagcaaaattgtgtccccaggcttgactatccatgagaggatttcagagaaggaacatagtctcgaagataacagtagtcctaattcgttagagcccttaaagcacgtgaggtttagcgccgttaaggacgagctcccacagagccctggcctgatccacgggagagaggttggagagttttcggttttggaatctgacagattgaaaaatggcatggaggacgccggagacaccgaggagttccagagcgaccccaaacccagccagtacagaaagccctctctgtttcaccagagcacctcaagtccgtacgtgtcaaagtcggaaacccatcagcctatgacctcaggaagcttccccatcaacgggctgcactcccatagcgaggtactcacagctcgccctcagagtatggagaactctcccactataaacgagccaaaagacaaatcctccgagctcacaaggttggaaagcgttctcccgcgatctccggctgacgaactctctcattgtgtcgagcccgagccatctcaggtacctggcggaagttctagggacagacagcagggttccgaagaagaaccttcaccagtgctcaagaccctggaaagatcggcagccagaaagatgccgagtaagtctcttgaggatatatcatcagactcaagcaaccaggcaaaagtcgacaaccagccagaagaactggtgagatccgccgaggacgtgagtactgtgcctacacagcccgacaatccttttagtcacccggataagttaaaacgaatgagtaaaagcgtcccagcattcctgcaggacgaaagcgacgacagggagaccgacacagccagcgaaagctcctaccagttgagtcggcacaagaagtctccctccagtttaaccaatctgtccagctcttcggggatgacttccctcagcagcgtctccgggtccgtgatgagcgtgtattccggcgattttggtaacctcgaggtcaagggcaatatccagttcgcaatcgaatacgtcgaatctctcaaggagttacatgtcttcgtcgcccagtgtaaggatcttgcagctgctgacgtgaagaagcagaggtccgatccttacgtaaaggcttacctgctgcctgacaagggcaaaatgggaaaaaagaagacactcgtagtaaagaaaacccttaaccctgtatacaatgaaattctgcgctataaaattgaaaagcaaatccttaagactcagaagctgaacctctccatctggcaccgcgataccttcaagcgcaattccttccttggggaggtggagctggatttagagacgtgggactgggacaataagcagaataagcaactaagatggtacccattaaagcgcaaaacggcccctgtggcgctggaagccgagaacaggggcgaaatgaaattggcactccagtacgttccagagcccgtgcctggaaaaaaactgcccactacaggcgaggttcatatctgggtgaaggagtgtttggacctccctcttctgagagggagccatttaaattctttcgtcaagtgcactatcctccccgacactagccgaaaaagcaggcagaaaaccagagctgtcgggaaaaccacaaacccaattttcaatcacacaatggtctacgacggctttcgccctgaggatctcatggaggcttgcgtggaactgaccgtctgggatcactacaagctaacaaaccagttcttgggcggtttacgcatagggttcggcacaggtaagtcatacggaaccgaagtggattggatggactctacctccgaggaggtcgccttgtgggagaagatggtgaactcaccaaatacatggatcgaggccacgttgcctctccggatgctgctcattgcaaagatctctaaatag

SEQ ID NO: 243115 - DNA, 3819 bp, synthetic construct
  misc_feature 1..3819: note = Description of Artificial Sequence: Synthetic coding sequence
  source 1..3819: mol_type = other DNA
atggacgagccaaacgcagagcaagtgtacaatcctagccaattcgaaaatcttcgcaagttctgggatctcgaggccaatagcaattcgaaggacaacgacaagaacatcaccaccacttcacagaaaaactccgccccattcaacaggcaaaagcataaggagttttccgatattaagctcagtggcaagaatactcatgaggcagaggtgttgttgtctcccaaaaaagttatggccagggaagaaatggagaaacttaacagcaaagggatccttcaagtgctgcctgatgaaattaccttccccctgagtccacttagaaagtacacctaccagttacccggtaatgaaagctccaaggaaaatgtggagaaaaacacagagggcattgtgacacccgtttttaaagaagaaaaagactacagtgaacaggagattcaggagagtataataaaaaccaacgtcctgtctaaagattgcaaggacaccttcaacgactctcttcagaaactgctgagcgaaactagcactcccgctattcagccctcgggtggaaaggtgcatggcaagcaggtgttagaaccttctgtatccgaaaaccgtacctggccacaaaaaaccgatttcgcagacacagaggaggaggtgaaggggccagaaaagatcatcaacgagcatgtggataagaccgtcgtgcatcctaaagtcaaacggaacagtcttaccgcttcgctggacaaactgttgaaagaggccaccggaacttccccaagcccgctacaagccaaactcgcccctgtaatcactggaacaaattccaagctggaggaaggcaggttttttggaaaaggtatcgaacagtctcataatacctccgctgacaaacgggagatcctcgcacctttccctgtgagagacgaaactttcggcaacacggccctcctgaagaaagccgagtcaggagagtgtcagctgagtactcagaatctcatacaaatggctgccgaagactcccacccgttggacccgacctcccagctatcccggaaaggaagtttcggcgacgtggcgagccctccacaggacatgctcttcccacaggacgctcacctggtcccccaagctcgcgttcacccatcccagaccgagatctcagagaccgtcgaaaaagtcatcctccccccacgaccagtgctcaatgacgtaagtgctgcgctgcaaaaactgtgtggagaggtgtggttgagctatcccgcaggtcgggaagtggggcctggagaagtcaatccagagtttcccgaagctgtgcagcccgtttgcagtccacttaacccacccggagtcattagcccgtgggccactatggatacaattgttccggacaggaaggacttctacagcagcaatgttgtccccgacaagacacacgaggtcggatcttatctagccgctcagatgagcccaagcgaccagactctgtccagttttgcaagcatcgttgcccagtatggcaagggtctgccccaggaagtggaagagatcgtccgtgagacaatcgtacagccgaagagtgagttcttggaatttagcgccggactggagaaactgctgaaggaagagaccgagacgtttcccagcaagtatgaaagcgatacgggaaatctctctccatccaagctgatcggttcgaccgaggagcccaggcgggctacttccgaatgccaccccgaggagcttaaggaaaccgtggagaaagcggaagcgccattaatcacagaaagcgcctttgatgcgggatttgagaagcttctaaaagagatcactgaagcccctccctaccagcctcaggtgtcagttagagaagaaacacatgaaaaggagagctcccagtcagaacagacaaggtttctaggaacagttccccacttctatcgggcagcatctcagacttccgagatgaaggataaatctaatggtctggagagccaggtcaatcagtgcgataagatgttgggcggagacgccctggtgactgaccttctggttgatttctgcgggtcccgaagtggagtggaaattccccgtactccccagctgtatgtggcgcacgaaatcgggacaattaaaacggtgaccccaccagaagatcgtgattcagaatctggggtcgccggtggccagggaacactgcaggagcctggatttggagaggcttccgaagccatttccgtgtcgcgcaacagacagcccattccacttctcatgaacaaggagaattcgacgaagacctccaaagttgagcttactctggccagtccctacatgaagcaggagaaggaggaggagaaggagggcttcagcgaatccgatttctccgatgggaacacctcctccaacgccgagtcatggcgtaatccttcttcctccgaagaagaaccgagccctgtgctgaagacactcgagagatccgccgctcgtaaaatgccctccaagagcctggaagacataagctctgatagcagtaatcaggcaaaggtcgataatcaaccggaggaactcgtacgcagcgctgaagacgatgagaagccggaccagaaacctgtgactaacgagtgcgttcctcggatctcaaccgtgccaacccagcccgataacccttttagccatcccgacaagttgaaacgcatgtcgaaatccgtgcctgctttccttcaagacgagtcagacgaccgagagaccgacactgcatccgagtcctcgtaccagttgtccagacataagaagagccccagtagcttaacaaatctgtccagctcaagtgggatgacatctctgagcagcgttagtggatctgtgatgtctgtttactcaggcgacttcggaaacttggaagtcaaggggaacattcaatttgccatcgagtacgtggaatcattgaaagagcttcacgtgttcgtggcccaatgtaaagatctcgccgctgccgatgtcaaaaagcaacggagcgatccttacgtcaaagcatacttgctcccagacaagggaaaaatgggcaagaagaagactctggtcgtaaagaagacactaaaccccgtttacaatgagattctgcggtataagatcgaaaaacagatactgaagactcagaaattaaatctgagcatctggcatcgtgatacttttaaacgcaacagtttcctgggggaagtcgaattagatctggaaacgtgggactgggataataagcagaataaacagctgagatggtatcccctgaaacggaagacagcccctgtagctctggaagccgagaatcgcggtgagatgaagcttgctcttcaatacgttccggagccggtcccaggcaaaaaattgcccaccaccggagaagtccacatttgggtcaaagaatgcctggatctaccactgctgaggggcagtcacctcaactcattcgtgaagtgcactattctcccagacacaagccggaaatcgcgacagaaaacacgagcggtcgggaagacaacaaacccaatctttaaccacacaatggtctacgacggcttccgtcctgaggacctgatggaggcctgcgtggagcttacggtctgggaccactataagttgacaaaccaattcctgggtgggctgcggattgggttcggaacagggaaaagttacgggactgaagtagactggatggactctacttctgaggaagtggccctgtgggagaaaatggtcaattccccaaacacctggatcgaagcaaccctgccactcagaatgctgctgatagccaaaatctcaaagtag

SEQ ID NO: 243116 - DNA, 5342 bp, synthetic construct
  misc_feature 1..5342: note = Description of Artificial Sequence: Synthetic coding sequence
  source 1..5342: mol_type = other DNA
atgatcaactcgagtctgtcaatgctcttttcatacttggagaagtacttttatgtcgctgacgagttgtcccattgcgtcgaaccagagccctcacaggtccccggaggttcctctcgggaccgacaacagggaaagccgcctccactgcctgccttgaaagccaaaacttcctcaaggtctgggccttatgcaactgagattaagaagagcacagacgatagcatttttaaagtccttgactggttcaataggtctagctactcagatgacaacaagtcgtttctccagcacccgagagggatcgagagcaaagagaaaaccgattcaaaaagtcaggtggccgtggatctcgttaccgacgataccacgctccgagaaaacgggtctaagactttgtcccctagtaaaattgaactcaagcccgtacgttccgatagccctttccaggccgaaggggatatgcttgtgtccgagtcctgtcaggacaacaacgtcaacatcaaatccaagtttatgaacctgagtcaaaaaggaactcccaaggaggggcctgggatcctccagccctttgaaagttacggtactcccagccaaggatccaagaacatggactacagccaagatagtaaaagccctggaaaagggaacggtgcctctccttcaaactctaactatagctactcggtcctgaaagagtctgatgccgagaatcaggtgccatgtaatactaataatattggcaatctcggcgaggaggagccaaagttccacgctcacgaggaaaataggggacattcggaggtcaattttgactctagcactgtagtgaaggaaccaggtttaaaggacaacatgaatgccgaacgtaagtctaaggtagggaatacatatatccttaaggcctccttggaaccagaaaatataaagtccacacctggcgtggcaaataacggcagcccctggaagaagcccgaggtgcagttccagcaagaagcaggagaggtgcctaaaaaccaggtccagcgggagaagtacaaacgggtgagcgaccgcatctccttctgggaaggcgaaaaagcaggtgcaaaaatcacccatgagaaacctacctcctcatgctcccaggagcagcctagtgccaaggcttatcagcctgtaaagaagtcccaaggcgtctcgagcatggattctctctccaccgaccaaagtgagtacaaccaggctatccctaagcgggtcgtactggacgaagatgatcaggcctcccaactgtccaattcctacagctccaacaaatctaaggaaacgaaaccgcagatcgccggtccatcacgttactacctatccgcagaacagtcagacaaggtctcgttgtttcaaaacaagaagaacgaaccgattaagaggagtcaggtggctgacagccttcccagcaggcgcaacattacccttccagctctgcaaccgcctagtaacgtaggtagtgaacggcacgcgccactcgaaaaggaccgcccactggtcagagagtctaatgccaatttcaaagttatgagcctgaaagaaagaatggatgaacctaatgccgagcaggtgtacaacccaagtcaatttgaaaaccttcgcaagttctgggatctggaagccaatagcaatagcaaggacaacgacaagaatataacgaccacgtcccagaagaactctgcccctttcaacaggcagaagcacaaggaattttccgatataaaactatccggtaagaacactcacgaagcagaggtgctgctgtcacctaaaaaagtcatggcaagagaagaaatggaaaaactgaacagtaaaggaatactgcaggtgttaccagacgagatcacctttcctctgagtcccctgagaaagtatacctatcaactgccagggaacgagagcagcaaagaaaacgttgaaaaaaacactgaggggatcgtgacgccagtgtttaaagaagagaaagactattcagagcaagagatccaggagtctattatcaaaacgaatgtgttgtcgaaggactgtaaggacacctttaacgattctctgcagaaactcttatctgaaacctctactcctgccattcagcccagcggtggaaaggtgcatgggaaacaggtgctggaaccctcagtgtccgagaataggacgtggccccagaagaccgacttcgcggacaccgaagaggaggtgaagggacccgaaaaaataatcaacgaacatgttgacaaaaccgtggtgcatcccaaagtcaagaggaattctctgaccgcttccctggataaattgcttaaggaagcgacgggaacttccccctccccactacaggctaaactcgctcccgtcatcaccggcaccaatagcaagcttgaagaaggaagattctttggcaaaggcattgagcagagtcataacacctcagcagacaagagggagatcttagcaccattccctgtaagagacgagacctttggaaacacagccctacttaagaaggcggaatctggcgagtgtcagctgtcgactcaaaacttgattcaaatggcagcggaagacagtcatcctttagatcccaccagccagttatcccggaaaggaagcttcggagacgtggcatctccgccacaagacatgctcttcccccaggatgctcacttggtccctcaagcgagagttcatccctctcaaactgaaatatctgagacagttgaaaaagtcattttgccccctcgacccgttctaaacgacgtgtcagcagccctgcagaagctctgcggagaggtttggcttagctatcctgcgggaagggaagtcgggcctggcgaggtcaatccagagtttcccgaggctgtccagcccgtgtgcagtccactcaatccacccggagtgatttccccatgggcaacgatggataccattgtgcccgatcggaaagacttctactcttctaacgttgtcccagataaaacgcacgaggttgggtcctatctcgccgcacagatgagccccagcgaccagacactgtcttccttcgcttcaatcgttgcacaatatggcaaaggactgcctcaagaagtggaagagatcgtccgtgaaactatcgtccagcctaaaagcgagttcctggaattctctgctggattggaaaaactgctgaaagaggagacagagacattcccttcaaaatacgaaagtgataccgggaatctgtctccctccaaattgattggcagcaccgaagagcccagacgagctacgagcgaatgccatccagaagagcttaaagagaccgtagaaaaagctgaggcgcctctgatcaccgaatcagcgtttgatgctgggtttgagaagctgctgaaagagattacagaagcacccccttaccagccccaggtaagtgtgcgtgaggaaactcatgaaaaggagagttcccagtccgagcaaacccggttcttgggaaccgtgccacacttctaccgggcagccagccagacctctgaaatgaaagataagtcgaatgggcttgagagtcaagtcaatcagtgcgataaaatgctcgggggtgatgcattggttacagaccttctagtcgatttctgtggtagtcgcagcggtgtggagatcccccgtactccgcaactgtatgtcgcacacgaaatcggcacaatcaagacggtcacaccccctgaagaccgcgactcagagagcggggttgccggtggacagggaactttacaggaacccggtttcggagaagcatctgaagccatctccgtgtctaggaaccgccagccgatacctttgctgatgaataaggaaaactcaacaaaaacgagcaaagtggaactgaccctcgcatcgccatatatgaagcaagagaaggaggaagagaaggaggggttcagtgagtccgatttcagtgacgggaacacatcttctaacgcagagtcctggcgtaatccatcctcatccgaagaggagccatcccctgtgctgaagacactggagagaagcgcagcccgaaaaatgccatcaaagtcactggaagacattagctccgactccagcaaccaggccaaagtggacaaccagcctgaggagctcgtgcgatcagctgaagatgtctccactgtgcccactcagcctgataatcctttttcgcatcccgacaagctcaagaggatgagcaagagtgtacccgcttttctacaagacgaatctgacgaccgggaaacagacacagcttcggaaagtagctatcagcttagtcgccataaaaagtctccctctagtcttaccaatctgtcaagctcctcgggaatgaccagcctgtcctcagtctctgggagcgtgatgagtgtgtactctggggattttggcaaccttgaggtcaagggaaacatccagttcgcgatcgagtatgtcgagagtttaaaggagctccacgttttcgtggcccagtgtaaagacctggcggcagccgacgtgaagaagcaacgaagcgatccatatgtgaaagcctaccttttgcctgacaaagggaagatgggaaagaaaaagaccctcgtggtgaagaagacactcaatccagtctacaacgagattctacggtacaagattgaaaaacagattttgaaaacccagaaactgaacctcagcatctggcatagagatacctttaagcggaatagctttctgggcgaggttgaactcgatctggagacatgggattgggacaataaacagaataagcagcttaggtggtacccactgaagcggaagactgccccagtcgccctggaagctgaaaatagaggggagatgaagcttgccctgcagtacgtgccagagccagtacctggaaaaaagctacctacaacgggcgaggtccacatctgggtgaaggagtgtctggatttgccgctgctgcgagggagtcacctgaactctttcgtcaagtgtaccattctgccagacacaagcaggaaatctaggcagaagactcgcgcagtagggaagaccaccaaccccatatttaatcataccatggtgtacgacggctttaggccggaagacctaatggaggcttgtgtggagctcaccgtttgggaccactataaactcactaaccagttcctgggcggactacgtatcggcttcggaactgggaagagttacgggactgaagtggactggatggactccacttctgaggaggtggccttatgggagaaaatggttaattctccgaatacctggatagaggcgactctcccactgcggatgcttttgatcgctaagataagtaagta

SEQ ID NO: 243117 - DNA, 1098 bp, synthetic construct
  misc_feature 1..1098: note = Description of Artificial Sequence: Synthetic coding sequence
  source 1..1098: mol_type = other DNA
atgagcgacgacagggagacagataccgccagcgagagtagctaccagctatcccggcataagaagagcccatcgtcgctgaccaaccttagttcttcaagtgggatgacttcactttcgagcgtttcaggatccgtgatgtctgtgtatagtggcgactttggtaatctcgaagtcaaaggtaacatccagtttgccatagaatacgtggaatctctgaaagaactgcacgtgtttgtcgcccagtgcaaggatttggcagcggctgacgtaaaaaagcagcgctctgatccttatgtgaaggcatacctcctccccgacaagggcaaaatgggaaaaaaaaagacactcgtggtgaaaaagacactgaatcccgtatacaatgagatccttaggtacaaaatagaaaaacagatcttgaagactcaaaaactgaacctttctatctggcacagggataccttcaagcgcaattctttcctgggcgaggtggaactagatctggagacgtgggattgggacaataagcagaacaagcagctccgttggtaccccctgaagcggaaaactgctcctgttgctctcgaggccgagaataggggggaaatgaagttggcactgcaatacgtgcccgagccagttccaggcaagaaattgccaaccactggcgaagtccacatttgggtcaaggagtgcttagacttgcccctgctgcgcggttctcacttaaattctttcgtcaagtgtacaatcctgccagacacctcccggaaaagtcggcagaagacaagggctgttggcaagaccaccaaccctatttttaatcacactatggtctacgacgggtttcgccctgaggacctgatggaagcttgcgtggagctgactgtctgggatcactataagctgaccaatcaattcttagggggactgagaatcggctttggcaccggaaagtcctatgggactgaggtcgactggatggactccactagtgaggaagtagccctttgggagaagatggtcaatagcccaaacacgtggatcgaggccacccttcctctgaggatgctactgattgctaagatctccaagtag

SEQ ID NO: 243118 - DNA, 2733 bp, synthetic construct
  misc_feature 1..2733: note = Description of Artificial Sequence: Synthetic coding sequence
  source 1..2733: mol_type = other DNA
atgatcgatctcagctttcttactgaggaagagcaggaagccatcatgaaagtgctgcagcgagatgctgctctgaaaagagccgaggaggagcgggtgcgccacctgcctgaaaaaattaaggatgaccagcagcttaaaaacatgtcggggcagtggttttatgaggctaaagcaaaacgacaccgcgacaaaattcacggagcggacataattagggcctctatgcgcaaaaaacgcccacagatagcggcagaacaatcaaaggatagagagaacggcgcaaaggagagctgggttaataacgtgaacaaggacgcatttctgccccctgaactggccggtgttgtcgaggaacctgaggaagatgctgcccctgctagtccgagctcctccgtagtaaatccagcaagttcagtcatcgatatgtcgcaggagaacactaggaaaccgaatgtctcgcctgagaagagaaaaaaccccttcaactcctccaagttaccagaagggcactcttcacaacagaccaaaaatgaacagtcaaaaaatggcaggacggggctatttcaaacatctaaggaagatgaattgagcgagagcaaagaaaagtcaaccgtagctgacacctctattcagaagctcgaaaagtccaaacaaacgcttccaggactgtctaacgggtctcagattaaggcgcctatcccgaaggctcgcaagatgatctacaagtcaacggacctcaacaaggacgataaccagtcatttccacggcaacgcacagattcgttgaaagccaggggcgctccaagaggaattctcaagcggaacagttcaagctcctcaacagactcagaaacacttcgctacaaccacaactttgagccgaaaagcaagatagtgagcccaggattaacaatccacgagagaatttccgagaaggaacacagcctggaagacaacagcagtcccaacagcctggagcccctaaagcatgtgagattctccgcggtcaaagatgagttaccccaaagcccgggactgattcacggtcgggaggtgggcgaatttagcgttctggagtccgaccggctcaagaatgggatggaggacgcaggcgatactgaagagtttcagagtgatcctaaaccctcccaatatcgcaaaccctccctctttcatcagtcaacttcttccccctatgtgagtaagtcagaaacccaccaaccgatgacctccggaagtttcccaatcaatggactgcactcgcactcagaggttttgacagccaggcctcaatctatggagaacagtccgacaataaacgaaccgaaggataagagttcagagcttacacgactggaatccgtgttgcccagatcaccggcagacgagctgagtcattgcgtagagccagagccttcccaagtgcctgggggttcaagcagggatcgacaacagggatctgaggaagaacctagtcctgtgctaaaaactttagaaagaagtgcggctagaaagatgccgagcaagagtctggaagatatttcttcagacagctcgaaccaggcaaaggtagataatcaacctgaggagctggtgagatcggccgaagatgatgaaaagccggaccagaaacctgtgaccaacgagtgcgtgccaaggatctctaccgtgcctacacagccggacaacccattttcccatcccgacaaactgaagcggatgagtaaatcagttcccgcattcctgcaggacgaagtcagtgggagcgtgatgtcagtttatagcggagatttcggcaatctggaggtgaaagggaacatacagttcgcaatcgagtacgtggagtccctgaaggagctgcatgtattcgtcgcacagtgcaaagatcttgccgctgctgatgtcaagaaacaaaggtcagacccatatgtgaaggcctacttgctccccgacaagggcaagatggggaagaagaagacactggtggtcaaaaaaacactgaatccagtgtacaatgagattctgaggtataagattgagaagcaaatccttaagacccaaaaactgaacctgtccatttggcatcgagataccttcaaacgaaactcattcctgggcgaggtggagttagacctggagacttgggactgggacaacaagcagaacaagcagctcaggtggtatcctttgaaacgaaaaaccgcccctgtggcactggaagcagaaaaccggggagagatgaagttggctctacagtacgtccctgagcctgtgccgggtaagaagttgccgaccacaggtgaagtccacatctgggttaaggagtgcctcgatctgccccttctccgcggttcacacttgaatagcttcgtcaaatgtaccatactgcccgatacgagccggaaatctagacagaagactcgcgctgtcgggaaaaccactaatcccatttttaatcatacaatggtatatgacgggttcagacctgaagatctcatggaggcatgcgtggagctcaccgtgtgggaccactacaaactaactaaccaattcctcggcggtctgagaatcggctttggtacaggaaagagttatggtactgaggtagattggatggacagcactagcgaggaagtggccctttgggaaaaaatggttaatagtcccaatacctggatagaagccaccctcccgcttcggatgctcctgattgctaagatctcaaaatag

SEQ ID NO: 243119 - DNA, 2733 bp, synthetic construct
  misc_feature 1..2733: note = Description of Artificial Sequence: Synthetic coding sequence
  source 1..2733: mol_type = other DNA
atgatagacctatccttcttgacggaagaggagcaggaagccatcatgaaggtgcttcagagagatgctgcattaaagcgagccgaggaggaacgtgttcggcacctgcctgaaaaaataaaagatgaccagcagctaaaaaatatgagcggccagtggttctatgaagccaaagccaagcgccaccgggataaaatccatggtgctgatattattcgggctagcatgagaaagaagcgtccccagattgcagcagagcaatcgaaggatcgcgagaatggggctaaagagtcttgggtgaacaacgttaacaaagacgcgttcctgccgccagagctggcaggggtggtcgaggaacctgaagaagacgctgccccagcaagcccgtctagctccgtcgttaatccagccagttccgttatcgacatgtcccaggaaaataccagaaagcctaacgtttcaccagaaaaaagaaagaacccgtttaatagctccaaactgcctgagggacactcctctcagcaaactaaaaatgagcaaagcaaaaacggaagaactgggttgttccaaacaagcaaggaagacgaactgagcgaaagcaaagagaaatccactgtcgctgatacgagtatacagaaactcgagaagagcaaacaaacactacctgggctctcgaacggtagccagatcaaggcccctatacctaaggcgagaaaaatgatttataaatcaactgatcttaacaaggatgataatcagagtttccctagacagagaaccgattctctgaaggccaggggagcaccaaggggcatcctgaagcgtaacagctcatccagctctaccgatagtgagacactccgctataatcacaactttgaacccaagtctaaaatcgtgtcgcccggtcttactattcatgagagaatttcagagaaagagcacagtctggaggacaatagctctcctaacagcctggaaccactgaagcacgtccggttcagcgccgtgaaggatgaactgcctcagtcccctgggctgatccacggcagggaggtgggcgagtttagcgtgctagagagcgaccgcctgaagaatgggatggaagacgcaggggatactgaagagtttcagtcagaccccaagcctagccagtaccgcaaacctagcctgtttcaccagtctacttcgagcccttacgtgagcaagtctgagacccaccaacctatgacctccggctcgttcccaataaacggccttcacagccacagcgaggtcctgactgcgcgtcctcaatcaatggagaactcaccgactatcaatgagccgaaggataaatcttcggagctgacccgccttgaatcagttctgcccagatcccctgcagacgagttatcgcattgtgtcgagcccgaaccctctcaggtgcccggaggtagttcgcgggatagacagcagggttcggaggaagagccaagcccagttttgaaaaccctggaacgtagcgctgctcgcaagatgcctagcaagagcttggaggacataagctcggactcatctaaccaggcaaaagtggataaccagccggaggagttagtgcgcagcgccgaggatgacgagaagcctgaccagaagcccgtcacgaatgagtgcgtgcccagaatatcaactgtgcctacacagccagataatcccttcagccatcccgataagttgaaacggatgagtaaaagcgtccccgcttttttacaagacgaggtgtctggctcagtgatgagcgtttattccggtgacttcggtaacctagaggtgaagggcaatatacaatttgccattgaatacgtcgagagcctcaaggagctgcacgtgttcgttgcccagtgcaaggacttggctgccgcagacgtgaagaaacagagatcagacccttacgtgaaagcttacctgcttcctgacaaaggaaaaatgggaaagaaaaaaacactggtagtgaagaagacattgaacccagtgtataacgagatcctgcgctataaaatagaaaagcagatcctgaagacccaaaaactgaacctgtcaatttggcaccgggacacgtttaaacggaactccttcttaggcgaggttgaactggatctcgaaacctgggattgggataataaacagaacaagcaactccgatggtatccattgaagcgcaaaaccgcacctgtggccctggaggctgagaacagaggagagatgaagctcgcacttcagtacgttccagaacccgttcctggaaagaagctccccaccacaggagaggtgcacatctgggtgaaggagtgcttagatttgcctctgctgaggggcagtcacttaaactcctttgtgaagtgtacgatcctgccagacacaagccgcaagagccggcagaaaacacgggcagtggggaagactacaaaccctatcttcaaccacaccatggtatacgatggattcaggccagaagacctgatggaagcctgcgtggaattgacagtttgggatcactacaaattgacaaaccaattcctgggcggtctgcgcatcggctttgggactggaaagagctatgggaccgaggtggactggatggattccacgtctgaagaggttgccctctgggagaaaatggttaacagccccaatacttggatcgaagccactctacctctccgcatgttgctgatcgcaaaaatatccaaatag

SEQ ID NO: 243120 - DNA, 192 bp, synthetic construct
  misc_feature 1..192: note = Description of Artificial Sequence: Synthetic coding sequence
  source 1..192: mol_type = other DNA
atgtcaaagtcagtgccagccttcctccaggacgaatccgacgacagggagaccgacacagctagtgaaagttcctatcagcttagtcggcataaaaagtccccctccagtctgacaaacctgtctagttcctcagggatgacttcactctcttccgtttccgggagtgttatgagcgtgtattcgggctag

SEQ ID NO: 243121 - DNA, 3771 bp, synthetic construct
  misc_feature 1..3771: note = Description of Artificial Sequence: Synthetic coding sequence
  source 1..3771: mol_type = other DNA
atggatgaacccaatgccgagcaggtttacaacccctctcagttcgagaatctacgtaagttttgggatctagaggccaactctaactcaaaggacaatgacaagaatataaccaccacgagccagaagaattctgctccatttaatagacaaaagcataaggaattctcagatatcaaactgagcgggaaaaacacacacgaggcagaggtgcttttgtctcccaagaaggtgatggccagagaggagatggagaaactgaactctaagggaatccttcaggtgctcccagatgagattacctttcccctcagccccttacgcaagtacacctaccagctgcctgggaatgaatctagcaaggaaaatgtggagaaaaatacggagggaatagtcacacccgtgtttaaagaagaaaaggattacagtgaacaggaaatccaggagtctattattaaaactaatgttctctcgaaagattgcaaggatactttcaacgacagcttacagaagctgctgtcagagactagcacacctgccatacagccttcaggaggcaaagtccatgggaagcaggtgctcgaaccctccgtgagcgagaatagaacctggccccagaagacagacttcgctgataccgaggaagaggtaaaaggcccagagaaaatcatcaatgaacacgtggacaaaacagtagtacacccgaaggtgaaacgcaacagccttaccgcctcgctagacaagctgcttaaggaggccaccggaacttctccgtccccactccaggctaaactagcaccagttataaccgggaccaactccaagctggaagagggtagattttttggaaagggtatcgagcagtcccacaatacgagtgccgataagagagaaattctagcccctttccccgtcagggacgagacatttggaaataccgccctacttaaaaaggctgaatcgggtgaatgtcagctctctacccagaatttgatacagatggccgctgaagactcccaccccctggaccccactagccagttaagcaggaagggatcttttggggatgtggctagccccccacaggacatgctcttccctcaggacgcccatctggttcctcaagccagagttcacccttcccagactgagatctctgaaacagtggaaaaagttattcttccaccaagacccgtgctgaatgacgtttctgcagctcttcagaaactatgtggtgaagtgtggctgagctaccctgcagggcgtgaagtcggaccaggagaagttaacccagaatttccagaagccgtccagccagtgtgttccccacttaatccacccggtgtaataagcccttgggccaccatggacacaattgtccctgaccgtaaggacttttattcaagtaatgtcgtgcccgacaaaacccacgaggtgggaagctatttagctgctcagatgtccccctccgatcagacacttagttcattcgctagcattgttgcccagtacggtaaggggctgcctcaagaggttgaagaaatcgtccgagagacaattgttcagccaaagtccgaattcttagaattttctgcaggactggaaaaactgttaaaagaggaaacagagacatttccaagcaaatacgaaagtgataccggcaatttgagcccctctaagctgataggcagtacagaggaacccaggcgtgctacttctgagtgtcatccggaagagttgaaagaaacagtggagaaggctgaagccccactcatcacagagtcagcgtttgatgccggtttcgaaaaattacttaaggaaatcaccgaggctccaccttatcagccacaggtgtcagttcgtgaagagacacatgagaaggagagcagtcaatctgagcagaccagatttctagggaccgtcccacacttttaccgcgcagcctcccagacatcggaaatgaaagataagagcaatgggttggagtcccaggtgaaccagtgtgataaaatgcttggcggagatgcattggttactgatctgctggtggacttctgtggatcccggtctggggtggagattcctcggacccctcagctgtatgtggctcacgagataggcaccataaaaaccgtgacaccgcctgaggaccgagattcggaaagcggtgtggccggaggtcaaggaaccctgcaggagccgggatttggtgaagcctcagaagctatttctgtgagccgtaatcgccagccgattcccctacttatgaataaggagaatagtaccaaaacatccaaggtggagctgaccctggccagcccgtacatgaaacaagagaaagaggaggagaaagagggattttcagagtctgatttctccgacggaaatacctcctccaatgcggaatcctggcgtaacccatcttcttccgaagaagaaccctcgccagtcctgaaaacactggaaagatctgccgcacgtaagatgcccagcaaatcccttgaagacatcagcagcgatagttctaaccaggccaaagtcgacaatcagccggaggaacttgttagatccgctgaggatgtctccacagttcctactcaacctgataacccttttagccatcccgataaattgaaacggatgagcaagtcagtcccggcatttctgcaggacgaatccgacgaccgcgagactgacacagccagtgaaagtagctaccagctgtctcggcacaagaagagcccttcatcgctgacaaatttaagttcatcatccggcatgaccagcctgagctcagtgtcaggctcggtcatgtctgtgtacagcggcgattttggaaatctggaggttaagggcaatatacagtttgccatcgaatatgtggaaagcctgaaggagttacacgtctttgttgcccaatgcaaagacttggccgcagccgacgttaaaaaacagagaagtgatccctacgtgaaggcctacttgctccctgataaaggtaagatggggaagaagaaaacactcgtcgtgaagaaaacactgaacccagtgtataatgaaatattaagatataagatcgaaaaacagatattgaaaactcagaaactgaacctctctatctggcacagagatacgtttaaaaggaatagcttcctcggtgaggtggaattagatctggagacctgggattgggacaataaacagaacaaacagctgcgttggtaccccctgaaaaggaaaaccgctcccgtcgctctggaggccgagaatcgaggcgagatgaaactggctctacaatacgtccccgaacccgtccccggtaaaaaactccccaccaccggggaggtacacatctgggtcaaagaatgtcttgaccttcctttgttgcgagggagccacctcaacagttttgttaagtgtaccatcttacccgacactagccgaaagagtcgacagaagactagagcagtcggcaagacaactaatcctatcttcaatcacactatggtatatgatgggtttcggccagaggacttgatggaggcatgtgtcgaacttacagtctgggatcactacaagctcaccaaccagttcctcggaggactacggatcgggttcggcacggggaaatcttatggtaccgaagtcgactggatggactcaacaagcgaggaggtggccctgtgggaaaaaatggttaattcgccaaatacatggatcgaggctaccctccccctgcgtatgttgcttatagcgaaaataagcaaatag

SEQ ID NO: 243122 - DNA, 1131 bp, synthetic construct
  misc_feature 1..1131: note = Description of Artificial Sequence: Synthetic coding sequence
  source 1..1131: mol_type = other DNA
atgtcaaagagtgtccccgcattcctgcaggacgaaagcgacgaccgggaaacagacactgcgtctgaatcttcgtaccagctttctaggcacaagaagagtccttcatcgttgaccaacctctccagcagctccggcatgacatcgctgtctagcgtttcgggttccgtgatgagtgtatattcaggcgacttcggcaacctcgaggttaaagggaatatacaattcgcgatcgagtatgtcgagagtttaaaggaactacacgtgttcgtggctcagtgtaaggaccttgctgccgcagatgtgaaaaagcagagatctgacccttatgtgaaggcctatttgctcccggataagggcaagatggggaaaaaaaagaccttagtcgtgaagaagacacttaatccggtgtataacgaaattctgagatacaagatcgagaaacagattctgaagacccaaaagctcaatctctcgatatggcatagagatactttcaagagaaactcattcctcggtgaggtggagcttgatctggaaacatgggattgggacaacaaacaaaacaagcaattgcgctggtacccgcttaagcggaaaaccgcgccagtggccttggaggccgagaatcgcggagaaatgaagctggctcttcagtatgtgcccgaacctgtccccggtaaaaaattaccgactactggcgaggtgcacatctgggtgaaagagtgtctggatctgccgttattaaggggctcccacctgaattcttttgttaagtgtacgatcctgcccgataccagtcgtaagagcagacagaaaaccagggctgtgggcaaaactaccaacccaatcttcaaccatacaatggtgtacgatggtttcagaccagaggatctgatggaggcctgcgttgagttaaccgtgtgggaccactataagttgaccaaccagttcctcgggggtctgaggatcggattcggcactggaaagtcgtatgggacagaggtggactggatggactcaactagtgaagaggtagcgctatgggaaaaaatggtgaacagtcccaatacttggatcgaggccacgctaccccttagaatgctgttgattgctaaaatttcaaaatag

SEQ ID NO: 243123 - DNA, 312 bp, synthetic construct
  misc_feature 1..312: note = Description of Artificial Sequence: Synthetic coding sequence
  source 1..312: mol_type = other DNA
atgagcaagagcgtacccgcatttctccaagacgagtctgacgatcgcgaaacggataccgcctccgagagctcataccagctttctaggcacaagaagtcccccagcagcttgacgaatctgtcttcaagttccggtatgacatccctgtcctcggtttcaggtagcgttatgtccgtgtacagcggcgacttcggcaacctcgaggttaaggggaatatacaattcgctattgagtacgttgaaagcttgaaggaattgcacgtgttcgtggcccaatgtaaggatttagctgctgccgacgtcaaatag

SEQ ID NO: 243124 - DNA, 2709 bp, synthetic construct
  misc_feature 1..2709: note = Description of Artificial Sequence: Synthetic coding sequence
  source 1..2709: mol_type = other DNA
atgtccgggcagtggttctacgaggcaaaggccaagaggcaccgggacaaaatccatggcgctgacataatcagggccagcatgagaaagaagcggccacaaatcgcagccgaacagtccaaagatagagaaaacggagcaaaggaatcttgggtcaataacgtgaacaaagacgctttcctaccacctgaactggcgggagttgtagaagagcctgaagaggatgccgctccagcctcgccttcgtcaagtgttgtgaatcccgcttcatcggtgattgatatgagccaggagaacacacggaagcctaacgtgtccccagagaagcgaaaaaatccgttcaacagctcaaagctacccgaaggccatagttctcaacaaactaagaatgaacagtcaaagaacggaagaacaggactcttccagacttccaaagaggatgaattgagcgaatctaaggagaagagcacagtggctgacacatccatccagaagctggagaaatcaaaacagaccctccccggactctccaatgggtcacagatcaaggcacccatccccaaggctcggaaaatgatttataagagcaccgatctgaacaaggatgacaatcaaagcttcccccgtcaacggacagacagccttaaagcacgcggagctcctcgcggtatcttaaagagaaactccagctccagctcaaccgactccgaaacactgaggtacaaccacaacttcgagccaaagtccaaaatcgtatcccccggactcaccatacacgagcggatctcagaaaaagagcattctcttgaagacaacagttcaccaaactccttggagcccctaaagcacgtccggttcagcgccgtaaaggatgagctgcctcagtcacccggtctcattcatggacgcgaggtgggcgaattttccgtgctagaaagtgacaggctgaagaacggaatggaggacgccggtgacacagaagaatttcagtctgacccgaaaccgtctcaataccgtaaaccaagtctgttccaccagagcacctcttccccctatgtgagtaagtcagagactcaccagcccatgacttccggttcatttccgatcaatggcctccattcgcacagcgaagtgctgactgctcgtcctcagtcgatggagaacagtccaactattaatgaacccaaggacaagagttccgaactcactagactggaatccgtcctgccacgtagccccgctgatgaactcagtcactgcgtcgaaccggagccatcccaggtgccaggcggatcctcccgcgaccgtcagcagggatcagaggaagagcctagtccggtgcttaagacattagagcgctccgctgcccgtaagatgccttcgaagtctctggaggatatcagcagcgacagctcaaatcaggccaaggtcgataatcagcccgaagaactggtgaggagtgctgaagatgacgaaaaacctgaccagaagcccgtgacaaatgagtgtgtgcctcgaataagtacagtccctacccagccggataatcccttcagccaccccgacaaactgaagcgaatgtcaaagagcgtgccagccttcttacaagacgaaagcgacgacagggagacagatacagcttcagagtcttcttatcaactttctcgacacaagaaatccccatcttcacttaccaacctgtcatcaagctccggtatgacatctctgtcgtcagtatccggctcagtgatgagtgtgtactccggggatttcgggaatctggaagtaaagggaaacatccagtttgccatcgaatatgtggagagtctcaaagagcttcacgtcttcgtcgcccaatgtaaggacctcgcagcagcagacgtgaaaaagcagaggtcagatccttacgtcaaggcttaccttctgcctgacaaagggaaaatgggtaagaaaaagacactcgtcgtcaagaaaacactgaacccagtttacaacgaaattctccgttataagatagaaaagcagatcctgaagacgcagaagttgaatctgtccatatggcatcgcgacacctttaaaagaaactctttccttggcgaggtcgagctcgacctcgaaacatgggactgggataataagcagaataagcaacttaggtggtatccattgaagcgaaagactgctccagtggccctggaggctgagaataggggggaaatgaagttggctctgcaatacgtaccagaacctgtgcccggaaagaaactgccgaccaccggagaagttcacatctgggtgaaagagtgtctcgacctgccgctgctgagaggaagccaccttaactccttcgtcaagtgtaccattttgcctgacacgtctcggaagagtcgtcagaaaacccgagctgtgggaaagaccaccaacccgatctttaatcacacgatggtttacgacggcttccgaccggaggatctgatggaggcttgtgtggagttaaccgtgtgggatcactacaaactgaccaatcagttcttgggcggactgaggatcgggttcggtaccgggaagtcgtatggaaccgaagtagactggatggactcaacttccgaggaagtcgccctctgggaaaagatggtcaatagtcccaacacttggatcgaggctacacttcctctccggatgctgcttatcgccaaaatcagcaagtag

SEQ ID NO: 243125 - DNA, 483 bp, synthetic construct
  misc_feature 1..483: note = Description of Artificial Sequence: Synthetic coding sequence
  source 1..483: mol_type = other DNA
atgtctaaaagcgtacctgcattcctgcaggacgaggtgtccgggtccgttatgtcagtatactcaggggactttgggaacctcgaggtgaagggaaatattcagtttgccatcgagtatgtcgagtcattgaaggagctgcacgtcttcgtcgcgcaatgtaaggacttggccgctgccgacgtgaagaagcagcgcagcgacccatacgtgaaagcgtacctgttacctgataaaggcaaaatgggcaaaaagaagacactggtggtgaaaaagaccttgaatcccgtgtacaacgagatccttaggtacaaaattgagaaacagatcctgaaaactcaaaagttgaacctcagtatctggcatagggatacattcaagagaaatagtttcttaggtgaagtcgagctggacctggagacctgggactgggataacaagcaaaataagcagcttcgctggtaccccttaaaacgaaaatag

SEQ ID NO: 243126 - DNA, 2805 bp, synthetic construct
  misc_feature 1..2805: note = Description of Artificial Sequence: Synthetic coding sequence
  source 1..2805: mol_type = other DNA
atgatcgatttgagttttcttacggaggaagaacaggaggccatcatgaaagtgctacagagggatgcagcgttgaagcgagcagaggaggagcgagtccggcacttgcccgaaaagataaaggacgatcagcaactgaaaaacatgtcagggcagtggttttatgaggcaaaggccaaaagacaccgggacaagattcatggcgctgacattatccgggctagtatgcgaaagaaacggcctcagatcgccgctgagcaatccaaggatcgggaaaacggtgcaaaggagtcttgggtgaacaatgttaataaggacgcttttctacccccagaacttgccggagttgtggaagagccggaggaagacgctgcacctgcttccccaagcagctcggtggtcaatcccgctagttccgtgattgacatgtcccaagaaaacacacggaagccaaacgtgtctcccgaaaagaggaagaacccttttaactcctcgaagctgcccgagggtcattcctctcaacagaccaagaatgaacaatctaaaaatggccgtacaggtctattccagacttctaaggaggacgagctatcggagtcaaaggaaaagtccaccgtggcagacacaagtatccagaagctggaaaagtctaaacagaccctcccaggcctctccaacggctcccagattaaggcccctatcccgaaggcccgtaaaatgatatacaaaagcacagacctaaacaaggacgacaaccagagttttccgcgtcaaagaacagactcgttgaaagccaggggtgcgcctcggggtatcctcaagagaaactcctcctctagctctacagactccgaaaccctgaggtacaatcacaatttcgaacccaaaagcaagattgtgagtccaggcctcaccatacatgaaagaatttcagagaaggagcactccctagaagataatagctccccaaactccttggagcccctgaagcatgtaagatttagcgcggttaaagacgaactgccccagtcgcctggcttaattcatggcagggaagtgggagagttctcagtgctggagagcgatagactgaagaacggcatggaggatgccggagatacggaggaatttcagtccgacccaaaaccatcccagtacagaaaaccatcactgttccaccaatctaccagcagcccttacgtgtctaaatcggaaacccatcagcctatgacaagtggatcattcccaattaacggcctacacagccattcagaagtgcttacagctaggcctcaatctatggagaacagcccaacaattaatgaacctaaggataagagcagtgagctgactagactcgaatccgtactaccgagatcccccgctgatgagctgtcacactgtgtggaacctgagccaagtcaagtgcctggcggtagctctagagacaggcagcaagggagtgaggaggagccttcgccagtgctcaagacactcgagaggtccgccgcacgtaagatgccgtctaagtcactggaggacatatccagtgacagttcaaaccaggcaaaagtggataatcagcccgaggaactggtgcggagcgccgaggacgtttcaacagtccctacccagcctgataatccattttcgcaccccgacaaactaaaacgaatgagcaagagtgtgcctgcgtttcttcaggacgagtcggatgatcgtgagactgacacagcgagcgagtcttcttatcaactctcccgccacaagaagtcaccttcctcactgactaatctgtcatcttcctctggcatgacctctctgtcgagcgtgtcgggttcagtgatgtctgtctacagcggcgatttcgggaatctagaggtcaagggaaatatccaatttgcgatcgagtatgtggagtctctgaaggagctgcatgtctttgtcgcacagtgcaaggatctcgctgccgctgacgttaagaagcaaagatccgatccctacgtcaaggcctatctgctgcctgacaaaggcaagatgggaaaaaaaaagactctggtggtgaaaaaaactttgaaccctgtgtacaatgagattctgcgctacaaaatcgagaaacagatactgaaaacccaaaagcttaatctgagcatatggcaccgtgataccttcaagaggaatagcttccttggcgaagtggagttagatttggaaacctgggattgggataataaacaaaataagcagctgaggtggtatccactcaagagaaagacagcccctgtagcgctggaggcagaaaatagaggggagatgaagctggcgctccagtacgtgcctgaacccgtgcctggcaagaagctcccaactacaggcgaggtgcatatctgggtcaaagaatgtctggacctccccctgctgcggggaagccacttaaattccttcgtgaagtgtactatattgccagatacgagcagaaagtctcgacagaaaacaagagcagttggtaagacgacaaatcctatcttcaaccacacaatggtttacgacgggtttcgcccagaagacctgatggaagcctgtgtagagctcaccgtttgggatcactataagcttacgaatcaattcctgggaggcttgcgaatagggttcgggactggcaaatcatacggcacagaagtggattggatggatagcacatccgaagaggttgccctttgggagaagatggtgaactctcccaatacatggatcgaggccacactcccacttcgcatgctcttgatagctaagatttcaaaatag

SEQ ID NO: 243127 - DNA, 468 bp, synthetic construct
  misc_feature 1..468: note = Description of Artificial Sequence: Synthetic coding sequence
  source 1..468: mol_type = other DNA
atgtccaagagcgttcctgcatttctgcaggatgagagcgatgacagggaaaccgacaccgctagcgagagctcgtaccaactatcgaggcacaagaaaagcccgagtagtctaacaaacctgagttcaagcagcggtatgactagcctcagttccgtttctggctccgtaatgtccgtttactctggggactttggtaatcttgaggttaaaggaaacattcaattcgccattgagtacgttgagagtttgaaagagctccatgtgtttgtggctcaatgcaaagatctggctgctgctgatgtcaaaaagcagcgcagtgatccatacgtcaaggcatacctcctgcctgacaaaggcaaaatgggtaaaaagaagaccttggtcgtgaaaaaaacactaaatccagtttacaatgagatcctacggtataagatcgaaaaacagattctcaaaacgcagaaatag

SEQ ID NO: 243128 - DNA, 1131 bp, synthetic construct
  misc_feature 1..1131: note = Description of Artificial Sequence: Synthetic coding sequence
  source 1..1131: mol_type = other DNA
atgagcaaatcggtcccagccttcctgcaggacgaatccgatgacagagagacagacacggcctctgaaagcagctatcagctgtcccggcataaaaaaagcccatcctccctgaccaacctctcttcctcatccggcatgacttctttatcatccgtttcaggtagtgtgatgtccgtctactccggcgatttcgggaatctggaggtgaaagggaatattcagtttgctatcgagtacgtagagtcactaaaggagttacacgtcttcgtcgcgcagtgtaaagatctagccgctgcggacgtgaagaaacaacgttcggatccatatgtaaaagcctatctgctgcccgacaagggcaagatgggcaaaaagaaaaccctggttgtcaagaaaacactcaaccccgtgtacaacgaaatactccggtataaaatcgaaaagcagatactcaagactcagaagcttaatctatcgatctggcaccgggataccttcaagcgaaatagctttctgggcgaggtggagctcgatttagagacctgggattgggacaacaagcagaacaagcagctcagatggtaccctctcaagcgaaaaacagcaccagtagcccttgaagcagaaaacagaggtgagatgaaactggctttacagtatgtcccggagccagtccctggtaaaaagctccctaccactggtgaggttcatatctgggttaaggagtgcctggacctgccacttctccggggtagtcacctgaacagctttgtaaaatgcactattctcccagacactagcagaaagtcccgccagaaaactagagcggttggaaagaccaccaatcctatcttcaatcacacaatggtttacgacggtttcagacctgaggatcttatggaggcttgtgtcgagctgacagtgtgggaccactacaagttaactaaccagtttttggggggattaagaattgggttcgggacaggcaagtcctacggcacggaggtagactggatggattccacatcagaagaagtggccctttgggaaaaaatggtgaattccccgaatacttggattgaggctaccctacccctgcgcatgcttttgattgccaagataagtaaatag

SEQ ID NO: 243129 - DNA, 1956 bp, synthetic construct
  misc_feature 1..1956: note = Description of Artificial Sequence: Synthetic coding sequence
  source 1..1956: mol_type = other DNA
gaaactgttgagaaggctgaagcccctctgataaccgaaagcgctttcgatgctggattcgagaaattattgaaggagattactgaagccccaccttaccagccacaggtttccgtgagggaggaaacccatgagaaggaaagttcccagagcgagcagacccggttcctgggaaccgtgccacacttttacagggccgcatcacagacatcagaaatgaaagacaagtctaatggcctggagtcacaggtcaatcaatgcgacaaaatgctgggcggtgatgcccttgtgaccgacctacttgtggatttctgcggctcgaggtcaggtgtcgaaatccctcgaacgccacagctttatgtggcccatgagataggaacaatcaagacagtcactcctccagaagatcgagactctgagagcggggtggctggcggacagggcactctgcaggaaccgggatttggggaagcttcggaagcaatcagtgtatcacgaaatcgacagccaattcccctgctcatgaataaagaaaatagcaccaagacatccaaggtggaactgacactggcgagtccttatatgaaacaggaaaaggaagaagaaaaggaggggttttcagaatctgacttctcagacggaaatacttcatcgaacgccgaatcttggaggaatccctcaagttccgaagaggagccttcgcccgtgttaaaaacactggaacgatctgccgctcggaaaatgccttcaaagtcgctggaggacatcagttctgacagctcaaaccaggctaaggtcgataatcagcccgaagagttggttcgatccgcggaagacgacgaaaaacctgatcagaaacccgtgactaatgaatgtgtgcccaggatttcaaccgtaccaactcagcctgataatcctttttctcaccccgataagctgaagcgtatgagcaaatccgtgcctgcttttctgcaggatgaggtaagtggatctgttatgtctgtgtactcaggtgatttcgggaatcttgaagtgaaggggaacatccaattcgcaatcgagtacgtcgaatctctcaaagaactgcacgtcttcgtcgctcagtgcaaagacctggccgcagcggatgtcaagaaacagcggagcgacccatacgtcaaggcttaccttctcccagataagggcaaaatgggtaagaagaaaacactcgtcgtgaagaagactctaaatccggtgtacaacgagattctcagatacaaaatcgaaaagcaaatcctgaaaacacagaagcttaatcttagcatctggcacagagacactttcaaaagaaatagtttcctcggggaagtggaactcgatttagagacttgggactgggataataagcagaataagcagctgcgatggtaccccttgaaacgaaagactgcccctgttgccctagaggctgaaaatcgaggtgagatgaagctcgctctccagtacgtcccagaacctgtgccgggaaagaagttacccacaaccggggaggtgcacatctgggtgaaagagtgtctggaccttcccctcctgcgaggaagtcatttgaacagttttgtgaagtgcacaattctgcctgataccagcaggaagagccggcagaagactagggctgttggcaagactacaaacccaatcttcaatcatactatggtttatgacgggtttaggcccgaggatctaatggaagcctgcgttgagctgacagtctgggaccattacaaactcactaatcagttccttggcggacttcgcatcggatttggcacaggaaaatcttatggcactgaggttgattggatggactccactagtgaggaagtcgcattatgggagaagatggtgaattcacccaatacttggattgaagctacacttccactgagaatgctcctcattgcaaagatcagcaaatag

SEQ ID NO: 243130 - DNA, 213 bp, synthetic construct
  misc_feature 1..213: note = Description of Artificial Sequence: Synthetic coding sequence
  source 1..213: mol_type = other DNA
atgagtaagagtgtgcctgcttttctgcaagacgagagcgacgacagagagacagacaccgcgtctgaatctagctaccagttaagccggcataaaaaaagtccatcgagcttgactaacctgagctcctcgtccggcatgactagcctgtcttcagtgtccggatcagtcatgtcagtgtatagtggggacttcgggaacctggaggtgtag

SEQ ID NO: 243131 - DNA, 1011 bp, synthetic construct
  misc_feature 1..1011: note = Description of Artificial Sequence: Synthetic coding sequence
  source 1..1011: mol_type = other DNA
atgtccaagtctgtgcctgcttttttgcaggacgaagtgagtggctccgtgatgtctgtttactccggggactttggaaatctcgaggttaaaggaaatattcaatttgccatcgagtacgtcgagtccttaaaggagctgcatgtgtttgtcgcacagtgtaaggacctagctgctgcagatgtaaagaaacagcggtcagatccttatgtgaaagcttacttacttcctgacaagggaaagatgggtaagaaaaaaacactggttgtgaagaaaactctgaatcctgtatacaacgaaatcctgcgctataagatagagaagcagattttgaagacgcagaaactgaatctcagtatatggcatagagatacatttaagcgcaacagcttcctgggagaggtggaactggatctcgaaacctgggactgggacaataagcagaacaagcagcttcggtggtatcccctgaaaagaaagacagcccctgtggccctggaagctgagaacaggggggagatgaaattggcgctccaatatgtgccagaacccgtgcccggtaagaaactccccactacaggagaagtccacatatgggtcaaagagtgtctggacctgcccctcttaaggggctcccatctcaactccttcgtgaagtgcactattctcccagacacatctaggaaaagccgccaaaagacccgggcagtgggtaaaacaaccaaccccatttttaatcatactatggtctatgatgggttcagaccagaggatttgatggaagcatgtgttgaattaaccgtttgggaccactataaactgacgaatcagttcctgggcggtctcagaatcggcttcggcacgggcaagtcttacggcacagaggtcgactggatggactccaccagtgaggaagtggctctctgggaaaagatggtaaactccccaaatacctggattgaggccactctgccccttcggatgcttctcatcgccaaaattagtaagtag

SEQ ID NO: 243132 - DNA, 2016 bp, synthetic construct
  misc_feature 1..2016: note = Description of Artificial Sequence: Synthetic coding sequence
  source 1..2016: mol_type = other DNA
atgtccgagctccttgacctgtccttcctgtcggaggaggaaaaggatctcattctgtccgtgttgcaaagagatgaagaagtgaggaaagccgatgagaagcgcatacgaagactaaagaacgaactgcttgagattaaacgtaaaggggctaaacgagggtcgcaacactattccgacagaacttgtgctaggtgtcaggagagtctaggaaggttgtctcccaaaaccaatacatgcaggggatgtaaccatctggtgtgtagagattgtcgaatccaggagagcaacgggacttggaggtgcaaagtttgcgctaaggagatcgagttaaagaaggccactggagattggttttacgaccaaaaagtcaaccggttcgcctaccggactggtagcgaaataattcgaatgagccttaggcataaaccagcagtgagtaagcgggaaaccgtcgggcagagtctgttgcaccagacccaaatgggagatatatggcctggcaggaaaatcatccaggaaagacagaaagagcccagtgttctgttcgaagttcccaagctaaagtcaggaaagagcgccctggaagctgagtcagagagcctagattcttttacggctgattctgacagtacatcccgtagggatagtctggacaaatctgggctgttcccagagtggaaaaagatgtcagcacctaagagccaggtagagaaagagacacaaccaggaggtcaaaacgttgtttttgtggacgaaggcgagatgatattcaaaaagaacacacgaaagattctcaggccttctgagtatactaaatctgtgatcgatctgcgaccagaagacgtggtacacgaatccgggagtttaggcgaccgttctaagagcgtgcccggattaaatgtggacatggaagaggaagaggaagaggaggacatcgaccatcttgtcaaattacaccggcaaaagcttgccaggagttccatgcaatccgggagcagcatgagtacaatcggttcaatgatgagcatctactcggaggcaggggattttgggaacatctttgtaacaggtcggatcgctttttcacttaagtatgagcagcaaactcagtcccttgtggttcatgtgaaggagtgccaccagctcgcctacgccgatgaggccaaaaaaaggagcaatccttacgtgaaaacttatctactccctgataagtcccggcaaggcaagcgaaagacttcaatcaagcgggataccatcaaccccctgtacgatgaaacactgagatacgaaatacctgagtctctccttgcccagcggacactgcagttctcggtttggcatcacggccgatttgggaggaacacctttctcggagaagcagaaatccagatggattcttggaaactggataagaagttagatcactgtctccctttacatggtaaaattagtgccgagtctcccacaggcttgccttcccacaagggagaacttgtggtgtctcttaagtacattcccgcatccaaaacgcccgtggggggtgaccgaaagaagtctaaagggggagaagggggagagctgcaggtgtggatcaaggaggcaaagaacctgactgccgctaaggccggaggcaccagcgacagcttcgtaaagggatacctccttccaatgcgcaataaagctagtaagcgcaaaacgcccgtgatgaaaaaaacattgaaccctcattataatcatacctttgtctacaatggcgttcgcctggaggacttgcagcacatgtgcctggaactgaccgtctgggaccgggagcccttggcgagcaatgactttctgggtggcgtacggctgggggtcgggacaggaatctccaacggggaggtggtcgactggatggattccactggagaggaagtgagcctgtggcagaaaatgcggcagtatcccggaagctgggccgaagggaccttacagctgcgaagtagcatggctaagcagaagctcgggctctag

SEQ ID NO: 243133 - DNA, 2016 bp, synthetic construct
  misc_feature 1..2016: note = Description of Artificial Sequence: Synthetic coding sequence
  source 1..2016: mol_type = other DNA
atgagcgagctgctagacctgtcttttttgtcggaagaagagaaggatctcatcctttcagtcctgcagagagatgaagaggtgcgcaaggccgacgagaaaagaatccgacggcttaaaaatgagctgctggagattaaacgtaaaggggctaaaagaggcagtcagcactacagtgataggacgtgtgcacgatgtcaggagagccttgggagactgtccccaaaaaccaacacctgcaggggctgcaaccacctcgtgtgcagggattgccgcatccaggagagtaacggtacatggcgctgtaaggtctgcgcaaaggagatcgaactgaagaaggcgacgggtgactggttctatgatcagaaggtgaatcgctttgcttacagaactggtagtgagattattaggatgtctctcagacataagccagctgtcagtaagagggaaacggtgggtcaatctcttttgcatcagacacagatgggcgatatctggcctggacgcaagataattcaggagaggcaaaaggagccttctgtcctgtttgaagtcccgaaactgaaaagcggcaaatctgccctagaagccgaatcagaaagtcttgactccttcacggccgacagcgacagcacatccagaagggactctttggacaaatccggcctctttcccgaatggaaaaaaatgtccgcccctaagtcccaggtggagaaggaaacgcaacctggcggtcagaacgtggtgttcgtggacgagggggaaatgatcttcaaaaagaatactcgcaaaatcctgagacctagtgaatataccaagtccgtcatcgatcttcggccagaagacgtggtgcacgagagcgggtcgctgggcgatagatccaagagcgttcccggtcttaatgtagacatggaggaggaagaggaagaagaggatatcgatcacctggtgaagctgcaccgccagaagctggccaggagttccatgcagagcgggtcatccatgtccacgatcgggtcgatgatgagtatctactccgaagcaggtgacttcggcaatattttcgtcacgggcaggatcgctttttcattgaaatatgagcagcagacccaaagtctggttgtgcatgtaaaggaatgtcatcagctagcctacgccgatgaagccaagaagcggtctaacccatatgtgaaaacatacctgctccctgataagagccgccagggaaaaagaaaaacaagcattaagagggatacaatcaatccgctatacgacgaaaccctgcggtatgaaatccctgaatcactcctggcccagagaactcttcaattttcggtgtggcatcatgggaggttcggcagaaatactttcctgggggaggccgagattcaaatggattcgtggaagctggacaagaagttggaccactgcctgccactgcatggtaagatctcagccgagtcccctaccgggttaccctcccataaaggagaactggtcgtgtctttaaagtatatccctgcgagcaagacacccgtcggtggcgatcggaaaaagtccaaaggtggggaagggggagaattgcaggtgtggattaaggaagcaaagaacctgacggccgctaaggccggaggaacgagtgacagtttcgtcaaaggctatctgctgccaatgaggaacaaggcgtctaaaaggaaaacacctgtaatgaaaaagaccttaaaccctcattacaaccatacattcgtgtacaatggagttcgcctcgaagatctgcagcacatgtgcctggaattgacagtctgggatagagagcctctggcaagtaatgattttttggggggagttaggctgggggtgggcaccggaatttcaaatggggaagtcgtcgattggatggacagcacaggtgaggaggtgtctctgtggcagaaaatgcgacaatatcctggcagttgggccgaagggaccctgcagctgcggtcttccatggcaaaacaaaaattgggcttatag

SEQ ID NO: 243134 - DNA, 1050 bp, synthetic construct
  misc_feature 1..1050: note = Description of Artificial Sequence: Synthetic coding sequence
  source 1..1050: mol_type = other DNA
atgtccgagctgctggaccttagcttcttgtccgaagaagaaaaagatctaatattgagtgtgctgcaacgggatgaggaggtgcgcaaggcagatgagaagaggattcggcgactgaaaaatgagttgttggaaattaagaggaagggagccaagcggggatctcagcactatagtgaccgcacttgtgccaggtgccaggagtctttaggtcggctgtccccaaaaacaaacacttgtcggggttgtaatcatttggtttgcagagattgccgtattcaagagtcaaatggaacttggcggtgcaaggtgtgcgctaaagagattgagctaaagaaagcaacgggagactggttctatgatcaaaaggtgaaccggtttgcttaccgaaccggtagcgaaatcattagaatgtcactgcgtcataaacctgccgtgagtaagcgggaaacggtcggacagtcgcttctccatcagacccagatgggcgacatatggccaggcagaaaaattatccaggaacggcagaaggaaccatcagtgttgtttgaagtcccaaagctgaagtccggaaaaagcgctctcgaagctgagagcgagtctctggattctttcactgcagactcagattccactagcagacgggattcccttgataaaagcgggctgttccctgagtggaagaaaatgtctgcacccaagtcacaagtcgagaaggaaacccagcctggcggacagaatgtggttttcgttgatgagggcgaaatgattttcaagaagaatacgaggaagattctccgccctagcgaatatactaaatctgtcattgatctgcggccagaagatgttgtgcatgaaagcggatctctgggcgaccggtctaagtccgttcccggactaaatgttgacatggaagaagaggaggaagaagaagacatagaccatctggtgaagctgcaccgtcaaaagctcgctaggagtagtatgcagagcggctcaagtatggtgtcctcaattagatccgtggtgacaggtatgttaggatactag

SEQ ID NO: 243135 - DNA, 2016 bp, synthetic construct
  misc_feature 1..2016: note = Description of Artificial Sequence: Synthetic coding sequence
  source 1..2016: mol_type = other DNA
atgagtgagctcctcgacctgagtttcttgagtgaggaagagaaggacctcattctgtccgttctccagagagatgaggaagtgcgcaaggcagacgaaaagaggattcggagactcaaaaacgagctcctcgaaatcaagagaaaaggggcaaagcggggatcgcagcattatagcgatcggacctgcgccagatgccaggaaagccttgggagattgagtcccaaaaccaacacctgtcgaggctgcaatcacctggtgtgccgcgattgtcgcattcaggagtctaacgggacatggaggtgtaaagtgtgtgctaaggagatagagctgaaaaaggccactggagattggttttatgatcagaaagtgaataggtttgcttacaggacaggaagtgagattatacgtatgtctctgcgccacaagcctgcggtctccaagagagaaaccgtcgggcaaagcttattgcaccagacccagatgggagacatctggccgggaaggaagattatccaagagcggcaaaaagaaccatctgtgctgttcgaggtgccaaagttgaagagcggaaagtccgctcttgaagccgaatctgagtccctggactccttcaccgccgattctgactctactagtcggagggattctctggacaagtccggtcttttccctgaatggaaaaaaatgagtgctccaaagagtcaagtggagaaagagacacagcccggagggcagaatgtcgtgttcgtggatgaaggggagatgattttcaagaaaaacactcggaagattttgagacctagtgagtacactaaatctgtgattgatctgcgccctgaggatgtcgtgcacgagtcaggatctctcggagataggagcaagagcgtgccaggcctaaacgttgacatggaggaggaagaagaggaagaggatattgatcacctggtgaagcttcaccgccagaaactcgcacggtcctcaatgcagagcggctccagcatgtctacgatcggctccatgatgtcaatttacagcgaagcaggtgacttcggaaacattttcgttaccggccgaatcgctttttctctgaaatacgagcagcagacacaaagcctggtggttcacgtgaaggagtgtcaccagttggcctacgctgacgaggccaagaaacgctctaacccatacgtgaaaacctacttactgcctgacaagtcacgccagggtaagcgtaaaacatctattaaacgcgacactatcaacccactgtacgacgagacactaaggtacgagattccagaatccctgttggcccaacgcacgctacaattttcagtatggcatcatggacgcttcgggcgaaacacgttcctgggggaggccgagatccagatggactcctggaagctcgacaaaaaattggatcattgcttaccccttcacggaaaaatttctgccgagagcccaactgggctcccatcccacaagggtgagctagtggtttccctgaagtatattcctgcatcgaaaactcccgtggggggagaccgtaagaagagtaaagggggagagggaggggagctccaagtatggatcaaagaggccaagaatctcactgcagctaaggcgggaggaaccagtgacagcttcgtaaaggggtacctactgccaatgagaaacaaggcttccaagagaaaaactcccgtgatgaagaaaactctcaatccgcattataaccatacattcgtgtacaatggcgtcagactcgaagacctgcagcacatgtgtctggagctgacagtgtgggaccgtgagccacttgcaagtaatgattttctgggaggtgttaggctcggggtcggcacaggaatcagcaacggcgaagtggtggactggatggatagcaccggtgaggaagtgtctctctggcaaaagatgcgccaataccctggcagctgggccgagggtaccctgcagctgagaagcagcatggctaaacaaaaactgggattgtag

SEQ ID NO: 243136 - DNA, 2022 bp, synthetic construct
  misc_feature 1..2022: note = Description of Artificial Sequence: Synthetic coding sequence
  source 1..2022: mol_type = other DNA
atgtccgagctcctggacctctccttcctgtccgaggaagagaaggatttgatcctgtctgtgctacaacgcgacgaagaggtgaggaaggccgacgagaagcgtatcaggaggcttaagaatgagctactggagattaagagaaaaggggctaaaagaggatctcagcactacagcgaccgcacctgtgccaggtgtcaggaatcactgggtcggttatccccaaaaaccaacacctgtcggggttgtaatcacctcgtatgcagggactgccgcatccaggagtcgaacgggacctggagatgtaaagtctgtgccaaagaaatcgaactaaaaaaagctaccggcgactggttctatgaccagaaagtgaacagattcgcctacaggacaggaagtgagatcatccggatgtcacttagacacaagcctgcagtaagcaaaagagagacggtgggccagtccttacttcaccagactcagatgggagatatctggccgggaaggaaaatcatacaggagcgccagaaggaaccatcgagtgtactgttcgaagtaccaaaacttaagagcggaaaatctgctcttgaagcagagtctgagtcattagactctttcaccgcagacagcgacagtacaagccggcgagactccctcgataagtcaggtctttttcccgagtggaaaaaaatgtccgcccctaaaagccaagtggaaaaagagacccagccaggcggtcagaatgtggtctttgttgacgaaggtgagatgattttcaaaaagaatacacgaaagattctgcgtccctccgaatatacaaagtcagtgatcgatctgaggccagaggacgtcgtgcacgaaagcggttcgctgggtgacaggagtaagagtgtgccgggtctgaacgtggacatggtggaggaggaagaggaggaagaggatatcgaccacttggttaagttacaccggcagaaactggcccgaagcagcatgcagtccggctcttccatgtccactataggcagtatgatgtccatctactccgaagccggagactttggcaacatattcgtcacaggccgtatagctttcagtctgaaatacgagcagcagacacagtccctggtggtgcacgttaaggaatgtcatcaactggcctacgcagacgaggccaagaaaagaagtaatccctacgtgaagacctatctgcttcccgacaaatcacgacagggaaagcgcaagacatctattaaaagagacacaatcaacccattgtatgacgaaactctcagatatgagatccctgaaagcctgctcgctcagcgcaccctacaattcagcgtgtggcaccacggcaggttcggtaggaatacgtttctcggtgaagccgagatacagatggacagctggaagcttgacaaaaagttggatcactgcctcccactccacggtaagattagcgccgagagtccgaccggactgccctcccacaagggcgagctcgtcgtgtcattaaagtacatccctgcctctaaaactcccgttggcggagacaggaagaagtccaagggcggagagggaggagagctgcaggtatggataaaagaagccaaaaacctgactgccgctaaggctgggggaaccagcgattccttcgtgaaaggatatctgcttccaatgcggaataaggcatcaaaacggaaaacaccagtgatgaaaaagacactcaacccccactataatcacacgtttgtgtacaacggagtgagactcgaggatttacagcacatgtgtctggaactgacagtgtgggaccgcgaaccgctggcttctaacgacttcctcgggggagtgcgcctcggggttgggacaggaatatcaaacggtgaagtggtggattggatggatagtaccggtgaggaggtctctttgtggcagaagatgcgacagtacccaggctcatgggccgagggtaccctgcaactgcggagctccatggccaaacagaaacttgggctgtag

SEQ ID NO: 243137 - DNA, 2016 bp, synthetic construct
  misc_feature 1..2016: note = Description of Artificial Sequence: Synthetic coding sequence
  source 1..2016: mol_type = other DNA
atgtctgaactgctggacctgtcatttctcagtgaggaggagaaggacttaatcctgtcagtgctacagagagatgaggaagttcggaaagcagacgagaaacgcatccggaggcttaaaaacgagctgcttgagattaagaggaagggcgctaagcgcggttcccagcactattccgatcgaacttgtgctcgatgccaggaatctctcggtagattgtcccccaagaccaacacttgtaggggctgcaatcacttagtgtgtagagattgtaggatacaagagtccaacggcacctggcgctgcaaggtgtgtgccaaggagatcgaattgaagaaggctaccggtgattggttctacgaccagaaagtgaataggttcgcatacaggacgggttccgagataatcagaatgagcctgagacacaaacctgctgtcagtaaacgggaaactgtgggccagagtcttctccatcagactcagatgggagatatctggcccggaaggaagattatccaggagcgccaaaaagagccttccgtcttgttcgaagtgcctaagctgaagtccggaaaatctgcccttgaagctgagtctgaatccctagattcgttcaccgctgactccgattcaacctcccgcagagacagtctcgacaagtctggccttttcccagagtggaagaaaatgtctgctcccaagtctcaggtggagaaagaaactcagcctggcggtcaaaacgtcgtcttcgtagatgaaggggaaatgatttttaagaagaatactagaaaaatcctgcgccctagtgaatacacaaaaagtgtgatagacttgagaccagaggacgttgtccatgaaagtggctctctcggagaccggtccaaatccgtgcctgggctcaatgtcgatatggaagaggaagaagaagaggaggacattgaccacctagtgaaattgcaccgccagaagctagctcggtcctctatgcagtcagggtcctcaatgtctaccatcggatctatgatgtcaatctatagcgaggcgggtgactttgggaatatcttcgtgaccggtcggatcgcctttagcctgaagtacgagcaacagacccagagtttagtggtacatgtgaaagagtgtcaccagctcgcgtacgcagatgaggcaaagaagcggtccaacccttacgttaagacttacctgctgccggacaagtcccgtcaaggcaagagaaagacctcaattaaaagagacacaattaatcctctctacgatgaaaccctgaggtacgagataccagagtccctgctggcccaaagaactttacagttttcagtgtggcaccacgggaggtttggtcgcaatactttcctcggtgaggccgaaatccaaatggattcttggaaactagacaagaagctggaccactgtttgcccttacacggcaagatttccgctgaatctcccacagggctaccaagccataagggggaactggtagtgtcactgaagtacatcccagcttcaaaaacgcctgtcgggggagacagaaaaaagagcaaaggcggagagggtggcgaactgcaagtgtggatcaaggaggccaaaaatctgactgctgccaaagcaggcggtacaagcgacagttttgtaaaggggtacctactgccaatgcgaaataaagcctctaaacgaaagaccccagtaatgaaaaaaacacttaacccccactacaaccatacatttgtatataatggtgtccgtcttgaagacctgcagcacatgtgcctcgaactgaccgtctgggacagagaacccctggcatcaaacgacttcctgggcggagtgaggcttggagttggcaccggcatttccaacggcgaagttgtggactggatggatagcaccggcgaggaggtcagtctgtggcagaaaatgcggcaatatccaggatcctgggcagagggcacacttcagttgagaagtagcatggccaaacaaaagctaggcctttag

SEQ ID NO: 243138 - DNA, 933 bp, synthetic construct
  misc_feature 1..933: note = Description of Artificial Sequence: Synthetic coding sequence
  source 1..933: mol_type = other DNA
atgaggagggctgctctgtggctgtggctctgcgcactggccttgtccttacagccagctctgccccagatcgtggctaccaatctgccacctgaagatcaggatggctccggggacgactcagacaatttttcagggtcaggcgctggcgctctgcaggacatcacgttatctcaacagactcccagcacctggaaggacacccaactgctgaccgctatcccgacctcacccgagccaacaggtctggaagctaccgctgcaagtacaagcacgctgcccgcaggcgaaggacccaaggagggcgaagcggtcgtgcttccagaggtggagcccggtcttacggctcgggaacaggaggccacacctcgtccccgtgagaccacccagcttcccactactcatttggcttccaccacaacagcaaccactgcgcaggagcccgcaactagccatccacacagagatatgcagcccggacatcatgaaacaagcacgcccgctggaccctcgcaagccgacttacacaccccacacacagaggatggaggcccttcagccactgagcgggctgccgaggatggcgcaagctcacagttgcccgctgcggaggggtcaggggagcaggacttcactttcgaaactagcggtgagaacacagccgtagtcgcagtggagcctgatcgcaggaaccagtctccggtggaccagggcgcaacgggcgctagccagggcctgctggacaggaaggaggttctcgggggagtgattgctggcggtctggtgggactgatcttcgcggtttgcctggttgggttcatgctgtaccgcatgaaaaagaaggatgagggtagttactccctcgaagagcctaagcaagcgaatgggggagcctatcagaagcccaccaagcaggaggaattctacgcctag

SEQ ID NO: 243139 - DNA, 933 bp, synthetic construct
  misc_feature 1..933: note = Description of Artificial Sequence: Synthetic coding sequence
  source 1..933: mol_type = other DNA
atgaggcgcgctgccctgtggctgtggctctgtgcgcttgccctgagcttgcagccggctttaccacagattgtcgctaccaacctgccgcctgaggaccaggacggatccggcgacgattctgacaacttcagcggttcaggagccggagctctccaggatattacactctcacagcagacacctagcacatggaaagacacacagctcctgaccgcaatcccaacaagcccagagcccacgggcctggaagctaccgctgcttctacctccaccctcccagcaggagaagggccaaaagagggcgaggccgtagtactgccagaggtggagcccggtctcacagccagggagcaggaggcaacaccaaggcccagagaaacaacccaattgcctacaacgcatcttgcatccactactacggctacaactgcccaggagcccgctacatctcacccccatagagacatgcagcccggtcatcacgaaactagtacacctgccggaccttcacaagcagatctgcatacgccccatacggaagacggaggcccaagtgcaacggagagggccgctgaagatggcgcttctagtcaactgcccgctgctgagggttccggagagcaagattttacatttgagacctcaggcgaaaacactgcggtcgttgcagtcgaacctgatcggagaaatcagtcccccgttgatcagggagctaccggagcgtctcagggactactcgaccggaaagaggtgctgggcggagtaattgccggagggctggtgggccttatcttcgcagtgtgcttggtgggattcatgctctaccgtatgaagaaaaaagacgaaggttcctactctctcgaagagccaaaacaggctaatggcggtgcttaccaaaagcctactaagcaggaagagttttatgcatag

SEQ ID NO: 243140 - DNA, 606 bp, synthetic construct
  misc_feature 1..606: note = Description of Artificial Sequence: Synthetic coding sequence
  source 1..606: mol_type = other DNA
atgagaagggcgtggatccttctaacgttgggcctagtagcatgtgtctccgccgagtcaagggcggaactgacgagcgataaagatatgtatctcgacaactcatccatagaggaagccagcggagtataccctattgacgatgatgactacgcatccgcttccggcagcggagcagatgaagatgtcgagtctcctgagttgacaacaagtagacccctgcctaaaatcctactgacctctgccgctcccaaggttgagactactaccctaaacattcagaataaaatcccagcccaaactaagtcacccgaggaaacggacaaagaaaaagtccatctcagtgactccgagaggaagatggacccagctgaggaggacactaatgtgtataccgagaaacacagtgattctctgttcaagcgtaccgaagtactagccgctgtgatcgctggcggagttattggttttctttttgccatcttcttgatcctgctcttggtgtatcggatgcgcaaaaaagacgaaggctcatatgacctaggggaaaggaagcctagcagcgccgcttatcagaaagcccctaccaaggaattctacgcgtag

SEQ ID NO: 243141 - DNA, 498 bp, synthetic construct
  misc_feature 1..498: note = Description of Artificial Sequence: Synthetic coding sequence
  source 1..498: mol_type = other DNA
atgaggagggcgtggatcttgttgactttgggcctggtagcttgcgtttcagcagagtccgtgagggccgatgaagacgtcgagtctccagaactgactacaagccggccactgcccaagattcttttaacaagtgcagctcccaaggtggaaacaacaacgttgaacatccagaataagatccccgcacagactaagagtccagaagaaactgacaaggagaaggtccacttgagcgacagtgagaggaagatggacccggcagaagaagacaccaacgtgtacacagaaaaacactcagactccctttttaaacgaaccgaagtgttagccgcagtaattgcgggaggcgtcattgggttcctgtttgcaatctttctgatcctgttactggtgtatagaatgagaaagaaggacgaggggtcatacgacctgggagagcgtaaaccttcctccgctgcataccagaaagcccctacgaaggagttctacgcctag

SEQ ID NO: 243142 - DNA, 519 bp, synthetic construct
  misc_feature 1..519: note = Description of Artificial Sequence: Synthetic coding sequence
  source 1..519: mol_type = other DNA
atgtatctggacaattcctccatcgaggaagctagcggggtgtatcccatcgacgacgacgattacgccagtgcatctgggagtggcgcagatgaggatgtggagtctcctgagttaaccacaagcaggcccctccccaagatactgctgacgtcggccgctcccaaggttgaaaccacaaccctgaacattcaaaacaagatccctgcccaaacgaagtccccagaggagacggacaaagagaaggtccacctgtccgacagcgaaaggaaaatggatccagccgaggaagacacaaacgtgtacacagagaagcattcagacagtctttttaagcgcactgaggtactcgcagccgtgattgcaggcggtgtgattggcttcctgttcgcaattttcctgatccttcttctggtgtaccgaatgagaaagaaagatgagggatcatacgatttaggggaaagaaagccatcctcagcggcatatcagaaggctccaaccaaggagttttatgcctag

SEQ ID NO: 243143 - DNA, 519 bp, synthetic construct
  misc_feature 1..519: note = Description of Artificial Sequence: Synthetic coding sequence
  source 1..519: mol_type = other DNA
atgtatctggacaactctagtatcgaggaagcttcaggggtgtaccctattgatgatgacgattatgcctccgcctccggctcaggggcagacgaggacgttgagtcccccgagctgaccacgagtagacctcttccaaaaattctgctgacgtcagcagcccctaaggtcgagacaaccactctgaatatccaaaacaaaatccccgcacagactaaatctccagaggagaccgataaagagaaagtgcatctgagcgatagtgaacgaaaaatggacccagccgaggaggacactaatgtttatacagagaagcactccgactctctgttcaaacgtaccgaagtgctagcggcagtaattgccggtggcgtcattggattccttttcgcgatcttcttaatcttgcttctagtctatcgaatgcgcaagaaagacgagggctcctatgatcttggggagcgcaagccatcctctgcagcctaccagaaggctcccactaaggagttctacgcatag

SEQ ID NO: 243144 - DNA, 606 bp, synthetic construct
  misc_feature 1..606: note = Description of Artificial Sequence: Synthetic coding sequence
  source 1..606: mol_type = other DNA
atgaggcgcgcatggatactgctgacactgggcctagtggcgtgcgtttctgccgagtcaagggccgagctgacaagtgacaaagatatgtatctggacaattccagtatagaggaagctagtggggtgtatccgattgatgatgatgactatgcctccgccagcggtagcggcgcagatgaggacgtagagagtccggagttgactacttcccgtccactacctaagattctactgacttccgcagccccaaaagtggagacgacgacgctgaatatacagaataaaattcccgctcagacgaagtctccagaggaaaccgataaggagaaagtccacctttccgactcagagcgcaaaatggaccccgctgaggaagatacaaatgtctatactgaaaaacattccgacagtctcttcaaaaggaccgaggtgctggccgctgtaattgccggaggggtgatcggatttctattcgccatcttcctcatcttactgctcgtgtacagaatgcggaaaaaggatgaagggtcttatgacttgggcgaacgcaaaccatctagtgccgcatatcagaaagctcccacaaaggagttttatgcttag

SEQ ID NO: 243145 - DNA, 576 bp, synthetic construct
  misc_feature 1..576: note = Description of Artificial Sequence: Synthetic coding sequence
  source 1..576: mol_type = other DNA
atgagagtcgcctgtgtcagcgccgagtcacgcgctgaactgacctccgataaggatatgtatctggacaatagctccatcgaggaagcatctggtgtgtatcccattgacgacgatgactatgcatcagcaagcggtagtggcgctgatgaggacgttgaatcgccggaattaactacaagtaggcctctcccaaagattctcttgactagtgccgctcccaaagtggagacgaccactttaaacattcagaacaagatccctgcccagaccaaaagtcccgaagagaccgacaaagagaaggtgcacctgagcgactcagagagaaagatggatcccgcagaagaagacaccaacgtctatactgagaagcactccgacagcctattcaagagaaccgaggtgctggctgccgtcatcgcgggtggcgttatcggatttctgttcgccattttcttaatactgctgcttgtttataggatgagaaagaaggatgaaggaagctatgaccttggggagaggaagcccagctctgccgcatatcagaaagccccaactaaggaattttatgcctag

SEQ ID NO: 243146 - DNA, 1155 bp, synthetic construct
  misc_feature 1..1155: note = Description of Artificial Sequence: Synthetic coding sequence
  source 1..1155: mol_type = other DNA
atggccatcgcatatttagggtccagctgccccagtcagccgcctagcagcctggccctctccctgtcacctacgcccagcgatttcgagcaagagagtgggattgagaccgctatgcgcttcagtccagacgtagccttagccgtgtcaaccactcctgccgtgctgccaacaacaaatatccaacctgtgggcacccccttcgaggagctccccagcgagcggcctacactggaacctgctactagccctctggtagtcaccgaggtgcctgaggaaccttcccagcgcgcaacaacagttagtaccaccatggccacaactgcagccacgtctactggtgaccccactgtcgccaccgtgccagctacagttgccactgctaccccaagtacaccagccgctccccctttcaccgcgacgacggcggtgatccgtacgaccggtgtacgacgcctgttgcccctacctcttaccacggtcgccacagcaagggccacgacacctgaagcgccttcaccaccaactacggccgcagtgttggataccgaagcccctacacctagacttgtctcaacagcaacctcaaggccccgagcactcccccgaccagcgaccacacaggagcccgacattccagagcgcagtaccctacctctgggcacaacagccccagggcctaccgaagtggctcaaactcctactccagagaccttcctaactacaatccgggacgaaccagaggtgccggtatcaggtggacccagtggagactttgagctgccagaggaggaaacaacccagcctgataccgccaacgaggttgtggctgtgggcggtgcagccgctaaagcctcttcccctcccggaaccctaccaaagggcgctcgcccaggtccgggactgctggacaacgctatagacagtggatcttctgcagcgcagctgccgcagaagtccatcttggagaggaaggaagtcctggtggcagtgatagtgggtggggtagtgggagcactcttcgccgcatttctggtaacactcctgatctacagaatgaaaaagaaggacgagggatcttatactctcgaagagccaaagcaggcatcggttacctaccagaagccggataaacaggaggaattttacgcctag

SEQ ID NO: 243147 - DNA, 1329 bp, synthetic construct
  misc_feature 1..1329: note = Description of Artificial Sequence: Synthetic coding sequence
  source 1..1329: mol_type = other DNA
atgaagccaggcccaccccatagagcaggggcagcacatggtgccggagctggtgcaggcgctgccgcaggccctggagctagggggctgctgctccctccacttctgctgctgctcctggcaggaagggccgcaggggctcaacgatggcgttctgaaaattttgagcgacccgtggatctcgagggctctggtgatgatgattcatttcctgatgatgagctggacgatctgtattccggctctggctccgggtacttcgagcaggagtcggggatagaaaccgccatgagattctcgcccgacgtagcactggcagtgtccacgaccccggcagtgctgccgactactaacatccagcccgtgggcacaccgtttgaggagttgccaagtgaacggccaaccctagagcctgccacctcacctctggttgtgacagaggtccccgaggaaccttcacaacgcgcaacgaccgtaagcaccaccatggccaccaccgctgcaaccagcactggcgatcctaccgttgctactgttcccgcaacggtggctacagctactccttccactcccgcagctcctcctttcactgccaccaccgccgtgatacggaccaccggcgttcgacgtctgctccccctacccttaaccaccgtcgccacagcaagggccaccacaccagaagccccatccccccctactaccgccgctgtgttagatacagaggcccctactcctcggttagtcagcaccgccacctctaggccccgtgcactgcccagaccagctactacacaggagcccgacatccctgaacggagtaccttgccattgggaactaccgccccaggcccaaccgaggttgcgcagacccctacaccagagactttcctgaccactatccgggatgagcctgaggttcctgttagtggaggacctagcggagattttgagttgcccgaggaggaaacaacccagcctgacactgccaatgaggtggtagctgtgggaggggctgcagcgaaagcctctagtcctcccggtaccctcccaaagggggctcgtccaggccctggcctactagacaatgccattgactccggtagttccgctgctcaactgccccagaaatccattctggagagaaaggaggtcctagtggcggtgatcgtgggcggtgtcgtgggcgcactttttgccgcattcctcgtgacactcttgatttatcggatgaaaaagaaagacgagggctcttatacactcgaagaacccaagcaagctagcgtgacgtatcaaaaacccgacaaacaagaagaattctatgcctag

SEQ ID NO: 243148 - DNA, 597 bp, synthetic construct
  misc_feature 1..597: note = Description of Artificial Sequence: Synthetic coding sequence
  source 1..597: mol_type = other DNA
atggcaccagcacgcctcttcgccctgctgctgttctttgtgggaggggtagctgagagcatcagggagactgaggttattgacccccaagacctgctggaggggcgttattttagcggggcactccccgatgacgaggacgtggtagggcctgggcaggagagcgacgacttcgagctgagcggttctggcgacttagatgacctcgaagatagcatgatcggacccgaagtcgtgcatccattggttccgctggataaccacatccccgagcgggctgggagcggctcccaggtgcctacagagccaaaaaagctcgaagagaacgaggtcatccccaaaaggataagccccgtagaggagagtgaggacgtcagcaacaaggtgagtatgtcgagcacagtgcaaggcagtaacatctttgagcggacagaagtacttgcagcactgatcgtagggggaatcgtagggattttgttcgctgtgtttcttattctgttattgatgtatcgcatgaagaagaaagacgagggctcttacgacctggggaaaaagcctatctacaagaaagccccaactaatgaattttacgcatag

SEQ ID NO: 243149 - DNA, 381 bp, synthetic construct
  misc_feature 1..381: note = Description of Artificial Sequence: Synthetic coding sequence
  source 1..381: mol_type = other DNA
atgataggtcccgaagttgtgcatcctcttgtgcctcttgataatcacattccagaacgggcaggatccggttctcaggtccccactgaacctaaaaaactcgaggagaacgaggttatcccgaaaagaatttcacccgttgaggaatcggaggacgtctcgaataaggtttctatgtcttccaccgtacagggatcaaacatatttgaacgcaccgaagtacttgccgctctaatagtgggcggtattgtggggatcctcttcgctgtttttttgatccttctgctaatgtaccgaatgaaaaagaaggatgaggggtcttatgatcttgggaaaaagcccatatacaagaaagcaccaactaacgagttttacgcatag

SEQ ID NO: 243150 - DNA, 1851 bp, synthetic construct
  misc_feature 1..1851: note = Description of Artificial Sequence: Synthetic coding sequence
  source 1..1851: mol_type = other DNA
atgttccggactgccgttatgatggccgctagtctcgcgctgacgggcgcagtggtcgctcacgcttactatcttaagcaccagttttacccaaccgtcgtttacttaaccaaaagttcccctagcatggcagtactgtatattcaggcttttgtgttggtgttcttactgggaaaggtcatgggtaaagtattctttggacagctgagagccgctgaaatggagcatctcttagaaaggagctggtatgctgtgaccgagacatgtctggcattcacagtgtttcgggatgacttcagtccaagatttgtggcactctttacactcctgctgttcctcaagtgttttcactggttagctgaggatagagtggattttatggaaagatcccctaatatcagctggttatttcactgcagaatagtatcgctgatgtttctgctcggcatcttggacttcctgtttgtgtcccatgcctatcatagtattctcacccgtggcgcttcagtacagttggtttttgggttcgagtacgcaatcttaatgaccatggttctgacaatttttatcaagtacgttttacactcggtggacctccagtctgagaacccttgggataacaaagctgtgtatatgctgtataccgagcttttcactggctttatcaaggtgctcctatatatggccttcatgaccattatgattaaggtgcacacattcccactctttgcaatccgccctatgtacttggcaatgagacagttcaagaaagcagttaccgacgccattatgtcacgcagagctatcagaaacatgaacactctgtatcccgatgcgacccccgaagagcttcaggcgatggataacgtgtgcatcatctgccgcgaggaaatggtaactggagctaaaaggctgccatgcaatcacatctttcatacttcttgcttacgaagttggttccagagacagcagacgtgtccaacctgtcgcatggatgttctgcgtgccagccttcctgcccagagccccccacctcccgagcctgcagatcaggggccaccccctgctccccacccacctccgctgctgcctcagccaccgaactttccacaggggctattgccaccattccccccaggtatgttcccactgtggccacctatgggacctttcccacccgtcccacccccaccttcttctggggaagcagtggccccaccatctaccagcgcagcactctctcgtccttccggagccgcaactacgacagctgctgggacgtcggccacagctgcatcagctaccgcatccggacctggcagcggcagtgccccagaagccggacccgctcctggcttcccttttccacctccttggatgggtatgcccctacctcccccttttgcttttccacccatgcctgtcccacccgctggtttcgcaggcttgacacctgaggagcttcgagccttagaaggtcatgagcgtcagcacttggaggcccgacttcaatctctcaggaatattcataccttgctcgatgctgccatgctccaaattaaccagtacctcactgtgcttgccagccttgggcctcccaggccggcaacctctgtaaactcgaccgaggaaacagcgacaaccgtcgtcgctgccgcatcatccacctccatcccctcgtctgaggccacaactccaaccccaggggcatcgcctccggcaccagaaatggagcggccacccgcacccgaatcagtgggtacggaggaaatgccagaagacggggagccggatgccgctgagctccggcgaaggcggttacagaaactggagtcccctgtggcgcattag

SEQ ID NO: 243151 - DNA, 1698 bp, synthetic construct
  misc_feature 1..1698: note = Description of Artificial Sequence: Synthetic coding sequence
  source 1..1698: mol_type = other DNA
atgttccgcactgccgtaatgatggctgccagcctcgcactcacaggcgctgttgttgcccacgcctactatttaaagcaccaattctatccaaccgtcgtctacctgactaaaagctccccctctatggcagtgctttacatacaggcttttgttcttgtttttttactgggtaaggtcatgggaaaagttttctttggccaattgagagctgccgagatggaacacctcctggagcggtcatggtatgcagtcaccgaaacctgtcttgcctttacggtctttcgcgatgatttcagcccaaggttcgtggcgctgttcactctgctcctttttctaaagtgtttccattggctcgccgaggatcgggttgatttttacgctattttgatgacaatggtgttgaccatttttatcaagtatgttctccattcagtggatctccagagcgaaaacccctgggacaacaaagcagtgtatatgctctacacagagctcttcaccggcttcatcaaggtgctgttgtacatggccttcatgacaatcatgatcaaggttcataccttcccactgtttgcgattcgacccatgtatctcgctatgcgtcagttcaagaaggcagtgacagacgccattatgtccaggcgcgcaattagaaatatgaatacgttgtacccggacgctacacccgaggaactgcaggcaatggacaatgtctgcatcatctgccgggaagagatggtaacaggagcaaagagactcccctgcaaccacattttccatacatcatgtctacgatcctggtttcaacgccagcagacatgccccacctgcagaatggacgtcttaagggcctccttgcccgcacagagtcctcctccccctgagcctgctgatcagggcccaccccctgctccacatcccccaccactccttccccagccacccaattttccacagggtttgctccccccattcccaccaggtatgtttcctctgtggccacctatgggtcccttccctcccgtgccaccgccaccctcgagcggagaggccgtggctccccctagcacgtcagctgcactatccaggccttccggcgctgccaccactaccgcggcagggacatctgccacagccgcttcagccaccgctagcgggccaggctcaggcagtgctccagaagccggaccagcccctgggttccctttcccacctccttggatgggcatgccactgccccctccattcgcctttccacctatgcctgttcctcccgctggctttgctggccttacccctgaggagctccgtgctctggaaggccacgaacgccagcatctcgaggctcggttacagagcctgaggaatatccatacactattggacgctgccatgctgcagataaatcagtacttgaccgtcctggcatcgctgggcccaccccgaccagctacatccgtcaattccacagaagaaaccgctacaactgtcgttgccgcagccagttccacctccattccgtcgagtgaggctactacgcccaccccaggagcctcacctcccgctcccgaaatggagcgcccaccagcccctgaaagtgtaggtacggaagagatgcccgaagacggggagcctgacgcggctgaactcaggcggaggcgattgcagaagctggagtcaccagtggcacactag

SEQ ID NO: 243152 - DNA, 1854 bp, synthetic construct
  misc_feature 1..1854: note = Description of Artificial Sequence: Synthetic coding sequence
  source 1..1854: mol_type = other DNA
atgtttcggacagccgtgatgatggctgcttccctagctctcacaggcgctgtagttgcccatgcgtattacctgaaacaccagttctaccctacagtcgtgtatctcaccaaatccagtccgtctatggctgtgctgtatatccaggctttcgtgctggtcttcctgctcggcaaggtgatggggaaagtttttttcggtcagctgagagccgctgagatggagcacctgctggaacggtcatggtatgcagttaccgaaacatgtctggccttcaccgtgtttcgggacgacttcagcccacgctttgtggccctgtttaccctgttattgttccttaaatgtttccactggctggctgaggatagggtcgatttcatggagcgtagccctaacatctcttggcttttccattgcaggattgtttctttgatgttcctgttagggatcctggattttctcttcgtttcgcacgcctatcacagcattcttactcgcggagcgagtgtgcaactagtgttcggatttgaatatgccattctcatgacaatggtccttactatttttatcaagtacgttttgcacagcgtggacctgcagagcgagaatccttgggacaataaggcagtgtatatgttgtacacagagttgtttaccgggtttatcaaagtcctgctatacatggcctttatgacaataatgatcaaggtgcacacctttcccttattcgctattcgacctatgtaccttgcaatgcgccagtttaagaaagctgtgacggatgcaattatgagtcggagggccatccggaacatgaacacactctatccagatgccactcctgaagaactgcaggccatggacaatgtctgcatcatttgccgcgaagaaatggtgactggagctaaacgactaccatgcaatcacatcttccacaccagctgcctgcgctcctggttccagcgccaacaaacctgtcctacatgcagaatggatgtcctccgcgcttcgctgcccgctcagtcgcctccccctcccgaacctgctgaccagggaccaccacccgcacctcacccaccacccttactgccccagcccccaaatttcccccaggggttactgccacctttcccgcctgggatgtttcccctctggccaccgatgggaccatttcccccagtgccccctccccctagttccggagaggccgttgctccacctagtacaagcgccgctgccctctcacgccctagtggagccgcaacgacgaccgctgctggtacatccgcgactgccgcatccgccaccgcatcaggtcccggaagcgggtccgccccagaagccggtcctgctcccggtttccctttccctcctccgtggatgggcatgccgctgccccctcccttcgcttttccccctatgcccgttcccccagccggatttgccggtttgactcccgaggaactgcgggcactggaggggcatgaaagacaacatctggaggccaggctccaatcactgcgtaatatccacaccctcctggatgctgcaatgttgcaaatcaaccagtatctgactgtgttagcgagcctgggacctcctagacctgcaacctccgtgaattctactgaagaaactgcgactactgtggtggcggctgccagctcgacatcgatcccctcttcagaggctacgacacctactcctggtgcctctccacctgcccctgaaatggaaagacctcccgctcctgagtctgttggaacagaggaaatgccagaggatggggagcctgacgccgcagagctacgtagacgacggttgcagaagctagagtcccctgtagcgcactag

SEQ ID NO: 243153 - DNA, 1890 bp, synthetic construct
  misc_feature 1..1890: note = Description of Artificial Sequence: Synthetic coding sequence
  source 1..1890: mol_type = other DNA
atgtttagaaccgccgtcatgatggcagcgagcctcgcactgacaggcgctgttgtagcccatgcttactatttaaagcatcagttttatccaactgtagtgtacctaaccaagtcaagcccctccatggctgttctgtacattcaggcctttgttctcgtcttcctactcggcaaggtcatgggaaaggtgttttttgggcaactgcgtgctgcagaaatggagcacctgctcgagaggtcatggtatgccgttacagagacttgccttgcatttaccgtcttccgtgacgacttttcaccgagatttgtcgcgctgttcaccctgcttctatttttgaagtgctttcactggctggctgaggatagggtggattttatggagaggtctccaaacatttcctggttgttccactgtaggattgtctccctgatgttccttctgggtatcttggacttcctgtttgtatctcatgcctaccactccattcttaccaggggggcatctgtgcagttagtattcggatttgaatacgctatacttatgaccatggtgctgacgatttttataaaatacgtattacacagtgtggatctgcagtccgaaaatccttgggacaataaggccgtgtatatgctgtacaccgagctgtttactggctttattaaggtgctcctctatatggcgtttatgacaatcatgatcaaggtgcataccttccccctgttcgcgattagaccgatgtatctggccatgaggcagttcaaaaaggccgtcacagacgcaattatgagtaggagagcaatacggaacatgaatactctatacccagacgcaacccccgaagagctgcaggcaatggacaatgtttgtattatttgccgggaagagatggtgactggagcaaagcgactgccctgcaaccatatttttcacactagttgtttgaggtcttggttccagagacagcagacttgcccaacatgccgcatggacgtccttagagcctcgctgccggctcagtcccccccacctccagagcctgcagaccaaggcccacctcctgccccacacccacccccactcctgccccagccgccaaactttcctcaaggactgttgccaccctttccacctgggatgttcccactgtggcctcctatgggccctttccctccggtcccccctccccctagttccggggaagcagtcgcacctccatccacttctgccgcagcgttgagtcggccatctggtgccgctacgaccaccgccgcaggaacgtccgctactgccgcttcggctacagcctcgggacctgggtccggctccgctcccgaggccggtcctgcacctggcttccccttccccccaccctggatgggcatgcccttacctccgccttttgccttccctcctatgcccgtgcccccagcaggctttgccggattaacgccggaggagttacgggcactggagggtcatgagcggcagcacctggaggctcgactgcagagcctcagaaatattcacaccttacttgacgcagcaatgctacagattaaccagtatctcactgtgttagcatctcttggaccccctgggctgccgctgcagtccacaccacttaggcgcctgcccctccaactgcttctccttcctcctcccccagccagcttggcacaaaggcctcgcccacaaccccaggaacctccgcaccaacctttaaagtggaaagggctccaactgctgtctcagtgggcccagcggcgatgcctgcgcatggagagccccatgcagcaatcaagcgccggagccgcttgcagatcatggagccttctgctaccaactgacaccgccccagcacagccacagcctttattgttctag

SEQ ID NO: 243154 - DNA, 1851 bp, synthetic construct
  misc_feature 1..1851: note = Description of Artificial Sequence: Synthetic coding sequence
  source 1..1851: mol_type = other DNA
atgttccgcaccgccgtgatgatggctgcttctcttgctcttaccggcgcagtggtcgcacacgcttattatctcaagcaccaattctatcctaccgttgtctacctcacaaagagttcaccatccatggctgtcctgtacatccaggcttttgtgttggtattcctcctgggaaaagttatgggaaaagtgtttttcggccaattgagggcggcagagatggagcatctgctggagcggagttggtatgccgttaccgaaacctgtttagcttttaccgtgttccgggatgatttcagccctaggtttgtggcattgtttacacttcttctctttcttaaatgctttcactggcttgcagaagaccgggtcgacttcatggagaggagccccaacattagctggttgttccactgcagaatagtgagcttaatgttccttttgggcattctcgactttctcttcgtgagccatgcttatcatagtatcctgaccaggggggctagtgtgcagttagttttcgggtttgagtatgccatcctcatgacaatggtgctaacaatcttcatcaagtacgtcctccacagtgttgatcttcagtctgaaaatccctgggataacaaggctgtctacatgctgtatactgaactgtttaccggtttcatcaaagtgcttctgtatatggcgtttatgaccattatgattaaagttcacaccttccctctgttcgctatccggcctatgtacttggcgatgcgccagttcaaaaaagctgtaacagatgccatcatgagccggagagcaatccggaacatgaatactctataccccgacgcaacacccgaagagcttcaggctatggataatgtttgtattatctgccgcgaggaaatggtgaccggggctaagagattaccatgcaaccacatcttccacacctcctgcctccgtagttggtttcagcgccaacagacctgccccacgtgtaggatggacgttctgagagcaagcctgcccgcacagtcaccgccacctcccgagccagcagaccagggtccaccccctgcaccacatcctcccccactgcttccccagccacccaactttccacagggactgttgcccccattccctcctggcatgttcccgctctggccgcctatggggccattcccacctgtaccacctccacccagcagcggggaagctgttgccccaccttccactagcgccgctctgtccaggccatcgggagccgctactaccactgcagcaggcaccagcgcaacagcggcttccgccactgcttctgggcctggctcaggcagtgcgccagaggctggccctgccccaggattcccatttcctcccccatggatgggaatgcctttgcccccaccctttgcattccctccgatgcctgtgccgcctgcagggttcgccggattgacccccgaggagctgagggccctggaaggacatgagaggcagcacttggaggccaggctgcagtccctgcgtaacatacacacattgctcgacgctgccatgctgcaaatcaatcagtatttgacagttctcgcatcgctcggccctcccagacccgctaccagcgtgaactcgacggaagaaactgctacaacggtagttgctgcggcttcgagcactagtatccctagcagcgaagccactacacccacgccgggagcaagtccacctgcacccgagatggaacggccaccagcccctgagagtgtgggcactgaagaaatgcccgaggatggcgaacctgatgccgctgagctgcgtcgccgaaggctgcagaagctcgaatcacctgtggctcattag

SEQ ID NO: 243155 - DNA, 1191 bp, synthetic construct
  misc_feature 1..1191: note = Description of Artificial Sequence: Synthetic coding sequence
  source 1..1191: mol_type = other DNA
atgtcagtagcgttcgcgtccgccaggcccagaggcaagggcgaggtgacccaacagaccattcagaagatgctcgacgaaaatcaccacttgattcagtgcatactcgagtaccagagtaaaggaaaaactgccgaatgtactcagtatcaacagatcctacaccgcaacctggtgtatcttgcaacaatagctgatagtaatcagaatatgcagtccctcttaccagcacccccaacccagaacatgaatctgggcccaggggctctcacacagtctggctcttctcagggactgcactcacagggttcgctgagcgatgcaattagcaccggtttaccacctagcagtctgctgcagggtcaaattggcaatggccctagccacgtgtcaatgcagcagacagccccaaacacgctgccgacaaccagcatgtcaatttctggacccggttactcccacgccggaccagcgtctcagggagtgcctatgcagggacaggggaccattggtaactacgtgtcccgcacgaacattaatatgcagagcaacccggtcagcatgatgcaacagcaggcagcaacctcacattattccagcgcacaaggcggttcccaacattatcagggccagtccagtattgctatgatgggacagggctctcaagggtcttcaatgatgggccagcgacctatggccccatatcgcccttctcagcaagggagctctcagcagtatctgggtcaagaagaatactacggcgagcagtattctcattcacagggggcagctgagcctatgggacagcaatattacccggacggccatggggattacgcttaccagcagtcatcatacacggaacaatcctatgataggtcatttgaggagtctacacagcactattatgaaggcggaaacagccagtacagccagcagcaggctggctaccagcaaggagccgctcagcagcagacctacagccagcaacaatacccaagtcagcagagctaccccggtcagcaacagggatacggttccgctcagggggctccctctcagtatcccggttatcagcagggccagggtcaacagtacggcagttatcgcgctcctcagaccgcacccagcgcacagcagcagaggccttacgggtatgagcagggccagtacggcaattatcagcagtag

SEQ ID NO: 243156 - DNA, 1200 bp, synthetic construct
  misc_feature 1..1200: note = Description of Artificial Sequence: Synthetic coding sequence
  source 1..1200: mol_type = other DNA
atgcagagcctctcaaccgaggctcgctatgtgccaagagtcccccagcatagggatcaaattagtcctagatctcctcagcatggtgggcagatctgccctagaagccccttacatcgtggtcagatctgccccaggagccctcctgcacgtcgatatcaacagatactgcaccgtaatctcgtctatttggctacgattgctgattccaaccagaacatgcagagcctgctgccagcccctccgacccagaatatgaacctgggccctggtgctctcactcaatccggttccagccagggactacacagtcaagggtcgctgtcggatgcaatcagtactgggcttcctccctcatccctgctacaaggccaaatcgggaatggcccttctcatgtgtccatgcaacagactgcacctaacaccctgcctacaacctccatgtccataagcgggccaggttatagccatgccggtccagcctcacagggggtccctatgcaggggcaaggaacgatcggaaattacgtcagcagaactaatattaacatgcagtctaatcccgtgagtatgatgcagcagcaggcagcaacctcacattattctagtgcccagggaggtagccaacactaccaggggcaaagcagtattgcaatgatgggccagggaagtcagggcagtagtatgatgggacagcgaccaatggcaccctaccgcccaagccaacagggcagcagccaacagtatctgggtcaggaggaatattatggcgagcaatattctcactcacagggtgctgccgagcctatgggccaacagtattaccctgacgggcacggggattacgcgtatcagcagtcctcttataccgaacaatcatatgatagaagttttgaagagagtacacagcactattacgagggaggcaattcgcagtatagccagcagcaggctggctatcaacagggtgcagcccagcagcaaacttacagccaacagcagtacccctcacagcagagttaccctggccagcagcagggatatggatcagcgcagggcgctccctcccagtatcctggctatcagcaagggcaggggcaacagtatggatcttaccgcgcaccccagactgccccttccgcacagcagcaacgcccttacggatatgaacaaggccagtacgggaactatcagcagtag

SEQ ID NO: 243157 - DNA, 1191 bp, synthetic construct
  misc_feature 1..1191: note = Description of Artificial Sequence: Synthetic coding sequence
  source 1..1191: mol_type = other DNA
atgtctgtggcctttgcaagcgcacgcccacgtggcaaaggagaggtgacccagcaaaccatccaaaagatgcttgacgaaaatcatcatcttatccaatgtattctcgaataccagagtaaaggaaagactgcagaatgcacccagtatcagcagatccttcacagaaatctcgtctatctggctactatcgccgattctaatcagaacatgcagagcctcctgccagcccctccaacacagaacatgaatctcggccctggcgctcttacacagagcggcagttctcaggggttgcattcacagggctcactgtcagatgccatatccacagggctccccccttcaagcctgctacaggggcaaattggcaacggacccagccacgtgtctatgcagcaaacagcccctaatactttaccaaccacgtccatgagcatcagcggtccaggttattctcatgctggcccagcatcacagggcgtgccaatgcagggacagggaaccatagggaattacgtttcaagaactaacatcaatatgcagagcaatcccgtgtctatgatgcagcaacaggcagccactagtcattattcaagtgctcaaggtggatctcagcactatcagggacagagcagcattgcaatgatgggacagggctcacagggcagctccatgatgggacagagaccaatggctccctacaggccatcgcaacagggatcatcgcaacagtacttagggcaggaagagtattacggagagcaatatagccacagtcagggggctgcagaaccaatgggccagcagtactatcccgacggccatggagactacgcttaccagcagtcaagctacaccgaacagtcgtatgacagatcctttgaggagtcaacacagcactactatgaaggcggtaatagccagtattcccaacagcaagccggataccaacagggcgctgcacagcagcagacgtactctcagcagcagtacccaagccagcagagttacccaggccagcagcagggctacggatcggctcaaggcgcacctagtcagtaccctggttatcagcaaggccaagggcaacaatacggcagctaccgagcacctcagaccgcaccatccgcccagcagcagcgcccttacgggtacgagcaggggcaatacgggaattaccagcagtag

SEQ ID NO: 243158 - DNA, 387 bp, synthetic construct
  misc_feature 1..387: note = Description of Artificial Sequence: Synthetic coding sequence
  source 1..387: mol_type = other DNA
atgcagtcactctccaccgaggcccgatacgtgccaagggtgccccagcaccgggatcagatttctcctagatcgcctcagcacggcggtcagatctgcccacggagtcctctccatcgaggacaaatctgcccccgtagtcccccagcacggcgttatcagcagatcctgcacagaaacttggtctatctcgctaccatcgccgacagcaaccagaatatgcagagtctgttaccagcaccaccaacacagaacatgaacctcggtccaggagccttgactcagagtggtagtagccagggactgcacagccaggggagcctgagtgacgcaatctctactgggcttccgccatcttcactcctacagggccagatcgggaactag

SEQ ID NO: 243159 - DNA, 234 bp, synthetic construct
  misc_feature 1..234: note = Description of Artificial Sequence: Synthetic coding sequence
  source 1..234: mol_type = other DNA
atgtccgtagcctttgttcccgattggctgagggggaaggctgaagtgaaccaagagactatccagagactcctggaagaaaacgatcagctgatcaggtgtatagtagagtatcagaataagggccgtgggaatgaatgtgttcagtatcagcacgtcttgcaccgtaatcttatatacctagcaacgatcgccgatgcatcccctacatcaacttccaaagctatggaatag

SEQ ID NO: 243160 - DNA, 234 bp, synthetic construct
  misc_feature 1..234: note = Description of Artificial Sequence: Synthetic coding sequence
  source 1..234: mol_type = other DNA
atgtcggttgccttcgtccccgactggcttagaggaaaagctgaggtcaaccaggaaacgatccaaagactcttagaggagaatgatcagctgattcggtgcatcgtagaataccagaacaaaggccgtggaaatgaatgtgtacagtaccagcatgtgctccacagaaacctgatctacctggcgaccattgccgatgcgagtcccacctcaacatccaaggctatggaatag

SEQ ID NO: 243161 - DNA, 1164 bp, synthetic construct
  misc_feature 1..1164: note = Description of Artificial Sequence: Synthetic coding sequence
  source 1..1164: mol_type = other DNA
atgagcgtggcctttgccgcacccagacaacgaggcaagggtgagataacccctgcggctatccagaaaatgctcgatgacaataaccacctaattcagtgcattatggactcccagaataaaggcaaaacctcagaatgctcccagtaccaacagatgctgcacactaatctcgtatatttggctacaatcgccgattcaaaccaaaatatgcagagtctcttgccggcacctcccacccaaaatatgccaatgggtcccggtggcatgaatcagagtgggcctccccctccccctcgctcacataatatgccttcagacggcatggtgggcggtgggcctccggcaccccacatgcagaaccagatgaacggccagatgcctgggccaaatcacatgccgatgcagggaccgggaccaaaccagcttaatatgaccaattctagtatgaacatgccctcaagctcgcacggcagcatgggcggttacaatcactctgtgccaagtagccagtccatgcctgtgcagaatcagatgactatgtcacagggtcaacccatgggtaattacggtcctagaccgaatatgagcatgcaaccaaaccagggccctatgatgcaccagcagcctcctagccagcagtataacatgccacaagggggtggacagcactatcaggggcaacaacccccaatgggaatgatggggcaggtgaatcaaggaaaccatatgatgggccagcgacaaattcctccttaccggccaccccagcaggggcctccacaacagtactctggacaggaggattattacggcgaccaatactcacacggaggacagggaccaccggagggcatgaaccaacaatactatcccgatgggaattcccagtacggacaacagcaggacgcgtatcaggggccacctcctcagcaggggtatccaccacagcaacagcaatacccgggtcaacaaggttatcctggacagcaacagggatacggtccgtcgcaggggggacctggtccacagtaccccaattacccccagggccaaggacagcagtacgggggttacagacccactcagcctggaccccctcagcctccacagcagcggccatacggctatgatcaggggcaatacggcaactatcagcaatag

SEQ ID NO: 243162 - DNA, 1257 bp, synthetic construct
  misc_feature 1..1257: note = Description of Artificial Sequence: Synthetic coding sequence
  source 1..1257: mol_type = other DNA
atgagcgtcgcatttgcagcaccacgccagagaggaaagggcgaaatcacccccgctgcaatccagaagatgcttgacgataacaatcatcttatccagtgcatcatggacagtcaaaacaaggggaagacgagcgagtgttcccagtatcagcagatgctacacacgaatctggtctacttggcaactatcgcagatagcaaccaaaatatgcaaagcttgttgccagcgcctccgacgcaaaatatgccaatgggccctggcggaatgaatcagagcgggcctccacccccacccagatcacataatatgccttctgatggaatggttggcggtggtccgccagctcctcatatgcagaaccagatgaacggtcagatgcctggccctaaccatatgcccatgcagggtcccggacccaaccagttgaacatgacaaactccagcatgaatatgccttcatcgagccatggatccatgggcggatataatcactccgtcccatcaagtcagagtatgcctgtccaaaatcagatgactatgtcccaggggcagcccatgggaaactatggacctcgccctaacatgtcaatgcagccgaatcagggccctatgatgcatcagcagccacctagtcagcagtataacatgccgcagggaggtggacagcactaccagggacagcagcccccaatgggtatgatgggccaggtcaatcaggggaaccatatgatggggcagcgccagattcctccctatagaccaccacagcagggtcccccacaacaatacagtggtcaggaggactactacggagaccaatactcccacgggggacaagggcctccagagggcatgaaccagcaatattacccagatggccacaatgattacggataccagcagccctcataccctgagcagggctatgataggccttacgaagatagcagccaacactattacgagggcggtaactcccagtatggccaacagcaagatgcgtaccaggggccacctcctcagcaaggatatccacctcagcagcagcagtaccctgggcaacaggggtaccccggacaacagcaaggatatggaccaagccagggaggtccaggccctcaatacccaaattaccctcagggtcaggggcaacaatacggtggctaccgaccaactcagcccggaccgcctcagcccccacagcagcgaccttacgggtacgatcagggacagtatggcaattaccagcagtag

SEQ ID NO: 243163 - DNA, 1266 bp, synthetic construct
  misc_feature 1..1266: note = Description of Artificial Sequence: Synthetic coding sequence
  source 1..1266: mol_type = other DNA
ggaggaaacatgagcgtggctttcgcagcaccacggcagcgcggaaaaggagaaattacaccagcagccatccagaagatgcttgacgacaataaccatttaattcagtgcatcatggacagtcaaaacaaaggcaagaccagcgaatgcagccagtatcagcaaatgctgcacaccaatttggtttacctcgcgactattgccgactccaatcagaatatgcagtccttgctacccgctcccccaacccagaacatgcccatgggacccggtgggatgaaccagtcagggccacccccaccaccacggtcgcataacatgcctagtgacgggatggtcggtggcggaccccctgccccacacatgcagaaccagatgaacggacagatgcctggccctaatcacatgccaatgcagggcccaggcccaaatcagcttaacatgacaaactcgtccatgaatatgccctccagcagccatgggtcgatgggaggctataaccattctgtaccaagctcacagtctatgcctgtgcagaatcagatgactatgtctcagggtcagccgatgggaaactacggccctcggcctaatatgtctatgcagccgaaccaagggccaatgatgcatcagcagcctccctcacagcagtataatatgccgcagggcggaggccaacactatcaggggcaacaaccacccatgggaatgatgggacaggtaaatcagggcaatcacatgatgggacagaggcagatacctccttatcgcccaccccaacagggtccgccacagcaatactcagggcaggaagattactacggtgaccaatactcccacgggggacagggccctccagagggaatgaatcagcagtactatccggacgggcacaacgactacgggtatcagcagcccagctatcccgaacaaggctatgaccgaccctacgaagattcttcgcagcattattacgagggagggaattcacagtacgggcagcagcaagacgcttaccaagggcctcctcctcagcagggctaccctccgcaacagcagcagtatccagggcagcaggggtatcccggacaacaacaaggatacggccctagccaggggggacccggtcctcagtacccaaattatcctcagggtcaaggtcagcagtacggtgggtacaggccgacccagcccggaccaccacaacctcctcagcagaggccttacggatacgatcaggggcagtacgggaattaccaacagtag

SEQ ID NO: 243164 - DNA, 399 bp, synthetic construct
  misc_feature 1..399: note = Description of Artificial Sequence: Synthetic coding sequence
  source 1..399: mol_type = other DNA
atgaaccagcagtactaccccgatggtcataacgactatgggtatcagcaaccctcctatccagagcagggttacgatcgcccttacgaagattcatcccagcactattacgagggcggaaactctcagtacggccagcagcaagatgcctatcagggtcccccaccacagcagggttatcctcctcagcaacagcaataccccggtcaacagggctaccccggacagcaacagggatatgggccatctcagggcggtccagggccacagtaccccaattacccccaaggtcaggggcaacaatatggaggttatcggcctacccagccgggaccccctcagcccccacagcagaggccttatggctacgaccaaaattcacggtggaccgtgtgctag

SEQ ID NO: 243165 - DNA, 1011 bp, synthetic construct
  misc_feature 1..1011: note = Description of Artificial Sequence: Synthetic coding sequence
  source 1..1011: mol_type = other DNA
atgcccatggggccaggaggtatgaaccagtctggcccacctccaccacctcggtcccataacatgccttccgacggtatggtgggcggtggacctccagcgccacacatgcagaatcagatgaacgggcaaatgccaggccctaatcatatgccaatgcaaggcccaggtccaaaccagctgaacatgaccaacagctctatgaatatgccctcctcttctcatggctcaatgggcggatacaatcactcagtgcccagcagtcagtcgatgcccgtgcagaaccagatgaccatgtctcagggacagcccatggggaactatggtcctcgccctaacatgtctatgcagccaaatcaggggccaatgatgcatcagcaaccaccaagccaacagtataatatgcctcagggcggagggcagcactaccagggccaacaacccccaatgggaatgatgggccaagtgaatcagggaaatcatatgatgggccagagacagattcctccttacaggcctccacagcaggggcctccacagcagtacagcggacaggaagattattatggggatcagtattcacacggcggacagggtcctccagagggcatgaatcagcagtattaccccgacggacacaatgactatggatatcagcagcccagctatcctgagcaggggtatgaccgcccatacgaggattcctcacagcattactacgaaggtgggaacagccagtacggccagcagcaggacgcttatcagggccctccacctcagcagggatacccccctcagcagcagcagtatcctgggcaacaaggatatccgggtcagcagcagggctatggacctagccagggtggcccaggaccccagtacccgaactatccgcaagggcagggacagcagtacgggggatatcgtccaactcaaccaggaccaccacagccccctcagcagagaccatacggatatgaccagggccagtatggcaattatcagcagtag

SEQ ID NO: 243166 - DNA, 1188 bp, synthetic construct
  misc_feature 1..1188: note = Description of Artificial Sequence: Synthetic coding sequence
  source 1..1188: mol_type = other DNA
atgctggacgataacaatcacctaattcaatgtatcatggactcacagaacaagggtaaaacctccgagtgcagtcagtatcagcagatgctccacacaaatcttgtgtacctggctaccatagctgattcaaaccaaaacatgcagagtctgctccccgctcccccaactcagaacatgccaatggggcctgggggtatgaatcaaagcggtccaccaccacctcctaggagccataatatgccttctgacgggatggtcggcggaggccctccagctccgcatatgcagaatcagatgaacggtcagatgcccggacccaatcacatgcctatgcagggcccaggcccaaaccagctgaatatgactaacagttccatgaacatgccatcctcatcacatggcagcatgggtggctataatcattctgtccctagctcccagtcaatgccagtgcaaaaccagatgacgatgtctcagggccagcctatgggcaattatgggccaaggcccaacatgtcaatgcaaccaaatcagggaccaatgatgcaccagcagcccccatctcaacagtacaatatgccgcaaggcggaggccagcactaccaggggcagcagccgcctatgggtatgatgggccaggtgaaccaggggaatcacatgatggggcaaagacagattccaccttatcgcccaccgcagcaaggcccaccacagcagtatagcgggcaggaggattactatggcgatcaatattctcacggcggacagggcccacccgagggaatgaaccagcaatactatccagatggacacaatgactacgggtatcagcagccatcctatcctgaacagggatatgatcggccttacgaggacagttctcagcattactatgagggcggaaactctcaatacggccaacaacaggatgcttaccagggaccccctcctcagcaggggtacccaccacaacaacagcagtacccaggtcagcaggggtatccagggcagcagcagggttacggtccctcacagggcggtccgggtccccagtatcccaattatcctcagggacaaggccagcaatatggcggataccgcccaacacagcccggacctccccaaccaccgcaacaaaggccctatggatatgatcaggggcaatatgggaactaccaacaatag

SEQ ID NO: 243167 - DNA, 1008 bp, synthetic construct
  misc_feature 1..1008: note = Description of Artificial Sequence: Synthetic coding sequence
  source 1..1008: mol_type = other DNA
atgctgcatacaaacctcgtgtatctagcaacaatcgctgactccaaccagaacatgcagagcctgctccccgctccacccactcagaacatgcccatggggcctggaggcatgaatcagagcggaccgccaccgcctcccagatcccacaacatgccaagtgacgggatggtgggcggaggaccccctgcccctcatatgcagaaccagatgaacggtcaaatgccaggccctaatcacatgccaatgcagggtcccggacccaaccaattgaacatgaccaattcaagcatgaacatgccatcctcctctcacggctctatgggaggctataatcacagcgtgcctagttctcagtctatgcccgtgcagaaccagatgactatgtcccagggtcagccaatgggcaactacggtccccgtcccaatatgtctatgcagcctaaccagggcccaatgatgcaccagcaaccgccaagccagcagtacaacatgccacagggaggaggacagcattatcagggccaacagccacccatgggcatgatgggacaggtgaaccaggggaaccatatgatggggcagcggcagatccctccctacaggcctcctcagcaaggtcctccccagcagtattccgggcaggaggattattacggcgatcaatattcacatgggggtcagggccctccagaaggcatgaatcaacagtattaccccgatggaaattctcagtacgggcagcagcaagatgcgtatcaggggcctccaccccagcaaggatatccccctcagcagcagcaatatcctggacaacagggataccccggacagcaacagggctacggtccctcccagggaggtccgggtcctcagtaccccaactatccccagggtcagggacagcagtatggaggataccgccctacgcagccaggaccacctcagcccccacagcaacgcccatacggctacgaccaagggcaatatggcaattaccagcagtag

SEQ ID NO: 243168 - DNA, 1008 bp, synthetic construct
  misc_feature 1..1008: note = Description of Artificial Sequence: Synthetic coding sequence
  source 1..1008: mol_type = other DNA
atgttgcacaccaatctggtgtacctggctaccatcgccgattccaaccagaacatgcagagcttgttgcctgcccctcccacccagaacatgcccatgggcccaggaggaatgaatcagtcgggaccacctccgcctccgaggtcccacaacatgccctcggatggcatggtcgggggaggccctcccgcacctcacatgcagaatcagatgaatgggcagatgcctggacccaatcatatgcccatgcagggtccaggccctaatcaactcaacatgacgaattcttctatgaatatgccctcctcatctcatgggtccatgggaggctacaatcatagcgttccttcctcccagtcaatgccagtccaaaatcaaatgaccatgagtcaaggtcagcccatgggcaactatggaccacgccctaacatgagcatgcaaccaaatcaaggcccaatgatgcatcaacagcccccaagccagcaatacaacatgccccagggagggggacagcactaccagggacaacagcctcccatggggatgatgggccaggtcaatcaaggcaaccacatgatggggcagagacagatacctccatatcgcccaccacagcaaggccctccccagcagtattctggacaggaagactattacggtgatcaatactcccacggcggtcaggggccaccagaggggatgaaccaacagtactatccagacggtaattcccagtatggccaacagcaggatgcctaccagggcccaccaccacagcagggataccctccacagcagcagcagtatcctggacagcaaggatacccgggtcaacagcagggctacgggccaagccaggggggacctggaccacagtacccgaactatccccagggacaggggcagcagtacgggggttacaggccaacccagccgggaccaccccagccgccacagcagcggccatatggctacgaccaggggcagtatggaaactatcagcaatag

SEQ ID NO: 243169 - DNA, 567 bp, synthetic construct
  misc_feature 1..567: note = Description of Artificial Sequence: Synthetic coding sequence
  source 1..567: mol_type = other DNA
atgaatggcgatgacaccttcgctaagaggcccagggatgacgcaaaagctagcgagaagcgatcgaaagccttcgacgacatcgccacatactttagcaagaaggagtggaaaaaaatgaagtactccgagaagattagttacgtatacatgaagaggaattacaaagctatgactaaattgggatttaaagtgaccttgccgcctttcatgtgtaacaagcaggccaccgatttccagggaaatgacttcgataacgaccacaacaggcggatccaagtggagcatccccagatgacgtttgggaggcttcaccgaattatccctaagatcatgccgaagaaacccgctgaggatgaaaacgactctaagggcgtctccgaagcctccgggccacagaatgacgggaaacagctgcaccccccaggaaaagctaacatatccgagaaaattaacaaaaggagtggcccaaaaagagggaaacatgcttggactcaccgcctgcgagaacgcaagcagttggttatatacgaagagatctccgaccccgaggaagacgacgagtag

SEQ ID NO: 243170 - DNA, 672 bp, synthetic construct
  misc_feature 1..672: note = Description of Artificial Sequence: Synthetic coding sequence
  source 1..672: mol_type = other DNA
atgaacggagacgacgccttcgctaggcgtcccactgtcggtgctcaaatacccgaaaagattcagaaagccttcgacgacattgcgaagtatttctccaaggaggagtgggagaagatgaaggcaagcgaaaaaattttctacgtctacatgaaaaggaagtacgaggccatgacaaagcttgggtttaaggccacccttccgcctttcatgtgtaacaaacgggctgaggactttcaaggcaatgacctggataatgatcctaacagagggaatcaggtggagcgaccccagatgactttcggtcgactccagggaattagccctaaaattatgccaaaaaagcctgcagaggagggaaacgatagcgaagaggttcctgaggcctccggcccacaaaatgatggcaaggagctctgccccccaggtaagcccacaacttccgaaaaaatccacgaaagatctggcaacagggaggcccaagaaaaggaagagcgacggggtactgcccatagatggtcctctcagaatacgcacaacatcggaaggttttcactttcaaccagcatgggcgctgttcacggcacacctaagacaatcactcacaaccgagaccccaagggtggaaatatgcctggtccgacagactgtgtgcgcgaaaattcctggtag

SEQ ID NO: 243171 - DNA, 567 bp, synthetic construct
  misc_feature 1..567: note = Description of Artificial Sequence: Synthetic coding sequence
  source 1..567: mol_type = other DNA
atgaatggcgacgatgcctttgctcgccgtcccacagtcggcgctcagattccagagaaaatccaaaaggctttcgacgatattgctaaatacttctctaaggaagaatgggagaagatgaaggcatccgagaaaatcttctacgtttacatgaagaggaaatacgaagcgatgacaaaattaggatttaaggccaccctccctccctttatgtgcaacaagagggctgaagattttcagggaaacgaccttgataatgatcccaacagagggaaccaggttgagagaccccagatgacattcggccgactgcaagggatcagtcccaaaataatgcccaagaagccagcggaagagggtaatgacagtgaggaagtgccagaggcttctggtccccagaacgatggcaaggaactttgccctccaggcaaacccacaacgagtgagaagattcatgagcgctctgggccaaagagaggagagcacgcctggactcatcgactacgggaaagaaagcagttggtgatctatgaagagatctccgacccggaggaggatgatgaatag

SEQ ID NO: 243172 - DNA, 567 bp, synthetic construct
  misc_feature 1..567: note = Description of Artificial Sequence: Synthetic coding sequence
  source 1..567: mol_type = other DNA
atgaacggggatgacacgtttgcccgtcgccctactgttggagcacagattccggagaaaattcaaaaggcctttgatgacatagcgaagtacttctccaaagaggagtgggagaaaatgaaggtgagcgagaagatcgtgtacgtttacatgaaacgcaaatatgaagctatgactaagcttggctttaaggctatactcccttccttcatgagaaacaaaagagtgactgattttcaggggaacgacttcgacaacgatcctaataggggaaaccaggtgcagagaccgcagatgaccttcggtcgactgcagggcatcttccccaagataatgcctaaaaagccagcagaagaggggaacgtgtctaaagaggtgcctgaggcctcaggtccgcagaatgacggcaagcagttgtgtccccctggcaaaccaaccaccagcgagaaaatcaatatgatcagcggaccgaagcggggagagcatgcttggacgcaccggttaagggagaggaaacagctcgttatttacgaagaaatatccgacccggaagaggacgacgaatag

SEQ ID NO: 243173 - DNA, 513 bp, synthetic construct
  misc_feature 1..513: note = Description of Artificial Sequence: Synthetic coding sequence
  source 1..513: mol_type = other DNA
atgaatggcgacgacacattcgctaggcgaccaaccgttggggcacaaatcccagagaagatacagaaggcctttgatgatattgctaagtacttcagtaaggaagaatgggaaaagatgaaggtctctgaaaagatagtgtacgtctacatgaaacgcaaatatgaggccatgacgaagctgggattcaaggctatccttccttctttcatgaggaataaacgcgtgacagacttccaaggtaatgatttcgataatgaccctaatagaggtaatcaggtccagagaccgcaaatgactttcgggcgtttacagggaatcttcccgaagatcatgcctaagaaacctgccgaggaaggtaatgttagtaaggaggtgccagaggccagcggccctcagaatgacggtaagcagttatgtcccccaggtaaacccaccacttctgaaaagattaacatgatctccggtgttctccagaggtattgtagattcggctcccgacctctgcagtag

SEQ ID NO: 243174 - DNA, 303 bp, synthetic construct
  misc_feature 1..303: note = Description of Artificial Sequence: Synthetic coding sequence
  source 1..303: mol_type = other DNA
atgtacagtctgtcagtgcaacgccctcaaatgacttttggtaggctgcagggcatttttccaaagatcatgcctaagaaacccgctgaagagggcaatgtaagcaaagaggttccagaggcctcaggccctcagaatgacggtaaacagctgtgtccccctggtaaacccacaaccagcgagaagatcaacatgatatccggcccaaagcgaggtgagcatgcttggacacaccgcctgagggaaagaaaacagctagtaatttacgaggagatttccgaccctgaggaggatgacgaatag

SEQ ID NO: 243175 - DNA, 462 bp, synthetic construct
  misc_feature 1..462: note = Description of Artificial Sequence: Synthetic coding sequence
  source 1..462: mol_type = other DNA
atgaacggcgatgatgccttcgcaaggcgccctagagatgatgcccagattagcgaaaaactgagaaaggcttttgatgatatcgcaaaatacttcagcaaaaaagagtgggaaaagatgaagtcatccgagaagatagtctacgtctatatgaagctcaactatgaggtaatgaccaagctgggctttaaggtaaccttgcctcctttcatgcgcagcaaacgggctgccgattttcatggaaacgatttcgggaacgatcggaatcacaggaaccaagtagagaggccccagatgacgttcgggtcgctgcagagaatctttccgaaagatccaaagggtggtaacatgccgggtccaactgattgtgtgcgcgagagctcttggtggttcatgaaaagatctgccacgctcaggaaaatgacctcaaattctcctaggggctacgatacatgcccctag

SEQ ID NO: 243176 - DNA, 567 bp, synthetic construct
  misc_feature 1..567: note = Description of Artificial Sequence: Synthetic coding sequence
  source 1..567: mol_type = other DNA
atgaatggcgacgacgctttcgctcgccgtccgagagacgacgcccagatttccgaaaagctacgaaaggcttttgatgacatagctaagtacttttcaaagaaggaatgggagaagatgaaaagttctgaaaaaatcgtctacgtctatatgaaactgaactatgaggttatgactaaacttggctttaaagtgactctgcctccttttatgagatccaagcgggctgcagacttccacggaaatgatttcggtaacgatcggaaccacaggaaccaggttgagcgacctcagatgaccttcgggtctctccaacgaatcttcccgaagatcatgcctaagaagcccgcagaggaggagaacggactgaaagaggttccagaagcttctggcccacagaacgacggcaaacaactgtgtcccccaggaaacccgtcaaccctggagaaaattaataaaacgagcgggccaaagcgcggtaaacacgcctggactcaccggttgcgcgagcgcaagcagttagtggtgtatgaggaaatcagcgatcctgaggaggacgatgagtag

SEQ ID NO: 243177 - DNA, 1992 bp, synthetic construct
  misc_feature 1..1992: note = Description of Artificial Sequence: Synthetic coding sequence
  source 1..1992: mol_type = other DNA
atggggcctctgcgtgaatctaagaaagagcacagggtgcagcatcacgacaaggaaatttcgaggtcccggattccacggctcattctccggccacacatgcctcagcagcagcataaggtctcccccgcatctgaatcacccttcagtgaagaggaatccagagaattcaatccatcatcttccggcaggagcgccaggactgtgtcttccaactcattctgcagtgacgacacaggatgtccatctagccagtccgtatcgcccgtgaagacaccatccgacgcaggtaatagcccaataggtttttgccccggttctgatgaaggttttaccagaaaaaagtgcaccatcgggatggtgggcgaaggatccatccaaagttccaggtacaaaaaggaatcaaagtctgggctcgttaagccgggatctgaggctgactttagcagcagttccagcacgggaagcatttcggctcccgaagtgcatatgtcaacagctggcagtaaacggagctcctccagcaggaatcggggaccgcatggcaggtctaacggcgcaagttcccacaaaccaggctcaagcccctcaagcccacgcgagaaagacctcctctctatgctgtgccgcaaccagctgtccccggttaatattcacccaagctacgcaccctcctccccatcttcctcaaactctggaagttacaagggctcagactgctcacctatcatgcggagatcgggtagatacatgtcttgtggcgagaatcacggagtgcgaccccctaacccagagcaatacttgacccccctccagcagaaggaggtgactgtgcgtcatctcaaaaccaagttgaaggagtcagagcgccgtctgcacgagagagagtctgaaatagttgagctgaaatcccaacttgctcgaatgcgggaggactggatcgaggaggagtgccatcgggtggaggcccagctggccctgaaggaggccagaaaggaaattaaacagctgaaacaggtgattgaaaccatgcgatctagcctcgccgacaaggacaagggaatccaaaaatattttgtggacatcaacattcagaacaagaaattggaaagcctacttcagagtatggaaatggctcattctggttccctgagggacgaattgtgcctcgacttcccttgcgacagccccgagaaaagtctgactttaaatcccccattagatactatggctgacggactcagcttggaggagcaggtaacgggagagggagctgatagagagttgcttgtcggcgactctattgcgaacagcacagacctctttgatgagattgtgactgcaacaacaacggaaagcggagacctggagctggtccatagcacccccggagcaaacgttctggaactgctgccgattgtgatgggtcaggaggaaggcagcgtggttgtggaacgagcagtgcagacagatgtagtcccgtactcgccagcaataagtgaacttatccaatcagtactacaaaagttacaggatccgtgccctagtagtcttgcatctcctgacgagtcagagcccgattctatggaaagctttcccgagtcactgtctgctctcgtcgtcgacctgacacctcgcaaccccaatagcgccatcctgttatcaccagtggagactccctacgccaacgtcgatgcggaagtccacgctaatcggctgatgagggagttggacttcgcggcatgtgtggaggaacgcctggacggagtgattccccttgccagaggcggtgtagtgcggcaatattggtccagcagctttctcgtggacctgcttgccgtggccgcacctgtggtgcccaccgtgctgtgggccttctctacgcagcggggaggtacagaccctgtatataacataggagctttgttaagaggatgctgcgtggtggccctccatagtcttcgccgtacagccttccgaatcaaaacctag

SEQ ID NO: 243178 - DNA, 1983 bp, synthetic construct
  misc_feature 1..1983: note = Description of Artificial Sequence: Synthetic coding sequence
  source 1..1983: mol_type = other DNA
atgtcaaatttcgagaaagagcatcgggtgcagcatcacgacaaggaaatcagcagatcacgaattcctcgcctgatccttcggccacatatgcctcagcaacagcataaggtctctccagcgagcgagtcacccttctccgaggaggagagccgcgaatttaatcccagcagctcagggagatccgcacgtacggtgtcatccaatagcttttgctctgacgatacaggctgcccaagtagccagagcgtatctcccgtcaagaccccgtcagatgccggaaatagccctattggcttttgtcctggttccgatgagggttttacgagaaagaagtgcaccatcggaatggtgggagagggatctatccagagttcgagatacaaaaaggaaagtaagtcgggcctggtcaagcccggtagcgaagcggattttagctcctccagcagcacaggaagtatctcagcccctgaggtgcatatgtcgactgcaggttcaaagcggtcatcctccagcaggaataggggccctcacggcagatcgaatggcgcttcctctcacaagccgggtagcagcccttcctcccctcgcgagaaggatcttctcagcatgctctgccgcaatcaattgtcgccggtgaatatccaccctagttatgcgccatcctcacccagttcttccaactcgggaagctataaaggctccgattgctcccccattatgagacgctccggacggtatatgtcatgcggggaaaaccatggcgtacgacctcctaatccagagcaatatctgacccccctccagcagaaggaagtgacagttagacacttgaagactaagcttaaagagtccgaaagaagactgcacgaacgggagtcggaaatagtcgagctgaaaagccagttagcgcgaatgcgagaggactggatcgaggaagaatgccatcgagtggaggctcagctcgccctgaaggaggcaagaaaagagatcaagcaattaaagcaggtcatcgaaacaatgcgtagttctctcgcggataaagataagggaatacaaaagtactttgtggacattaacatccaaaacaaaaaactggagtccctcctgcaaagtatggagatggctcactcagggagcttacgggacgagctgtgtctggattttccgtgcgacagcccggagaaatcactgacgctaaatccccctctggacacaatggcggacggtctctcactcgaggagcaggtcaccggcgagggcgctgacagagaattattagtaggagattcgatagctaacagtaccgacttgttcgatgaaatcgtgactgccacaacgactgagtcaggggacctggagttggtacattcaactccaggcgctaatgtgttggaactgttgcctatagtcatggggcaggaagagggaagtgtggtggttgaaagggctgttcagactgatgtagtgccatacagtcctgcaatatcagaactgatccagtctgtgctgcagaaactgcaggatccttgcccgagtagtctggcttccccagatgaaagcgagccggattctatggagagctttccggagtctctgtccgctctggtggttgatttgactccacggaatcccaatagtgccatcttattgagccccgtggaaaccccttatgccaacgtggacgcagaagtacacgccaacagacttatgcgtgaactggactttgcggcttgcgtggaagaaagactcgatggagtgattccactcgccagagggggtgtcgtgaggcaatactggagctcttcatttctcgtagacctgttggctgtggcggctcccgtggtgcccactgtcctgtgggctttctcgacccagcgaggaggtacggacccggtgtataatattggtgcccttctacggggatgctgcgtggtggccctacacagcctgcgccgaactgcctttcggatcaagacgtag

SEQ ID NO: 243179 - DNA, 1635 bp, synthetic construct
  misc_feature 1..1635: note = Description of Artificial Sequence: Synthetic coding sequence
  source 1..1635: mol_type = other DNA
atggtaggcgagggaagcatacagtcgtcccggtacaaaaaggaatcaaagtcagggctggtcaaacccggaagcgaagctgacttctcaagctcatctagtaccggctccatcagcgcacctgaggtgcacatgtctactgccggatctaaacggtcctcctcttcacgcaatcgcggacctcacggtcgctccaatggcgcttctagtcacaagcctggtagctcaccatcctcccccagagagaaagacctgcttagcatgctgtgcagaaaccagctgtctccagtgaacatccatccctcctacgccccttcatcaccgagctcttccaactctggatcatacaaggggtccgactgttcccctataatgcggagaagcggcagatacatgagctgtggggaaaaccatggcgttaggcctccaaaccctgaacaatatctaaccccactgcagcagaaagaggtcacagttcgccacctaaagactaagcttaaggagagtgagagaaggcttcacgagagagagtccgagatcgtggaactgaagtctcaattggcacgcatgcgcgaggattggattgaggaggaatgtcacagagtggaagctcagctggcactgaaggaagctcgcaaagagatcaagcaattgaagcaagtcatcgagacaatgagatcctctctggccgacaaagataagggcattcagaagtactttgtggatattaacatacagaacaaaaagctggaatccttactacaatctatggaaatggcacattctgggtctctgagggatgagctttgtctagacttcccttgtgatagccctgagaagtccctgacgctgaacccccctttagacactatggcagacggtctcagtctcgaagagcaagttacaggcgaaggcgcagacagagagcttctcgtcggagattccatcgccaacagtaccgatctctttgatgagatagtaacagcaacaactactgaaagtggggacctcgagctggtgcattcaacaccaggggcaaatgtgcttgagctgttaccaatcgtaatgggacaggaggaggggtctgtggtcgtcgagagagctgtgcagactgacgtcgtaccatactctccggcaatctcagaactcatccagagtgtgctgcagaaactgcaggatccctgccctagcagcctcgcctcaccagacgaatctgagccagacagcatggagtcattcccggagagcctgagcgccctggtcgtggacctgacgcccagaaaccctaattccgccatcttgttgtcgccagttgagaccccttatgctaacgtggacgctgaggtgcatgctaacagactgatgcgagagctcgattttgccgcatgcgtggaagagagactggacggggtgatccctctggctaggggtggtgtcgtccgtcaatactggtcctcatctttcctggtggacctcctcgccgtggcagcccctgtggtgccgactgtcctgtgggcattctctacacaacggggtggtaccgaccccgtgtataacatcggcgcactgctcaggggttgttgcgtagtcgccctccacagccttcgacgcacggcctttcgcataaaaacctag

SEQ ID NO: 243180 - DNA, 1992 bp, synthetic construct
  misc_feature 1..1992: note = Description of Artificial Sequence: Synthetic coding sequence
  source 1..1992: mol_type = other DNA
atgggccctttacgagagagtaaaaaggaacaccgcgtacaacaccatgataaggagataagccgcagtaggattcctcgcttaatactccgtccacacatgcctcagcagcagcacaaggtgagtcctgcttccgaaagcccgttcagcgaagaggagtctagagaattcaacccgagttcttctggccgttcagctcgcaccgtctcgtctaactctttctgttctgacgacaccggttgcccgtcctcacagtcagtgagcccggttaagacaccaagcgacgccggtaactcaccaataggattttgcccgggtagcgacgaaggcttcactcgaaaaaagtgtaccattggtatggtcggagagggctcaatccagtcctctagatacaaaaaggaaagcaaatccggactggtcaagcctggtagtgaggcagactttagctcttctagttcaacggggtctatcagtgctccagaagtccacatgagtacagccggaagcaagcgttcatcaagcagccgcaatcggggaccacacgggagatcgaacggcgcaagctctcacaaaccagggtcaagccccagctctccgagggagaaagatctgctgtccatgctctgccgcaatcagctcagtcccgtcaacatccaccctagctatgccccttcgtccccgtcctccagcaatagtggctcctataagggtagtgactgcagcccaattatgagaagatccggcaggtacatgagttgcggcgaaaaccacggtgttagacctcccaaccctgaacaataccttacccccctgcagcaaaaggaagtgactgtgcggcacctcaagacaaaactgaaggagtcggaacgcagactccacgagcgggaatcagaaatcgtagagctgaagagccagctcgcaagaatgcgagaggattggatagaggaagagtgccatagggtggaagctcaattagcactcaaggaggcaagaaaagaaataaagcagctgaagcaggtaatcgagacaatgagatccagccttgccgataaggataagggaatccagaagtacttcgtggacatcaacattcagaacaagaaacttgagtccctcctgcagagcatggaaatggcccattcagggagcctcagggacgagctatgcctggactttccatgcgactcacctgagaaatcactcacgttgaacccacctttagataccatggcagacgggctcagcttggaggaacaagtgaccggtgagggcgctgatcgcgagctgctcgtgggggactccattgccaactccaccgacctctttgacgagatcgtgactgccaccaccactgagtctggcgacctggaattggtgcactcaacccctggagccaacgtgttggagctccttcccatcgttatggggcaagaagaagggagcgtggttgtcgagcgcgcagtgcagactgacgtggtgccatactcacccgcaattagcgaacttatccagagtgttctgcagaaactgcaggatccctgccctagtagtctggcatctcctgacgaatccgaaccggactcaatggagtcctttcctgagagccttagcgctctggtcgtggaccttacaccacgcaaccctaacagcgcaatccttttgtctcccgtcgagacaccatacgcaaacgttgacgcggaagttcacgcgaatcgtctgatgcgagagctggacttcgctgcgtgtgtggaggagagactggatggcgtgatacctctcgccagagggggagtggtgcgtcagtactggagttcaagctttctggtggacctgctggccgtcgcagctccagttgtgccaactgtgctttgggcgtttagcacacaaagaggcggaactgatcccgtgtataacatcggtgctctgctgagagggtgttgtgtggtagctctccattctctgagacggactgccttcaggatcaagacttag

SEQ ID NO: 243181 - DNA, 1989 bp, synthetic construct
  misc_feature 1..1989: note = Description of Artificial Sequence: Synthetic coding sequence
  source 1..1989: mol_type = other DNA
atggggcctctgcgcgagagcaaagagcaccgggtgcaacatcatgacaaggaaatcagccggtcccgcatcccacggttgatcctccggccacacatgcctcaacaacagcacaaagtcagtccggcatccgagtctccctttagcgaggaggaatcacgagaatttaatccctcttcatccggacgcagcgctcggactgtgtcctctaattctttctgttcagatgacactggttgtcccagttcccagagcgtttcccccgttaagacgccaagtgatgcgggaaactcacccataggattctgtcccggttctgatgaaggcttcacccgaaagaagtgcactatcggtatggtgggggaggggtccattcaaagcagccgatataagaaagagagcaagagtggtctcgttaagcctggctctgaggccgacttctccagttcttcgagcactggaagcatcagtgcacccgaagtgcatatgagcactgctggcagtaagcgttcctcaagttcacgaaatcgcggtccccacggcagatctaatggagcctcttctcacaagcccggttcctcaccatcatccccacgcgaaaaggatttattgtccatgctttgtcggaatcagctctctcctgtcaatatacaccccagctatgccccaagtagtccatcctccagcaattctggctcctacaagggatcagattgctctccgataatgaggagaagcgggagatatatgagctgcggggagaaccatggagtcagaccgccaaacccagaacaatacctcaccccacttcagcagaaggaggtgaccgtcagacatttgaaaactaaactcaaggaatcggagcgacgactgcacgagcgggaatccgaaattgtagagctcaagtcacagctcgctcgtatgcgtgaagattggattgaggaggagtgccatcgcgtcgaagcccagctggcacttaaggaagccaggaaggaaatcaagcaattaaaacaagtgatagaaactatgagatcttcactcgcggacaaagataagggtatccagaagtattttgtggacatcaatatccagaataagaaattggagtctctgttgcagagcatggaaatggcccattcaggtagtcttcgcgacgaattgtgcttagacttcccctgcgactctcccgaaaagtccctgactctcaaccctcccttagataccatggcagatggtctgtctctagaggaacaggtcactggagagggtgctgatcgggagctgctcgtgggagattccattgccaactccactgatctctttgacgagatagtaaccgcaacgaccaccgagtccggcgacttggagttggtacactctacacccggagcgaatgtcctggagcttctacctatcgtaatgggccaggaagagggctctgtggtagtcgaaagagccgttcagactgacgtagtgccctattccccagccatctctgagctcatccagtccgttttgcaaaagctgcaggatccatgtccaagctcccttgcaagcccggatgagagcgagccagattcgatggagtcctttccagaaagtttaagtgccctcgttgttgacctaactccaagaaatcctaactccgctatccttctgtctccggtggaaactccttatgcaaacgttgatgcagaggtgcacgcaaaccggctgatgcgcgaattggactttgcagcttgtgtcgaagagcggctggacggagttattcctctcgcccgtggaggcgttgtgaggcagtactggtcatcatccttccttgtggatctcctggcagtcgctgctcctgtggtgcctacagtgctctgggccttctccacgcagagagggggaacagaccccgtctacaacatcggtgcactgctccgcggatgctgcgtggtagctctgcattccctcaggcgaacagcctttaggataaagacgtag

SEQ ID NO: 243182 - DNA, 1992 bp, synthetic construct
  misc_feature 1..1992: note = Description of Artificial Sequence: Synthetic coding sequence
  source 1..1992: mol_type = other DNA
atgggaccactccgcgagagcaagaaagagcatcgggtgcagcatcacgacaaggagatttcccggagccggattccacgcctgattctccgtccacatatgcctcagcagcagcacaaagtcagccctgcctcagagagccccttttcagaggaagagagtagagaatttaacccttcatcatcagggagatccgcccgaaccgtgagctcaaacagcttttgttctgatgataccggatgcccaagttcccagtcagtgagtccagtaaagacaccctctgacgctggcaactctccaattggcttctgccccggttcagacgaagggtttacacggaagaaatgtacgatcgggatggtcggagaaggtagcattcagagttctcggtataagaaagagtcgaagtccggactggtcaagccaggctcagaagccgacttttcgagttcaagctccaccgggtctatttccgcccctgaggtgcacatgtccaccgctggtagcaaacggagcagcagcagtcgcaatcgtggcccacatggtagatccaatggagcctcctcacataaacctggctctagcccctctagtcccagggagaaggacctgcttagtatgttgtgtaggaatcagctgagtcccgtcaatatccatccctcttatgccccaagctccccctcctcttctaactccggttcgtacaaaggctccgactgctctccgattatgcgacgtagcggtagatatatgtcttgcggggagaaccatggcgttagaccacctaatccggaacagtatcttacgcccttacagcagaaggaggtgacagtgcgacacctgaagacaaaattgaaagaatccgagagacgcttacacgagagagagtcagagatagtggagctgaaaagtcagctggcacgaatgagagaggattggatcgaggaagagtgtcaccgggttgaggcacagctggcactaaaggaggccagaaaggaaatcaagcagcttaagcaggttatcgagacaatgcggagtagtctagctgacaaagataaagggatccagaaatactttgttgacatcaacattcagaacaaaaagctggaatcactccttcagtcgatggaaatggcccactcaggttctcttcgggacgaactctgtctggactttccatgcgatagtccagagaaatcattaaccctgaaccctccacttgacactatggctgatggactcagcctcgaggaacaggtgacaggggaaggggctgaccgggagctgttagtcggcgatagtattgccaacagtacagatcttttcgatgaaatcgtgaccgcaaccacaacagagtcaggcgacctggagctcgtgcactcaactcccggagccaacgtcctagaactgcttcccatagtaatggggcaggaagagggctccgtggttgtggaacgcgcagtccagacagacgtagtcccctacagccccgcaataagcgagctcatccagtctgtgctgcagaaactgcaagatccgtgtccctcctctctagccagccccgatgagagcgagcctgattctatggagtccttccctgagagcctgagcgctctggttgttgatctgacacctcgcaaccctaactcagccatacttctgtcccccgttgaaactccgtatgccaacgtggacgcagaggtacacgctaaccgattaatgagggagctggactttgccgcatgcgtcgaggaaaggctggatggggttatcccgctcgccaggggcggagtggtccggcagtattggtctagctcatttctcgttgatcttcttgcagttgctgccccagttgtccccactgttctatgggctttctcgacacaacgcggtggaacagaccccgtctacaacattggcgctctgctccggggttgctgcgtcgttgcgttgcattcattgcgcagaacagccttccgtataaaaacatag

SEQ ID NO: 243183 - DNA, 1992 bp, synthetic construct
  misc_feature 1..1992: note = Description of Artificial Sequence: Synthetic coding sequence
  source 1..1992: mol_type = other DNA
atgggaccactccgggagagcaagaaggagcatcgagtacagcaccacgacaaggaaatcagcaggagcagaatcccaagactgattctaagaccccatatgccgcagcagcagcacaaggtgagccctgcaagcgagtcccccttctcagaagaagaaagtagagagttcaacccaagcagcagcggcaggtctgcacgcacagtgagcagcaattccttctgtagtgatgacaccggctgccccagtagccagtcagtcagcccggtcaaaacgccatccgatgccggaaacagcccaatcgggttctgcccgggttctgatgagggcttcacccgaaaaaaatgcactataggcatggtaggtgaagggagtattcagtctagcagatataaaaaagagtcaaaaagcggcttggtaaagcccggttctgaagcagattttagttcttcctcatcaaccggtagtatctctgccccagaggtgcatatgagtacagcaggctcaaagagatcgagttcctcccggaatcggggtcctcatggacggtctaacggtgctagctcccataagccgggatccagcccttcctccccaagagaaaaggacctcttgagcatgctgtgtcggaaccagctctcacccgtcaacatccatcctagctacgccccttcttcgccatcttcctctaattcgggaagttataagggtagcgattgttcacctattatgaggcggtctggacggtacatgtcctgtggcgaaaaccatggcgtccgccctcccaatccggaacagtatttgacccccttgcagcagaaagaggtgacggtcagacacctgaagactaaactaaaagagtctgaaaggcgtcttcatgaaagagagagtgaaatcgtggaactcaagagccagctagcgaggatgagagaggactggattgaagaggaatgtcacagggtcgaagctcaattagcccttaaggaggcacggaaggagatcaaacagcttaagcaggtgattgagacaatgcggagctcactagctgacaaagacaaggggattcagaagtactttgtggatataaatatccagaacaaaaaactggagtctctgctgcagtcaatggaaatggcccattctggcagcttacgcgacgagttgtgcctggactttccctgcgacagccccgagaagtccctcaccctcaatcctcctctggacactatggccgacggactgagcctcgaggagcaggtgaccggcgaaggcgctgaccgcgagctgctcgtcggtgatagtattgccaatagcactgacctatttgatgagatcgtgacagccaccacaaccgaaagtggcgacttggagttggtgcacagcactccgggagccaatgtgctggaactgctgccaatagttatgggacaagaggaggggagtgtcgttgtagagagggcagtgcagacagatgtcgtaccctacagtccagccatctcagaactcatacaaagcgtgctacaaaagctacaagatccctgcccctccagcttggcctcccctgatgagtcggagccagacagcatggagagttttccggaaagcctttctgcgctggtggttgacctcacacccagaaacccaaacagcgccatcctgctgtccccagttgagacaccatatgccaatgtggacgctgaggtacacgccaatcggttaatgagagagctcgactttgccgcatgcgttgaggaacgcctggatggggtcattcctctggcgcgagggggtgtggtgcgccagtattggtcaagcagttttctggtagacctgctggccgtagccgctcctgtagtacctactgtgctgtgggccttcagtacacagaggggtggtacagacccggtatacaacatcggcgcactgctgaggggctgctgtgtggtggctctgcacagccttcggcgaacagctttccgaatcaaaacttag

SEQ ID NO: 243184 - DNA, 1992 bp, synthetic construct
  misc_feature 1..1992: note = Description of Artificial Sequence: Synthetic coding sequence
  source 1..1992: mol_type = other DNA
atggggccactgagggaaagcaaaaaagaacaccgtgtacaacatcacgataaagaaatctcccgctcccgcatacctagactgattttgcgccctcacatgccacagcaacaacataaggtctcccccgcatcagagtcccccttttcagaggaggagtcccgggagtttaatccgagctcatccggcaggtctgcccgtactgtgtccagtaactcattctgctccgatgataccggctgccctagctctcagtccgtgagccctgtgaaaacaccaagcgatgcgggaaacagtcctattgggttttgccctggttccgacgaggggttcacccggaagaaatgcaccatcggcatggtgggcgaaggatctatacagagctcccgttacaagaaagagagcaagtctggactggtcaaaccagggtccgaggctgattttagttccagcagcagtaccggctctatttccgcccctgaggtccatatgtcaaccgcgggtagcaagagatcatcctcctctcgcaaccgaggcccacacgggcgatctaacggcgcttcctcacataaaccagggagttcacccagctcccctcgagagaaggacctactgtctatgctgtgtcgcaaccagctgagccctgtgaacatccacccatcgtatgcccctagctccccttcgtcttccaactccggatcgtataaggggagtgactgtagccccatcatgcgcagatccgggaggtacatgagctgcggcgaaaaccacggagtgcgtccccctaacccagaacagtacctcacaccgttacaacaaaaagaagtgaccgttcggcacctgaaaactaaactcaaagagtcagagcgcaggttgcatgagcgggagagtgagatagttgagttgaagtctcagttggcgaggatgcgcgaagactggatcgaagaggaatgtcaccgggtcgaagcacagctggccctaaaggaagcgaggaaggagataaagcagctgaagcaggttatagaaactatgcgatcaagtcttgccgacaaggataagggcatccaaaagtatttcgtggacataaatatccaaaataagaagctggaaagcctcctgcagtctatggaaatggcccactccggctctctcagagacgagttatgcctggacttcccttgcgatagtccagagaaatccctgactctaaacccccctctggacaccatggccgatgggctctctttggaagagcaggtcactggcgagggagcggatcgcgagcttctcgtgggtgatagtattgcaaattcgactgatctgttcgatgaaatcgtgactgcaacaaccaccgaatccggagatttggagctagtgcactcgaccccgggtgccaacgttctggagttactgcccattgttatgggacaggaagaaggttccgtagtcgtggagagggcagtgcaaactgacgtggttccctacagtcctgccatttcagagttgatccagagcgtgttacagaagctgcaggatccctgcccttcatctctggctagtcctgacgagagtgaacctgattctatggagtcatttccggagtcgctgagcgcactcgtagtcgatctgaccccacgcaatcccaacagtgccatcctactttctcctgtggaaacgccatatgccaatgtggacgccgaagtgcatgctaatcggcttatgagggaactagactttgccgcatgcgtggaggaaagactggacggcgtgatccctttggccaggggtggcgttgttcgccagtactggagctctagcttcctagtagaccttctagctgttgctgcccctgtggttccaacggttctctgggctttcagcacccagcgaggtggcactgatcctgtgtataatatcggtgctctgttgaggggctgttgtgtagtggccttacatagtctccgcaggaccgcctttagaatcaagacctag

SEQ ID NO: 243185 - DNA, 1989 bp, synthetic construct
  misc_feature 1..1989: note = Description of Artificial Sequence: Synthetic coding sequence
  source 1..1989: mol_type = other DNA
atggggcctctgagggagagtaaagaacatagagtccaacaccacgataaagaaatctcacggtcacgaataccccgactcattttaagaccccatatgccacaacaacaacacaaggtgtccccagctagcgagagtccgtttagtgaagaggagtcccgggagttcaatccttccagcagtggtaggagtgctagaacggtgtcatccaacagtttctgttctgacgacacagggtgccccagtagccagtctgttagtccggtcaaaacacctagcgacgctggcaatagtccgataggtttctgcccgggttcagatgaaggctttaccagaaagaaatgcacaatcggcatggtgggcgaggggagcatccaatcgtcgcgatacaaaaaggagagcaaatctggcctggtgaagccaggctccgaggctgacttctcatcgtcttcaagcacagggtccattagcgctccagaagttcatatgtccacggccggaagtaaaagatccagtagctcaaggaaccggggtccacatggtcgcagcaatggtgcctcatctcataaaccagggagcagtccgtccagccccagagaaaaggacctgctgagtatgctgtgtagaaatcagcttagtccagtgaacatccatccaagttacgccccttcctctccttcttcctccaatagcggctcatacaaagggagtgattgttctcccatcatgcgtcggtctggcaggtatatgagttgcggggaaaaccatggggtgaggcctccaaatcctgaacagtacctgaccccactgcagcagaaggaggttacagtccgacatctgaaaaccaaactcaaagagagcgagcggaggcttcatgagcgcgagagtgagatcgtggaactgaaatcccagcttgcgagaatgcgagaagattggattgaggaggaatgtcatcgcgtcgaagctcagctggctttaaaagaggctcgtaaagagatcaagcaactgaaacaagtcatagagacaatgcgcagctccctagctgacaaagataaaggaattcagaaatactttgtcgacataaatatccagaataagaaactggaaagtctactgcaatcgatggaaatggcacactcaggcagtttaagagatgagctctgcctggacttcccctgtgacagccctgaaaagagccttaccttgaatccccctttagacaccatggctgacgggctctcactggaagaacaggtaactggcgaaggggcagatagagaactcctggttggagactccatcgccaattccacggacctctttgatgagatcgtgacggccaccaccacagagagcggtgaccttgagctggtacattcgacgcccggtgccaatgtgcttgagctgctccccattgtgatggggcaagaagaagggtctgtggtggtggaacgtgctgtgcagactgatgtggtgccatacagccctgccatttctgagttgatacagtctgtgctgcagaagctgcaggacccctgtccgtccagtctggcttctcctgacgaaagtgagccggactccatggagagcttccctgagtctctttccgcacttgtggtggaccttacacccagaaacccaaacagtgctatattgttgtcccccgttgagactccttatgccaatgtggatgcggaagtgcacgctaatcggcttatgagggagctagacttcgccgcatgcgtcgaggagaggctggatggtgtgatccccctcgcgagaggaggagtggttagacagtattggagtagttctttcctcgtggatctcctggcggtggcagctcccgtggtgcctacggtcctctgggctttctccactcaaagaggaggcactgatcccgtgtataatataggtgccttgctccgcggttgctgcgtggttgccctgcatagtcttcgtcgcacagcctttcgcatcaaaacctag

SEQ ID NO: 243186 - DNA, 414 bp, synthetic construct
  misc_feature 1..414: note = Description of Artificial Sequence: Synthetic coding sequence
  source 1..414: mol_type = other DNA
atgggccctctgagggagagcaagaaagaacacagagtccagcaccacgataaagagatttcgaggtccagaatcccccgactgattcttcgtccccacatgccacagcaacagcacaaggtttctccagccagcgaatccccattcagtgaggaagaatctagagaattcaatccctcctcctctggacggtccgcaaggacagtgagcagtaattcattctgttctgacgatactggatgccccagcagccagtccgttagcccagtcaagacgccatccgatgctgggaactcccctatcggtttctgtcctgggtcagacgagggcttcaccaggaagaaatgcacgattggaatggtgggcgaaggtagcatccaaagctcaagatacaagaaagagagtaaaagctag

SEQ ID NO: 243187 - DNA, 231 bp, synthetic construct
  misc_feature 1..231: note = Description of Artificial Sequence: Synthetic coding sequence
  source 1..231: mol_type = other DNA
atgggccctctccgggaaagcaaaaaagagcaccgagtacagcaccacgataaagaaatatccaggtctcgaattcctcggcttatacttcggccacacatgccccagcagcagcacaaggttagccccgctagcgaaagccctttctccgaagaagaatcacgcgaattcaaccccagcagctccggacggtcagcacgcacagtcagttcgaacagtttctgtagctag

SEQ ID NO: 243188 - DNA, 222 bp, synthetic construct
  misc_feature 1..222: note = Description of Artificial Sequence: Synthetic coding sequence
  source 1..222: mol_type = other DNA
atgggcccacttcgggagagtaagaaggaacacagggtacagcatcacgataaggaaatttcccggtcccgcatcccccgactgatcctccgccctcacatgccacaacaacaacacaaagtaagtcctgctagcgagagtccgtttagtgaagaggaatctcgggagttcaatccatcctctagcggaagaagtgccaggactgtttcgtcgaactcttag

SEQ ID NO: 243189 - DNA, 378 bp, synthetic construct
  misc_feature 1..378: note = Description of Artificial Sequence: Synthetic coding sequence
  source 1..378: mol_type = other DNA
atggtcggagaaggttcaatacaaagttctcgctacaagaaggaatctaaatcaggattggtgaaaccaggctctgaggctgatttctcatcatccagctccaccggctccattagtgccccagaggtgcatatgtcgacagccggtagcaagaggagctctagctctagaaataggggacctcacggtcgatccaatggagccagttcccacaagccgggatcctcaccttctagccccagggaaaaggacctgctcagcatgctgtgtagaaatcagttgagccctgtgaatatccatccatcatatgcaccttcctctccatcatcctccaattcaggctcctataagggatctgactgttcaccaattatgtag

SEQ ID NO: 243190 - DNA, 1635 bp, synthetic construct
  misc_feature 1..1635: note = Description of Artificial Sequence: Synthetic coding sequence
  source 1..1635: mol_type = other DNA
atggttggagagggctccattcagagtagcagatacaagaaggaaagcaagtccggcctagtgaagcccggtagcgaagccgatttctcctcgtcctccagtactggatcgattagcgctcctgaggtgcatatgtccactgccggatcaaagcggtcatcttcttctagaaaccgaggacctcacggaagatcaaacggagctagctctcacaagccaggctcttcccccagctcaccaagggaaaaagatttattatcaatgctatgccggaatcagctcagtcctgtgaacatccatccgagctatgcaccttcatccccttctagttccaactcaggcagctacaagggatctgattgttccccaattatgagaagaagtggtcgctatatgtcctgtggtgaaaaccacggggttcgccctcccaaccccgagcaatacctcactccactgcagcagaaggaggtgaccgtgagacatctgaagacgaagttaaaagaaagtgaacgtcggctgcatgaacgggagtcagaaattgtcgaactcaagtcccagctggcaagaatgagagaagattggattgaggaggagtgccatagagtggaggcacagctggctctgaaggaggctcgcaaggagatcaaacagctaaagcaggtcatcgagaccatgcgcagttcgcttgctgataaggacaaaggaattcagaaatatttcgttgacattaacattcagaataaaaagctagagagcctattgcaaagcatggagatggcacattctgggtctctgagggacgagctctgcctggattttccctgcgattccccagagaaaagcttgaccctgaatccaccattggataccatggccgacgggctctccttagaagaacaagttaccggggagggtgcagatagggagctgttagtgggggactctatagccaattcgaccgacctgtttgatgagatcgtcaccgcaaccaccacagaaagcggagatttggagttagtgcacagtactccgggagccaatgtgctggaactactgccaattgttatggggcaagaggaggggtccgttgtcgtggaacgggcagtccagaccgatgtggtgccatatagtccagccatttctgaattaatccagtcagtcctacaaaagcttcaggatccgtgtccgagtagtctggcgagtcccgacgaatcagagcccgatagcatggaatcgttccccgagagtctctcagccctggttgtggatttgactcctcgcaatcctaactctgcaatactgttgtcacccgtcgaaaccccgtatgctaatgtcgatgcagaagtacacgcaaatcgtctgatgcgggagctggactttgccgcttgcgtcgaggagaggctggatggcgttatccccctggcaagaggcggagttgttcgccagtactggtcgtcgtctttccttgtcgaccttttagctgtggctgcgcctgtggtaccaaccgtgctgtgggccttttctacacagcgcggaggaaccgatcccgtctacaatatcggcgctctgctgcggggttgctgcgtggtagccctgcattcgctccggagaaccgcctttaggatcaagacctag

SEQ ID NO: 243191 - DNA, 243 bp, synthetic construct
  misc_feature 1..243: note = Description of Artificial Sequence: Synthetic coding sequence
  source 1..243: mol_type = other DNA
atggtgggcgagggaagcatccagtcaagccggtacaaaaaagagtccaaaagcggactcgtcaaaccgggtagtgaagcagacttcagcagcagctcgtcgactgggagcatctccgcaccggaggtgcacatgtctaccgcagggtccaaaaggtcttcatcctcccggaatagaggaccacatggcagaagcaatggcgcttcatcccacaagcctgggagttcaccttcatctccttag

SEQ ID NO: 243192 - DNA, 1989 bp, synthetic construct
  misc_feature 1..1989: note = Description of Artificial Sequence: Synthetic coding sequence
  source 1..1989: mol_type = other DNA
atgggtcctttgcgggagtctaaagaacatcgagtgcagcatcatgataaagagatatcgcgctcccgaattcctaggctcattctgcgcccacacatgccacagcaacagcacaaggtctctccagccagcgagagccccttttccgaagaagaatcccgagagtttaatccttcaagtagcggacgtagtgctaggacagtctcaagcaactccttttgttctgatgacacagggtgccccagttcccagagcgtgtccccagtcaagacgcctagtgatgcaggcaattcgcctatcggattttgccccggatcagatgaaggcttcacccggaaaaagtgcacaatcgggatggtaggagaagggagtattcaaagctcccgttacaagaaggagagtaagtctgggctcgtgaagccgggttctgaggccgatttttccagcagtagcagcactggcagcatctccgcaccggaggttcatatgagcacggcaggtagcaaacgcagttctagcagtcggaaccggggtcctcatggaaggtcaaacggagccagctctcacaaaccgggatcttcacctagcagccccagggaaaaggatctactcagcatgctctgccggaaccagctttcaccagtaaacatccatccatcctatgccccaagttcgccctccagctctaactccggtagctacaaggggtcagattgctccccgattatgagacggtccggcaggtatatgagttgtggggagaaccatggcgtgcggccacccaaccctgaacagtatttgacgcctctacaacagaaagaggtgactgttcggcacctgaagacgaagttaaaagagagcgagcggaggttgcacgagcgcgagagcgagattgtcgagctgaaatcccagctcgcccgtatgagggaggactggatcgaggaggaatgccatcgcgtggaggctcagctggccttgaaggaggcgaggaaggagattaagcagctcaagcaggttattgagaccatgcgctcctcactggctgacaaagacaaaggcatacagaaatattttgtggatattaacattcagaacaaaaaattggagtcactgttgcagtctatggaaatggcccactctggcagtcttcgcgatgagctatgtctggattttccctgcgactccccagaaaagagcctgacacttaatcctcccctggacaccatggcggatggactgtcactggaggagcaggtgaccggcgaaggcgctgacagagaacttcttgtgggagatagtatcgccaatagtaccgatttgtttgatgagatcgtgactgccacgacgactgaatccggcgatctggaactggtccatagtactccgggagctaacgttttggagctcctgcctatcgtgatgggccaggaggaaggctccgttgtagtcgagcgcgcagtacagaccgacgtagtgccctactcgcccgctattagcgagttaattcagtcagtccttcagaaattacaggacccttgtcccagttccctggctagccccgacgaaagcgagcctgattcaatggaatcattcccagagtccctgtcggcacttgtagttgatctgacaccgaggaaccccaattccgcaattcttctctccccggtggaaacaccgtatgctaacgtggatgctgaggtccatgcaaaccgattgatgagggaactggacttcgcggcttgcgtagaggagcgtttagacggagtgataccactcgctaggggaggtgtggttaggcaatattggagtagcagtttccttgtcgatctgctcgccgtggccgcaccagtggtgcccacagttttgtgggcttttagtactcagcggggaggcaccgatccggtgtacaatatcggcgctctgctgaggggctgttgcgtcgtggcactccacagcctccggaggaccgcctttaggatcaagacctag

SEQ ID NO: 243193 - DNA, 288 bp, synthetic construct
  misc_feature 1..288: note = Description of Artificial Sequence: Synthetic coding sequence
  source 1..288: mol_type = other DNA
atggggcctttacgagagagtaagaaggagcatcgggtgcagcatcacgacaaagagatctcaaggtctaggatcccccgattaatcttacgccctcacatgccacaacagcagcataaagtgtctccagcttccgagtctcccttctccgaggaagagtccagagaattcaatccttccagttcgggtcgtagcgctcgcactgtgagctccaactctttctgcagcgacgataccggctgtccatcctcccagagcgtgtctcctgttaagactcccagcgactag

SEQ ID NO: 243194 - DNA, 615 bp, synthetic construct
  misc_feature 1..615: note = Description of Artificial Sequence: Synthetic coding sequence
  source 1..615: mol_type = other DNA
atgggcccactccgagaatccaaggagcatcgtgtccagcaccatgataaggagatatcacgcagcaggatcccacgcctcatcttgcggccacatatgccccagcagcagcacaaggtttcacctgccagtgagtcgccttttagcgaagaagaatcgcgtgagttcaacccatcatccagcggccgatctgcgagaacagtctcctcaaattcgttttgcagtgacgacactggatgtccttctagccagtctgtttcacctgtaaaaacccctagtgatgcgggtaacagccccattggcttctgtcctggctcagatgagggatttactcgcaagaaatgcacaattggcatggtcggtgaaggctcaatccagtcctctaggtacaaaaaggagtccaaatccgggctcgtaaagcctggctccgaagccgatttctcatcctcctcctccacggggtcaatctcagcccctgaagtacatatgagcacagctggcagcaaaagatcctcatcatctcgcaacagagggcctcatggccgttcgaatggagccagcagccacaagcccggatcaagcccctccagtcctagggagaaagacctactctag

SEQ ID NO: 243195 - DNA, 108 bp, synthetic construct
  misc_feature 1..108: note = Description of Artificial Sequence: Synthetic coding sequence
  source 1..108: mol_type = other DNA
atggtcggggagggatcgatccagtcaagtcgctataaaaaggagtcgaagtccggactggtcaaacccggttccgaagcagacttctcctccagctcgtctacttag

SEQ ID NO: 243196 - DNA, 105 bp, synthetic construct
  misc_feature 1..105: note = Description of Artificial Sequence: Synthetic coding sequence
  source 1..105: mol_type = other DNA
atggtgggagaaggctccatccaaagcagccggtacaaaaaggagtccaagtcgggcttggttaaaccaggttctgaagccgatttttcatcttcctccagttag

SEQ ID NO: 243197 - DNA, 243 bp, synthetic construct
  misc_feature 1..243: note = Description of Artificial Sequence: Synthetic coding sequence
  source 1..243: mol_type = other DNA
atggtcggggaaggttccattcagtcatccaggtataagaaagagagtaagtctggcctcgtaaagcccggtagtgaagccgacttcagttctagttcttcgacaggctctatcagcgccccagaggtccatatgtccacagccggaagcaaaaggtctagctcatcaagaaatagagggccacatggacgatcaaatggcgcttccagtcataagccaggatccagcccatcttctccttag

SEQ ID NO: 243198 - DNA, 1788 bp, synthetic construct
  misc_feature 1..1788: note = Description of Artificial Sequence: Synthetic coding sequence
  source 1..1788: mol_type = other DNA
atgggccctttttgggcaaggaaggatgacaccgggtgtcctagtagtcagtctgtgtcccctgtgaagactccaagcgatgctggcaactctccaatcgggttttgtccagggagcgatgaggggttcactcggaaaaaatgtactataggcatggttggtgaaggctctatacaatcaagccggtacaaaaaggaatcaaagtcaggtcttgtgaagcctggttccgaggcggacttttcaagctctagttctaccggaagtatatcagccccagaggttcacatgtccaccgccggtagcaagaggagctcttccagtcgtaataggggacctcatggaaggagtaacggggcttcttcacacaaacctgggtctagcccttcctcaccacgcgaaaaagatctgctatctatgctctgtaggaatcagctaagccccgtgaacatccacccttcctacgcaccctcaagcccatctagctctaatagtggctcatacaaaggttccgattgttcaccgattatgcggcgtagcgggagatacatgtcatgtggagaaaatcatggtgtcaggccacctaatcctgaacagtacctgacgcctttgcagcaaaaagaggtgacagtacgtcacctcaagactaagctgaaagaaagcgaaaggcgcttgcatgagagggaatctgagatcgttgaactgaagtcccagctggccagaatgcgcgaggactggattgaggaggaatgtcatagagtggaagcccagcttgccctgaaggaagctaggaaggagatcaaacagttgaaacaggtcattgaaaccatgaggtctagtctggccgataaagataagggcattcagaagtacttcgtagatatcaacatccaaaataaaaagctcgagagcctgctccaatctatggagatggcccatagcggcagtttgcgcgacgagctttgtctcgattttccgtgcgacagtcctgagaaaagtttaacactgaacccacctctcgacaccatggctgacggactatcattggaagaacaggtgacaggcgaaggcgcagatcgcgagctgttggtgggcgactcaatcgcaaactcgacagatctttttgacgaaattgtcaccgctactaccacagagtcgggcgacctcgaactggtccactccacgccaggcgctaatgtgttggagttgctgcccatcgttatgggccaagaggagggaagcgttgttgtcgagcgagccgtgcagacggatgtggtgccttactcaccagctatatccgagctgatccagagtgttctccagaagctgcaagacccttgcccctcaagtctagcatctccagacgaatcggagcctgattcaatggagagttttcccgaaagcctgtcagcattagttgtggacttaacccccagaaatcctaactctgccatcctcttgagccccgtggaaacaccatatgccaatgtggacgcggaggttcacgctaacaggcttatgcgcgagctagattttgctgcctgcgtggaagagagactcgatggggtcataccacttgcgagagggggagtggtgaggcagtactggagcagttccttcctggtggacctactggccgttgccgctcctgtggtacccacagttttgtgggcattctcgactcaacgcggagggacagaccccgtctataacatcggcgctcttcttaggggctgttgcgtagtcgcgctgcacagcctgagacgcacggcattccggataaaaacttag

SEQ ID NO: 243199 - DNA, 1635 bp, synthetic construct
  misc_feature 1..1635: note = Description of Artificial Sequence: Synthetic coding sequence
  source 1..1635: mol_type = other DNA
atggtgggtgaaggctctattcagagctctaggtacaagaaagaatccaaaagcggattggttaaacccggaagtgaggctgattttagttcctcttccagcacggggtcgatcagtgccccagaggtgcatatgtcgactgctgggagcaagcggagtagttccagcaggaatcgtggcccacacggccgttccaacggggcatcatcccacaagccaggatcatctccatcttcacccagggagaaagatctgctatcaatgctgtgcagaaaccagctgtcacctgttaatattcacccatcttacgcaccctcttcacccagcagcagcaattccggcagctacaaggggagcgattgctcacctatcatgcgcagatcaggcagatatatgtcctgcggagagaaccacggtgttagacctcccaacccggaacagtacttaacccctttgcagcaaaaagaggtcaccgttaggcatctgaaaacaaaactgaaagagtccgagaggaggctccacgagagggaatctgagatcgtggaactgaagtcccagctggcacgcatgcgcgaggactggatcgaggaggagtgtcatagagtcgaggctcagctcgcactcaaagaagcaagaaaagagattaagcagttgaagcaagtaatagagacgatgcgcagttcactagctgacaaagacaaggggatccagaagtacttcgtcgacataaacattcagaataaaaagctggagtccctgctccagtctatggaaatggcccactcaggcagtctgagagacgagctatgccttgattttccttgtgatagtccggagaagagcctgacgttgaacccgccactcgacacaatggccgatggactctccttggaagagcaggtgacgggcgagggtgctgatcgcgaattacttgtcggtgacagcatagcaaatagtacagatctttttgatgagatcgttacagcaacgaccaccgaaagcggcgatctggagctggtccactctacccccggagctaacgtcctggagctcctgccaattgtgatgggccaggaggaaggctccgtagtagtcgagcgggctgttcagactgacgtagtgccatattctcctgcaatttcggaactgatccagtctgttctccagaagcttcaagacccctgcccatcaagcctcgccagccccgacgagagtgagcctgatagtatggagagcttccccgagtctctatcagctcttgtggtggacctgaccccacgtaatccaaattcagccattcttttgagtcccgtcgagactccatatgccaacgtcgacgctgaagttcatgcaaaccggcttatgcgggagctagattttgccgcttgcgtggaggaacggctggatggggtgatcccattggcacgtggcggtgtcgtaaggcagtattggagcagctctttccttgtggacctcctggctgtcgccgctcccgtcgtccccaccgtcttgtgggccttcagcacgcagaggggaggtactgacccggtatataatatcggcgctctgttaagaggatgctgtgtcgtcgcgctccactccctccgacgaacagccttccggataaaaacatag

SEQ ID NO: 243200 - DNA, 1992 bp, synthetic construct
  misc_feature 1..1992: note = Description of Artificial Sequence: Synthetic coding sequence
  source 1..1992: mol_type = other DNA
atgggcccattgcgtgaatccaaaaaagagcaccgtgtgcagcaccacgacaaggagatcagtcggagtcgaatcccaaggcttattctaaggccccatatgcctcagcagcagcacaaggtcagtccagccagcgaatcgccattttccgaagaagagagtcgcgaattcaaccccagctcttctggaagatctgcccgaacagtgtcttctaattctttttgttcggacgataccggctgcccttcttcgcagagcgtgtcccccgtgaagacaccttctgacgctggcaattctcctataggcttctgcccgggatcagatgagggtttcaccaggaaaaagtgcaccattggtatggtaggtgaaggctcgattcaatcttcacgatacaaaaaggaaagcaagtctggccttgtcaagccaggcagtgaggctgacttttcttcatcctcgtctaccgggtctatttcagcgccagaagtccatatgtccaccgccggatccaaaagaagtagctcctcacggaacagaggaccccatggtcgtagtaatggcgcttctagccacaaacccggttcaagtccttcttctccgcgagaaaaggacctgcttagtatgttatgccgcaaccagctttccccagttaatattcacccatcttatgctccatccagtccatcctcttcaaactctggctcatacaaagggagcgattgttcccccatcatgcgtcgaagcggcaggtatatgtcttgcggcgaaaatcacggagtccgaccaccgaaccctgaacagtacttaactccattacagcagaaggaagtaacggtcaggcatcttaagaccaaactgaaagagagcgagagacggcttcatgagagggaatccgagatcgtagagctgaagtcacagctggccaggatgcgagaagactggatcgaagaggagtgccatcgagtggaagcccagctagccctgaaggaggcacggaaagagataaaacagcttaaacaggtaatcgagacaatgaggtcgtctttggctgataaggacaaaggcattcaaaagtacttcgtagatatcaacatccagaacaaaaagctcgagtccttactgcaatccatggaaatggctcattccgggtcgctccgagatgaactctgtctggacttcccatgtgactctcctgagaagagtctgaccctcaacccacctctggacactatggcagacgggttgtccctggaagagcaagtgaccggcgaaggcgcagaccgggagctcctggttggagactctatagctaattctaccgacctgttcgatgaaatagtaactgccaccaccaccgagtccggtgacctcgaattggtgcacagtacacccggagctaatgtgctggaactactgcccatcgtgatgggccaggaggaggggagcgtggtggtggagagagccgtgcagactgacgttgtcccctactctcccgctatatccgaattaattcagtcggtgctccaaaagttgcaggatccatgtccctcctcgctcgcatctccagatgaatcagagcccgactccatggagtcctttcctgagtcgctatccgccttagtggttgatttgacgcctcggaaccctaactccgcgatcctgctctcgcctgtggaaacaccttatgctaatgtcgatgccgaagtacacgctaaccgcctgatgcgggagctggactttgccgcatgcgtggaggaacgcctcgacggcgttattcctctggccagagggggagttgtccgccagtactggtcctcgtcattcctcgtggacctcctcgcagttgccgctccagtcgtgcctaccgtcttatgggccttcagtacccagcggggaggcaccgatcctgtttataatataggcgcactactccggggatgttgtgtcgttgccctgcattcactgaggaggacagcattccgtataaagacatag

SEQ ID NO: 243201 - DNA, 489 bp, synthetic construct
  misc_feature 1..489: note = Description of Artificial Sequence: Synthetic coding sequence
  source 1..489: mol_type = other DNA
atggggccattgagggaaagtaaagaacacagagtacagcaccatgataaggagatttcgaggtcccgcatccctcggctgatccttcggccacacatgccacagcagcagcacaaggtctctccagctagtgaaagcccattcagtgaggaagagtccagggagttcaatccatcaagcagcggcaggagtgccagaacagtgtccagcaactcattctgttctgacgataccggatgtcctagcagccaaagcgtttcccccgtgaagactccatccgacgcgggaaatagtcccatcggattctgcccaggatctgacgagggcttcacccgcaagaagtgtacaatcggaatggttggtgagggcagcattcagtcgagccggtacaagaaggagtctaaatctggcctggtcaagcccggatctgaagccgacttcagctcctctagctctactggctctattagcgcaccggaagtccactag

SEQ ID NO: 243202 - DNA, 1989 bp, synthetic construct
  misc_feature 1..1989: note = Description of Artificial Sequence: Synthetic coding sequence
  source 1..1989: mol_type = other DNA
atggggcctttgcgtgagtccaaagaacaccgggtgcagcatcatgataaggagatatcccggtcaaggatccccagactgatcctcagaccccacatgccccagcagcagcacaaggtgagcccagcctcagaaagtcctttctcggaagaagaaagccgcgagttcaacccaagctcatccggcaggtcagccaggacagtgtcatccaattcgttttgctcagatgacactggttgtcccagctctcaaagcgtgtctcctgtgaagactccaagcgatgctggaaattctcccatagggttttgcccagggagtgacgaagggttcacgagaaagaaatgcaccattggtatggttggggagggctctattcagtccagccggtataagaaggaaagcaagtccggattggtgaaacccggatccgaggccgatttctcatcctcaagtagtactggcagtatcagcgctcccgaagttcatatgagcacagccggtagtaaacgcagctccagctccaggaacagagggccacatggtagatccaatggagcatctagccacaagcccggaagcagtccgtcaagcccccgtgaaaaagacctgctgagtatgttgtgtcgaaatcagctatcaccagtgaatattcaccccagttacgcaccaagcagtcccagcagttctaattccggcagctacaagggctctgattgcagccctattatgaggaggagcgggcgatatatgtcttgcggagagaaccacggcgtgaggccgcctaaccccgaacagtatctgacgccactccagcaaaaagaggttacagtgcgccaccttaagaccaaactgaaggaaagcgagaggcggctgcatgagcgagagagcgagattgtggagctgaagagccagctggccagaatgcgtgaggactggattgaggaagaatgtcacagggtggaggcccaattggccctgaaggaagctcgaaaggagattaagcagctcaagcaggtgatcgaaactatgcggtctagcctagcggacaaagataaaggaatccaaaaatacttcgtggatatcaatatacagaacaagaaactcgagtctctactgcagtctatggagatggctcactccggtagcctgcgtgacgagctctgtcttgacttcccgtgtgacagtcccgagaagagcctgacactcaaccctccactggacacgatggctgatgggctctctttggaggagcaggtaacgggcgaaggtgcagatagagaattgctcgtgggagactctatcgcaaatagtaccgatttgtttgacgaaatcgtgacagctacaaccaccgagagcggcgacctggagctcgtgcactccaccccgggtgccaacgtcctcgaactgctccctatcgttatgggtcaggaggaagggagtgtggtcgtggaacgcgcagtccagactgatgtggtgccatactcccccgcaattagcgaactgatacagagcgtcctgcagaagctgcaagacccgtgtccaagtagccttgcatctccagacgaaagcgaaccggactctatggaatccttccccgaaagcttatcggctcttgtagttgaccttacacctagaaacccaaacagcgccattcttttgagccccgtggaaacaccctacgctaatgtcgacgctgaggtgcacgccaatcgactaatgagagagttggactttgctgcgtgcgtagaggagcggctcgacggagttatccctctggcccgaggaggcgtcgttaggcagtactggtcctcatcgtttctggtcgacctcctggccgtcgccgcaccagtagttccaacagtcctttgggcgttttctacacaaagggggggtacggacccagtctacaatatcggcgctctcctgaggggctgttgtgtcgtcgccttacacagcctgcgcaggacagcgttccgcattaagacttag

SEQ ID NO: 243203 - DNA, 315 bp, synthetic construct
  misc_feature 1..315: note = Description of Artificial Sequence: Synthetic coding sequence
  source 1..315: mol_type = other DNA
atgggcccactgcgggagtctaaggagcacagagtgcagcaccatgataaggaaattagtcggagcagaattccacgccttattctcagaccccatatgccccagcagcagcataaagtctcgcccgcaagcgaaagccctttctctgaggaggagtctagagaatttaacccatccagctcagggagatctgcgagaacagtttcttcaaactccttttgttccgatgacactgggtgtccctcctcccagtccgttagccctgtaaaaacccctagtgacgccggaaactcccccatcggcttctgtccctag

SEQ ID NO: 243204 - DNA, 456 bp, synthetic construct
  misc_feature 1..456: note = Description of Artificial Sequence: Synthetic coding sequence
  source 1..456: mol_type = other DNA
atgggacccctgagagagagtaagaaagaacatagagtgcagcatcacgacaaggagatctctcgctcaaggattcctagactcattctgcgaccccatatgccccagcagcaacataaggtgtctccagcaagcgagagtccctttagcgaggaggaatcccgtgagttcaatccatccagttcagggaggtccgccagaactgtttcttcaaactcattctgttctgacgacacgggttgcccctcttcccagagcgtcagccctgtgaagacacctagcgatgccggaaattccccaataggcttctgtcccggtagtgatgaaggattcaccagaaagaaatgtactatcggcatggtaggggagggttccatccaatcaagtaggtataaaaaggaaagcaagtctgggttggtgaagcctgggtcagaggcagatttctctagctcttag

SEQ ID NO: 243205 - DNA, 231 bp, synthetic construct
  misc_feature 1..231: note = Description of Artificial Sequence: Synthetic coding sequence
  source 1..231: mol_type = other DNA
atggggccattgcgcgaatccaagaaagaacatcgcgtgcagcatcatgataaggagatttcccgcagtcggatacctagactgattttaagaccacacatgccacaacagcagcacaaggttagtcccgctagcgaatcaccattttctgaggaggagagccgagaattcaacccctctagctctgggaggagtgctcgaactgtgagttccaatagtttttgtagctag

SEQ ID NO: 243206 - DNA, 1617 bp, synthetic construct
  misc_feature 1..1617: note = Description of Artificial Sequence: Synthetic coding sequence
  source 1..1617: mol_type = other DNA
atgcccggaagcggcccatctgagcgcatgacttggccgggacccgcattgagcgcaggccctcctacacgccctctgagcagcgccccaggtatcccccctattccccctctcacacgcacccacagtctgatggctatgtcactgccaggtagtcggcgaacctctgcgggttctagaagacggactagccctccagtgtcagtaagggatgcctacggcacctcctcactttcgagctcttctaacagcggttcgtataaaggaagcgatagctcccccacgcccagaagaagcatgaaatacactctttgttcagataaccacgggatcaaacccccaacccccgaacagtacctgacccccttgcaacagaaggaagtctgtattaggcacctgaaagctcgcctgaaggacacacaagacagactccaggatcgggatacagaaattgatgacttgaaaactcagcttagccgcatgcaagaggactggatagaggaggagtgccaccgcgtggaggcccagctggccctgaaggaagccagaaaggaaattaaacagctcaaacaggtgatcgacacagtgaagaacaacttgatcgacaaggacaaaggcttacagaaatattttgttgacattaatatacagaataagaagctggagactctgttgcattccatggaagtcgcgcagaatggtatggccaaggaggacgggacaggagagtccgctggcggaagtccagccaggtccctaacacggagctccacatacactaaactgagcgacccggctgtgtgcggcgatagacagccaggggaccccagttccggcagtgccgaagacggcgcagatagcggcttcgccgctgccgatgacaccctgagccggaccgacgctctggaggcgtcatcactcctttcgagcggagtggactgcggtaccgaagaaacatccctgcactcttcctttgggcttggcccacgttttcctgcatccaatacttatgaaaagctactgtgcggcatggaagctggtgtgcaggcctcgtgcatgcaggagagggctattcagaccgacttcgttcagtaccagcctgatctagacacaatactcgaaaaagtgacccaagcacaagtgtgcggaacagacccagaatccggggaccggtgccccgagctggatgcccatccttcaggcccaagggatcctaattctgcagtggtggtgacagttggcgacgagctcgaagcgccagagccaatcacacggggaccaacgccccagagacctggcgctaaccccaacccaggtcagagtgtgagtgtcgtttgtccgatggaagaggaagaggaagccgcagtggcggaaaaggaaccaaaatcatactggtctcggcactacatcgtagacttactggctgtggtagtgccagccgtcccaactgtggcctggctatgtaggagccagcggcgtcagggacaacctatatacaatatatccagcctgctacggggttgttgtactgtggccttacattccattaggcgaatttcgtgtcgcagcctgagccagccttcacccagccctgccggaggaggttctcagttatag

SEQ ID NO: 243207 - DNA, 1485 bp, synthetic construct
  misc_feature 1..1485: note = Description of Artificial Sequence: Synthetic coding sequence
  source 1..1485: mol_type = other DNA
atggccatgagcctacccggttcccggaggactagcgctggttctcggcgaaggacatccccacctgtgagcgtgcgagacgcctacggcacctcttctctcagcagttcttctaactcaggttcttacaaaggaagtgacagtagtccaactcccaggcgatccatgaagtatactctgtgttctgataaccatggtatcaaaccaccgactccagagcagtacctgacccctctgcaacaaaaggaggtctgtatcagacatctgaaggcaaggcttaaagatacccaggaccggctgcaagaccgagacactgaaattgatgatttgaaaacccagttgtcacgtatgcaggaagattggatcgaggaggagtgtcacagagtcgaagcccaactggctcttaaagaggccagaaaggagattaaacagctcaagcaggtcatcgatacggtgaaaaacaacctgatcgacaaggacaaaggcttacaaaagtacttcgttgacatcaacattcagaataagaagttggaaacgctattacactcaatggaggtggctcaaaacggcatggccaaggaggatgggacaggcgagagcgccggtggatctcccgctcggtctttaacccggtcttccacttataccaaattgtcagacccggctgtctgtggcgaccgacagccgggagatccttcttctggcagcgccgaagacggtgctgacagtgggtttgcagctgcggacgacactttgtctagaactgacgcgcttgaggcgagtagccttttaagcagcggagtggactgtggtaccgaggaaacgagtttacatagcagctttggattgggcccacgatttcctgccagtaacacctacgaaaaacttctatgtggcatggaagctggagtgcaagccagctgcatgcaggaacgggcaattcaaacggacttcgtccagtaccagccagacctggacacaatcctggaaaaggtcactcaggcacaagtctgcggaaccgatccagagagcggggacagatgcccagaactggacgctcatccatctgggcctagggaccctaacagcgctgtggtggtgacggtgggagacgagctcgaggcgcctgaacccattaccagaggacccacacctcagagacccggagccaacccaaacccaggacagtcggtgtccgtggtgtgtcccatggaggaagaagaagaggcagcagtggcggagaaagagcccaagtcttattggtcacgacactacatcgtcgatctgctcgctgtggtagtgcccgcagtccctaccgtcgcatggttgtgtcgatctcagagacgacaaggccagccaatttataatatcagttctctactgaggggctgttgcacggtagcgttacactctatccggcgtattagctgccggtccttgagccagccaagcccctcacccgctggaggcggaagtcaactatag

SEQ ID NO: 243208 - DNA, 864 bp, synthetic construct
  misc_feature 1..864: note = Description of Artificial Sequence: Synthetic coding sequence
  source 1..864: mol_type = other DNA
atgaaggataggttggcagagctgctggatctttcaaaacaatatgatcagcagttccctgacggagatgacgagtttgatagccctcacgaggatatcgtctttgaaacagatcatattttggagtccctgtaccgcgacatccgtgatatacaagatgaaaatcagctgctggtggcggatgtgaagcggttggggaaacagaacgcacgcttcctcacctcgatgcggaggctgtctagcatcaaacgggacacaaactccatcgcgaaagcgattaaagcaagaggtgaagtgatccattgcaaactgcgggctatgaaagagttgagtgaggccgctgaagctcagcacgggccacattccgctgtcgcccgtatcagtagagcccagtacaatgcccttaccttaacattccagagagcaatgcacgactacaaccaggcagagatgaagcaacgggacaactgtaagattaggatccagagacaattggaaatcatgggtaaggaggtctcaggagaccaaattgaggacatgtttgagcaaggaaagtgggatgtttttagcgaaaatctgctggcggatgtgaaaggtgcaagggctgctctcaatgagatagaatctaggcaccgagagctgcttcggcttgagtcacggattagagacgtgcacgagctttttcttcaaatggccgtcctcgtcgagaaacaggcggacaccctcaacgtgatcgagttaaatgtgcaaaaaacagttgactataccgggcaggccaaggctcaggtacggaaagccgttcagtatgaggagaaaaatccttgcaggaccctctgttgcttttgctgcccttgtctaaaatag

SEQ ID NO: 243209 - DNA, 615 bp, synthetic construct
  misc_feature 1..615: note = Description of Artificial Sequence: Synthetic coding sequence
  source 1..615: mol_type = other DNA
atggctcttgtttcaggtattagcctcgatccagaggcagccattggagtcaccaagaggcctccgccaaagtgggtagacggcgtcgacgagattcaatacgatgttggcaggatcaaacagaagatgaaggaattagcctctctccacgacaaacacctgaaccgccctacgctggacgatagctctgaggaagagcacgcgatcgaaatcaccacacaggagatcacacagctattccacaggtgtcagcgcgcagttcaagccctgccctctcgggctcgagcgtgttcagaacaggagggcaggcttctaggcaatgtcgtagcgagcctggctcaggccctgcaggagctgagcacatcgtttagacatgcacagtctggatacctcaagcggatgaagaatcgggaggagcgatcgcagcatttcttcgatacaagcgtgccactaatggatgacggggatgacaatacactgtatcatagaggattcaccgaagatcagctggtactagtggaacaaaatactttaatggtcgaagagagagagcgggagatacggcagattgtgcagtcgattagtgatcttaacgaaatctttcgggatctctag

SEQ ID NO: 243210 - DNA, 927 bp, synthetic construct
  misc_feature 1..927: note = Description of Artificial Sequence: Synthetic coding sequence
  source 1..927: mol_type = other DNA
atggccacgagaagacttacagatgcctttctactgttaaggaataatagtatccaaaacagacagcttcttgcagaacaggagttggacgagttggctgacgacaggatggctctcgtgtccggcattagccttgaccccgaggcagcgatcggagtgactaaacggcctcctccgaaatgggttgatggagtggacgagatccagtatgatgtggggaggatcaaacagaaaatgaaggagctggcttccctgcatgacaaacatcttaaccgccctaccctagatgactcctccgaagaagaacacgcgattgagatcaccacccaagagattacacagctattccaccgctgccagcgggcagtgcaggcactgccctctagggctcgtgcttgcagtgaacaggaaggccgactgctgggaaacgtcgtggctagtctagctcaagccttacaggaattatccacgtcttttcggcatgcgcaaagcggctacctaaaaaggatgaagaaccgggaggagcggagccagcatttcttcgatacctctgttcccttgatggacgacggtgacgacaatacgttgtaccaccgaggcttcactgaggatcagctggtgctggttgagcagaataccctgatggttgaggaacgagaaagagaaattaggcagattgtccaatcaatcagcgacttgaatgaaatattccgagacctgggcgcaatgatcgtggaacaaggaactgtgttggaccgtattgactataatgtggaacagtcgtgtattaagactgaggatggattaaaacagttgcacaaagctgaacaataccagaaaaagaaccggaagatgctcgtaattttaattctgtttgtgatcataatcgtcctgattgtcgtgctggtcggagttaaatctcggtag

SEQ ID NO: 243211 - DNA, 966 bp, synthetic construct
  misc_feature 1..966: note = Description of Artificial Sequence: Synthetic coding sequence
  source 1..966: mol_type = other DNA
atggcaaccaggcgcctcactgatgcatttctgttgctgcggaataacagcatccagaacaggcagctgcttgccgagcaggtgtcttctcatattacttcctcccccttacactctcgttcaatagctgctttagccgatgaccgcatggcactcgtttccggcatctccctggacccagaggctgccattggcgttaccaagcgtccaccccctaaatgggtggacggcgtcgacgaaatccaatacgacgtcggcaggatcaagcaaaaaatgaaggaactggcatcgctacatgacaagcatctcaatagaccgaccctggacgactctagcgaggaggaacatgctatagagatcacaacacaggaaatcacccagcttttccatagatgccaaagagctgtacaggctcttccctcaagggcacgcgcatgcagcgagcaggaagggaggctacttgggaatgtagtggcttcacttgcacaggcactgcaggagctgtctacctcttttcggcatgcccagtccggctatctgaagagaatgaagaatcgcgaagaaagatcgcagcacttctttgataccagtgtgcctctaatggatgacggtgatgataacactctctaccatcgcggattcacagaagaccagctcgtcttggtggagcagaacacactgatggtcgaagaacgagagagggaaataagacagatagtacagagcatcagtgatttgaacgagatctttagagatctgggtgccatgattgttgaacagggtactgtgctggacaggatagattacaacgttgaacaaagttgtattaagactgaggatggattaaagcagctgcataaggcagaacagtatcaaaagaagaatcggaagatgcttgttattctgatcctgtttgtgatcatcattgtgttgattgtcgtgttagttggcgtcaagagccgctag

SEQ ID NO: 243212 - DNA, 756 bp, synthetic construct
  misc_feature 1..756: note = Description of Artificial Sequence: Synthetic coding sequence
  source 1..756: mol_type = other DNA
atggcgctagtgtcaggtatttctctagaccccgaagccgcaatcggtgtcactaagcgaccgcctcccaagtgggtggacggagtggacgaaatacagtacgatgtcggcaggattaagcagaagatgaaagaattggcctctttgcacgataaacacttgaatcgtcctacactggatgactcttccgaagaggagcacgccattgagataacgacacaggagatcacccagctctttcacagatgtcagcgggctgtccaggcactaccaagccgtgctagagcttgtagcgagcaagaggggcgattgctggggaacgtcgtcgcttctctagcccaggccttgcaggagttatcaacatccttcagacatgctcagtcaggttaccttaagcgcatgaaaaaccgcgaggagcgcagtcagcacttctttgatacttctgtgcctctgatggacgacggtgacgacaataccctgtatcataggggcttcacggaagaccagttggtccttgtggaacagaatacgttgatggtggaagagagggaaagagagattcggcagatagtgcagtcaatcagcgatctcaacgagatattccgcgacctgggagccatgatcgtggagcaggggacagtgctggacaggatcgattataatgtcgagcagtcttgtattaagaccgaagacgggctcaagcaacttcacaaggctgagcagtaccaaaagaaaaataggaagatgttggtctag

SEQ ID NO: 243213 - DNA, 927 bp, synthetic construct
  misc_feature 1..927: note = Description of Artificial Sequence: Synthetic coding sequence
  source 1..927: mol_type = other DNA
atggcaacacggcgacttacagacgcattcctgctcttgcgcaataactccattcaaaaccggcaactgctcgcggagcaacagctcagcaagctggccgatgatcgaatggccctggtcagcgggatctccttggatcctgaagcggctataggtgttacaaagcgcccaccgccaaaatgggtcgatggagtagatgagattcagtacgatgtcggacgcatcaagcagaaaatgaaggagcttgcctcccttcacgataagcatcttaaccgcccaacgcttgatgattctagcgaagaggaacatgctattgagattaccactcaggaaataactcagttgttccaccgatgccagcgagcggttcaagccctgccttcgcgagctcgcgcttgtagtgagcaggaggggagattgctcggaaatgtcgtcgcatcgctcgcacaggctctgcaggagttgagtacttcgtttcggcacgcgcagtccggatatcttaagcgcatgaagaatagagaagagagaagccaacatttttttgacacaagcgtgcctcttatggacgatggagatgacaatacactgtaccatcggggttttaccgaggatcaactggtcctggtggaacagaatactctcatggtggaggagcgggagagggagatccgccagattgttcagagtattagcgatctgaatgagattttcagagatctcggcgctatgattgtagagcaggggacagtgctggatcgcattgactacaacgttgagcagagctgcataaagactgaggacggtctgaagcagcttcacaaagctgaacagtaccaaaagaagaaccgaaaaatgctggtaattttgatactcttcgtgatcatcattgtcctgatcgttgtgttagtaggcgtgaagtcacgttag

SEQ ID NO: 243214 - DNA, 978 bp, synthetic construct
  misc_feature 1..978: note = Description of Artificial Sequence: Synthetic coding sequence
  source 1..978: mol_type = other DNA
atggccaccaggaggcttacagacgccttcctgcttctcaggaacaattccatccagaaccgacagctgcttgccgagcaggtcagctctcatatcacgtcctctcctctgcactcccggtcaatcgcagcggcactagacgagttagccgacgaccggatggcccttgtgtccggtatcagcctggatcctgaagccgctatcggggtcacaaagcggcctcctcccaagtgggtggacggcgtggacgaaatccaatatgatgtaggccgtattaagcaaaagatgaaggaattggcctcactgcatgacaagcatctgaacaggccaaccctggacgatagctctgaggaagagcacgccatcgagattactacgcaggagatcacgcagctgtttcacaggtgtcaacgagccgtccaggctcttccatccagggcacgggcttgcagtgagcaggagggacgcctcctcggaaatgtggtggcctcattggcacaggcactgcaggagctctccacctcttttaggcatgcccagagcggctacctgaaacgaatgaaaaatcgggaagaaaggtctcagcattttttcgacacttctgtgcccctgatggatgacggagacgataataccctgtaccaccgaggctttacggaagatcagttggtactcgtcgaacagaacacactgatggtcgaggaaagagaacgagagatccggcagatcgtgcagagcatctccgatctcaacgagatattccgggacctgggtgccatgatcgtggaacaggggacagtattggatagaatcgattacaatgtcgagcagagttgtataaagaccgaggacggcctgaagcagctgcacaaggctgaacagtatcaaaaaaaaaatagaaagatgcttgtaatattaattctcttcgttattattatcgtcctaatcgtcgtgctggtaggggtaaagagtaggtag

SEQ ID NO: 243215 - DNA, 915 bp, synthetic construct
  misc_feature 1..915: note = Description of Artificial Sequence: Synthetic coding sequence
  source 1..915: mol_type = other DNA
atggctactcgccgactcaccgatgcctttcttcttctgaggaacaattcaattcagaacaggcagttgctggccgagcagcttgcggacgaccgcatggctctggtaagtgggatcagtctagaccccgaagcagcgattggggtgacaaaaagaccccctcccaagtgggtggatggtgtggacgaaattcaatatgatgttgggagaatcaaacagaagatgaaagaactggcatcccttcatgacaaacatttgaatagaccaaccctggatgactcctcggaggaggaacacgccatcgagattacaacccaggaaattacccaactgtttcaccgatgccagcgtgcagttcaggcccttccatcacgagcccgagcatgttctgaacaagagggtcggcttctgggcaatgtggtggcaagtttggctcaagcattgcaggaactgagcacctcatttcggcacgctcagagcggatacctgaaaagaatgaaaaatcgcgaggagagatcgcagcacttcttcgatacttccgtgccactcatggacgacggagacgacaacacactgtatcaccgagggttcacagaagaccaactcgtcttggtcgagcaaaacaccctcatggtggaagagagggaacgcgagataagacagattgtgcagtctattagcgacctgaatgagatcttccgggatttgggcgctatgattgtggagcaggggaccgtccttgatcgaatcgattataacgtggagcagagctgcatcaagactgaggacggcctgaaacagttacacaaggccgaacagtaccagaagaaaaacagaaaaatgctggtaatcctgattttgttcgtgattattatcgtactgattgttgtcctggtcggcgtgaagtccaggtag

SEQ ID NO: 243216 - DNA, 819 bp, synthetic construct
  misc_feature 1..819: note = Description of Artificial Sequence: Synthetic coding sequence
  source 1..819: mol_type = other DNA
atggccctcgtgtccggcatctcattagaccctgaagcagctataggcgtgacaaaacgccctccaccgaaatgggtggacggggtcgacgagatacagtacgacgtcgggaggatcaagcagaagatgaaggagctggccagcttgcacgacaagcatctcaaccgtcctacactggacgatagttcagaagaggagcacgcgattgagatcacaacccaggaaatcacacagctcttccatagatgtcaacgcgcagttcaggctttaccatcaagggcacgggcatgcagtgaacaggaggggagactcctcggaaacgtggtcgcaagcctggcacaggccctccaggagttgtctacctccttccgccatgctcagtccggctatttgaaacgcatgaaaaatagagaagagcgatcccagcacttctttgacacatctgtcccattgatggacgatggcgatgacaacacactgtaccatcgaggctttacagaggatcagttagtgctcgtggaacagaatacccttatggtggaagaaagagaacgcgagatcaggcaaattgtgcagagcatatctgacctgaacgagatcttcagagatttaggcgcaatgatagtggaacaggggacagtgctggatcggattgattacaacgtggaacagtcttgcattaagacagaggacgggctcaaacaactgcacaaggcggagcagtaccaaaagaagaaccggaagatgctggttattctgattctgttcgtgataatcatagtcctgatagttgtgctcgttggcgtgaaaagcagatag

SEQ ID NO: 243217 - DNA, 978 bp, synthetic construct
  misc_feature 1..978: note = Description of Artificial Sequence: Synthetic coding sequence
  source 1..978: mol_type = other DNA
atggccacacgacgcctgacagacgcatttctgctccttcggaacaattccatccagaatcgccagctcctggcggagcaggtgtctagtcatataacatcgagcccattacactcacggtccattgccgcagagctggacgagctggctgatgaccgtatggccctcgtcagtggtataagccttgacccagaggccgcaatcggggttactaagcgtccaccgcctaaatgggtagacggcgtggacgagatccagtatgacgtgggtagaatcaaacaaaagatgaaggagttagcctctcttcacgataaacacctaaacaggcccacactagatgactcttcagaagaagaacacgccatagaaatcaccacccaggagattactcagttgttccatcggtgtcagcgtgccgtgcaggcattaccgtcacgggcaagagcgtgctctgaacaagaaggcaggttattgggtaatgttgtcgccagtttagcccaggcgttgcaggaactcagcaccagcttcaggcatgcacagtccggctacctaaaacggatgaagaatagggaggaacggtcccagcattttttcgacaccagtgtccctctgatggacgacggagatgataacacactctaccatcgcggattcacagaagatcagttggtgctggtagagcagaataccctgatggtggaggagcgggaacgggaaattcggcaaatcgtgcagtccatctctgaccttaatgaaatcttccgcgacctcggggcaatgattgtggagcagggcacagtgttggatagaatcgattataatgtcgaacagtcctgtataaagacagaagatggcttgaagcagctgcacaaagccgagcaatatcagaaaaagaaccgtaagatgctggtgattttgatcttgttcgtaattattattgttctgatcgttgtcctggtcggggttaagagtagatag

SEQ ID NO: 243218 - DNA, 366 bp, synthetic construct
  misc_feature 1..366: note = Description of Artificial Sequence: Synthetic coding sequence
  source 1..366: mol_type = other DNA
atggcactcgttagtgggattagcctggatccagaagcagcgattggtgtcaccaagagaccccctcccaagtgggtggatggagtggatgagattcagtacgacgttggacgcattaagcagaagatgaaggagctggctagccttcatgacaagcacctcaacaggcctactctggacgactccagcgaagaggaacacgccattgagattacaacacaggagatcactcagctgttccacagatgccagcgtgcagtgcaggccctgccgtcacgtgcaagagcatgttccgaacaggagggcaggctgttgggcaacgtcgtggcatcgttagcacaggcgctgcaggaactgtccacctag

SEQ ID NO: 243219 - DNA, 420 bp, synthetic construct
  misc_feature 1..420: note = Description of Artificial Sequence: Synthetic coding sequence
  source 1..420: mol_type = other DNA
atgaaaaaccgcgaagagagatctcagcattttttcgacaccagcgtcccccttatggacgacggcgatgacaacactctgtatcatcgcggttttactgaggaccaactggtcctcgtcgaacagaatacccttatggtggaggaacgggaacgggagatcagacagatcgtgcagtcaatcagtgacttgaacgagatattcagagatttaggagcaatgatcgtggaacagggcacagtgctggacagaattgattataacgtcgaacagagctgtatcaagacagaggatggcctcaaacaactacataaagccgagcagtatcaaaaaaagaaccggaagatgctggtgatcctgattctgttcgttataatcatcgtcttgatcgtcgtactggtcggtgtcaagtcacggtag

SEQ ID NO: 243220 - DNA, 660 bp, synthetic construct
  misc_feature 1..660: note = Description of Artificial Sequence: Synthetic coding sequence
  source 1..660: mol_type = other DNA
ggcatcagcctggaccctgaagcggcaattggcgtcacgaagcgacccccacccaagtgggtggacggcgttgatgaaatccaatacgacgtgggaagaatcaagcaaaaaatgaaagagcttgctagccttcatgacaagcacctgaacagaccaaccctggacgattccagcgaagaggaacatgccatcgagatcactacccaggagataactcagctgttccaccgctgtcagagggctgtgcaggccctcccgtcacgtgctagagcatgtagtgaacaggagggacgtcttctaggcaatgttgtggccagcctggcccaggcccttcaggaactgagcacgagtttccgacatgcacaatccggctatttaaagaggatgaaaaacagagaggagcgatcccaacattttttcgatacctctgtgccattgatggacgacggggacgataacacactgtatcatagagggacagtcctagataggatagactacaatgtggaacagagctgtatcaagacggaggatggactcaaacaactgcataaagcagagcaatatcaaaagaaaaatcggaaaatgctggttattttaatcctattcgtgataataattgtactcatcgtagtcctcgtgggcgtcaagagccggtag

SEQ ID NO: 243221 - DNA, 369 bp, synthetic construct
  misc_feature 1..369: note = Description of Artificial Sequence: Synthetic coding sequence
  source 1..369: mol_type = other DNA
atggccctggtcagcggcatctccctggatcctgaggcggcaattggagtcacaaaacgaccgcctcccaaatgggtggatggggtggatgaaattcagtacgacgtgggcagaattaaacaaaaaatgaaagagttagcaagtctccatgataagcacttgaacagaccgacactggacgatagttccgaagaggaacatgccatcgaaatcactacacaagaaatcacacaactatttcataggtgtcagcgcgctgtgcaggctctacctagccgggcaagagcttgctctgagcaggaaggacgtctcctcgggaacgttgtggcctcgctcgcacaggcattacaggagttaagcacatcttag

SEQ ID NO: 243222 - DNA, 609 bp, synthetic construct
  misc_feature 1..609: note = Description of Artificial Sequence: Synthetic coding sequence
  source 1..609: mol_type = other DNA
atggccactcgcaggctgaccgacgctttcctgctgctccggaataacagcatccaaaacaggcagctgctggcggagcaggaactggacgagctagccgacgaccggatggctttggtctcaggcatttctctcgatccagaggccgctattggagtaacgaaacgtcctcccccaaaatgggtggatggcgttgatgagattcaatacgacgtaggtagaatcaagcaaaaaatgaaggagctggctagtttgcacgataaacacctcaatcgacctacactggacgactcaagcgaggaggagcatgctattgaaatcacaactcaagaaatcacccagctgttccacagatgccaacgggctgtccaggcgctgccatccagagccagggcctgttctgaacaggagggtcggcttttaggtaacgtggtcgcttccctcgcacaggcccttcaggaactttctacatcctttcgccatgcccagtcaggctatctcaagcggatgaagaaccgtgaagaaaggagccaacattttttcgatacctccgtaccgttgatggatgatggtgacgataataccttgtatcaccgtcggacatcctag

SEQ ID NO: 243223 - DNA, 909 bp, synthetic construct
  misc_feature 1..909: note = Description of Artificial Sequence: Synthetic coding sequence
  source 1..909: mol_type = other DNA
atgagcgaagatgaggaaaaagtgaagctgcgcagattggaaccagctatacagaaattcatcaaaatcgtaattcccaccgacctggaacgcctgagaaagcaccagatcaacatcgagaagtaccagcgatgtagaatttgggataaactgcatgaggaacacatcaatgccggacgtacggtgcagcagcttaggagcaatatccgagagattgaaaaactatgcctcaaggtgagaaaggacgacctcgtgttgctcaagaggatgattgatccagttaaagaggaagcatcagctgccaccgctgaatttctccaactccacctagaaagcgtagaggagttgaagaaacagttcaatgatgaggagactctgctgcagccacccctgacccggtctatgacagttggtggcgcatttcataccaccgaagccgaggcctcaagccagagcctcacccagatatatgccctccccgagatcccccaagatcagaacgctgccgaatcatgggagacgctcgaggcggatctcatcgaattgtcacaactcgtgacagactttagcctgcttgtcaactcccagcaggagaagatagatagcatcgctgaccacgtcaactccgccgcagtgaatgtggaagaaggaacaaaaaacctaggtaaggccgcaaagtacaagcttgccgcacttccagtggccggagcgctcatcggaggcatggtgggagggcctatcgggctgctggccggatttaaggtagccggtatagctgccgctctgggaggcggagtccttggatttaccgggggaaagttgatacagcgaaagaagcagaagatgatggaaaaactgacgtcatcgtgtccagatttgccgagccagaccgataagaagtgcagctag

SEQ ID NO: 243224 - DNA, 909 bp, synthetic construct
  misc_feature 1..909: note = Description of Artificial Sequence: Synthetic coding sequence
  source 1..909: mol_type = other DNA
atgtctgaggacgaggagaaggttaagcttagaaggcttgagcccgcaattcagaagtttatcaagatcgtcattcctacagacctggaacggctaagaaagcatcagattaacattgaaaagtatcagaggtgccgcatctgggataagcttcacgaggaacacattaatgcagggaggaccgtgcagcagctccgcagcaacatccgcgagatcgaaaagctttgtttgaaagtgaggaaagatgatctcgtgctcctcaagcgtatgatcgaccctgttaaggaggaagcgtccgccgctactgctgaatttcttcagctgcaccttgagtcggttgaggagctgaagaagcagtttaacgacgaggagacgctgctgcagcctcctctaaccaggtctatgactgtgggcggtgcgttccacacaacagaggccgaagcgagctctcagagcttaacgcagatttacgctttgcccgaaattcctcaagaccagaatgcggctgagagttgggagaccttagaagctgacctaatcgaattatcacagctggtgaccgacttcagtctgttggtcaattcacagcaggaaaaaattgattcaatagcggaccatgtcaactccgcagccgtcaatgtggaagaaggtacgaagaatcttgggaaggccgcaaaatataagctcgccgctttaccagtggctggcgctcttattggcggaatggtcggaggaccaatcggacttctggccggatttaaggtcgctggaatagcagctgctctgggagggggtgtgctgggttttactgggggtaagctgatccaacgcaaaaagcagaaaatgatggagaagcttacttcaagttgcccagacctcccctcccagacagacaagaagtgctcttag

SEQ ID NO: 243225 - DNA, 126 bp, synthetic construct
  misc_feature 1..126: note = Description of Artificial Sequence: Synthetic coding sequence
  source 1..126: mol_type = other DNA
atgagcgaagacgaagagaaggtgaaattgagaagattggaaccagctatccagaaattcattaaaatcgtgatcccgactgacctggagaggctgagaaaacaccagatcaatattgagaagtag

SEQ ID NO: 243226 - DNA, 126 bp, synthetic construct
  misc_feature 1..126: note = Description of Artificial Sequence: Synthetic coding sequence
  source 1..126: mol_type = other DNA
atgtcagaagacgaagagaaagtcaaactgcggagactggaaccagccattcagaagttcatcaagatcgtgataccaacagacttggagcgcctgcgaaaacatcagatcaatattgaaaaatag

SEQ ID NO: 243227 - DNA, 909 bp, synthetic construct
  misc_feature 1..909: note = Description of Artificial Sequence: Synthetic coding sequence
  source 1..909: mol_type = other DNA
atgtccgaggatgaggagaaagtcaaacttcgccgactcgaacctgctattcagaaatttataaagatagttatacccaccgatttagagcgtctgaggaagcaccaaattaacatagagaagtatcaaaggtgtagaatctgggacaagctgcacgaagaacacatcaatgctggtcgaaccgtgcagcaactacggtctaatatcagggagatcgaaaaactgtgtctgaaagtcaggaaggatgatctcgtgctgctaaaacgaatgattgatcctgtcaaggaagaagcctccgcggcaaccgccgaatttttgcagttacatctcgagtcggtcgaggagctgaaaaagcagttcaacgacgaagaaacacttttacagcctcccctcactcgcagcatgactgtgggtggagcattccacacgaccgaggctgaggctagctctcagagcttaactcagatatatgctctgcctgaaatcccccaggaccagaatgccgctgagagctgggagaccttggaggctgatctgatcgagttatctcagctggtgactgacttctcactccttgtgaattcccagcaggaaaagatagacagcattgcagatcacgttaactctgccgcagtgaatgttgaagagggcaccaagaatctcgggaaagcagcaaaatacaaacttgccgcactccctgttgcaggggcactaattgggggaatggtaggcggacctatcgggctcctggctggatttaaagtagcagggattgctgctgccctgggaggcggagtgctggggttcaccggcggaaagttgatacagcgtaagaagcagaagatgatggagaaactcacaagctcatgccctgacttgccttcccaaactgataagaagtgctcctag

SEQ ID NO: 243228 - DNA, 636 bp, synthetic construct
  misc_feature 1..636: note = Description of Artificial Sequence: Synthetic coding sequence
  source 1..636: mol_type = other DNA
atgcgcctcttcttatggaatgcagttctcaccctcttcgtcaccagtctcataggagcgctcataccagaacctgaggtgaagattgaagtccttcagaaacccttcatttgccaccggaaaactaagggtggtgacctgatgctggttcactacgagggctacttggagaaggacggcagcctgttccatagtacacacaaacacaacaacggccagcccatctggtttactctcggcatactcgaggcactcaaaggctgggatcaggggcttaagggcatgtgcgtgggcgaaaaacgcaaactgattattccgccagctctgggctacggaaaagaaggaaaaggcaaaatccctcccgagagtacattaattttcaacatagatcttcttgaaattaggaatggacccaggagtcatgaaagcttccaggagatggacctgaatgacgactggaaactgagcaaagatgaagtgaaagcttacctcaagaaagagtttgagaagcatggagctgtagttaacgagagccaccatgacgctcttgtggaggacatctttgacaaagaagacgaagataaggacggcttcattagtgctagagaatttacctacaaacatgacgagctctag

SEQ ID NO: 243229 - DNA, 783 bp, synthetic construct
  misc_feature 1..783: note = Description of Artificial Sequence: Synthetic coding sequence
  source 1..783: mol_type = other DNA
atgaaagacagaactcaagagttgaggactgctaaggattcagatgacgacgacgacgttgctgtaaccgtcgatagggaccggtttatggatgaattctttgagcaggtcgaggaaatcaggggtttcattgacaagattgctgagaacgtggaagaagttaaaagaaaacactcagccatcctggccagtcccaaccccgacgagaaaactaaggaggagctggaagaactcatgtcggacatcaaaaagactgccaataaagtgcgttctaagctgaaatctatcgagcagagcatagaacaggaggaaggactcaatcgcagcagtgccgatctgaggattagaaagactcagcattctactctgagcaggaagttcgtagaggtgatgtccgaatataacgctacacaatccgactatcgcgagcggtgtaaaggaaggatccagcgccaactcgaaatcacaggtaggacgaccacaagtgaggaactagaggacatgttggagagcggcaatccagccattttcgctagcggcattatcatggactcatccattagcaagcaagccctgtctgaaattgaaacaaggcatagcgaaattataaaacttgagaatagtattcgggagctacatgatatgttcatggacatggccatgctggtcgagtctcagcctcaaggggcattcttgaagtcctgtccagagcctcagccaaacccggaggagggtgccctttggtccagcggggctcccggaccggctggccgtgacgactag

SEQ ID NO: 243230 - DNA, 516 bp, synthetic construct
  misc_feature 1..516: note = Description of Artificial Sequence: Synthetic coding sequence
  source 1..516: mol_type = other DNA
atgaaagatagaacacaagagttacgcaccgcgaaggattccgacgacgacgatgacgtggctgtcaccgtcgaccgggaccgctttatggacgagtttttcgagcaggtggaagtgatgagtgagtacaacgcgacgcagagcgactatcgggagagatgcaagggacgtattcagaggcagttggagatcacaggccgtaccaccacatcagaggagcttgaggacatgctcgagtctggcaatcccgctatctttgcctcaggaataattatggatagctctatctctaaacaagctttgtccgagattgagactcggcactctgaaattataaaactggagattgaatataatgtcgagcacgctgttgactatgtggagcgagctgtgtctgacacaaaaaaagccgtgaagtatcaatctaaggctagacggaagaaaatcatgatcattatttgctgcgtgatcctgggcattgtcattgcgagtacagttggaggtatcttcgcctag

SEQ ID NO: 243231 - DNA, 756 bp, synthetic construct
  misc_feature 1..756: note = Description of Artificial Sequence: Synthetic coding sequence
  source 1..756: mol_type = other DNA
atgaaagaccggactcaggagcttaggacagccaaggatagtgatgatgatgatgacgtggccgtcaccgttgatagggacagatttatggatgagttctttgagcaggtcgaagagatcaggggctttatcgataaaattgctgagaatgtggaggaggtaaagcgaaaacattctgccattctggcctcgcccaacccagacgaaaaaactaaggaggagttggaggagctaatgtccgacatcaagaagacagcaaataaggtgcgctccaagctgaagtccatagagcagtccatagagcaggaagaaggcctgaaccgatcttccgccgacctaaggattcgaaaaacgcagcactcaaccctcagcaggaaatttgtggaggtcatgtcggagtacaatgccacccagtccgactatagggagcgatgtaagggaagaatccagaggcagctggaaatcacaggtaggaccaccacttccgaagagttggaggatatgctcgagagcggcaatccagcgatttttgcttcgggcatcatcatggatagctctatcagcaagcaagccctaagcgagatcgaaaccaggcacagtgagataattaaactggagaatagcatccgcgagctgcatgatatgttcatggacatggctatgctggtggagagtcagactatgtggaggggaccctgtcttacgccaaggagaccctctagtacacgagctaggcgcgctgggagaaaaagttag

SEQ ID NO: 243232 - DNA, 1053 bp, synthetic construct
  misc_feature 1..1053: note = Description of Artificial Sequence: Synthetic coding sequence
  source 1..1053: mol_type = other DNA
atgtttatcaaaggccgagctcctagagcgccaccacgagagcggagaagagccaccagaggaggattgcgccaagtggtggctcccccaagagccttaggctccacctcaaggcctcatttcagaagagccagcgtgtgtcgcaggaggtgtcgtaagagtgggggactgctcgccgctagtcgcaaaatggccgctgccgctgtgaatggggctgccggtttttcgtcttccggacccgctgccacttcaggtgcagtgctgcaggctgctacgggcatgtacgaacagctgaaaggcgaatggaatcgcaaatctcctaacctatccaaatgtggagaagaacttgggagactgaaactggtcctgcttgagcttaattttttaccaacaactggaaccaagctgacgaaacagcagttgattctagctagagacatactcgaaatcggggctcagtggtctatcctacgtaaagacatccctagcttcgaaagatacatggcccagctgaagtgctattatttcgactataaggaacagctacccgaaagcgcctacatgcaccagctgcttggactcaatctgctttttttgctgagtcagaatagagtggccgaatttcacacggagctggagaggttgcccgctaaggatatccagacaaatgtgtatatcaaacaccccgttagcttggaacaataccttatggaaggcagttacaacaaggttttcctggctaaaggcaatatcccagctgaatcttacacgttcttcattgacatactcttagacaccatccgagacgagatagcaggctgtatcgaaaaggcttatgagaagattttgtttactgaagctacccgcattttgtttttcaacactcctaaaaagatgacggattacgccaagaagcgtggatgggtgctcggacccaataattattattcattcgcctcacagcagcagaaacccgaagacaccacaattccatccacagagttagccaagcaggtgattgagtatgccaggcagcttgagatgatagtgtag

SEQ ID NO: 243233 - DNA, 864 bp, synthetic construct
  misc_feature 1..864: note = Description of Artificial Sequence: Synthetic coding sequence
  source 1..864: mol_type = other DNA
atgcgcgatagactcccagatctgactgcctgtcgaaaaaatgatgatggcgatacagtcgtagtggtagagaaagaccattttatggacgacttctttcaccaggtggaggagattcggaactccattgacaagattacccagtacgtcgaagaagtgaagaagaaccattccattattctatctgctccgaaccccgaaggcaagattaaagaagaactcgaggacctcaacaaagagataaagaagacagccaacaagatccgggcaaaactcaaagccattgagcagtcctttgaccaggatgagagcgggaaccgaacctcagttgatttgagaatcagacggacacagcactccgtcctgagtcgtaaatttgtcgaagccatggcagaatataatgaggcacaaacactctttcgcgagcgtagcaagggcaggatacagcggcaacttgaaattaccggaaggacaacaacggatgacgagctggaggagatgcttgagtccggaaagccaagcatctttacaagcgacatcatctctgatagtcagatcacaaggcaggctctaaatgagatagaaagcagacacaaggacatcatgaaactggaaacaagtattcgcgaactacacgaaatgtttatggacatggcaatgttcgttgaaacacagggagaaatgatcaacaacatagagcggaacgtaatgaacgccactgattacgtggaacatgcgaaagaggagacgaaaaaagccataaagtatcagtctaaggcaagacggaagttaatgttcatcattatctgtgtgattgtgctcctggttatcttgggaatcatcctggctaccaccctgtcctag

SEQ ID NO: 243234 - DNA, 867 bp, synthetic construct
  misc_feature 1..867: note = Description of Artificial Sequence: Synthetic coding sequence
  source 1..867: mol_type = other DNA
atgcgcgatagactcccagacctgacagcctgccggaagaacgacgatggcgatactgttgtagtggtggagaaggaccatttcatggatgactttttccaccaggtggaggagatacgtaattctatcgacaagataacccagtacgtagaggaggtgaaaaaaaatcactctattatcctgagcgctccgaaccctgagggaaaaatcaaggaggaacttgaagacctgaacaaggaaattaagaaaaccgctaataagatcagagccaaattaaaagccattgagcaaagcttcgatcaggatgaaagcggaaaccgaacgagtgtggacctgcggatccgtagaacgcagcactctgttctcagccgcaagttcgtggaggccatggcagagtataacgaagcccaaacattgttccgcgagagatctaaagggcgtatccagcgccagttggagattaccggtagaaccactactgatgacgagttggaggagatgctggaatctggaaaaccttctatttttacgagcgacatcatctcagattcccagataactagacaggctttgaatgaaatcgaatctcgtcacaaggatattatgaaactagagacgtcaattcgcgaactccacgagatgttcatggacatggccatgtttgtggagacccagggggaaatgattaataacatcgagcgcaacgtgatgaatgccactgactatgttgagcacgccaaagaggagaccaagaaagctattaaatatcagagtaaagcacgtcggaagaagtggatcataatcgcggtgtcggtcgtgctggtggcaatcatcgccctgattatcggtctgtccgtcggaaaatag

SEQ ID NO: 243235 - DNA, 777 bp, synthetic construct
  misc_feature 1..777: note = Description of Artificial Sequence: Synthetic coding sequence
  source 1..777: mol_type = other DNA
atggatgaattcttctccgaaatagaggagacgcggttgaacattgataagatcagcgagcacgtcgaggaggctaagaaactttactccatcatactttccgcacctattccggagccaaagaccaaggatgaccttgagcagctgaccaccgaaattaaaaagcgcgcaaataatgtcagaaacaaactgaaatctatggagaagcacatagaggaggatgaggtccgcagctccgctgaccttcgtatcaggaagagccagcactctgtgctgtcgcggaagttcgtggaggttatgaccaaatataacgaagcacaggtcgattttagagagcggtctaaagggaggattcagcggcaacttgaaatcaccggtaaaaaaactacagatgaggaactcgaagaaatgcttgagagcgggaaccccgcaatatttacctccggaatcatcgattcccagatctccaagcaggccctaagcgaaatcgaaggacgtcacaaagacatcgtcagattggagtcatccatcaaggaactgcatgacatgttcatggatattgctatgctggtagagaaccaaggcgaaatgctggacaacattgaattaaacgtgatgcacactgtcgatcatgtggagaaggcccgagacgaaacaaaaaaggcagtcaagtatcaatcacaggcgaggaaaaagttgataatcattatagtgctcgttgtcgtgttgctcgggatcctggcactgatcatcggactgtcagtgggactgaactag

SEQ ID NO: 243236 - DNA, 870 bp, synthetic construct
  misc_feature 1..870: note = Description of Artificial Sequence: Synthetic coding sequence
  source 1..870: mol_type = other DNA
atgaaagaccggttagagcagttaaaagcgaagcagctgacacaggacgacgacaccgatgccgtggagattgcaattgataatactgcctttatggatgagttcttctcggaaatcgaagaaacaagattgaatatcgataagatctctgagcacgtggaggaggctaaaaagttatactccattattctatctgctcccatccctgagcccaaaaccaaagatgatctagagcagttgacaacagagattaagaagcgagccaataatgtgcgcaacaagctcaagagcatggagaagcacatagaggaagacgaggtgcgaagcagcgcagatttgagaattcgcaagtcacaacattcagttctctccaggaagttcgtagaggtgatgacgaagtataacgaggcccaagtggacttccgtgagcgctctaagggaagaattcagcgacagctggagattaccggcaagaagaccacggacgaggaactcgaggagatgctggagagtggcaatcccgctattttcacgagcgggatcatcgattctcaaatctctaaacaggcactgtctgaaattgaggggaggcacaaggatatcgtgcgcctcgaaagctcaatcaaggagttgcatgatatgttcatggacattgcgatgctcgtggagaaccagggtgaaatgctcgataacatcgaactcaatgtgatgcataccgtcgaccacgttgagaaggctagggatgagacaaaaaaggctgtgaaataccagtcccaagccaggaaaaagctgattatcataatcgtgctggtggtggtgttattgggcatactggcactgatcatcggactgtcagtaggactaaactag

SEQ ID NO: 243237 - DNA, 543 bp, synthetic construct
  misc_feature 1..543: note = Description of Artificial Sequence: Synthetic coding sequence
  source 1..543: mol_type = other DNA
atggagaaacacatagaagaagatgaggtgaggtcttccgctgacttacgaatacgaaaatcacagcatagcgtactaagccgcaagttcgtggaggtgatgactaagtacaatgaagcccaagtagacttccgcgagaggagtaaaggccgtattcaaagacaactagaaatcaccgggaagaagacaactgatgaggagctggaagagatgctggaaagcggcaacccggctatctttacgagcggcatcatcgactctcagatttccaagcaggctctctctgagatcgagggccgacacaaggacattgtgcgcctggaatctagcatcaaggagttgcacgacatgtttatggatatagcaatgttagtcgagaatcaggggtcaatgatagaccggattgagaataacatggatcagtccgtcgggtttgtggaaagagcagtggcggataccaaaaaagcggtgaaataccagagcgaagcacggagaaaactgatcagtttacagacaggggtcgccactctggtcttcagatag

SEQ ID NO: 243238 - DNA, 834 bp, synthetic construct
  misc_feature 1..834: note = Description of Artificial Sequence: Synthetic coding sequence
  source 1..834: mol_type = other DNA
atgaaagacagactcgaacagttgaaggcgaaacagctcacacaagatgatgatacagatgcagtggagatcgctatcgacaatacggccttcatggacgaattcttttctgaaatagaagagactcgcctgaatattgataagatctcagagcacgtcgaggaggctaaaaagctctatagcatcattttaagcgcccctattcctgagcctaagaccaaagacgacttagaacagcttacaacagagattaaaaaacgtgccaacaacgtgcggaacaaattgaaaagtatggaaaagcatattgaggaggatgaagtgcgtagtagtgcagacctgcgaatccggaaaagccagcactctgtcttgagccgaaagtttgtagaggtgatgacgaagtacaacgaagcacaagtcgactttcgtgagaggtcaaagggcaggatccagcgccagctggagattaccggcaagaaaacgacagatgaagaattggaagagatgctggaaagcggaaatcccgctatttttacctccggcattatcgattctcagatttcaaagcaggcattgtctgaaatcgagggcaggcacaaagatatcgtgcgattggaatccagtataaaggagctgcatgacatgttcatggatatcgcgatgctggtggagaatcagggcgagatgctggacaacatcgagctcaacgttatgcataccgtggatcacgtcgagaaggctcgagatgagacgaaaaaggccgtcaaatatcaatcccaagcccgtaagaaactgatatcactgcagactggagtcgccaccctcgtgttccgttag

SEQ ID NO: 243239 - DNA, 231 bp, synthetic construct
  misc_feature 1..231: note = Description of Artificial Sequence: Synthetic coding sequence
  source 1..231: mol_type = other DNA
atgtttatggacatagcaatgctggtagaaaaccagggggagatgctggataacatcgagctgaacgtgatgcatacggtggatcacgtcgagaaggccagagacgaaaccaaaaaagccgttaagtaccagagtcaagccagaaagaagcttatcatcatcattgtgttggttgttgtcctcctgggcattctggctctgatcataggcctgagcgttggtcttaattag

SEQ ID NO: 243240 - DNA, 759 bp, synthetic construct
  misc_feature 1..759: note = Description of Artificial Sequence: Synthetic coding sequence
  source 1..759: mol_type = other DNA
atgaaggataggcttgagcagttaaaggccaaacagttaacgcaggatgacgacacagacgctgttgagattgctatcgataatacagctttcatggatgagtttttttccgagattgaagaaaccagactgaatatcgacaaaatttcagaacatgtggaggaggccaagaagttgtacagcattatcttgtccgccccaatccctgagccaaaaactaaagatgatttagagcagctcaccactgaaatcaaaaagagggcgaacaatgtgcgaaataaactgaaatcgatggagaaacacattgaggaagatgaagtgcgctcatctgcggacctgcgcatcagaaagtcacaacatagcgtgctttcaagaaagttcgtggaggtcatgactaaatataacgaggcccaagtcgattttcgagagcggtcgaaaggacgaatccaacgccaactagagattacggggaaaaagaccacagacgaagagctagaggagatgctcgagtccgggaatcccgcaatctttacgtccgggatcatcgactcacaaatctctaagcaggcgctgtctgaaatcgagggccgtcacaaagatatcgtgcggctcgagagttccatcaaggagctgcacgatatgtttatggatatcgctatgttagtcgagaaccagaagttgatcataatcatcgtcctggtagttgtgctgctgggtatcctggcccttattattggcctgagcgtcggactgaactag

SEQ ID NO: 243241 - DNA, 894 bp, synthetic construct
  misc_feature 1..894: note = Description of Artificial Sequence: Synthetic coding sequence
  source 1..894: mol_type = other DNA
atgcgtgacaggacacatgagctccggcagggcgatgacagctctgatgaagaagacaaagagcgcgtcgctctggtggtccaccccggaacggccaggctggggagtccagacgaggaatttttccataaggtgcggacgatccgacagaccatcgttaaactcggaaataaggtccaagaactggaaaaacagcaggttaccatccttgccacacccttgccagaggagagcatgaagcaggagctgcaaaacctgagagacgaaatcaagcaactgggacgcgagatccgactgcaactaaaagccatcgagcctcagaaggaggaagccgatgaaaactataatagcgtgaacactcgaatgcggaagacacagcacggagtcctatcccagcaattcgtcgaactgattaacaagtgcaatagcatgcagtcagaatatagagagaagaacgtggaaagaattcgtagacagcttaaaatcactaacgctggaatggtgtccgatgaggaactggaacaaatgctggatagcggccagagtgaagtgttcgtcagtaatattctaaaggatactcaagtgaccaggcaggccctcaatgaaatatccgcccgacactcggagatccagcagctggagcggagcataagggaactgcacgacatttttactttcttagcaaccgaagttgaaatgcagggcgagatgattaaccgcatcgagaagaatatactgagttcagcagactatgttgaacggggacaggagcacgtgaaaacagcactggaaaaccagaagaaagctaggaagaagaaagtgcttatcgcgatctgcgtctcgatcacagtggttctgttagccgtgattattggagtcactgtcgttgggtag

SEQ ID NO: 243242 - DNA, 888 bp, synthetic construct
  misc_feature 1..888: note = Description of Artificial Sequence: Synthetic coding sequence
  source 1..888: mol_type = other DNA
atgggcatgaccgccaggaccaagaggaccaggagcggcagccgctggtggtgtacgagggccagacacggctggggagccagaacgcgctctagctcaaccagcccccttggacatcctcctcaggtgaggaccatccgacagactatagttaaactcggcaacaaagttcaagagctcgaaaaacagcaagttaccattctggccacacctctgcccgaggaaagcatgaaacaagagctacagaacctccgcgacgaaatcaagcagcttggccgagagatacgccttcaattgaaagctatcgagccacagaaagaagaggcggatgaaaattacaatagcgtcaatacgagaatgaggaaaactcaacatggagtgttaagtcagcaattcgtcgaactgatcaacaagtgcaattctatgcagagcgagtaccgagagaagaatgtggaaaggatccggcgacagcttaaaataacaaacgcgggtatggttagtgatgaggagctggagcagatgctagatagcggccagtcagaagtgttcgtttctaacatcctgaaagacacccaggtaacgagacaggccctgaatgagatttcagccagacactccgaaattcagcagttagaacgctctatccgggagctgcatgatatttttaccttcttagcgactgaagtggagatgcagggcgagatgatcaacaggatcgagaaaaacatactcagcagcgcagactacgtggagcgaggacaggaacacgtgaagactgccctagaaaatcaaaagaaagcacgaaagaaaaaagtcctcatcgcaatatgtgttagcatcacagtagtgctcctagcagttatcataggggttacagtcgtgggatag

SEQ ID NO: 243243 - DNA, 1068 bp, synthetic construct
  misc_feature 1..1068: note = Description of Artificial Sequence: Synthetic coding sequence
  source 1..1068: mol_type = other DNA
atgattcctcgaaaacggtatggaagtaagaatactgatcagggggtctatcttggtctatcaaaaactcaggtgttgtcacccgcaactgccggttcttcttcctcagacattgccccactgccccctcctgtcaccctggtgccccctccccctgacaccatgtcctgccgtgaccgcactcaggaatttctctctgcatgcaagagcctacaaacacgccagaacggaatacagaccaacaagccagccctgagggccgtacggcaacggtctgagttcaccctgatggccaagaggatcggaaaggatctgagcaatacatttgccaaactggagaaactaacaattcttgcaaagcgtaagtcactcttcgatgacaaggctgtcgaaatcgaggaacttacttatataatcaaacaagacattaacagtcttaataaacagattgcacagctgcaggactttgtgagagcaaaagggagccagagcggcagacacctccagacccattcaaataccatagtggtgagcctacaatcaaaactcgcgtcaatgtcgaacgatttcaagtccgtgttggaagtgcgcaccgaaaaccttaagcaacagcgttcaaggcgggaacagttctcgcgcgctcctgtgtcagctctacccctcgcccctaatcatttaggcggtggcgctgtggttctgggagccgaatcccacgctagtaaggatgtcgcaatcgacatgatggatagccgcacaagccaacagctgcagctcatcgacgaacaagactcttacatacaaagtcgcgctgacacaatgcaaaacatcgagtctaccatagtggagctcggatcaatctttcagcagctcgctcacatggtgaaggagcaagaggaaactatccaaaggatcgacgagaatgtcctaggcgctcagcttgacgtcgaagcagcacatagtgaaatcctgaagtatttccagtccgtgacctctaaccgttggttgatggtgaagatattccttatcctgatcgtcttcttcataatttttgtcgtctttctggcctag

SEQ ID NO: 243244 - DNA, 966 bp, synthetic construct
  misc_feature 1..966: note = Description of Artificial Sequence: Synthetic coding sequence
  source 1..966: mol_type = other DNA
atgatccccaggaaaagatatgggagtaagaacacagatcagggagtgtaccttggtctaagtaagactcaggtgctgagccctgccacagctgggagctcttccagtgacatagctccgctcccaccacctgtaacacttgtaccgcctccaccggatacgatgtcatgccgagatcgaacccaagaatttttgtccgcgtgtaagagcctccagactaggcaaaacggcatccaaacaaataagccagcgcttcgggctgtgcgtcaacgaagtgaatttaccctaatggctaaaaggattggcaaggacctgagtaacacttttgccaagcttgaaaagctcacaattctcgctaagcggaaatcactattcgacgacaaagctgttgagatcgaggaactgacctacattattaaacaggatattaactccctcaataaacagatcgctcagctgcaggacttcgtgcgcgctaaaggctcccagtctggcagacacctacagacacactctaatactatagtggtttccctgcagtctaagttggctagtatgtccaacgactttaaaagtgtgctggaagtccggacggagaatctgaaacagcagcgcagcaggcgcgagcagttctccagagcacctgtgagcgcacttcctcttgctcctaaccatctgggaggtggggcagtggtgcttggagcagagagccacgcaagtaaagatgtggctattgatatgatggactccagaacatcccagcagcttcagttaattgacgaacaggattcatatattcagtcccgggctgatacgatgcaaaatatcgaatccaccattgtggagctggggtctatattccagcagctcgcgcatatggttaaagagcaagaggagactatccagtccgtgctcttatttcccctccttcctgctctgtcaccagggagcacccgaacatgttag

SEQ ID NO: 243245 - DNA, 906 bp, synthetic construct
  misc_feature 1..906: note = Description of Artificial Sequence: Synthetic coding sequence
  source 1..906: mol_type = other DNA
atgtcctgtagggaccggacacaggagttcctttccgcttgcaagtctctccaaactcggcaaaacggcatccagactaacaaaccggcattaagagctgtgcggcagcgatcagaattcacacttatggctaaaagaatcggcaaggatctgagcaatacctttgcgaagctggagaagctgactatcctcgccaagcgtaagtcactctttgatgacaaagcggtagagattgaagagctgacatatataattaaacaggatattaattccctgaataagcagattgcgcaactgcaggattttgtgcgtgctaaaggtagtcagtcggggagacacctgcagactcacagcaacacaattgtggtgtccttacaaagcaagctggctagcatgtccaacgatttcaagtccgtgttagaagtgagaacggaaaatctgaagcagcagcgctcacggagagaacagttttctagagctccagtgtctgccttacctttggcaccgaatcatctcggcggaggcgctgtagtactcggggcagaatctcatgcgagtaaagacgtggccatcgatatgatggattcacggacttcgcagcagcttcagcttattgatgagcaggacagctacatccagagccgggcagacacaatgcagaacatcgagtcaacgattgtagaactagggagcatctttcagcagctagcacacatggtgaaagagcaagaagagactatccaacggatcgacgaaaacgttctgggcgctcagctcgatgttgaagcagctcatagcgagattttgaagtatttccagtccgtcacctccaacaggtggctcatggtcaaaatttttctgatattgatagtgttctttataattttcgtagtctttctggcgtag

SEQ ID NO: 243246 - DNA, 780 bp, synthetic construct
  misc_feature 1..780: note = Description of Artificial Sequence: Synthetic coding sequence
  source 1..780: mol_type = other DNA
atggctaagcggatcggaaaagatctgagcaatacatttgctaagttggaaaaacttacaatcctggccaaacgcaaatccctgttcgatgataaggctgtcgagatagaggaactgacttacataattaagcaggacatcaactcactgaacaagcagattgctcaactccaggattttgtgcgcgctaagggctcacaaagtggtaggcatttgcagacacactcaaacacaattgttgtgtcccttcagtcaaaattagccagtatgtccaatgacttcaaaagtgttctggaggtacggaccgaaaacctaaaacagcagcggagcagacgagaacagttttctcgggctcccgtttccgccctccctcttgcccctaaccacctgggaggtggggctgtggtactcggcgctgagtctcacgcttccaaggacgtcgccatcgatatgatggactcccggacaagccaacaattacaactgattgatgaacaagattcgtacattcagagccgagctgacacgatgcagaatatagagagcacaatagtcgagctgggatcaatttttcagcaactcgcacacatggtaaaagaacaggaagagacgatacagcgtatagacgagaacgtgctcggggctcagcttgacgttgaagcagcccattctgagattttgaaatactttcagtctgtgacgtccaatagatggttgatggtcaagattttcctcatcctgatagtgttttttataatattcgtggtctttctggcctag

SEQ ID NO: 243247 - DNA, 720 bp, synthetic construct
  misc_feature 1..720: note = Description of Artificial Sequence: Synthetic coding sequence
  source 1..720: mol_type = other DNA
atgtcctacacacctggcgttgggggtgatcccgctcagctggctcagcgaatcagcagcaatatccaaaagattacccagtgtagcgtggagatacagagaacccttaatcagctgggaaccccccaggactctccagaattgagacaacaattgcagcaaaagcaacagtacaccaaccagcttgccaaggagaccgataaatacattaaagagttcggaagccttccaaccacaccgtcagagcagaggcaaaggaaaatacagaaagaccgattggtggccgagtttaccacctccctcacaaacttccagaaggtccagcgccaggcagcggagagagaaaaggagtttgtagcacgggtccgagcctctagtagagtgtctggatctttccccgaagatagcagtaaagaaagaaatcttgtctcttgggaatcacaaacccaacctcaagtgcaagttcaagatgaggagataaccgaggacgacctgcgactgatccatgaaagggagtccagtattcggcaacttgaagcggacattatggatatcaacgaaatcttcaaggatttgggaatgatgatacacgagcagggggacgtgattgactccatcgaggcaaacgtggaaaacgcagaggtgcacgtgcaacaggcaaaccaacagttgagccgggcagcggactaccagaaaaaagacagttgtatgctgatgtag

SEQ ID NO: 243248 - DNA, 786 bp, synthetic construct
  misc_feature 1..786: note = Description of Artificial Sequence: Synthetic coding sequence
  source 1..786: mol_type = other DNA
atgtcatatacccccggagttggcggtgacccggctcagctcgcgcagcggatcagtagcaacatccagaagattacccagtgttctgttgaaatccagcgtactctcaatcagttagggaccccccaagactcacccgaactccgtcagcagttgcagcaaaaacagcaatacacgaatcagctcgcgaaggagacagataagtacatcaaggagtttgggagcctcccaactacaccctccgagcagagacaacgtaagatccagaaagaccgcttagtggccgaattcaccaccagtcttacgaattttcagaaagtgcagcggcaggccgcagagcgcgaaaaagagtttgtggcaagagtgcgggcttccagcagggtgtctggaagttttccagaggactcctctaaggagcggaacctggtgtcttgggagtctcaaacccagccacaggtgcaagtacaggatgaggagatcaccgaagatgacctgcgcttgatccacgaaagagaatcctccattcggcagttggaagcagatataatggacattaacgagattttcaaggacctcggaatgatgatccacgaacagggcgacgtgatcgatagcatcgaggcaaacgttgagaacgcagaagtccacgtgcaacaggccaaccagcagctgagcagagccgctgactatcagcggaagtctcgcaagactctgtgcataattatcctcatccttgtgatcggggtggctattatctctctgatcatctgggggttaaatcattag

SEQ ID NO: 243249 - DNA, 786 bp, synthetic construct
  misc_feature 1..786: note = Description of Artificial Sequence: Synthetic coding sequence
  source 1..786: mol_type = other DNA
atgagttacacccccggagttggcggagacccggcacagcttgctcagagaatatcatcaaacattcaaaaaatcactcagtgctcagttgagatccaacggaccctgaaccagttggggacaccccaagattccccagagttacgccaacagcttcagcagaaacagcagtatacaaaccagttagccaaagagaccgataaatacatcaaagagttcgggtcattgcccactactccctcggaacagcgtcagaggaagattcagaaggatcgcctggtggcagagttcacgaccagtctcaccaacttccagaaagtgcagcgccaggccgctgagagggagaaagaattcgtggcgagggtgcgggctagtagcagagtgagcgggagtttccccgaggacagttcaaaggagaggaacttggtatcctgggagtcacaaactcagcctcaagtccaggttcaggatgaagaaattacagaagacgatttacgcctcatccacgagagggagtctagtatacgtcagttggaagcagacatcatggacatcaatgaaatatttaaggacctcggaatgatgattcatgaacagggtgacgtaatcgactccattgaagcgaacgtcgaaaacgccgaggtgcatgttcaacaggcaaaccaacagctgtctagggcagcggactatcagagaaagtctcggaaaacactgtgcatcatcatactgattcttgtgattggtgttgctatcatctccctcattatctggggcctgaatcattag

SEQ ID NO: 243250 - DNA, 711 bp, synthetic construct
  misc_feature 1..711: note = Description of Artificial Sequence: Synthetic coding sequence
  source 1..711: mol_type = other DNA
atggcgcctgatccctggttcagtacgtatgactctacatgtcagatcgctcaggaaatcgctgagaaaatacagcagcgcaaccagtatgagcggaagggggaaaaggccccaaagctaactgtgacaatccgagcactgctgcagaatctcaaagaaaaaatcgcactgttgaaagaccttctgctgcgtgccgtgagtacccatcagatcacacagttggaaggggaccgccgacagaatctgctggacgacctggttactcgcgaacggctcctgctggcctctttcaagaatgagggagcagaacctgacctgatcaggtcctcactgatgtcggaagaagcaaagagaggcgctcccaacccttggctctttgaagagcccgaagagacgcgcggactgggcttcgatgagattcggcagcaacagcagaaaattatacaggaacaggacgccggactggacgcattaagcagcataatatccagacagaagcaaatggggcaggagataggcaatgagttggacgagcagaatgaaattatcgatgacctggccaacctcgtggagaacacagatgagaagttgcgaaacgagactcggagagtgaacatggtggacagaaagagtgcttcttgcggaatgatcatggtcatcttgttactcctggtggcaattgtcgtcgtcgccgtctggcccacaaactag

SEQ ID NO: 243251 - DNA, 1785 bp, synthetic construct
  misc_feature 1..1785: note = Description of Artificial Sequence: Synthetic coding sequence
  source 1..1785: mol_type = other DNA
atggctcccatcggattgaaggccgtggtcggagaaaagatcatgcacgacgtcatcaagaaagtgaagaagaaaggagaatggaaggtgctggtggtggaccagctttcgatgcggatgttatcctcttgttgcaagatgacggacattatgaccgagggaattaccattgtcgaggacattaataaacgcagagagcctcttccctcccttgaagctgtctatctgattactccttccgaaaagtccgttcattctctgatttctgactttaaggaccctccaactgctaagtatcgggcagcacacgtgttctttacagacagttgccctgatgctctcttcaatgaattagtgaaaagccgagccgcaaaggtgattaaaacccttaccgaaattaatattgccttcttgccatatgagtcccaggtatacagcctggattccgctgacagctttcagtccttttactctccacacaaagcccaaatgaaaaaccctatcctggagcgcctggcggaacaaattgcaacactttgcgccacccttaaggaatatcctgcggttcgctaccgcggagagtataaagataacgccttgctcgctcagctgatacaagacaagttggatgcctataaagccgacgatcccacgatgggcgagggacctgataaagctaggtctcagctgctcattctcgacaggggcttcgaccccagtagtcctgtcttgcacgagctcacatttcaggccatgtcttacgatctgctgcctatcgagaatgatgtctacaagtacgagacatccgggattggcgaggccagagtgaaggaagtgctcctggatgaagacgatgacctttggattgctttgcggcataagcatattgctgaagtctctcaggaggtaacacgtagccttaaagatttttctagctctaagcggatgaacacaggagagaagaccaccatgcgggatctctctcagatgttaaagaagatgccccagtatcaaaaagagctgtcaaagtactccactcatttgcacctggcagaagactgtatgaagcactaccagggaacagtggacaaattgtgccgcgtagaacaggacctggcaatgggtacggatgcagaaggagagaagataaaagatccaatgagagctatcgtacctatacttttggatgcgaatgtgtccacatacgataaaatcagaatcattctcctctatattttcctcaaaaacgggatcactgaggaaaacctgaacaagttgatccagcacgcgcagatccctcctgaggactcagagataatcactaacatggcccatcttggggtacccatagtaactgattctacacttagacgcagatctaaaccagagagaaaagagcgcatttcagagcagacctatcagttgtcccgctggactcctataattaaagatatcatggaagatactatcgaagataagcttgatacaaaacattatccctacattagtactcgctctagcgcgagtttttcaactactgctgtctccgcacgctatgggcattggcataaaaacaaggcgccaggagagtataggagcgggcctcgactgatcattttcattctcggaggagtctccttaaatgaaatgagatgcgcctatgaggtcacccaagccaacggcaaatgggaggtgctaataggatcaactcatattcttaccccccaaaaactgttggacacactaaaaaagctcaataaaacagatgaagaaataagctcttag

SEQ ID NO: 243252 - DNA, 1674 bp, synthetic construct
  misc_feature 1..1674: note = Description of Artificial Sequence: Synthetic coding sequence
  source 1..1674: mol_type = other DNA
atgaccgatattatgactgaaggcattactattgtggaagacatcaacaagcgaagagaacctctccccagtttggaggccgtgtatctcatcaccccctccgaaaagtcagtccactcacttataagtgattttaaggatccgcctacagctaagtatagagcagctcatgtttttttcaccgactcatgtcctgatgccttatttaatgaactggtgaaaagccgagccgcaaaggtcatcaagacacttacagagattaacatagcgttcctcccttatgaatcacaggtctattccctagattctgcagattcattccaatccttttattcaccacataaggctcagatgaagaaccccattctcgagcgtctggccgaacagatcgctaccctatgtgctactctgaaggaatatcctgccgtgagatatcgtggagagtacaaagacaatgcactcctggcccaactgatccaggataaattggacgcatataaagccgatgatcccacaatgggggagggtcccgacaaagccagatcacagctactgattctcgatcgcggtttcgacccaagctcaccagtcctgcatgaattaacgtttcaggcaatgtcttacgatctgctccctatcgagaacgacgtgtacaagtacgagacaagcggcatcggggaagcaagagtgaaggaggtactacttgatgaggatgatgatctgtggattgctctgcggcacaaacacattgctgaggtgagtcaggaggtgaccagatccctcaaagacttcagttcctcgaagagaatgaacaccggcgaaaagaccacaatgcgagacctcagccaaatgctgaaaaagatgccacagtatcagaaagagctctccaagtattcaacacatcttcacctcgcggaggactgtatgaagcattaccaggggaccgtcgataaactgtgtagggtggagcaggacctggctatgggaacggatgcggagggagagaagatcaaagatccaatgcgggcaatcgtgccaatactgctggacgcaaatgtgagcacgtacgacaagataagaattatcctgttgtatatcttcttaaaaaatgggattacagaagagaatctgaataagcttatacaacatgcacagatcccacctgaagactccgagattattaccaacatggcccacctgggagtgccaatcgtgacagattcaaccttgaggaggcggagcaagcccgagagaaaggaacggatctcggaacagacctatcaactttccagatggactcccatcatcaaagatattatggaagacaccatagaggacaagttagataccaagcattacccttatatcagcacacggtcttccgcaagcttttcaacaactgccgtgtccgccaggtatggacattggcacaaaaacaaggcccctggcgaatatcgaagtggccctcggctgatcattttcatcctgggtggcgtgtctctgaacgagatgcgatgcgcctatgaggtgactcaggcaaacgggaaatgggaggtgctaatcggatctacacacatccttacccccacgaaattcttgatggatctgcgccatcccgatttccgggaaagctcccgggtgtctttcgaggatcaggccccaacaatggaatag

SEQ ID NO: 243253 - DNA, 1308 bp, synthetic construct
  misc_feature 1..1308: note = Description of Artificial Sequence: Synthetic coding sequence
  source 1..1308: mol_type = other DNA
atggccccaataggcctgaaggccgtggttggcgagaagatcatgcatgatgtgataaaaaaagtgaaaaagaaaggcgagtggaaggtccttgtggtggatcagctgtcgatgaggatgctgagctcctgttgtaagatgaccgatatcatgacagaaggcccagacaaggccaggtcacagttgctcattctcgacagggggtttgacccctcaagtcctgtgctacacgagttgacattccaagctatgagctacgacttactcccaattgaaaacgacgtctataaatatgagacttctggaataggtgaagccagagtgaaagaggtacttctggatgaggatgacgacttgtggattgcgttgcgccataagcacattgctgaagtttcccaggaagtgacccggtcactgaaggatttctcaagctctaaacgaatgaacaccggagaaaagacaacaatgagagatttaagtcagatgttaaagaagatgccgcagtaccaaaaggagctctcaaagtactccactcacctacacttagcagaagactgcatgaaacactatcagggcactgtggacaaactctgtagagtcgagcaagacttagcaatgggtaccgatgccgaaggtgagaagattaaggacccaatgagggcaattgttcccatcttgttagatgcaaacgtcagtacatacgacaaaattaggataatcctgttgtatatcttccttaagaacgggataaccgaagagaacttgaacaaactgattcagcacgcgcaaatccctcccgaagattctgagatcatcacaaatatggcacacctcggggttcctatcgtgaccgattctacactgaggcggcgtagcaagccagagaggaaagagcggatctccgagcagacataccaactttcccgatggacacccatcattaaagacattatggaagatactatagaagacaagctcgacactaagcattatccgtacattagtacacggtcttcggccagcttttcaacaacagctgtgagcgcgagatacggacactggcacaagaataaggcaccgggagaatataggtccgggcctagactaatcatttttattctgggcggtgtgagtctgaatgagatgcggtgcgcttacgaggtgacccaagcgaacggcaagtgggaagtgctgataggatctacacacattcttacgcccactaaatttctgatggatctgagacatccagactttagagagtcgtcccgggtgagttttgaggatcaagctccgaccatggaatag

SEQ ID NO: 243254 - DNA, 1812 bp, synthetic construct
  misc_feature 1..1812: note = Description of Artificial Sequence: Synthetic coding sequence
  source 1..1812: mol_type = other DNA
atggctcccattggcttgaaagcagtggtgggggagaagatcatgcacgatgtgatcaaaaaagtcaagaaaaagggagaatggaaggtactcgtggtcgatcaattgagtatgaggatgttgagtagctgttgcaaaatgaccgacataatgacagagggtattaccatcgttgaggatatcaataagcggagagagccgctccccagcttggaggctgtctatttaataactccaagcgagaaatcagtacatagtttgatatctgatttcaaagaccctccaacagctaagtaccgggcagcccacgtgttcttcacagattcatgccctgatgcgctcttcaacgagcttgtgaagtcccgtgccgctaaggtaataaaaaccctgaccgaaatcaatatcgctttcctgccgtatgaatctcaggtctacagtcttgattccgctgattctttccagagcttttattccccacacaaagcccagatgaaaaatcccatcctggaaaggctggccgagcaaatcgccacactctgtgccacccttaaagagtaccccgctgtgcgctataggggagagtataaggataacgctctgctggcgcagcttattcaggacaaactcgacgcatacaaggcagacgaccctacgatgggggaaggtcctgataaagccaggtcccaactgctgatattagatcggggttttgacccatcttcgcccgtgctccacgagctcaccttccaagctatgagctacgatttgctccccatcgaaaacgacgtgtataaatacgaaaccagtggcatcggtgaagccagagtgaaggaggtcctgctcgatgaggatgatgacctgtggatcgcgctgcggcataagcacatcgccgaggtgagtcaagaggtgacgagaagccttaaggacttctcatcctctaaaaggatgaacaccggagagaagacgaccatgagagatttgagccagatgctgaaaaaaatgccccagtaccaaaaagaactgagcaaatattcaacgcatctgcaccttgctgaagattgcatgaaacattaccagggaaccgtcgacaagctttgtcgcgttgagcaggatctggctatgggaaccgatgcagaaggtgagaagattaaggacccgatgcgagccatcgtacccatcctcctggacgctaacgtttcaacttacgataagatccggatcatattgctgtatatcttcctaaaaaacgggatcacggaagagaacctgaataaattaatccagcatgcgcagataccgccagaggactcagagataatcactaacatggcgcatctcggagtaccgatcgttaccgattcgaccctccgtaggcgaagcaaacctgaacgtaaggagagaatctccgagcagacgtaccagctgtcacgttggacccctatcataaaagacattatggaagacaccatcgaagacaagctggatacaaaacactacccatatatttcaacgcgtagctctgcttccttttcaacaacggcggtttcggctcggtacggtcattggcacaaaaataaggccccaggtgagtaccgtagcggtccgagactcattatctttatcttgggcggtgtgagcctgaacgaaatgaggtgcgcatatgaagtaactcaggccaatggtaaatgggaggtgctcatcggaagtacccatattctgaccccgaccaagttcctcatggatctccgccaccccgatttcagggagtccagtagagtttcatttgaagaccaagctcccacgatggagtag

SEQ ID NO: 243255 - DNA, 1389 bp, synthetic construct
  misc_feature 1..1389: note = Description of Artificial Sequence: Synthetic coding sequence
  source 1..1389: mol_type = other DNA
atggcacccacaatccagacccaggcccaaagggaggatggacaccgctctggcgtagtgtgcagagttaagtactgcaactcactgccagacatcccattcgatccgaaattcattacgtacccgttcgaccagaaccggtttgtgcagtacaaggcgactagtctagaaaaacagcataagcacgacctccttaccgaacccgatctgggtgtaacaatcgacctgatcaacccagacacttacagaattgacccgaacgtgttactggatccggcagatgagaagttgctcgaagaagagatccaggcccctacctcgtcaaaaagaagccagcagcatgcgaaagtggttccttggatgcgaaagactgagtacatatctacagaattcaaccgctacggaatctcgaacgagaaaccagaggtgaaaatcggtgtgagtgtgaaacagcaatttacagaagaggagatatacaaagatcgcgactcacaaattaccgctatagagaagaccttcgaagatgcacaaaagagcatgtggatcaatccttgcgcacaggtgatcttcgacagcgatcccgctcccaaagacaccagcggtgcagccgctctggaaatgatgagtcaagcaatgatccgcggaatgatggacgaggaaggcaatcaatttgtggcctactttctccccgtcgaggagacacttaagaagcggaaacgggatcaagaggaggagatggactatgcacccgatgacgtctacgactataaaatcgctcgggaatacaattggaacgtaaagaacaaggcctctaaaggctacgaggagaactacttcttcattttccgtgagggtgacggcgtgtactataatgaacttgaaactcgcgtccgcctctctaagcgtcgggctaaggctggggtccagtcaggaacgaacgccctgttggtggttaaacacagagacatgaacgagaaggagttggaggcccaagaagccagaaaagcccaacttgagaaccatgagccagaggaagaagaggaagaggagatggagacagaagaaaaagaagccggtggaagcgtgatgctcattctgagaactatgccaactctgatgatgaggaccgaagatcgacccaaggtcgctgttacaatgatccagactgcggctgctatgggggtagcaagtggggctggcgcaacagcagccgctccggtgcccagccccgtggccgcatcgactcgacccaggagaatggctgtgaagctgcaactgctcataccggtcaagctgatcgtgaccgtaaccgagagccagggcatccagggctggttcagacatcattactgcgaacaacagtctacgttcctggtggtgtgcctttag

SEQ ID NO: 243256 - DNA, 1197 bp, synthetic construct
  misc_feature 1..1197: note = Description of Artificial Sequence: Synthetic coding sequence
  source 1..1197: mol_type = other DNA
atgtgcattcgcgtgcatgtctcaatgtgtatgtgcatgtgtgttcacgtgtgcgtccacctctgtatgcatgtctgtgccgtctgtatgtgtgtgtatgtgtgcgtgtgcgtccacgttcacgtgtgcgcatctgtgtgtgcctttgtctgcatgtgcgtatgcgtatgtgtttgcggtagtgtgtgcgcctttgtgtcagtacacgtatgcatgagggtgtacgtgtgcgtgtgtatttgtgttcacttgtacgtttgcgtgtgtgtctgtctctgtgcttgtgtatatgcttgcgtttgcatgtgtctgagactgtgtgtgcggctctgtgtttccgtgtgtgcgtgcgtttacgcctgcatctgcatgtgcatctgcgtgcatgtgtccatgtatgtatgcgcgagcgtgtgtgcctgcgtgtgcgtgtgtgtttgcgtctgtgtatgcatgcgggtatgtgcccaccagtgtctgcacgtatgtatctgtgtctatgtgtgtgcacgcatctgcgtgtgcgcctgtgtgtatgtctgtgtttgtatttccgtctgcgcatgcgtatacgtctgcgtgcatctgtgcgtgtgtgcctgtgtgcatgcatgtgtttgtgtgtgcgcatgcgtacatctgtgcgtgtgcgcgtgtgcgcacgtgggagccacccttgtgtgcatatgtacatacacttgtccacgtccatccatgttcgcacatggcggtcgctggggtgtagctgggcgtcccagacagccgatgagcctaggagttcaggctcaggcacagcgagtgattcatctgccccagtctgtccaagccctgataaaggactttcaagggacacctaccttcacctacaaagccgctcatatttttttcaccgacacatgccccgagccactgttctccgaattagggcgttctaggttagcgaaggtggtcaagacacttaaagaaatccacctcgcctttctcccgtatgaggcgcaggtgcgacccggactcatccttggtcgcggatgggggtttgttacaaaatgccccttgtttccccagaagcaaacactgagactcggggctgtggcacatacctgtaacccctccgccgttggcggacaaggacgcaggattacgtgggggcaggaatttgaaacttctctgggaaccgaacaggacccagtgagctag

SEQ ID NO: 243257 - DNA, 1773 bp, synthetic construct
  misc_feature 1..1773: note = Description of Artificial Sequence: Synthetic coding sequence
  source 1..1773: mol_type = other DNA
atggccccttctgggctgaaggcagtagtgggtgagaagatcctctccggcgtcattagaagtgttaaaaaggatggggagtggaaggtgcttattatggatcatccctcaatgcggattctgagctcttgctgcaagatgagcgacatactggcagaggggatcacaatcgtagaggatattaacaaacggagagagccgatcccatctttagaggcaatctacctcctgtcccccactgaaaaggcattaataaaggactttcagggcacccccaccttcacatacaaagcagctcatattttcttcaccgacacatgccccgagccgcttttctctgagctcgggcgatcaagactggcgaaggtggtgaaaacactgaaagagatacatctggccttcctgccgtatgaggcacaggtgttctctcttgacgctccacacagtacatataacctgtattgtccctttcgagcagaggagagaacaagacagctagaagtcctcgcacaacagatcgccaccctttgcgctacactccaggagtacccagccattcgttatcggaagggaccagaagatactgcccagctggcacatgcagtgcttgccaaacttaatgcattcaaagccgacactccatcgctcggcgagggacctgagaagacccggtcccagcttttgatcatggaccgcgctgctgacccggtgtccccactgcttcacgaacttacttttcaggcaatggcgtacgatttgctagatatcgagcaggacacgtatcggtacgaaaccaccggcctgtctgaggcccgtgaaaaggctgtgctacttgacgaagacgacgatctgtgggtggagctccgccatatgcatatcgccgatgtgtccaagaaggtaaccgagctgctgcggacattctgcgaatctaaaagacttactacagacaaagcgaatatcaaggacctgtctcagattctcaagaaaatgccacaataccaaaaggagctgaacaagtactccacacaccttcacctggcagatgattgcatgaaacattttaagggatccgttgaaaaactgtgcagtgtggaacaggacctcgctatggggagtgacgccgagggcgagaagatcaaggacagtatgaagctgatagtgcctgtgctgctagacgctgctgtgcccgcatatgataaaataagagtcttgcttctgtatatcttgctcaggaatggagtaagcgaagagaacctggctaagcttattcagcacgcgaacgtgcaggcccacagcagtctgatcagaaatctcgagcaactgggcggaaccgtcactaatccagggggttctggtacgagttcgcggctcgaacccagagaaagaatggaacccacgtaccagctgtcccgatggacgccagtcattaaagacgtcatggaggatgcagtggaggaccgccttgaccggaatctgtggcccttcgtgtccgaccctgccccaactgcctcgagtcaggctgccgtgagcgccagattcgggcactggcacaagaataaagcaggcatagaagctcgggcagggcctaggctaattgtctatgtgatgggaggagttgccatgagcgaaatgagagcggcatacgaggtgacacgggctacagaggggaaatgggaggtattgatcggatcctcacacattctaactcccactcggtttttggacgatttaaaggctctggacaagaaattagaggatatcgctctcccctag

SEQ ID NO: 243258 - DNA, 1815 bp, synthetic construct
  misc_feature 1..1815: note = Description of Artificial Sequence: Synthetic coding sequence
  source 1..1815: mol_type = other DNA
atggccccttccggcctcaaagccgttgtgggggagaaaattctgagtggggtgattcgcagtgtcaaaaaggacggagagtggaaggtactcatcatggatcacccatcgatgagaatccttagctcctgttgtaagatgtcagatatactcgctgaaggtatcactatcgtggaggatatcaataagagacgcgaaccaatcccttccctggaggccatttacctgctttctcctactgagaaggctcaagcacaacgggttatccatctcccacaaagcgtgcaagccctgattaaggattttcagggcacacccacattcacatataaagccgctcatatcttctttacggacacctgccctgaaccattgttttccgaactggggcgtagtagacttgctaaagtggtgaagaccctaaaagagatccacctggcctttctgccatacgaagctcaggtcttttctctggacgcaccacacagcacatataatctctattgccccttccgagctgaggaaaggacacgtcagcttgaagttcttgcccaacaaatcgcaacgctctgtgcaacactgcaggaatatcctgctattagatataggaaggggcctgaggacaccgcccagttagctcacgctgtgctggccaagttgaacgcgttcaaggctgatactccatcccttggagagggcccagagaagactaggtcgcagcttttgattatggaccgggcagccgaccctgtcagccccctcctgcacgagttgacatttcaggctatggcatacgatcttctggatatcgaacaggatacctatcggtacgagacaaccgggctgtctgaggcgagggaaaaagccgtattgctcgatgaggatgatgatctgtgggtggagctccgacatatgcatatcgctgatgtgagcaaaaaagtgaccgagcttctgaggaccttctgtgagtctaagcgattgacaactgataaggcgaacatcaaggatctatcccagattctaaaaaaaatgcctcagtatcagaaagagctgaacaagtatagcacccacctgcatctggcggatgactgcatgaaacacttcaagggaagcgttgaaaagctatgcagcgttgagcaggacttagccatgggaagtgatgctgaaggggagaagattaaggatagcatgaagcttattgtacctgttctgcttgacgcggctgtgcccgcatacgataaaatccgcgtactgctgctgtacatactgctgcgcaatggcgtttcagaggaaaatttggccaagctgatacagcacgctaatgttcaggcacattcgtctctgatccggaaccttgaacagctggggggaactgtgaccaaccctgggggtagcgggaccagctcacgcctggaacctcgcgaaaggatggaacccacctaccaattgagccggtggacaccagtgattaaagacgtcatggaagacgctgtggaggatcggctagatagaaacctatggcctttcgtaagcgaccctgctcccaccgctagtagtcaggccgcagtgtcagctagattcggccactggcataagaataaggctggcatagaagctcgcgcagggcctaggcttatcgtgtacgtcatgggcggtgttgcaatgtccgagatgagagccgcttatgaggtgacacgggctacggaaggcaaatgggaagtcctgattgggagtagtcatatactgacacctactcgcttcctggatgacctgaaggcactggacaagaaacttgaggacatcgcattaccctag

SEQ ID NO: 243259 - DNA, 1740 bp, synthetic construct
  misc_feature 1..1740: note = Description of Artificial Sequence: Synthetic coding sequence
  source 1..1740: mol_type = other DNA
atggccccatccggcctgaaggctgtggttggggagaagattctctcaggggttataaggtcagtgaaaaaagatggcgagtggaaggtcctaattatggaccacccgtcaatgagaatcttaagctcttgctgcaagatgagcgacatcctagctgaagggattacaatagtggaagacatcaataagcggagagagccaatcccgtccttggaagcaatatacttactttcacccaccgaaaaatcagttcaggccttgatcaaagacttccagggcacccctacctttacctacaaagcagcccacattttctttactgacacttgtcctgagcctttatttagcgagctggggaggtctcgattggccaaggtggtcaagactctgaaagaaatccatctcgcgtttcttccctatgaggctcaggtgtttagccttgatgcaccccacagcacttataacctgtactgtcctttccgcgctgaggagagaacgcgccagctggaagtactcgcccaacagattgcgaccctctgcgccacactacaggaatacccggcaatccggtaccgcaagggtccagaggatacagctcagctggctcatgccgttctcgctaaactgaacgcctttaaggctgacacacctagcctgggagaggggccagagaaaactcgctcacaactcttgataatggatagggctgctgaccccgtctcgccactcctgcatgaactgacctttcaggctatggcgtacgatttgctggatatagagcaggatacttaccggtatgagactacggggctgtccgaagccagagaaaaagctgtgctcctggacgaggatgacgatctgtgggtggagctcagacacatgcatatagctgatgtctcaaagaaggttaccgagcttctgcggaccttttgtgagagtaagagattaactacagacaaggccaatatcaaggatctgtcccagatattgaaaaaaatgcctcaataccagaaagagttgaacaagtatagtactcacctacatctggctgacgattgcatgaaacactttaaaggaagtgtcgaaaaactttgttcagtggaacaggacctagctatgggaagtgatgccgagggcgagaaaattaaggactcaatgaagctaatcgtcccggtgctcttagacgccgctgtgcccgcatatgataagataagggtgctgttgttatatatcttgctccgaaacggagtgtctgaggagaatctcgctaagctcatccaacacgctaacgtccaggcgcacagctctctgataagaaatcttgaacagcttgggggtacagtaactaatcctggcggtagtggtacctccagtcggctggagcccagggaacgcatggaacctacttatcagctgagccgctggacccccgtgataaaagacgtgatggaagatgcagtggaagatcgcttagaccgcaatctgtggccatttgtatctgacccagctccgacagccagctcgcaggcagccgtgagcgccagattcggccactggcacaaaaataaagctggaatagaggcgagggccggtcctagactgatcgtctatgtgatgggcggtgttgcaatgtccgaaatgcgggcagcttacgaggttactcgggctacagagggatcaggcaggtgtagcctcgcaccccacacgtcatctccaagacccgctagctggatgacttag

SEQ ID NO: 243260 - DNA, 2421 bp, synthetic construct
  misc_feature 1..2421: note = Description of Artificial Sequence: Synthetic coding sequence
  source 1..2421: mol_type = other DNA
atgcatgggaagtccaccgctgttctggagatggactacagcatcgtggacttcctgacactgtgcgaaaccccatatcccaacgactttcaggagccatatgccgtagttgtgttactggagaaggacctagttctgatcgacctcgcccagaatggatatccaatcttcgagaatccttatcctttatcaatccatgaatcccccgtgacctgttgcgagtatttcgctgattgcccggtggatctgattcccgcactctatagcgtgggggctcggcagaagcgccagggctacagcaagaaagagtggccgattaacggcggtaactggggcctgggcgcacaatcataccccgagatcataataactgggcatgccgacggctcggtcaagttctgggacgcgagcgccatcacgcttcaggtgttatataagcttaaaacttccaaagtttttgagaaaagccgcaacaaggacgacaggccaaatacagacattgtggatgaggatccctatgccattcagatcatctcatggtgccctgagtctcggatgctctgcatagcgggagtgtcagcccatgtgatcatttatagattttctaaacaagaggtgataaccgaagtgatccctatgctcgaagtgcgcctcctttacgaaataaacgatgttgagacacccgagggcgaacagccaccacctttaccgactcctgtgggtggctctaatccacaacctatcccgcctcagagccatcctagcacttctagctcgagcagtgatggactcagagacaatgtaccatgccttaaagtgaagaacagtcctttaaaacagagcccaggttaccagacagagttggtgatacagctcgtctgggtcggcggagaacctccccagcagatcaccagcctggcggtgaatagctcttatgggctcgtggtgttcgggaactgcaacggaattgccatggttgactacctgcagaaggccgtgctgttaaacctgggtactattgagctgtacggttctaatgacccttaccgcagagaacccagatctcccagaaagagccgccagccctccggtgcaggcctatgtgatattagtgaggggactgtcgtgcccgaagatagatgcaagtcccccacttccgggtcatcatctccacataactcagatgatgaacagaaaatgaataatttcattgagaaagctaagatgtcccgcaagcttagtctgcctacagacctgaaacctgacctcgatgtgaaagataactctttttctcgctcccgttcatcaagcgtcactagcattgacaaggagagtcgagaggccatcagtgcccttcacttttgtgaaacattcacccgtaaaactgacagctccccatctccgtgtttgtgggttggtacgacattgggaacagtgctggtgatcgcattgaacctaccacccggtggggagcagcgcctcctccaacctgttattgtatccccctctgggactatccttcggctcaaaggtgccatcctaaggatggcgttcctcgacaccacaggatgccttattccacctgcttacgaaccgtggagagaacacaatgttccagaagagaaagatgagaaagagaagctgaagaagagacgtccggtcagcgtgagcccgtcatcttcacaagagatttccgagaaccagtacgctgtgatctgctctgagaagcaggcgaaggtgatatctcttccgacccagaactgcgcttacaagcaaaatattacagaaacctcatttgttctacgcggagatatcgtggccctcagcaatagcatctgtctcgcgtgcttctgcgccaacggacacatcatgacttttagtctgcctagcctcagacccttgctcgacgtgtattatctccccctcaccaatatgcgcatcgcgcgtaccttttgtttcactaacaacgggcaggcgctttatctggtcagtcctactgaaattcagagacttacctactcacaggaaacatgcgagaacttgcaggagatgctgggcgaattattcactcctgtggagacacccgaagcacccaatcgcggtttcttcaagggattgtttgggggaggtgctcagtcccttgatcgcgaagagttgttcggtgaatccagctccggtaaggccagtaggagcttggcccaacatatccctggcccagggggaatagagggtgtgaagggtgcagccagtggggtagtgggcgaacttgccagggcgagactggcattagatgaaaggggacagaaactgggagaccttgaagaaagaacggcggctatgctatcttcggcagagagcttcagcaaacacgctcacgagattatgttgaaatacaaggacaagaaatggtaccaattctag

SEQ ID NO: 243261 - DNA, 3456 bp, synthetic construct
  misc_feature 1..3456: note = Description of Artificial Sequence: Synthetic coding sequence
  source 1..3456: mol_type = other DNA
atgaggaagtttaacatccgcaaggttttagacggtttgacagctggttctagcagcgccagccagcagcagcagcagcaacaccctcccggaaacagagagccagagatacaggagacactccagtcagagcatttccagctgtgtaagacagtgcggcatgggtttccttaccaaccttccgcactcgcctttgaccctgtacagaagattttggccgtgggcacacagacaggtgctctgagacttttcggacgccctggcgtggagtgctactgccaacacgatagtggcgcagccgtgattcaactgcagtttcttatcaacgagggggcactggtgagcgcactggccgacgacacactgcatctgtggaacctgcgacaaaagcggccagctattctccattcgctgaaattctgtcgggaacgcgttaccttttgtcacttgcccttccaaagcaagtggctgtatgttgggaccgaaaggggcaatatacatattgtcaacgtggaatccttcacattgtcgggctatgtcattatgtggaacaaggctatagagctcagctctaagagtcatccaggcccagtggttcatatctcagataaccccatggatgaaggcaagctgctgattggcttcgaatcaggaaccgtcgttctctgggacctgaaatcaaagaaagccgattaccggtacacttatgatgaagcgattcactcggtcgcatggcatcatgaaggcaagcagtttatttgctcccactcggatgggaccctgaccatctggaacgtacggtctccggctaagccagtgcagacgatcactccccacgggaaacaactgaaggacgggaagaaacctgaaccttgtaaaccaatcctaaaagtcgagttcaaaaccacaagatccggcgagccatttatcattttgagcggtggtctcagctacgacactgtggggaggagaccctgtctcacggtgatgcacgggaaaagcacagccgtactcgagatggactactctatcgtcgatttcctcactctctgcgagactccgtaccctaatgacttccaggaaccctacgcggttgtcgtgctcctggagaaggatctcgtgctgatcgatctcgcccagaatggatatccaatctttgaaaatccttatcctttgagcatccatgagagtccagtgacatgctgcgagtacttcgcagactgcccggtggatctcattcccgctctttacagtgtgggcgcacgccagaagcggcaggggtattctaaaaaagagtggccaattaacggaggaaactggggcttaggcgctcagtcataccccgagattatcattacgggacatgctgacgggagcgttaagttttgggacgcttccgccatcactttacaagtcctctataaactcaaaactagcaaggtgttcgaaaagtccaggaacaaagacgatagaccaaacaccgatatcgttgacgaggatccctacgctatccaaatcatttcttggtgcccggaaagccggatgctgtgtatcgccggagtgagtgcccacgtgatcatctaccgattctccaaacaagaggtgatcaccgaagtcatccccatgctcgaggtgcggctgctctacgagattaacgacgtggagacccctgagggcgagcaaccacccccactgcctacccctgttggcggatccaacccacagcccataccacctcagtctcacccctccaccagcagttcatcaagcgacggactgagagacaacgttccctgcctcaaggtgaagaacagtcctctgaaacagtctcccggttaccagacagagctggtgattcagctcgtttgggtaggtggggaaccacctcagcagataacttccctggccgtcaattctagttatgggctggtcgtcttcggcaattgcaatggcatagccatggtagactatctccagaaggctgtgctgctgaatttgggcacaatcgaactctacggatccaatgatccgtaccgcagggagccgaggtctccgcgtaaatctcgacagccttctggcgcagggctctgtgatatttcagaaggaactgtggtccctgaagatcgctgtaaatcccctacgtcaggatctagttccccccacaacagcgatgacgagcagaaaatgaacaactttatcgagaaggtaaaaacaaagagccgcaaattctctaagatggtcgctaacgatatagcaaaaatgtcacgtaagttgtccttgcctactgacctcaagcctgaccttgatgtgaaggataacagtttctctagatctcgctcctcctcagtaacctcaatagacaaggagtctcgggaggccattagcgcactgcacttttgcgagactttcaccaggaaaactgacagttccccctccccatgtctgtgggtggggacaaccctgggcaccgttcttgttatcgccttgaacttgccccctggcggtgagcagcgcttgctgcagccggtgatcgtgtcaccaagtggtacaatcctgagactcaaaggggcaatattgcgtatggctttcctcgatactacagggtgcctgatccctcctgcctatgaaccgtggagagagcacaatgtaccagaagagaaagatgaaaaggagaaactgaaaaaaagacgccctgtttctgtgtccccaagcagctcgcaggaaatttctgagaaccaatatgctgtcatttgtagcgagaagcaagcgaaggtaatctccctgcccacccagaattgtgcctataaacagaacatcaccgaaacatcttttgttctgcggggagacatagtggccttatccaactccatctgcctggcctgcttctgtgccaatggccacattatgactttctcgctgccctcactaagaccgcttcttgatgtctactatctgcccctaacaaacatgagaatagctagaaccttttgcttcaccaataacgggcaggccttatacctggtctcccctacagagatccagaggctcacctattctcaggagacatgtgaaaatctacaagagatgctgggggagctgttcacacctgtagaaacccccgaggctcccaacagggggtttttcaagggtctcttcgggggaggcgctcaaagcttagatcgcgaggagctgtttggcgaatccagctccggaaaagcgtcacggtctcttgctcaacatatcccaggccctggcggaatcgaaggcgttaagggcgctgctagtggagtggtgggcgagctagcaagggcccgtctggcgttagacgagaggggccagaagctgggagacctggaggagcgcaccgcagctatgctctcttccgctgagtcgttttcaaagcacgcacacgaaatcatgctgaagtacaaagataagaagtggtatcagttttag

SEQ ID NO: 243262 - DNA, 525 bp, synthetic construct
  misc_feature 1..525: note = Description of Artificial Sequence: Synthetic coding sequence
  source 1..525: mol_type = other DNA
taaaaggccgtgttgttgaatctgggtaccattgagctgtacgggtccaatgatccgtataggagagaaccgaggtctcccaggaagtctagacagcctagtggggctgggttatgcgacattagtgaggggaccgtggtgccagaggatcgatgcaaatccccaacatccgggtcttcttcaccccataattctgatgacgagcagaaaatgaataacttcatagagaaagccaagatgtcccgcaagctaagtcttcctaccgatttgaagcctgacctggatgttaaggataacagcttttctcgctctcgatcgagttccgttacatctatcgacaaagagtctcgggaagcaatctctgccctgcatttctgcgagacatttacccgcaagacagacagcagcccaagcccatgcctgtgggtcggaaccactctggggacagttttagttattgccttaaatttgcctcctgggggtgagcagcgtctcttgcagcccgttatcgtgagtccatcgtag

SEQ ID NO: 243263 - DNA, 840 bp, synthetic construct
  misc_feature 1..840: note = Description of Artificial Sequence: Synthetic coding sequence
  source 1..840: mol_type = other DNA
atggtggattaccttcagaaggccgtcctgctgaatcttggtaccatcgaactatacgggtcaaacgacccataccggcgtgagcctaggtccccccgaaagtcacgccagccatctggaggggtgctaatcgtgacctcttgtatgtgcgggctctccagcctgtatagcgagtcaatgaagaaactgagaagtagctttctcacgggcctctgtgacatctccgaaggcacagtggtaccagaggatcgatgtaaatcccctacttcagccaaaatgtctcgaaagctgtcgctccctactgatttgaagccggatctcgacgtaaaggacaatagtttcagccgtagcaggtctagctctgtgacgtccattgacaaggagtcacgggaggcaatcagtgctctgcatttttgcgaaacctttactagaaagactgactccagcccctccccatgcctatgggtgggaacgacactcggaacggttttggtgattgctctgaacctccctcctgggggagaacaacgactccttcaacccgtcatcgtcagtccaagcggtacaatcctgagactcaagggggctatccttcggatggctttcctggataccactggctgtctaattccccctgcatacgaaccttggcgagaacacaatgtgcctgaggaaaaagacgagaaggagaagttgaagaagagaagacctgtttctgtatctcccagttcctctcaagagatttctgaaaaccaatacgccgtgatttgctcagagaagcaggcgaaggtgatttccttgccgactcagaattgcgcgtacaagcagaacatcacatag

SEQ ID NO: 243264 - DNA, 3297 bp, synthetic construct
  misc_feature 1..3297: note = Description of Artificial Sequence: Synthetic coding sequence
  source 1..3297: mol_type = other DNA
atgcggaaattcaatatccgaaaggtacttgatggactgaccgccggatcaagcagcgcctcccagcagcagcagcagcagcaccccccaggcaacagggaaccagagatacaagaaaccctgcagagcgaacatttccagctgtgtaagactgtcaggcacggctttccttatcagccgagcgccctggctttcgatcctgttcaaaagatattggcagtcggcacgcagacaggggcactgcgcctatttggacgacctggcgtcgaatgttactgtcagcacgattctggggctgcggtgattcaactgcaattcctaattaacgaaggagcactggtctctgctctggccgacgacactcttcatctgtggaacttgcgccagaaacggcctgcaatcctgcactctctcaagttctgtcgggaaagggttactttttgccacctcccatttcagagcaagtggctgtatgtggggactgaaagggggaatattcatatcgtgaacgtcgaatcctttacacttagcggctacgtaatcatgtggaacaaagctatagagctatcctcaaaaagtcatccaggcccagtggtccacattagtgacaaccctatggacgaggggaaacttctgattgggtttgaatctgggacagtggtgttgtgggatttgaaaagcaagaaggctgactaccgttatacttatgacgaagctatccacagtgtcgcttggcaccacgaagggaagcagttcatctgttcccacagcgacggcactctgaccatctggaacgtgcgcagcccggcaaagccagttcaaaccatcaccccacacgggaaacagctaaaggatggcaaaaaacctgaaccatgtaagcctatcctcaaagtcgagttcaaaacaacacggtcaggcgaacctttcatcatcttgagtggagggctttcctacgacacggtgggtcgcagaccatgtctaacagtcatgcacggtaagagcaccgccgtgctcgagatggattacagcattgtcgatttccttacactctgcgagaccccttaccccaatgacttccaagaaccttatgccgtcgttgtactcctagagaaggacctcgtgctgatcgatctggcgcagaatggatacccaatattcgagaacccctacccactctccatccatgagagcccggtcacatgttgcgagtactttgcagactgtccggtggatttgatcccagccctgtattctgtgggggcaaggcagaaacgtcagggatactcgaagaaagaatggccaattaatggagggaactggggactcggcgctcagtcatacccggaaattatcattaccggacacgcggatggcagcgtgaagttctgggatgccagcgcgattaccctacaagtgctttataagctgaaaaccagtaaagtcttcgagaaatcgagaaacaaagacgatcgacctaatacagatattgtggatgaggatccctacgcaatccagattatctcctggtgtcctgagtctcgcatgctctgcattgctggggttagcgcgcacgtgatcatttacagattcagtaaacaggaagttatcaccgaagtgatcccgatgctggaggtgcggttgctctatgagattaacgacgtcgagacccctgaaggggaacagccccctccgcttcccactccagttggcggaagcaacccgcagccaatccctccccagtctcatccgtccacatcttcaagcagctcagacggcctgagggacaacgtgccgtgcctaaaggtgaagaacagccccctgaaacagtctccagggtatcagacagaactcgtgatccaacttgtatgggttgggggagaaccccctcagcagatcactagtctggctgtaaactcctcgtatggtttggtggtttttgggaactgcaatgggattgccatggtagattatctccagaaagcagttcttctaaacctgggcaccatcgagctgtatggctccaacgatccctaccgcagggagcctaggtcaccacgcaaatcaaggcagccctccggcgcagggctgtgcgacatttccgagggaaccgtagtaccagaggatagatgtaaaagccccacctctgatgtgaaggataatagtttttctagatcgcgctctagctccgtcactagcattgacaaggaatcacgtgaggcaatctcagcgttgcacttctgcgagacctttacacggaagactgatagctctcctagtccatgcctgtgggtaggaacaactttggggacggtgctcgtgattgcacttaacctcccacccggaggggagcagagactcctgcaacctgtgattgtgagcccttctggaacaattctgcgcttgaaaggtgctatcctcagaatggcatttctcgacactactggctgcctcatcccccctgcgtatgagccctggagagagcacaacgtgccggaggagaaagatgaaaaagaaaaactgaaaaagcgccgacccgtgagtgtaagccccagctctagccaggaaataagtgagaaccagtatgcagtgatctgttcagaaaaacaagccaaagtgatcagtctgcccacccagaattgtgcttataagcagaacattactgagactagttttgtgctgcgcggtgatatcgttgcattgtccaacagtatatgtctggcttgtttctgcgctaacggtcacattatgacattctcgttgccctccttgcggcctcttctggacgtgtattatctaccactgacaaacatgcgtatcgcccgtaccttctgttttacaaacaacggacaagccctgtacctggtctcccccacagagatccagaggttgacatatagccaggagacctgtgagaatctgcaggaaatgctcggcgagctgtttacccctgtggagacacccgaggctcccaaccgtgggtttttcaaagggctgttcgggggtggagcacagtcattggatagggaggaactgtttggggagtcgtctagtggcaaggcctcccgatctcttgcacagcacattcccggaccaggtggaatagaaggggtaaaaggtgcggcttctggcgtcgtgggagagttggccagagccaggctcgccctagatgaacgtggacagaaactgggcgatttggaggaaagaacagccgctatgctatccagtgccgagagtttcagtaagcacgcccatgagatcatgctcaagtacaaggacaaaaagtggtaccaattctag

SEQ ID NO: 243265 - DNA, 3348 bp, synthetic construct
  misc_feature 1..3348: note = Description of Artificial Sequence: Synthetic coding sequence
  source 1..3348: mol_type = other DNA
atgagaaaattcaacattaggaaagttcttgatggcctgacggccggttcttcttctgcctcccaacagcagcagcagcagcatccccctggcaatcgggagcctgagatccaagagacactgcagtctgaacacttccagctctgcaagacagtgcgtcacggcttcccttaccagccgagtgctttagccttcgacccagtgcagaagattttggccgtaggaacacaaaccggagccctcaggctgttcggtcgtccaggcgttgagtgctactgtcaacacgactctggggctgccgtaatacagctgcagtttctaataaatgaaggggctctggtctctgccttagccgatgacacccttcatttgtggaacctgcgtcaaaaaagacctgcgatactgcattcgctcaaattctgtagagagcgtgtcaccttttgccacttgccttttcagagcaagtggctttatgttgggactgaacgtggcaacatccacatcgtcaacgtcgagagcttcacgctgagcgggtatgtaattatgtggaacaaggccattgagctgtccagcaagtcccaccccggtcctgttgtgcatatctctgataatcctatggacgaaggcaaacttctcattggtttcgaaagcggcactgtggtgctgtgggacctgaagtctaaaaaagcggactaccgctatacttacgacgaggctattcacagcgttgcttggcatcacgagggcaaacagttcatctgcagtcatagcgacgggacgttgaccatttggaacgtgcggtctccagccaagcccgtgcagaccattaccccccacggcaaacaactcaaagacggcaaaaaaccagaaccttgtaaacctatactgaaggtggagtttaagaccactaggtcgggagaaccgtttatcattctgtcaggcggattgtcttatgataccgtggggaggcgtccttgcttgacggtgatgcatggcaagtcgacagctgttctcgagatggattattccattgttgactttctcacactgtgcgagaccccttacccaaatgattttcaagaaccatacgccgtggtcgtgctcctggagaaagatctggtgctgatcgaccttgcgcagaacggttacccaatctttgaaaacccttaccctctcagcatacacgaaagcccggtgacctgctgtgagtactttgccgattgccctgtggatctgattccagcactgtactctgtcggagctcgacagaagagacagggatattcaaaaaaggagtggccaatcaatggaggtaattgggggctgggtgctcagtcatatcccgaaataattatcaccggtcatgccgatggatcagtaaaattctgggacgcttctgcaataaccctccaggtgctgtacaaactgaagacttctaaggtgtttgagaaaagtagaaacaaggacgataggcccaataccgacatcgtggatgaggatccatacgccattcagattatctcatggtgtcctgagtcacggatgctgtgcattgccggagtttcagctcacgtcatcatttaccgattctcaaagcaggaggtgattaccgaagtgatacccatgctagaagtgaggctcctgtatgaaatcaatgatgtcgagacacctgagggcgagcagcctcctccactccctacgccagtggggggttcaaaccctcagccaattccacctcaaagtcacccgagtaccagctcatcctcatccgacggtctgagagataacgtgccttgcctgaaggtcaaaaatagccctctcaagcaaagccctggatatcagacagagttggtgatccagctggtgtgggtaggaggggagccacctcagcaaattacctccctcgctgtgaactcttcatacggattggtggtttttggcaactgtaacggcattgccatggttgattacctgcaaaaggctgtgctccttaatctgggcaccatcgagttgtacggtagcaacgatccctacaggagagagcctaggtccccccgtaaatccagacagccctccggcgcaggcctctgtgacatttcagaaggaaccgttgtgccagaagaccggtgcaaaagccctacaagcgccaagatgtcccgcaagctctccttgcccacggatctgaaaccggatttagatgtgaaagacaactcattctcaagatctcggtcatcttccgtaacaagtatcgacaaggaatcccgggaagctatttccgcactgcatttctgtgagacgtttacccgaaaaaccgactcttcaccatcaccatgcctgtgggtgggcaccacattgggtacagtcctggtgatcgctctgaaccttccccctggcggagaacagagattgttgcaaccggtgatagttagtccatctggcactatactgcgtctgaagggtgccatattgcggatggctttcctggacaccacgggctgtctgatccccccagcgtacgaaccatggagggagcacaacgtccccgaagagaaagatgaaaaggagaagctgaagaagcgtcggccagtctctgtgagtccctcctcttcacaggagatctctgagaatcagtacgctgtgatatgctccgagaaacaggccaaagtgatctccctcccaacgcagaattgcgcatacaaacagaatatcacagaaaccagcttcgtgctgcgtggggatatcgttgcattatccaattccatctgtcttgcctgtttctgtgcgaacggccatatcatgacttttagcttaccatctctccggccactcctcgatgtgtattacttgcccctgacaaacatgaggatcgctcggaccttttgctttacaaacaacggacaggctctgtacctagtgagtcctactgagatacagcgcttgacctattcgcaggaaacctgcgagaacttacaagagatgctgggggagctctttacacctgtcgagacccccgaagccccaaatcggggtttttttaaggggctctttgggggtggggctcaaagcctggatagggaagaattgttcggagagtccagctcaggcaaggcaagtcggtccctcgcacaacatataccgggacctggcggaattgaaggtgtcaaaggtgccgcaagtggggtggttggtgagctcgctcgggcaaggctggccttagacgaacgcggacagaagctgggtgatctcgaagagagaactgctgctatgctgtccagtgctgaatccttctcaaaacacgcacatgaaatcatgctaaaatacaaggacaaaaagtggtaccaattctag

SEQ ID NO: 243266 - DNA, 795 bp, synthetic construct
  misc_feature 1..795: note = Description of Artificial Sequence: Synthetic coding sequence
  source 1..795: mol_type = other DNA
attgagctgtacgggagcaacgatccatacagaagagagccccgttccccgaggaagagccgtcaaccatctggtggcgttctaatcgtcacttcttgtatgtgcgggctgtcgtcactgtatagcgagagtatgaagaagctcaggtcctcgttcttgactggtctctgcgacatcagtgagggcaccgtggttcccgaggatcgttgtaagagtccaacctccgctaaaatgtccaggaaactgtcccttcctacagatcttaagccagatttagacgtgaaggataattcattctccaggtcccgctcttcgagcgtcacaagcatagacaaggagagtagagaggcaatttctgctttgcacttttgcgaaacttttacccgcaagacggattcctctccatcaccgtgcctatgggttggaactacccttggcaccgtgcttgtgatcgcactcaacctccctccgggtggggagcagcggctcctgcaaccagtcatcgtctctccatccggaacgattctgagacttaagggtgccattcttcggatggcattcctggatacgacgggctgcttaattccccctgcctatgagccttggcgcgagcataatgtgcccgaggaaaaagacgagaaagaaaagctcaaaaaacgccgacccgtcagtgtctctccctctagtagtcaagagatttcggagaaccagtacgccgtgatatgtagcgagaaacaggccaaggtgatttcacttcccacgcagaattgcgcctacaagcagaatattacttag

SEQ ID NO: 243267 - DNA, 927 bp, synthetic construct
  misc_feature 1..927: note = Description of Artificial Sequence: Synthetic coding sequence
  source 1..927: mol_type = other DNA
atgcggaagtttaatatcagaaaggttctcgacggcctcacagccggtagctccagtgctagccagcaacaacaacagcagcacccaccaggaaatcgagaaccagagattcaggagacactgcagtccgaacacttccagctatgcaagactgtcagacacgggttcccttatcagccctccgcccttgctttcgatccggtgcagaaaatcttagccgtgggcacacagacaggcgctctgaggttgtttggtcgccctggggtagaatgctactgccaacacgactctggagcggctgttattcaactgcagttcctgatcaacgaaggagccctagtgtcagcattggctgatgacactttgcatctgtggaatctccggcaaaagagacctgccattctgcactcactcaagttctgcagagaacgtgtgacattctgccatttgccctttcagagtaagtggttgtatgtgggtaccgaaaggggcaatattcatattgtgaatgtcgagtcctttaccctcagtggctacgttatcatgtggaacaaggcaatcgaactctccagtaaaagccatcctggtcccgtggtacatatctccgacaatcccatggatgagggcaaattattgatcggattcgagagcggaacagtcgtgctctgggacttgaaaagtaagaaagccgactacagatatacgtacgacgaagccatacacagtgtcgcttggcatcatgagggcaaacagttcatatgctctcactctgacggaacactgacaatttggaatgtccgttcacccgctaaacccgtgcagacgattacacctcacgggaagcagctcaaggatgggaagaaaccagaaccatgtaagccgattctgaaggtcgaattcaaaacgaccaggagtggcgtctgctag

SEQ ID NO: 243268 - DNA, 3561 bp, synthetic construct
  misc_feature 1..3561: note = Description of Artificial Sequence: Synthetic coding sequence
  source 1..3561: mol_type = other DNA
atgaaaaaatttaatttccgaaaagtgcttgacggcctcacagcaagttctcctgggagcggttcttcctcaggcagtaatagcgggggaggcgcaggctccggctccgttcaccctgctggcaccgccggagtcctccgggaagagatacaggagacactcacgtccgagtatttccagatctgtaaaaccgtgcgtcacggattccctcaccaacctaccgctctcgctttcgatccggttcagaaaattcttgccattggcactcgcactggagctatacggattttaggcaggcctggcgtggattgctattgtcagcatgagtccggagcagcggttctgcagttgcagtttctgattaacgagggggcattagtcagcgcctcatccgacgacaccctccatctctggaatctgcggcagaagcgtcccgctatcctacattccctaaagttcaaccgagagagaattacttactgtcatcttccattccagtcaaagtggctgtacgttgggactgaacggggtaacactcacattgtcaacatcgaaagctttattctgtctggttacgtcattatgtggaacaaagccatcgagctcagcactaagactcacccaggccctgtggttcacctgtccgattctccgagggatgaaggcaaactgctgatcggctacgagaacgggacggtcgtgttttgggatctgaaatctaaaagggccgagttgcgggtgtattatgacgaggctattcattcaatagactggcaccatgagggtaaacagttcatgtgtagtcacagcgatggttcactcacactctggaacctcaaatcaccctctaggccgtttcagacaaccatacctcacggtaagtctcagcgggaggggagaaaatctgagtcttgtaaacctatcttaaaggtggagtacaagacttgcaaaaattctgagcctttcatcatcttctctggcggactctcctatgacaaagcttgtagacgcccatccctcaccatcatgcatggcaaggcaatcacagttttagagatggatcaccccatcgtggaattccttaccctgtgtgaaaccccatatcctaacgagtttcaggagccctacgccgtcgtagtcttgcttgagaaagatctgatcgtggtagacctcacgcagagcaatttccccattttcgaaaatccgtatccgatggatatccacgagtcccctgtgacctgtacggcatattttgccgattgcccaccggatcttattctagtcttgtactccatcggggtcaagcataagaagcaggggtacagcaataaggaatggccaatcagtggaggtgcctggaatctgggggctcagacttaccccgaaattattattactggccatgccgatggctccataaagttttgggacgccagcgccataactctgcagatgctgtataagctaaagacctccaaagtcttcgagaagcagaaggtgggggagggcaagcagacctgtgagatagtggaagaagacccattcgccatccagatgatctactggtgtccagagtctaggattttctgcgtaagcggagtttctgcttacgttatcatctacaaattttctcggcacgaaatcactacagagattgtgtcactggaagtgaggcttcagtacgatgtcgaggacatcattaccccggagccagaaacatcccctccattccccgatctctcagctcagttaccttcctctcgtagtttgagcggaagcacaaataccgttgcctcagaaggcgtgacaaaagactctatcccatgcttaaatgtgaagacaagacctgtgcgcatgccccctggctaccaggcagagctcgtgatccaactcgtgtgggtagatggagagccccctcagcagattacctctcttgccgttagttctgcctatggcatcgtcgcctttggtaactgcaatggcctggctgtcgtagattttattcagaaaaccgttctgctcagtatgggtaccattgatctgtataggtcgagcgacctctatcaacggcagccaagatctccacggaaaaacaagcagttcattgctgacaacttctgtatgagaggcctcagtaatttctaccctgaccttaccaagcgcatacggacctcctatcagtccctgactgaactgaatgacagtcccgttcccctggaacttgaaaggtgtaagtccccgaccagcgatcatgtgaacgggcactgtacatcccctaccagccaaagctgctcatcaggaaagcgtctgagcagtgccgacgtgagcaaagtaaatcgctggggcccagggaggccaccattccgtaaggcacaaagcgctgcctgcatggagatctctctccccgtgaccacagaggagaatcgcgagaattcctacaatcggtctcggtcgtcatctatctcttctattgacaaggacagcaaggaggccatcaccgccttgtactttatggatagttttgctcggaagaatgactctaccatttcaccatgtctcttcgtgggcacatctctgggaatggttttgattataagccttaatctcccactcgctgatgagcaacgctttaccgaaccagtcatggtgctaccctctggtacttttctcagtctcaagggggctgtcctaaccttctcctgcatggaccgtatgggcggtcttatgcaacctccttatgaggtatggagagaccccaacaatatcgatgagaacgagaagagttggcggaggaaagtggtaatgaacagctctagtgcctctcaggagatcggcgaccaccagtacaccatcatctgtagcgagaaacaggcaaaagtgttctccctaccttcccagacctgcctgtatgttcacaacataacagagacaagctttatcttgcaagccaacgtcgtcgtcatgtgctccagtgcgtgcttagcctgcttctgcgcaaacggacacattatgatcatgtctctcccttccctccgacctatgttggatgtgaattacctccctctgacagacatgcgcattgctcgaaccttctgtttcaccaatgaggggcaggctctttacctggtaagcccgaccgaaattcagcgactgacgtactcccaggagatgtgtgacaatttacaggatatgttaggagacctcttcacgcccatcgagacacccgaggcccagaataggggattccttaaaggcctcttcggcggaagcggccagacctttgatcgtgaagaactgtttggagaggccagcgccggtaaggccagcagatctctggctcaacatattcccggtccaggttcaatcgaagggatgaagggcgctgccggaggtgtcatgggagagttgacccgagcgcgaatcgcccttgacgaacgcggacagcgtctgggggaacttgaggagaagactgcgggtatgatgacttctgcggaggccttttctaaacatgcccacgagttaatgctgaaatataaagacaaaaagtggtaccaattctag

SEQ ID NO: 243269 - DNA, 384 bp, synthetic construct
  misc_feature 1..384: note = Description of Artificial Sequence: Synthetic coding sequence
  source 1..384: mol_type = other DNA
atgaaaaaatttaacttccgcaaggttctggacgggctgaccgcgtcgtctcctgggtcaggaagctcctctggctctaattcaggaggaggggctggcagtggatctgtgcacccagctgggaccgcaggggtgctgagggaggaaattcaggagacccttacatcagaatacttccaaatttgcaaaacagtgaggcacggatttccacaccaacctaccgcactggcgttcgatcccgtccagaaaatactagccatcggaactcggacgggagcaataagaattcttggcagacctggcgttgattgttactgtcagcacgagtcaggggcagctgtactccagcttcagttcttaatcaatgagggcgctttggtgtag

SEQ ID NO: 243270 - DNA, 633 bp, synthetic construct
  misc_feature 1..633: note = Description of Artificial Sequence: Synthetic coding sequence
  source 1..633: mol_type = other DNA
atgtcagctaagagcgcgatcagcaaagagatattcgccccactagatgagcggatgctgggcgcagtacaggtcaagcgtcgtaccaagaaaaaaattccgtttctggctactggcggacaaggtgagtaccttacctatatttgtctctccgtgaccaataaaaagccaacacaggcctccatcacaaaagtgaagcagtttgagggttctacctcttttgtcagacgatcccagtggatgctcgagcagctgcggcaggtgaatggcatagatcccaacggcgatagtgccgagtttgatcttctgttcgagaatgcctttgaccagtgggtggcaagtaccgcttcagagaagtgcacattttttcaaatcctccatcacacttgtcagcgatacctgactgacagaaaacctgagttcataaattgtcaaagcaagatcatgggcggtaacagcattctacattcagctgccgacagtgtgaccagtgcagtccagaaggcatcacaggctttgaatgaacgtggagagcgcttgggtcgcgcagaggaaaagacagaggacttaaagaactccgctcagcagtttgccgagacagcccacaagctggccatgaagcacaagtgttag

SEQ ID NO: 243271 - DNA, 633 bp, synthetic construct
  misc_feature 1..633: note = Description of Artificial Sequence: Synthetic coding sequence
  source 1..633: mol_type = other DNA
atgtccgccaagagtgcaataagtaaggaaattttcgcccctctggacgagcgcatgcttggcgctgtgcaggtgaagcgacgcacaaaaaagaaaattccctttctcgccaccggaggtcaaggcgaatacttgacctatatctgcctgtccgtgaccaacaagaagcccacccaggcctctataacaaaagtgaagcaattcgagggaagtacaagctttgtgcggagatcacaatggatgctggaacagctgcggcaggtaaatggcatagacccgaacggggatagcgccgagtttgacctcctgttcgagaacgcattcgaccagtgggtcgcgagtacagcttctgagaagtgcacttttttccagatcctccatcacacatgtcagcggtacctgaccgataggaaaccagagtttatcaattgtcaaagcaagattatgggcggaaatagtatattacattctgccgcagatagcgtgaccagcgctgtgcagaaagcctcccaggctctcaacgaaagaggcgagcgcctgggcagagctgaggaaaaaactgaggacctcaagaacagtgcgcagcaattcgccgagacagcacataaggtgacgttccgagggaggaagtag

SEQ ID NO: 243272 - DNA, 633 bp, synthetic construct
  misc_feature 1..633: note = Description of Artificial Sequence: Synthetic coding sequence
  source 1..633: mol_type = other DNA
atgagcgccaagagtgctattagtaaagagatattcgccccacttgacgaacgaatgctgggggcagtacaagtgaaacgtcggacgaagaaaaagatccccttcttagccacaggcggtcaaggcgagtatctgacttatatttgcctcagcgtgactaacaaaaaacccacacaggcttcaataaccaaagtgaagcagtttgagggctcaacctccttcgtgagacgctctcaatggatgctggagcaactgcgacaggtgaacggtatcgatccaaacggagactccgccgagtttgatctgctctttgaaaacgcctttgaccagtgggtcgcgagcaccgccagcgagaaatgcacgttctttcagatattgcaccatacgtgccagagatacctcacagatcggaagcccgagttcattaactgccagagcaaaataatgggcggaaattccattctgcattccgctgctgattcagtcacttccgcggtgcagaaagcttcacaggccctcaacgaaaggggcgagcgccttggacgagcagaagaaaagaccgaggacctgaagaactctgctcaacagttcgctgagactgctcacaagctcgcaatgaagcacaagtgctag

SEQ ID NO: 243273 - DNA, 633 bp, synthetic construct
  misc_feature 1..633: note = Description of Artificial Sequence: Synthetic coding sequence
  source 1..633: mol_type = other DNA
atgagtgccaagagcgcgatttcaaaggagatattcgcgccactggatgaacgcatgctgggcgcagtgcaggttaagcggaggactaaaaagaagattccattcttggcaaccggcggacagggggaatatctcacatacatctgcctgtccgtcaccaacaaaaaaccaacacaagctagtattaccaaggtcaagcaattcgaaggcagcactagttttgtcagacggtcccaatggatgttagagcagctccggcaagtcaacggaattgatccgaacggggatagtgcagagttcgaccttctgttcgaaaacgcttttgatcaatgggtggctagcactgcgtccgaaaagtgtacgtttttccagattctgcatcatacttgccagcggtacctcactgatcggaagcccgagtttattaactgccaaagtaagatcatgggcggaaattcaattctacactcagccgctgactctgtgacttccgccgtccaaaaggcatcacaagccctaaacgagcgcggagagcgtctgggacgggcagaggagaaaaccgaggatcttaagaactctgcacagcagtttgcggagacagcccataagcttgcaatgaagcataaatgctag

SEQ ID NO: 243274 - DNA, 633 bp, synthetic construct
  misc_feature 1..633: note = Description of Artificial Sequence: Synthetic coding sequence
  source 1..633: mol_type = other DNA
atgtctgcaaaatccgccatctcaaaggagatcttcgcccctctcgacgagcggatgctaggggcagtacaagtgaaacggagaaccaagaagaagattccattccttgcaacgggaggacagggagaatacttgacatatatttgcctctcagtgaccaataagaaacctacacaggcgtcaattaccaaggtgaaacagttcgaggggtcaacaagctttgtccggcgttcacaatggatgctagagcagctaagacaggtcaacggaatagaccctaatggagattcagctgaatttgacctgttatttgaaaatgcttttgaccagtgggttgcatcgaccgcgagtgagaaatgtaccttctttcagatattgcatcacacatgtcagcgctatttaacagatagaaagccggagttcatcaactgtcagtctaagatcatgggtggcaattccatccttcactccgcagctgattctgttacctccgccgttcagaaggcttcccaggctctgaatgagcggggtgagagactgggccgagctgaggaaaaaactgaggacctgaaaaattctgctcaacaatttgcagagacagctcataagctggctatgaaacataagtgttag

SEQ ID NO: 243275 - DNA, 327 bp, synthetic construct
  misc_feature 1..327: note = Description of Artificial Sequence: Synthetic coding sequence
  source 1..327: mol_type = other DNA
atgtccgcttgctttctggacacgcgtcgtgcggcatttctccagtgcgaccttcccagtagctacaggatattaacattaccagaatctgggcattgcggaagcgccgagccagtcagcgacgctcccgctctcctgctctcaggtaactccattctgcacagtgccgctgactcagttactagcgccgtgcagaaggcctctcaggccctgaacgagagaggagagcggctggggagggctgaggagaaaacagaagacttgaagaactctgctcaacagtttgctgagacagcgcacaaattagctatgaaacataaatgctag

SEQ ID NO: 243276 - DNA, 633 bp, synthetic construct
  misc_feature 1..633: note = Description of Artificial Sequence: Synthetic coding sequence
  source 1..633: mol_type = other DNA
atgtctgcaaagtccgccatctctaaggaaatttttgcaccactcgatgagagaatgctgggtgctgtacaggtaaaacggaggactaaaaaaaaaatcccgtttcttgctacagggggtcagggagagtaccttacctatatttgtctcagcgtcactaataagaagcctacccaagcaagcatcaccaaggtgaaacagtttgagggcagtacgtcctttgtgcggagatctcaatggatgctggagcagctccgacaggtgaacgggattgaccccaatggggatagtgcagagttcgacctgttatttgagaatgcctttgaccaatgggtcgcatcaacagccagcgagaaatgcacattcttccagatactgcaccacacttgccaaagatacctaacagacaggaaaccagaatttatcaattgccagagtaagataatgggcggaaactcaatcctgcacagtgccgctgatagtgtaacctccgctgtccagaaggcctcgcaagctctcaatgagcgaggggaacgcctgggcagggcggaggagaagactgaggacctgaaaaacagcgcccaacagtttgcagagaccgcgcataaactggcaatgaagcacaaatgttag

SEQ ID NO: 243277 - DNA, 633 bp, synthetic construct
  misc_feature 1..633: note = Description of Artificial Sequence: Synthetic coding sequence
  source 1..633: mol_type = other DNA
atgagcgccaaatctgccatctctaaggagattttcgctccactagatgagagaatgctcggcgctgtgcaggtgaagcgacggaccaagaaaaagattccattcctcgccaccggaggacaaggtgagtatctaacctatatttgtctctccgtgactaacaagaagccaacacaggcttcaattactaaggtcaagcagtttgaggggtccacgtctttcgttagaaggagccaatggatgctggaacagctgcgccaagtgaacgggatcgacccgaatggtgactccgctgagtttgacctgttattcgagaatgcgttcgaccagtgggtggctagcactgcctccgagaaatgtacattcttccaaatcctccaccacacgtgccagcgctaccttactgatcggaagccggagttcatcaactgtcaaagcaagatcatgggcggaaactccatcctgcattcagctgcagacagcgtgaccagtgccgtgcagaaggcatcccaagccctgaacgagcggggagagagactcggcagagccgaggagaagacggaagacctgaagaattccgcccagcaattcgcagaaaccgctcataaactggcaatgaagcataaatgttag

SEQ ID NO: 243278 - DNA, 1617 bp, synthetic construct
  misc_feature 1..1617: note = Description of Artificial Sequence: Synthetic coding sequence
  source 1..1617: mol_type = other DNA
atggctgttgcagccgcagccgctgccgctgggcctgccggtgccggaggcggtcgggcacagaggagtggtctgttggaggtcctggtcagggacagatggcacaaggtgctggtcaatctgtccgaggatgcattggtgctctcctccgaagagggtgctgcggcatacaatggaatcgggactgcaactaatggctccttctgccgtggagctggcgcaggccatcccggagcaggaggcgcacagcccccagacagccccgcaggcgtgaggaccgcattcaccgatctgcctgaacaggttccggagtctatctcaaatcagaaacgaggcgtgaaagtcctaaaacaggagttaggaggccttggtatcagcatcaaaggtggaaaagaaaacaagatgcccatattaattagtaagatatttaagggcctcgccgctgaccagacccaagctctttacgttggagatgctattctgtcggtgaatggcgcagacctgcgtgatgccactcacgatgaggctgtgcaggctttgaagcgcgcaggaaaggaggtcctcttggaggtcaaatacatgcgcgaagccactccctatgtgaaaaaaggcagccccgtttccgaaatcggctgggagacaccaccacctgaatctccccgactgggtggaagtacctcggacccaccctcctctcaaagcttttcctttcacagggacagaaaatcaattccacttaagatgtgttatgtgacccgttccatggctctggcagaccccgaaaatagacagcttgagatccattctcctgacgccaagcacaccgtcatcctcaggtctaaggactctgcgaccgcgcaggcctggttctccgccatacattccaacgtaaacgatctgctcacgagggtgattgcagaggttcgcgagcagctgggaaaaaccggcatcgcgggttctcgggagataagacacctcggttggctggccgaaaaagtgcctggggaaagcaaaaagcagtggaagcccgctctcgtcgtgctgaccgagaaggatctgcttatatacgactccatgcctaggaggaaggaggcttggttctctcctgtacacacgtacccacttctggctactcgcttggtgcattccgggcctggcaagggaagtccccaagctggcgtggatctaagtttcgctacccgaaccggtacccgacagggcattgagacgcatcttttcagagctgagaccagcagagacctatcgcactggactcgctctattgtgcaggggtgtcataacagcgctgaattgatcgccgaaatttcaaccgcctgcacttataaaaaccaggaatgcagattaactatccactacgaaaatggtttctctatcaccactgagccccaggagggcgctttccctaagacgatcatccaatccccatatgagaagcttaagatgagctccgatgatggtattcgcatgctgtatctcgatttcggcggaaaggatggagagattcaattggatctgcattcgtgccccaagcccatcgtttttataatccacagtttcctctccgctaagatcactcggctggggctcgtggcatag

SEQ ID NO: 243279 - DNA, 1617 bp, synthetic construct
  misc_feature 1..1617: note = Description of Artificial Sequence: Synthetic coding sequence
  source 1..1617: mol_type = other DNA
atggctgtggctgccgcagcagctgccgcaggtccggcaggggctggcggtggcagagcccagcgttccgggctcctagaagtcttagttcgtgataggtggcacaaagtcctggtgaatctctccgaggatgcactcgtgctttcgtctgaggaaggagccgctgcttacaacgggattggcaccgcaacaaatggtagtttctgcagaggcgctggcgctgggcaccctggggcagggggtgctcaaccacccgacagccccgcaggggtccgaaccgccttcacggacctgcccgagcaggtgcctgaatcaatcagcaatcagaagcgaggcgtgaaagtcttgaagcaggagctgggcggtctggggatctccatcaaggggggaaaagagaataaaatgccaattctgatttcaaaaattttcaaggggcttgccgcagaccaaactcaagccctgtatgttggcgatgccattctgtcggtcaacggcgcagacctgagagacgcaacacacgatgaggcagtgcaggctctgaaacgagcaggcaaagaagtcctgctggaggtgaaatatatgagagaggcaactccctatgttaagaaagggagccccgtgtcagaaataggatgggagacccctccccctgaatcccctaggctcggaggttcaacatctgaccccccaagctcccaatcgttctctttccatcgcgatcgcaaatcaattccgctcaagatgtgctatgttaccaggtcaatggcattggccgatccggagaacaggcaactggagatccactcgcctgacgcaaagcatacggtgattctgaggtctaaggatagcgcgacagcacaagcatggttctctgcaatccacagtaacgtgaatgacctgttgaccagagtgattgctgaggtccgggagcagttggggaagacgggcatcgccggtagccgggaaatcaggcatctcggatggctggccgagaaagtccccggtgaatcgaagaaacagtggaaaccggctctagttgtcttgaccgagaaggacttgctaatttatgatagcatgcctaggcgtaaggaagcatggttctctcctgtgcatacataccctcttctcgccaccagattagtgcacagtggcccaggaaaaggatctcctcaggctggggtagatttaagtttcgcaacaaggactggcacaaggcaaggcatcgaaactcatctgtttcgtgccgaaacttccagagacttgagccattggaccagatctatcgtgcagggttgtcataacagcgccgaactcatcgctgaaatctccactgcatgcacgtataaaaaccaggaatgccgcctgaccatccactacgaaaatggcttctccatcaccacagaacctcaggagggggcatttcctaaaaccatcatacagtcaccttatgaaaaattaaagatgagcagcgacgatggaatcaggatgctgtacctggactttggtgggaaggatggagagatacagcttgacctccactcgtgtcctaagcccatagtgtttattattcactcctttctgagtgccaagattactcgactgggactggtggcgtag

SEQ ID NO: 243280 - DNA, 87 bp, synthetic construct
  misc_feature 1..87: note = Description of Artificial Sequence: Synthetic coding sequence
  source 1..87: mol_type = other DNA
atggctgttgctgctgcagcggcagctgcgggaccggcaggagcgggaggcggacgcgctcagagaagcggactcctggaagtgtag

SEQ ID NO: 243281 - DNA, 1623 bp, synthetic construct
  misc_feature 1..1623: note = Description of Artificial Sequence: Synthetic coding sequence
  source 1..1623: mol_type = other DNA
atgcgggtggccgctgccacagcggctgctggggcaggtccagccatggctgtgtggactcgggctactaaggccggattagtggagctcttattgcgtgaacgctgggttcgagtcgttgccgagttgagcggtgaatccctgagcttaaccggagatgccgctgcagcagagcttgagccagccctcggaccagccgcagcagctttcaacggccttccaaatggcggaggggctggtgatagcttgccgggttctccctctcgcggattgggcccaccatcgccaccggcacccccaagaggcccagctggcgaggcgggagccagtccgcctgtgcgacgcgtgcgggtcgtcaaacaagaagccggtggcctgggcatcagcattaaagggggaagagagaatcgcatgccaatactcatcagtaaaatttttcctgggttggcagcggaccagtctcgcgctctgagactaggtgacgcgattctcagcgtcaatggtacagacctacgccaggccactcacgatcaagcggtacaggcactgaagcgcgcaggcaaagaggttctcctggaggtcaaattcatcagggaggtcaccccttacattaagaagcccagcctggttagcgaccttccttgggaaggggctgccccacagtcgccatcctttagcggcagcgaagattctggatctcctaaacaccagaattcgaccaaggacaggaaaatcatccctctgaagatgtgcttcgcggctcggaatctgagtatgccggatctggaaaacaggctcattgagcttcactctccagattctcgtaatactctcatactgaggtgcaaggatactgccactgcccactcatggttcgtcgctatccataccaacatcatggccctcctgccacaggtattggctgagctgaatgccatgctgggggcaacttccacagccggtggatctaaagaggttaagcatattgcctggctcgccgaacaggcaaagctggatgggggaaggcagcaatggaggccagtcttaatggccgttacagaaaaagacctgttactctacgattgcatgccctggaccagggacgcatgggcgtcaccctgccatagttatccgctagtggcgacacgcctggtgcatagtggatccggctgtaggtccccgagccttgggagcgacctcaccttcgcaacacgcactggctcacgtcagggcatagagatgcacctctttagggtagagacacatcgagacctgagttcatggactaggatactcgtgcaggggtgtcacgctgccgctgaactaataaaagaggtatcattaggatgcatgttaaacggccaggaagtgcgccttaccatccactacgagaatggattcaccatttcaagagagaacgggggtagctcttctatcctgtacaggtacccttttgagcgcctcaaaatgtccgctgacgatgggattcgcaatctctatctagatttcggcggacccgagggtgaactaactatggatctccactcttgcccgaaacctatcgtgtttgttctgcacaccttcctaagtgctaaggtgacaagaatgggccttcttgtctag

SEQ ID NO: 243282 - DNA, 1443 bp, synthetic construct
  misc_feature 1..1443: note = Description of Artificial Sequence: Synthetic coding sequence
  source 1..1443: mol_type = other DNA
atggactttcgcacagcatgcgaagagacgaagaccggtatctgtcttctgcaggatggcaatcaggaaccatttaaggtgaggctgcatctggccaaggacattttaatgattcaggagcaggatgtgatttgcgtttccggagaacctttctactcgggggagaggaccgtcacaatccgtagacagaccgtgggagggttcggattatccataaagggcggagccgagcataatatccctgtggtggtatcaaaaatcagtaaggaacagcgcgctgaattatctgggctcctgttcatcggggacgcaatcttgcagatcaatggcattaacgtccggaagtgccggcatgaggaggttgtacaggtccttcggaacgcaggagaggaagtgaccctgactgtgagcttccttaagcgcgcacccgctttcttaaaactgcccctcaatgaggactgcgcttgtgctccgtctgaccaaagctcaggaacatcatcccccctctgcgattccggactgcatctgaattaccatccaaataacaccgacactttaagctgctcaagctggcccacgagccctgggttgagatgggagaagcggtggtgtgatctgcgcctgattcctctcttacactcacggtttagtcagtacgtaccagggacagacttgtcgcgccagaatgcatttcaggttatcgcggtggatggagtttgtacagggattattcagtgtctgagtgctgaggactgcgtcgactggctacaggcaatcgctacaaatatcagcaatctgacaaaacataacatcaaaaagattaacaggaactttccagtgaaccaacagatcgtttacatgggatggtgtgaagctcgcgagcaagatcccctccaggatagagtgtattcacccaccttcctcgccctgagaggcagctgtctctacaaatttctcgcgccaccagtgaccacctgggactggacacgagctgaaaagacattcagcgtgtatgagattatgtgcaaaattcttaaggacagcgacctgcttgacagacgtaaacagtgcttcacagtacagtcagaaagtggcgaagacctgtatttttcggtggagcttgaatcagaccttgcccagtgggaacgggcttttcaaactgcaaccttcctggaagttgagaggatacagtgcaaaacgtacgcatgcgttttggaatcccatctcatggggctgaccattgacttttccactggtttcatctgcttcgatgctgcaaccaaggagctcgagttttctaacttattcgccgtcctgcactgcatccacagcttctttgcggcaaaggtagcttgtcttgatcctcttttcctgggcaaccaggcaactgcctctactgctgcatccagtgccacgacttctaaagccaagtatacaacgtag

SEQ ID NO: 243283 - DNA, 1443 bp, synthetic construct
  misc_feature 1..1443: note = Description of Artificial Sequence: Synthetic coding sequence
  source 1..1443: mol_type = other DNA
atggacttccggacagcatgcgaggagaccaaaaccggtatctgcctgctccaggatggcaaccaagagccattcaaagtgcgccttcacctagccaaagatattctcatgatccaggaacaagatgtcatctgtgtgtcaggggaacccttctatagcggagagcgcacagtgaccataaggcgtcaaacagtcggtgggtttggactctccattaaagggggagccgaacataacatcccggtagtggtcagcaagatttcgaaagagcagcgggctgagctctcgggactgctcttcatcggcgacgccatcctgcagatcaatggcatcaatgtccggaagtgtaggcacgaggaggtggtgcaggtgctccggaacgcaggcgaagaagtcaccctgacggtttcctttctcaagcgggctcctgcctttctcaaactgcccttgaatgaggattgtgcttgtgctccctcagaccagagcagcggaacaagttctccgctctgtgatagtggactgcacttgaactatcaccccaataatacagacactttgtcctgttcatcttggcctacttccccaggcttaaggtgggaaaagcgatggtgcgatctccgcctgatacccctgcttcatagccgattctctcagtatgtccccggaaccgacctgtcgaggcagaatgcattccaggtcatcgccgtcgacggcgtctgcacgggaatcatacagtgtctcagtgctgaagattgtgtcgactggttacaggccatcgctaccaacattagcaacctcacaaagcataacattaagaaaatcaacaggaacttcccagtgaatcagcagatcgtatatatggggtggtgtgaagcacgggagcaggatcccctgcaggatcgcgtgtacagccctacgttcctagctctccggggatcgtgcctttacaagttcctcgcccctcctgtaacaacatgggattggacacgcgcagaaaagactttctctgtttacgaaattatgtgtaaaatcctcaaagacagcgatttgctggacagacggaagcagtgttttacagtccagtcagagagtggcgaggatctatatttttccgtggaactggaatcagatctcgcccagtgggaacgggcattccaaactgccacctttctggaggtcgagcgaattcaatgtaaaacatacgcatgcgtgctcgaaagccacttgatgggtcttaccatcgatttttctactggatttatctgttttgacgctgccaccaaggagctcgagttcagtaacctgtttgctgtgcttcactgcatccacagtttctttgcggctaaagtggcttgtctggatccattattcctgggcaatcaagccaccgcttctacagccgcttcttctgctacgacttcaaaagcaaaatacactacctag

SEQ ID NO: 243284 - DNA, 1554 bp, synthetic construct
  misc_feature 1..1554: note = Description of Artificial Sequence: Synthetic coding sequence
  source 1..1554: mol_type = other DNA
atggattttagaacagcttgtgaggagacaaagactggcatatgtttgctgcaggacgggaaccaagagcctttcaaagttaggctccacttggccaaggatatcttgatgatacaggagcaggacgtgatttgtgtgtcaggtgagccgttttatagtggagagcgcacagtgacaattcgacggcagaccgttggtggctttgggttgtcaatcaaaggcggagcggagcataacatacctgtagtagtctctaaaatctccaaggagcaaagagctgaactttcgggcctactctttattggcgacgccattctgcagatcaatggcatcaacgtgaggaagtgccgacacgaagaagtcgtacaagtcctacgaaacgcaggagaggaagtgaccctgacggtctctttcttaaaacgcgctcctgctttcctcaagctaccactaaacgaagattgcgcatgtgctcccagcgaccagtcttctgggacatcatctcccttgtgcgatagtggtttgcacctgaattaccatccaaacaatacggacacactctcgtgctctagctggcccacatcacctggcctgcgatgggaaaaacggtggtgtgacttgcggctaatccccctgctacattcacgattcagccagtatgtccccggtactgacttgagtcgccagaacgcctttcaggtcatcgcggttgacggcgtgtgcacaggcatcattcagtgtctctcggcagaagactgcgtcgactggctgcaagctatcgccacaaacatcagtaatctgaccaaacacaatattaagaagattaatagaaactttccagtgaaccagcagatagtgtatatggggtggtgtgaggccagggaacaggaccccctccaagaccgggtgtactctccaacattcttggctctgcgcggttcctgcctctacaagtttctcgcgccacccgtgaccacctgggactggactagagccgagaaaacctttagtgtatacgaaattatgtgtaagatactgaaagactctgacctgttggataggaggaagcaatgtttcactgtacagtcggaaagcggggaagacctctatttctccgtcgaattggagtctgacctggcccagtgggagcgtgccttccagaccgcgaccttcctggaagttgagagaattcagtgtaagacctacgcttgtgtcctggaaagccacctgatgggcctcaccatcgatttttctacaggcttcatctgcttcgacgcagccacaaaagctgtgctttggcgatataagttctcccaacttaagggctcaagcgatgatgggaaatcaaaaatcaagttccttttccagaatcccgataccaagcaaattgaagccaaagaactagaattttccaacctcttcgcagtgttgcactgcattcacagctttttcgccgcaaaagtggcctgcctggacccactcttcctgggcaaccaggcaacggcgagcaccgcagcaagctcagccacgacatccaaggccaagtacacgacttag

SEQ ID NO: 243285 - DNA, 1554 bp, synthetic construct
  misc_feature 1..1554: note = Description of Artificial Sequence: Synthetic coding sequence
  source 1..1554: mol_type = other DNA
atggactttcggaccgcctgcgaagagactaaaacaggaatctgtctcctgcaggacggaaatcaagaaccattcaaagtcagactgcacttggccaaggatatcttaatgatccaggagcaggacgtgatctgtgtgtcaggggagcccttctactccggtgaacgaacagtgactattagacggcaaaccgtgggtggcttcggcctgtcgattaaggggggagccgagcacaacatacccgtcgtggtgagcaagattagtaaggagcaacgggcagagctgagcggtttactttttataggagatgccatcctgcagatcaacggcataaacgtacggaaatgccgccacgaggaagtcgtccaggtcctgcgtaatgctggggaagaggttactttaacagtgagcttcctgaaaagagcgccagcctttctgaaactgccactgaatgaggactgcgcgtgtgcaccttccgatcagagttcgggcactagttccccgctctgtgattcaggcctgcacttgaattaccaccccaacaatactgatacactgagctgttcaagctggccaacatcgcccggtctgagatgggagaagagatggtgcgatctcaggctgatcccattgctgcactcgagattctctcaatatgtgccaggtaccgacttaagtagacagaatgccttccaggtgatcgccgtcgacggtgtttgtaccggcattattcagtgtctgtcagctgaagattgcgttgattggctgcaggccatagcaacaaatataagtaatctcaccaagcacaatatcaagaaaattaaccgcaatttccccgtgaaccaacagatcgtgtatatgggctggtgcgaggcaagggagcaagatccactgcaggaccgagtgtactcccccacattccttgccctgcgcggatcttgtttgtacaagttcttggcccctcctgtgacgacatgggattggacaagggcggagaagacatttagcgtttatgagatcatgtgtaagattctcaaagattccgatttgctggataggagaaagcagtgtttcaccgttcagtccgagagcggcgaggacctgtacttcagcgtagaactggaaagcgaccttgctcagtgggagcgagcattccagacagccacttttcttgaggtggagcgaattcagtgtaagacttatgcgtgcgtgcttgaatctcaccttatgggtttaactattgacttctccacaggtttcatttgctttgacgccgctactaaggcagtgctgtggagatacaagttttcccagcttaaagggtcttccgatgacggaaagtccaaaataaaatttctctttcagaatcccgatacaaagcagattgaagcaaaggagctcgagttttccaatttgttcgctgtgctgcactgcattcacagctttttcgccgcaaaggtggcatgtctggatcccctttttctcggaaatcaggcaaccgcaagcactgccgcttcaagcgcaactaccagcaaagcaaagtataccacatag

SEQ ID NO: 243286 - DNA, 279 bp, synthetic construct
  misc_feature 1..279: note = Description of Artificial Sequence: Synthetic coding sequence
  source 1..279: mol_type = other DNA
atggattttcggacagcttgcgaggagacaaaaaccggcatttgcctgctgcaggatggcaatcaggagccatttaaggtcaggctgcacctggccaaggatatcttaatgattcaggaacaggatgtgatctgcgtaagcggagaacccttctactcaggagaacgaaccgtgacgattaggcggcagacagtaggtggctttgggctgtctattaaaggtggggcagagcacaacatccccgtggtcgtcagtaagatctccaaggaacagaggtag

SEQ ID NO: 243287 - DNA, 423 bp, synthetic construct
  misc_feature 1..423: note = Description of Artificial Sequence: Synthetic coding sequence
  source 1..423: mol_type = other DNA
atggatgtctttatgaaagggctctccaaggcaaaagaaggggtcgtggctgccgctgagaaaaccaagcagggggtggcagaggccgctgggaagaccaaagaaggcgtcctatatgtcggttctaagacaaaagaaggggtggtccatggcgtggctactgtagccgaaaagacaaaggagcaggttaccaacgtgggaggcgctgtggtgaccggcgtcacggccgtcgctcagaagaccgtcgaaggtgctggatcgattgccgcagccactggcttcgttaagaaggaccagctgggtaagaatgaggaaggggctcctcaagaagggattcttgaggatatgcccgtagatcccgacaacgaagcctacgaaatgccgtctgaggagggctatcaggactacgagccagaagcctag

SEQ ID NO: 243288 - DNA, 339 bp, synthetic construct
  misc_feature 1..339: note = Description of Artificial Sequence: Synthetic coding sequence
  source 1..339: mol_type = other DNA
atggatgtttttatgaagggactgtctaaagcaaaggagggtgtagttgctgcagcagagaaaaccaagcagggcgtggctgaggcagctggaaagacgaaggaaggggttttatacgtcggttcaaaaacaaaagagggtgtcgtccacggagttgcaaccgttgcagagaaaacaaaggagcaggtgactaacgtgggaggggctgtggtgactggtgtgaccgcagttgctcagaagacagtggagggagcagggagtatagccgctgccacaggtttcgttaaaaaagatcaacttggaaaagagggttatcaggactatgaacccgaagcatag

SEQ ID NO: 243289 - DNA, 423 bp, synthetic construct
  misc_feature 1..423: note = Description of Artificial Sequence: Synthetic coding sequence
  source 1..423: mol_type = other DNA
atggatgtgttcatgaaaggcctcagcaaggctaaggagggcgtggtggctgccgctgagaagacaaaacagggagtcgctgaggcagccggaaagaccaaagagggcgtgctctacgtcggctccaaaactaaggagggagtggtacatggtgtagcaacagtggccgagaagaccaaggaacaagtgaccaacgtcggcggtgccgttgttaccggtgtgaccgcagttgctcagaaaaccgtcgagggcgcaggcagcattgcagctgccactggctttgtcaagaaggaccagctggggaagaatgaggagggagctccccaagaaggtattctcgaagacatgcccgtggaccccgacaacgaggcttatgaaatgcccagcgaggagggatatcaagactacgaacctgaggcttag

SEQ ID NO: 243290 - DNA, 381 bp, synthetic construct
  misc_feature 1..381: note = Description of Artificial Sequence: Synthetic coding sequence
  source 1..381: mol_type = other DNA
atggacgtgttcatgaagggtctgtctaaggccaaagaaggggttgttgcagctgctgaaaaaaccaaacagggtgtcgcagaggcggcaggaaagacaaaagaaggcgtgctgtatgtggtcgcggagaagaccaaggaacaagtgacaaacgtcggcggagccgtcgtgacgggcgtgactgctgtggctcagaaaaccgtggagggcgcaggttccattgctgctgcgacgggcttcgtaaaaaaggaccaattaggcaaaaacgaagaaggtgctcctcaggaaggaattctggaagatatgccagttgaccccgataacgaggcctatgaaatgccatcagaggagggttaccaggattacgaacctgaagcttag

SEQ ID NO: 243291 - DNA, 423 bp, synthetic construct
  misc_feature 1..423: note = Description of Artificial Sequence: Synthetic coding sequence
  source 1..423: mol_type = other DNA
atggacgtatttatgaagggcctctcgaaggccaaagagggcgtagtggccgcagctgaaaaaacaaagcagggcgtggccgaagctgcgggaaagaccaaggagggcgtcttgtatgtggggtctaaaacgaaagagggagtggtgcacggagtggcaaccgtagccgagaaaaccaaggagcaggtgacaaacgtgggcggtgctgtagtgactggggtgactgcggtagcgcagaagaccgtggagggcgcaggcagtatcgccgctgctacaggatttgtcaagaaagatcaacttgggaaaaacgaggaaggagcacctcaggaaggcatcttggaagatatgccggtggaccccgacaatgaggcatatgaaatgccttcagaggaagggtatcaggactatgagcccgaggcctag

SEQ ID NO: 243292 - DNA, 339 bp, synthetic construct
  misc_feature 1..339: note = Description of Artificial Sequence: Synthetic coding sequence
  source 1..339: mol_type = other DNA
atggacgtgtttatgaaaggattgtccaaggccaaagaaggtgtggttgccgctgccgagaagactaaacaaggcgtggccgaggcagccggtaagacaaaggagggggttctgtacgttggttctaaaacgaaggaaggggtcgtgcacggagtcgccactgtagcagagaagaccaaagagcaggtaaccaacgtgggtggggcagtggtaactggtgtcacggctgtggcacagaaaactgtggagggggcaggctccatcgcagccgcaaccggattcgtgaaaaaggaccagctgggaaaggaaggctaccaggactacgaacccgaagcctag

SEQ ID NO: 243293 - DNA, 348 bp, synthetic construct
  misc_feature 1..348: note = Description of Artificial Sequence: Synthetic coding sequence
  source 1..348: mol_type = other DNA
atggacgtcttcatgaagggattaagcaaagccaaagagggcgttgtggcagctgccgagaagacaaaacagggcgtcgcggaggctgctggcaaaacaaaggagggggtgttatatgtgggttccaaaacaaaggagggggtggtgcatggtgtggccaccgtcgcagaaaagactaaggaacaggtgaccaatgtcgggggagccgttgtaactggggttactgcagtggcgcagaagactgtagagggagccggaagtatcgctgctgcgactggatttgtcaagaaagatcagttggggaaggtgtggttgtgtacattctgcgttacgtttattagctggtag

SEQ ID NO: 243294 - DNA, 381 bp, synthetic construct
  misc_feature 1..381: note = Description of Artificial Sequence: Synthetic coding sequence
  source 1..381: mol_type = other DNA
atggacgtgtttatgaaggggttgagcaaggccaaagagggggtcgttgcagccgcagagaagaccaaacagggagtggcagaagctgctgggaagaccaaggagggggtcctgtacgtggtagctgaaaaaactaaggagcaggttaccaacgtgggtggagcggtagtaacaggagtaacagccgtagcccagaagacagtcgaaggcgctggaagcattgccgcagccactggcttcgtgaagaaagaccagctgggtaaaaatgaggagggcgctccccaggagggtattctggaggacatgcctgtggaccccgacaatgaggcgtatgagatgccttcagaagaaggctaccaagattacgaaccagaggcatag

SEQ ID NO: 243295 - DNA, 423 bp, synthetic construct
  misc_feature 1..423: note = Description of Artificial Sequence: Synthetic coding sequence
  source 1..423: mol_type = other DNA
atggatgtgttcatgaagggcctgtccaaggctaaggaaggggtcgtggccgctgctgagaagactaaacaaggtgtcgctgaggccgctggaaagaccaaagagggcgtgctgtacgtagggtctaaaacaaaggagggagtagtgcacggcgtggccaccgtggccgaaaaaaccaaggagcaggtgaccaacgtgggcggagccgtggtgaccggagtcacagcagtggcacagaaaacagtggagggcgcaggatcaatagccgctgcaacaggatttgttaagaaagaccagttaggcaaaaacgaggagggcgcaccccaggaggggatacttgaggatatgccagttgacccagacaacgaggcatacgaaatgcccagcgaggagggatatcaggattacgagcccgaggcatag

SEQ ID NO: 243296 - DNA, 204 bp, synthetic construct
  misc_feature 1..204: note = Description of Artificial Sequence: Synthetic coding sequence
  source 1..204: mol_type = other DNA
atggatgttttcatgaagggcctgagtaaagctaaggagggagttgtagcagcagcggaaaagaccaagcagggggtggcagaggcagcgggaaagacaaaggagggggttctgtacgtaggcagtaaaacgaaggagggagtcgtccacggggtggccactgtcgctgaaaagaccaaggagcaggtgacaaacgtcggctag

SEQ ID NO: 243297 - DNA, 423 bp, synthetic construct
  misc_feature 1..423: note = Description of Artificial Sequence: Synthetic coding sequence
  source 1..423: mol_type = other DNA
atggacgttttcatgaaaggactgtctaaagctaaagagggcgttgtagctgctgctgaaaaaacaaagcagggcgttgccgaggccgctggtaagactaaagaaggggtactgtacgtgggctcaaagactaaagagggtgtggtgcacggcgtcgccacagtggctgagaagaccaaagaacaagtgaccaacgtgggaggcgcagtggtaactggcgtgacggcggttgcccaaaaaaccgtagaaggagctggtagcattgctgcagcaacagggttcgtcaaaaaagatcagctagggaagaatgaggaaggagcaccccaagaggggattcttgaggatatgcccgttgatcctgataacgaagcctatgaaatgccttctgaagaggggtatcaagactacgaacccgaagcttag

SEQ ID NO: 243298 - DNA, 2760 bp, synthetic construct
  misc_feature 1..2760: note = Description of Artificial Sequence: Synthetic coding sequence
  source 1..2760: mol_type = other DNA
atggaggctccagagtaccttgacctcgacgagatcgacttttcagacgacatatcatattcggtgacttctctcaaaaccatcccagagctgtgtaggcggtgtgacacacagaacgaggaccgttccgtgtcctcctcttcgtggaactgcggtatttctacccttatcacgaacacacagaagccaactggcattgcggacgtctattctaaatttagaccggttaagcgagtgagcccactcaagcaccagccggagaccctggagaacaacgagtccgacgaccaaaaaaatcaaaaggttgttgagtaccagaagggtggggagtccgatctgggtccccagccccaggagctcggacccggagacggggtcggcggtccaccaggtaaatcctcggaacccagtaccagcctgggggagttggaacactacgacctggacatggacgaaattcttgacgtcccatatattaaaagttcgcagcaactagcctcattcacgaaggtgaccagcgagaagagaatcctcggactgtgtacaaccattaatggtttgtcagggaaggcctgtagcactggatcctctgaatcttctagtagtaacatggcgcctttctgcgtgctatcccctgtaaaatcgccacacctccggaaggcatctgccgtgattcatgaccagcacaagctgtccaccgaggaaacagaaatatcccccccattagtgaaatgtggaagtgcctatgagcccgagaatcagagtaaagatttcttaaacaaaaccttcagcgacccacacggcaggaaggtagaaaagacaactccagattgtcagcttcgagccttccacctccagagtagtgccgcagaaagcaagcctgaggaacaagtgtccggactcaaccgcacaagctcgcagggacccgaggagcgtagtgaatatcttaagaaggtgaagagtattctgaatatcgtgaaagaaggccagatatcattgctcccccaccttgctgctgataacctggacaagatccacgatgaaaatggaaacaatttgctgcacattgctgcctcccagggccacgctgaatgtctgcagcacctcacaagtctaatgggcgaagattgcctgaatgaacgcaatactgagaaactaacccctgcaggcttggccattaaaaacgggcagctggaatgtgtgcgttggatggtgtcagagaccgaagccatcgccgagctttcctgctccaaagactttccgtcgttgatccactatgctggatgctatgggcaggagaaaattctgctatggctcctccagttcatgcaggagcagggcataagtctggacgaagtcgatcaagatggcaacagtgctgtccacgtggctagtcagcacggttacctgggttgcattcaaaccctggtggaatacggagccaacgtgacaatgcagaatcacgctggtgagaaaccctctcagagtgccgaacggcagggccacacgctgtgttccagatatctggtcgtggtggagacttgtatgtccttggcttctcaggtcgtgaagttgaccaaacagttgaaggaacagacagtcgagcgagtcacactccaaaatcagctccaacagtttctggaggcccagaaatcagagggcaagagtttgccaagctcaccctctagcccaagttcgccagcttccagaaaaagccagtggaagagtccagatgccgacgatgatagcgttgccaaaagtaaaccaggcgtgcaagaagggattcaggttttaggaagcctgtccgcctcctcccgagcgagacctaaagccaaagacgaagattcagataagatcctgcgccaactgctgggtaaagaaatctcagagaatgtgtgcacccaggagaagctctcattggagttccaggatgctcaggcctcaagcagaaacagcaaaaaaataccactagagaagcgggagctcaaactggcaagacttcggcaactgatgcaacggtccctgagcgagagcgacacggattcaaataactcggaggaccccaaaactacccctgtgagaaaggctgaccgcccacgaccgcagcccatagtggagtctgtcgaaagtatggacagtgccgaatcattgcatttaatgatcaaaaaacacaccttagcctccggagggagacggtttccattttcgataaaagcctctaagtctctggacggacacagtccttcccctacttctgaaagctccgaaccagacctggagtctcagtatcccggatctggatccattccacccaatcagccatccggagacccacagcagccgtcccctgactccaccgccgcacagaaggtcgccaccagccctaagtccgctctgaaatcaccttcaagcaagcgtcgtacctcacagaatttaaagctccgagtcacctttgaagaacctgtggtccagatggagcagccctcactcgagcttaatggagagaaagataaggacaaggggaggacgctgcagcggacttccacctctaacgagtccggagaccaacttaagagaccttttggggcttttcgaagcatcatggaaaccctgagcggcaaccagaataataataacaattaccaagccgcaaatcagttaaagacatctactcttccgctgacatcccttggccgtaaaacagacgcaaagggcaaccctgcctctagcgcttcaaagggaaagaacaaagcagcctag

SEQ ID NO: 243299 - DNA, 3051 bp, synthetic construct
  misc_feature 1..3051: note = Description of Artificial Sequence: Synthetic coding sequence
  source 1..3051: mol_type = other DNA
atggaagccccagagtatctggacctggatgagatcgacttctctgatgatatttccgataaccgcagccaagggaacagacttcagaaacttggtctcgaggatacggaccgcgaggacgctatgggttttggctcacaccgagcaaagttgactgtagtcgccgctctcggagcttgccattgtcctgaaaatgaatacagcgtaacatcgctgaaaacaatcccggagctatgtaggcgatgcgatacccagaacgaagatcgctccgtctcaagttcttcatggaattgcggcatttccaccctcatcaccaatacacaaaaacccactggcattgctgacgtgtatagcaagtttcggccagtgaagcgtgtgtcccctctcaagcaccaacccgaaaccttggagaataacgaatctgatgaccagaagaatcagaaagtggtggagtatcaaaaagggggtgagtcggatctgggaccccagccacaggaactcggccctggggacggggtcggtggacctcctggcaagtctagcgaaccaagcacctcgcttggcgagcttgaacactacgacctggacatggatgaaatcctcgatgtgccctacatcaagtcttcacagcagctagcttcctttaccaaggttacaagtgagaagaggattttaggcctttgtaccactatcaacggtctttcaggtaaggcctgttctaccggatcgtctgagtcaagcagttccaacatggctcccttctgtgtgctgtccccagttaagtctccacaccttcggaaggcaagcgctgttattcatgatcagcataagttgagtactgaggaaactgagatttctcctccactggtcaaatgcggcagtgcctatgagcctgaaaaccaatctaaagactttctaaataaaacgtttagtgatccccatgggagaaaggtggagaagaccactccagactgccagctgagagctttccatttacagtcctccgctgccgagagcaaacccgaagagcaggtatctggcctgaataggacaagcagccaagggccagaggagagaagcgagtaccttaaaaaagttaaaagcatcctgaacatcgtcaaggagggtcagatctctttactcccacacctggccgcagacaacctggacaagattcacgatgagaatgggaataatttactgcacatcgccgctagtcaggggcacgcagagtgtctgcagcacctaacaagcctgatgggagaggattgcctcaatgagcgtaacacagagaaactgactcccgctggacttgccatcaagaatggacagctggaatgcgttaggtggatggtctccgaaactgaagcaatcgccgaactctcctgcagtaaggacttcccaagccttatccactacgcagggtgttatggccaggagaaaattttattgtggctgttacagttcatgcaggaacaaggtatctctctcgatgaagttgaccaggacggaaactctgccgtccacgttgcatcacagcatggatacttaggatgtattcagaccttagtcgagtacggggcaaacgtcaccatgcagaatcacgctggagaaaagccttctcaatctgctgagaggcagggacacactctctgttcccgctacctggtggtggtcgaaacctgtatgtccctggcaagtcaggttgtcaaactgaccaagcagctcaaggagcagaccgtggagagggtgactctccagaatcagctccagcaatttctggaggcacagaaatccgagggtaagtctcttcctagttctccctcaagtccttcatcaccagcctctagaaagtcccagtggaaatcccccgatgcagatgacgattctgtggcgaagagtaaaccgggagtacaagagggaatccaggttctcggtagtctgagtgccagctcaagagccaggcctaaggcgaaagatgaggacagtgataaaatcctacgtcagctgctcggcaaggagatttcggaaaatgtctgcacccaagagaagctttccctggaattccaggacgctcaggcctccagccgaaactccaaaaagattccactcgagaagcgcgagctgaagctcgcaaggctgcgtcagctcatgcagcggtctctgtccgagagtgacactgattctaataatagtgaagaccccaagactactccagttagaaaggctgatcggccacgtccgcagcctattgtggagtctgttgagtccatggacagcgccgaatccttgcacctgatgattaagaagcacactcttgccagcgggggtcggcgtttccctttctcaataaaggcctcaaaatctctcgatggccactccccaagccccacgagcgaatccagtgaaccagatctcgaaagccagtatccagggtcaggcagcattccccctaaccagccaagcggagaccctcagcagccgagcccagacagcaccgccgctcaaaaggttgctacatcacccaagtcagcgttgaagtcccccagctcaaagcggaggacgagccaaaacctaaaactgagggtcacattcgaagaacccgtagtgcagatggagcaaccctctctggaactgaatggggaaaaagataaggacaagggacggactctgcaaaggacctcaacaagtaatgagtcgggcgatcagctgaagcgtccattcggggcatttcgcagcatcatggaaaccctgtctgggaaccagaacaataacaacaattatcaagctgctaaccagctcaagacatcgactctgccactgacttcactaggacgcaagactgacgccaaagggaacccagcttccagcgcttcaaagggcaaaaacaaggctgaaatgtacagctcatgcattaacctgtcatctaacatgctgattgaagaacatctctgtaacgacacacgacacaacgatatcaatcgcaagatgaaaaaatcatatagcatcaagcacatcgcagaacctgaatctaaggaactgtttctttag

SEQ ID NO: 243300 - DNA, 2580 bp, synthetic construct
  misc_feature 1..2580: note = Description of Artificial Sequence: Synthetic coding sequence
  source 1..2580: mol_type = other DNA
atggaggccccagaataccttgatctcgatgagatagattttagcgacgatatctcctattcagtgacttctctcaagacaatccccgagctgtgtcggaggtgtgacactcagaatgaagaccggagtgtctcgtcttctagctggaactgtggcatcagcacactgatcactaatacccaaaagcccactggtatcgctgatgtgtattccaagtttcgcccagttaagcgagtttcccccctgaaacaccagccagaaacattagagaataatgagtccgatgatcagaaaaatcagaaagtggttgagtatcagaagggtggcgagtctgatctggggccacagccgcaggagctgggcccaggcgatggagtggggggaccacctgggaagagctccgagccaagtactagcctgggcgaactggagcattacgatcttgacatggacgaaattctggatgtgccatacataaagtccagccagcagttggcctcttttactaaggtgactagtgaaaagcgaattctcgggctttgtacaaccattaacggcttgagcgggaaggcctgtagtactggctccagcgaatcatcatccagtaacatggcgcctttttgcgtgttgtcgccagttaagagccctcacctgagaaaggcctctgccgtgatccacgaccagcacaagctgtccaccgaagaaacagaaatttcccccccactcgttaaatgtgggtctgcttatgaacccgagaaccaatctaaggactttcttaacaagacttttagcgatccacatgggagaaaggtcgagaaaacaacccccgactgtcagcttcgcgcttttcatctgcagtctagtgcagcggaatccaagcccgaggagcaggtctcgggattaaaccgcacgtcctcacagggcccagaagagagatctgaatacctgaaaaaagtgaagagtatcctcaatattgttaaggaagggcagataagtttgttgaacgggcaattggagtgcgtgagatggatggtgagtgaaacagaagccattgctgaactctcatgctcaaaagactttcctagccttatccattacgccggatgttacggacaggagaaaatacttctatggctgctccagttcatgcaggagcagggcatctccctggacgaagtggaccaggacggtaatagcgcggtccatgtggcctctcagcatggctacttaggttgtatccagaccttagtggagtacggggctaacgtgactatgcagaatcacgctggagagaagccttcccagtcagccgagagacagggccacactctatgttcccgatatcttgtagtagtcgaaacttgtatgtcactagcatctcaggtggttaagctaactaaacagttaaaagagcagacggtcgagcgggtgactttacagaaccagctgcaacagtttcttgaggctcagaagagcgaagggaaatccctgccctctagcccttcctctccatcttctccggcttcccgcaaatcgcagtggaagagtccagatgcagacgacgactcggtggctaaatctaaaccaggggtccaggaagggatccaggtgctcggaagcctaagcgccagttcccgagccagaccgaaagccaaggacgaagactcagataaaatactgcgtcagctgttgggaaaggaaatctccgagaatgtgtgtacacaggagaagctgagtctggaatttcaggacgcgcaagcctctagtagaaactccaagaaaatacctctcgaaaagagagagctgaagctggctcgcctcagacagctaatgcagcgaagtttaagtgagtcagatactgactccaacaactcagaggatcccaagaccacaccagtccggaaggcggacagaccgaggcctcagcctatcgtggaatcagtggaaagcatggattctgcggagtctcttcatctgatgataaaaaagcacacactggcctctgggggacgcaggtttccattttccatcaaggccagtaagtcacttgatggtcattccccctctcctacatccgagagttccgagccggatcttgaatctcagtacccaggatccggcagcataccccctaaccaacccagcggggatcctcaacaaccgtcaccagattctactgccgctcagaaggtggccacaagccctaagagcgccctgaaatcaccaagttctaagcggaggacatcacagaatctcaagctacgagtaacattcgaggaacctgtggttcagatggagcaaccttcgctggagttaaacggggagaaggacaaggacaaaggaagaactctgcagagaacctccacgtcgaacgagagtggtgaccagctaaaacgtcccttcggggctttcagatccattatggagacactgtctgggaaccagaacaacaataataattaccaggcagcgaatcaattgaagaccagcactctgcctttaactagcctgggtcgtaaaacagacgctaaaggcaatccggcatcctcagcgtcaaagggcaaaaacaaggctgcttag

SEQ ID NO: 243301 - DNA, 1812 bp, synthetic construct
  misc_feature 1..1812: note = Description of Artificial Sequence: Synthetic coding sequence
  source 1..1812: mol_type = other DNA
atgacttatctgattcagagccatcacagcaggcgttctcagaactgtgccgaggatgttatcaggaaaacaaagaccgatcagaatggtcagctggagtgcgtgaggtggatggtctcagaaacagaggcaatcgcagagttgtcatgctccaaggattttcctagtctcattcattatgcgggatgctatggccaagagaagatcctcctatggcttctacaattcatgcaggagcagggtatatcattggacgaagtggaccaagatggtaacagtgcagtgcacgtggctagccagcacggctacctcggctgcatccagacgctggtggagtacggcgcaaatgtcacaatgcagaatcacgccggagagaaacctagtcagtcagctgaaaggcagggccacacgctgtgttcaagatatctggtagtggttgaaacctgtatgtcactggcttcacaagtggtaaagctcaccaagcaactgaaggaacagactgtcgagcgggtgaccttgcagaaccagctacagcagtttttggaggctcagaagagcgagggcaagagtctgccaagctccccatcctctccatcaagtccagcgagtagaaaatcccagtggaagagtcctgacgccgatgacgattctgtggccaagtcgaagcccggtgtacaggaagggatccaggttttggggtctttgtctgcctcgagcagggctaggcccaaagcaaaggacgaggatagcgacaaaattctccgccagcttctgggcaaggagattagcgagaatgtttgtactcaggaaaagttgagtctggagttccaagacgcccaagccagctcccgaaactcaaagaaaataccacttgagaaacgggagctaaaattggccaggctccgacagctcatgcagcgcagcttgagcgagtctgacacagacagcaataacagtgaggaccccaaaaccactcctgtgagaaaagcggatcgcccaagaccccagcctatagtggagagcgtcgaatctatggactccgctgaatcattgcatcttatgatcaaaaagcatactctagccagcggtggccgtagatttcccttctccatcaaagccagcaaatcactggacggccattcaccttcccccacctcagagtcctccgagcctgatctggaatcacaatacccaggtagcggctcgattcccccaaaccaaccttctggcgacccgcagcagcccagcccagactctaccgccgctcagaaagtcgctacatctccaaagtctgcactgaagtctcctagttcaaagcgccgaacatcacaaaatttaaagctcagggtgaccttcgaggagcctgtcgtgcagatggagcagccttccctggaattaaacggcgagaaggacaaagacaagggaaggacactgcagcgcacttccacttcaaacgagtccggtgaccagttgaaacgtcctttcggcgcttttcgatccataatggaaacactgtccgggaatcaaaacaataataacaattaccaggcagccaaccagttaaagacttcaactctccccctgacttcactgggcaggaaaacagatgctaagggtaatccagcctcctccgcttcaaaggggaagaacaaagccgagatgtattcgtcctgtattaaccttagcagcaatatgctcatagaggagcatctatgtaatgatactcggcacaatgatatcaatagaaagatgaaaaaaagctacagtatcaaacatatagccgaacccgaatctaaagagttgttcctgtag

SEQ ID NO: 243302 - DNA, 1566 bp, synthetic construct
  misc_feature 1..1566: note = Description of Artificial Sequence: Synthetic coding sequence
  source 1..1566: mol_type = other DNA
atgaagctgactctggtgatgacgtatctgatccaatcccaccattctagacgttctcaaaactgcgcagaggacgtgatcaggaagactaaaaccgaccaggaaaagatcttgctttggctgctgcagttcatgcaggagcagggcatcagtcttgacgaggtggatcaggatggcaattccgccgtccacgtagctagtcagcacgggtatttgggttgcattcaaactctcgtagagtatggagccaatgtgacaatgcagaaccatgccggagaaaaaccttcccagtctgcagaaagacaaggccatacactttgtagtagatatcttgtggtggtggagacctgtatgagcctggcgagccaggttgtcaaactcactaaacagctgaaggagcagacagttgaacgcgttaccctccagaaccagctccagcagttcctagaggctcagaagagcgaaggcaagagcttaccctccagtccttcctcaccgtcttcccccgcaagcaggaagagccagtggaaatcaccggacgccgacgacgactcagtcgcaaagtccaagcccggagtgcaggaagggatccaggtgctcgggagtctcagcgcctcttctcgtgctaggcccaaagccaaagacgaagattctgataaaattttaaggcagctgctcggcaaagaaatctccgaaaatgtatgcacacaggaaaaactcagcctggagttccaggacgcccaggctagtagtaggaatagtaagaaaatccctctggagaaaagggaactgaaattggctaggctccgccagttgatgcagcggtcactgagcgagagtgatactgactcaaataactccgaagatccaaagactacacctgttcgaaaggcggatcgtccaaggcctcagcctattgtggagtcggttgaaagcatggactcagccgagagcttgcatctgatgatcaaaaagcatactcttgcctctgggggacgcagatttcccttttccatcaaggccagcaagtcactcgacggtcattcccccagtccgacatcagagtcttcagaacctgacttagaatctcagtacccaggtagcggcagcattcctccaaaccagccatctggggacccccagcagccaagtccggacagcacagcagctcagaaggtggccacctcacctaaaagcgcgcttaagtcccccagtagcaagcgaagaacctcccaaaacttgaagcttagagtcacatttgaggaacccgtcgtccaaatggagcagcccagtctagaacttaacggggaaaaggataaggacaaaggacggaccctgcagcgcacatctactagcaatgagagcggggatcagctgaagaggcctttcggcgcattccggagtataatggagactctgagcggcaatcaaaataacaacaataattaccaggccgcaaaccagctcaagactagcacattacccctgacttcactgggcaggaagactgatgcgaagggaaatcccgcatcttcagcctcaaaggggaagaataaggctgcctag

SEQ ID NO: 243303 - DNA, 1146 bp, synthetic construct
  misc_feature 1..1146: note = Description of Artificial Sequence: Synthetic coding sequence
  source 1..1146: mol_type = other DNA
atgaaattgacgttggtcatgacttatctgattcaatctcatcacagtagaaggagtcagaattgcgcagaggacgtgatccggaaaacgaaaaccgatcagaatggacagctggaatgtgtcagatggatggtttcagagacagaagcgattgcagagctctcctgctccaaggactttccttcgttaatacactatgcagggtgttacggccaagagaaaatcttgctctggctgttgcagttcatgcaagagcagggcatcagcctggatgaggttgatcaggacggtaactccgccgtgcacgtggcaagtcagcacggctatctgggatgtatacagactctggtggaatatggagccaacgtgacgatgcagaatcatgccggagagaaaccaagtcagagtgccgaaagacaggggcacacgctgtgtagccggtacctggtcgtcgtagagacttgtatgtctttagcaagccaggtcgtcaaacttactaaacagctcaaggaacagactgttgagagagttacgctccagaaccagcttcagcagtttctcgaagctcagaagagtgagggcaagtcactaccctcatctccctcctctccaagctcccccgcatcacggaagagtcagtggaaatcgcctgatgctgatgatgattccgttgccaaatccaaacccggtgttcaagagggaatccaggtgctaggctctctctcagcctcatccagggctagacccaaagccaaggatgaggactccgataaaatcctccggcagctgttggggaaggaaataagcgagaatgtttgtacgcaagagaaattgtctctcgaatttcaagacgcccaggcttcctcacgtaattctaaaaaaatccccctagaaaaacgggagcttaaacttgcaaggctgcgccagttaatgcagcggtctctgagcgagagtgacaccgactcaaataacagcgaagaccccaagaccacaccggtgcgcaaggcagatcgaccccgaccgcagccgatagttgagagcgttgagagcatggactctgcagggtttttatccgcttcccggcctcccaatccatggatggccaccgcacatctgccacctcagcgcgctgccaatcaaacctag

SEQ ID NO: 243304 - DNA, 1767 bp, synthetic construct
  misc_feature 1..1767: note = Description of Artificial Sequence: Synthetic coding sequence
  source 1..1767: mol_type = other DNA
atggaagctcccgagtacctcgacttggatgagatcgacttcagcgatgatatctccgacaataggagccagggaaacaggctgcaaaaacttgggcttgaagatacagatcgagaggacgcgatggggttcggctcacaccgggcaaaattgaccgtcgtagctgctctcggtgcttgtcactgccctgagaacgagtatagcgttacaagcctgaagactattcccgagctgtgccgccgttgcgatacccaaaatgaggatcgttctgtctctagttctagctggaattgtggcatctcaaccttaatcactaatacgcagaagcccaccgggattgcagatgtgtattcaaaatttagaccggtgaaacgagtgtccccactgaagcaccaacccgagacattagagaacaacgagagcgacgaccagaagaatcagaaggtggttgagtaccaaaaaggcggtgaatctgatctcggtcctcagccccaagagcttggacccggagatggcgtcggcggaccaccaggcaaaagcagtgaaccatccacatctcttggggagctggagcactatgatctggatatggatgagattctggacgtcccatatattaaatcatcacagcaacttgcctccttcactaaggtgacatcagagaaacggattttgggcttgtgtacgaccataaatgggctgtctgggaaagcatgtagtacaggctcaagcgaaagctcttcctctaacatggcacctttttgcgtgctaagccccgtcaagtctccgcatctacggaaggccagcgccgtgatccacgatcagcataagttgagcaccgaagaaaccgaaataagcccaccactggtaaaatgtgggtcagcctatgagccagaaaatcagtcaaaagatttcctcaacaaaaccttttccgatccgcacggtagaaaggtggagaagacaaccccggattgccagctccgcgctttccacctgcagagctccgcagcagaaagcaagccagaagagcaggtaagcggccttaacaggacctccagccaggggccagaggagcgatcagagtacttaaagaaggtgaagtctatcctgaatattgtcaaagagggccagatctccctcctccctcacctcgccgctgataatttggataaaatccacgatgagaacggaaacaatcttttgcatatcgctgcttcccaggggcacgcagagtgccttcagcatctgacatctctcatgggggaagattgtctaaacgaaagaaacactgagaagctgacccctgccggactggctatcaaaaacggacagctggagtgcgtgcgttggatggtgtctgagaccgaggccatagcggagctgtcgtgttctaaggacttccccagcctcattcattatgcaggatgctacggtcaggaaaaaatcttactgtggctgttgcaatttatgcaggagcagggtatcagcctggacgaagttgaccaggatggcaactccgccgtgcatgttgcttctcagcacggttatctgggatgcattcagaccagactgaaaattcaagggacgtggaacgggagcgagacgtgtctgttcacacaccatttttcaagttatccacctatcagcagtggcctgcagtgccagggccaagagggcgtcttgttcattccagaccaggtgggtgctgctacaaataagcaggtcctctttcagaatcagctccccgaaaccaaatcatcctattag

SEQ ID NO: 243305 - DNA, 267 bp, synthetic construct
  misc_feature 1..267: note = Description of Artificial Sequence: Synthetic coding sequence
  source 1..267: mol_type = other DNA
atggaagcaccagaataccttgacctggatgaaatcgatttcagcgatgatatttcctacagcgtcacaagcctgaagaccattcccgaattatgtcgccgatgtgatacacagaacgaagatcgatccgccactccatcttgtagacagtctcgacagaacagccggcgaaaatggaagcagagcatcacgtattgtggcgtaacggggacccgcagagtttctactgccccacacttcttcgacggaaggagactgccccaatag

SEQ ID NO: 243306 - DNA, 297 bp, synthetic construct
  misc_feature 1..297: note = Description of Artificial Sequence: Synthetic coding sequence
  source 1..297: mol_type = other DNA
atggaggccccagaatacctggatcttgacgaaattgatttctccgacgacatttcctattcggttacaagcctcaaaaccattcccgaactgtgtcgccgatgtgatactcagaacgaagatcggtctgtgagttctagttcttggaattgcggtatttccaccctgatcacaaacacccaaaagcccacagggatcgcagatgtgtacagcaagttccgcccagtgaaacgcgtatctccactcaagcatcagccagagacactggagaacaatgagagtgatgatcagaagtag

SEQ ID NO: 243307 - DNA, 45 bp, synthetic construct
  misc_feature 1..45: note = Description of Artificial Sequence: Synthetic coding sequence
  source 1..45: mol_type = other DNA
atggaagctccggagtacctagatctggatgaaatcgatttctag

SEQ ID NO: 243308 - DNA, 408 bp, synthetic construct
  misc_feature 1..408: note = Description of Artificial Sequence: Synthetic coding sequence
  source 1..408: mol_type = other DNA
atggaggcacccgagtacctggaccttgacgagattgactttagcgatgatatcagctactctgtgaccagcttgaagacgataccagagctgtgccggcgatgcgacacgcagaatgaggacagaagtgtctcttcaagttcgtggaattgcggcatttcgacgctcatcaccaatacacagaagccaaccggtatcgcagacgtgtacagcaagtttagaccagttaagcgggtatcaccacttaaacaccagccagagaccctagagaacaacgagagcgatgaccagaaaaatcagaaagtggtggagtaccagaaaggaggcgagagcgacctcgggcctcagccgcaggaactgggcccaggtgacggggtgggcggaccgccagggaaaagtagcgagtag

SEQ ID NO: 243309 - DNA, 1434 bp, synthetic construct
  misc_feature 1..1434: note = Description of Artificial Sequence: Synthetic coding sequence
  source 1..1434: mol_type = other DNA
atgcaggagcagggtatctccttagatgaggttgaccaggatggtaattctgccgtccatgttgccagccagcatggctaccttggatgcatacagacgttagtggaatatggagctaatgtgactatgcaaaaccacgccggagagaagccatcacaaagtgcagaacggcagggccatactctgtgtagccggtacctggtcgttgttgagacctgcatgagtctggcctcccaggttgttaaattaaccaaacagctcaaagagcaaaccgtggagcgggtcactctgcagaaccagttacagcaattcttggaggctcagaagtcggagggtaagagcttgccctccagcccgtccagccccagttcccctgcatctcgtaaaagtcagtggaaatcccctgatgcagacgatgattccgtggcaaaatcaaaacccggtgtccaggagggcattcaggtcttgggcagcctgagcgcctcatctcgcgctaggcccaaagcaaaagatgaagacagtgacaagatattaaggcagttactcggcaaggagatttccgagaatgtgtgcacacaagagaaactttcactggagttccaagatgcacaggctagtagcagaaacagtaagaagatcccactggaaaaacgagagctaaaattagcacgcctaaggcagctcatgcagaggtccctcagcgaatccgatactgatagcaataactcagaggaccccaaaacgacaccagtgagaaaggccgaccggccacggcctcagcctatagtcgaatccgtggaatcaatggattccgccgagtctttgcatttgatgatcaaaaaacacacgcttgcctcaggaggccgacgctttcccttctcaataaaggcttctaaaagtctcgatggacatagcccttctcctacctccgagtccagcgaaccagatttggagagccagtacccaggtagcggcagcataccccctaaccagccaagtggcgacccgcagcagccctctcctgactcaacagccgctcaaaaagtcgccacgtctccaaagtccgcattgaagtctcccagctcaaagaggaggactagccagaatctcaagctgagggttacctttgaagaacctgtcgtgcagatggaacagcctagcttagagctgaacggagagaaggataaagacaagggtaggaccttacagcggacaagcacctccaacgagagcggggaccagctgaagcgaccttttggagcctttcggagcataatggagacgctctccgggaaccagaacaacaataataattatcaggccgcaaatcagcttaagacttctaccctgcctctgacttcactgggcagaaagacggacgcaaagggcaatccagctagctccgcttccaaggggaagaataaggctgcttag

SEQ ID NO: 243310 - DNA, 405 bp, synthetic construct
  misc_feature 1..405: note = Description of Artificial Sequence: Synthetic coding sequence
  source 1..405: mol_type = other DNA
atggacgttttcatgaagggcttatccatggcaaaggagggtgttgtggctgccgcagagaagaccaagcagggtgtcacagaggctgcagaaaagactaaagagggggtgctttatgtcgggagtaagacccgggagggagtggtacaaggggtggcctccgtcgccgaaaagacaaaggaacaggccagccatctcggcggtgccgtgttctcaggcgcaggcaacatcgccgctgccacaggacttgtcaagagagaagaatttcccaccgacctcaagcctgaggaggtcgcccaagaggccgcagaagagcccttgattgaacccttgatggaacctgagggcgaatcctatgaagatccacctcaggaggaataccaggagtatgagcccgaggcctag

SEQ ID NO: 243311 - DNA, 405 bp, synthetic construct
  misc_feature 1..405: note = Description of Artificial Sequence: Synthetic coding sequence
  source 1..405: mol_type = other DNA
atggacgtgttcatgaaaggattgagcatggccaaggagggtgtcgtcgcggcagctgaaaaaaccaagcagggcgtgacggaggccgctgagaaaaccaaagagggcgtattgtatgttgggtccaagacaagagagggagtcgtgcagggcgtggcaagcgtcgcggaaaagaccaaggaacaggccagccacctcggcggagccgtctttagcggagcaggtaatatcgctgccgcaactggtctcgttaaaagggaagaattccctacggacttgaaacctgaggaggtggcacaagaagccgctgaagaacctttgattgaacccttaatggaacccgaaggggagagttatgaagatcctcctcaggaggagtatcaggagtatgagcccgaggcctag

SEQ ID NO: 243312 - DNA, 405 bp, synthetic construct
  misc_feature 1..405: note = Description of Artificial Sequence: Synthetic coding sequence
  source 1..405: mol_type = other DNA
atggacgtcttcatgaaaggcctgtcaatggcaaaagaaggggttgtcgccgcagccgaaaaaaccaaacagggagtaaccgaagctgcggagaagactaaagaaggggttctgtacgtcggcagtaagacccgcgagggcgtggtccagggagtcgcatccgtcgccgagaagacaaaggagcaggcgtctcatcttggcggagcagttttcagcggcgcaggaaatatcgccgcagctactggcctggtgaagagggaagagtttcctacagacctgaagcccgaagaggtggctcaagaggcggctgaggagcctttaatagagccattgatggaaccagagggcgaatcctatgaggacccgcctcaggaggagtaccaggaatatgagcccgaagcttag

SEQ ID NO: 243313 - DNA, 405 bp, synthetic construct
  misc_feature 1..405: note = Description of Artificial Sequence: Synthetic coding sequence
  source 1..405: mol_type = other DNA
atggatgtttttatgaagggcctgagcatggctaaggagggggttgtagcagccgctgagaaaaccaagcagggcgtcaccgaggcagctgagaagacaaaggagggcgtcctgtacgtgggctccaagaccagagagggcgtggtgcagggagtcgcgtccgtcgccgagaaaacaaaagagcaggccagccatctgggcggtgccgtgttttccggagcaggaaatatcgccgctgccacgggacttgtaaagagggaggagttcccaactgatttaaaacccgaagaggtggcccaggaagctgccgaagagccacttatcgaacctttgatggagcccgagggcgagtcttatgaagatcctccacaggaggagtatcaagaatatgaacctgaagcctag

SEQ ID NO: 243314 - DNA, 381 bp, synthetic construct
  misc_feature 1..381: note = Description of Artificial Sequence: Synthetic coding sequence
  source 1..381: mol_type = other DNA
atggacgtgttcaagaagggcttcagtatcgcaaaagagggggtcgtgggagctgtagagaagacaaagcaaggcgtgacggaagcagcggaaaagaccaaggagggggtgatgtatgtaggggctaaaaccaaggaaaatgtcgtgcagtctgtgaccagtggactaccatggggttgggggtggggtggcggtcagccggtgtctagccacagtgggagggaggatcagggagcaggtcaaagaagagagagaggctgtggcgagcagcgtcagcactgtgggcaccaagatcggggtggcggaggtgagcacagaggacatctgaggggaggtgctcagggagggcttgaagctatctgtccacctaccggaggctag

SEQ ID NO: 243315 - DNA, 384 bp, synthetic construct
  misc_feature 1..384: note = Description of Artificial Sequence: Synthetic coding sequence
  source 1..384: mol_type = other DNA
atggacgtctttaaaaagggcttcagcatcgccaaagaaggggtggttggagccgtggagaagactaagcagggggtcacagaagccgcagagaaaactaaagagggagtgatgtatgtaggtgccaagacaaaggagaacgtggtacagtcagtaacatccgtggccgagaagacaaaagaacaagccaacgccgtgtccgaagccgtcgtgagctctgtgaacaccgtggcgacaaagaccgtcgaagaggccgaaaacattgccgtgacctctggagtagtcagaaaggaagacctgcgcccaagcgcaccccagcaggaaggggaagcatctaaggaaaaagaggaggtggcagaagaggcacaaagtggaggagactag

SEQ ID NO: 243316 - DNA, 471 bp, synthetic construct
  misc_feature 1..471: note = Description of Artificial Sequence: Synthetic coding sequence
  source 1..471: mol_type = other DNA
atggccggtcagttcagaagctatgtttgggacccactgctaatattgtcccagatcgtcctgatgcagaccgtatattatggatcactggggctgtggcttgccctggtcgatggcctcgttcgctcctctccatcacttgatcagatgttcgatgcagagatcctaggcttcagcacaccccctgggaggctttccatgatgtccttcatactgaacgctcttacgtgcgctctggggctcctctactttatacgtcgcggaaaacagtgtctcgactttaccgttactgtgcatttctttcacctcttaggctgttggttctatagcagtagatttccatccgcacttacatggtggctcgtgcaggcagtctgcattgcactaatggccgttatcggagagtacctgtgcatgcgaaccgaactaaaagagatccccttaaacagtgccccaaagtcgaatgtgtag

SEQ ID NO: 243317 - DNA, 471 bp, synthetic construct
  misc_feature 1..471: note = Description of Artificial Sequence: Synthetic coding sequence
  source 1..471: mol_type = other DNA
atggcgggacaattcaggagctacgtgtgggaccctctgctcattctgagtcagattgtgctgatgcagaccgtgtactacggttccctgggtctttggctggcgctcgtagacggattggttcgaagttcacccagtctcgatcagatgtttgatgcggagatcctaggattttctacgccccctggcaggctcagcatgatgtcttttatcctgaatgccctaacctgtgctctcggcctgctgtattttattcggcgtggtaaacaatgcctggactttaccgttaccgtgcacttcttccacctgctggggtgctggttttattccagtagatttccttcggccttaacctggtggctggtgcaagccgtgtgtatcgccttgatggccgttattggcgagtatctttgtatgcgaaccgaacttaaggagattcctctcaattccgctcctaagtcgaatgtgtag

SEQ ID NO: 243318 - DNA, 357 bp, synthetic construct
  misc_feature 1..357: note = Description of Artificial Sequence: Synthetic coding sequence
  source 1..357: mol_type = other DNA
atggcagggcagttccggagttacgtatgggacccattgttgatactctcccagatcgtgctcatgcagacagtgtattacggcagtctgggtttgtggctcgccctagttgacggcttggtccgatcctcaccatccctagaccagatgttcgacgccgagatattgggatttagcacaccaccaggacgactgtctatgatgtcttttatcttgaatgctctgacatgcgcactcggtttgttgtactttattaggagggggaaacaatgtctcgattttaccgtgacagtgcacttctttcatctccttgggtgttggttttattccagcagattcccatctgctttgacctag

SEQ ID NO: 243319 - DNA, 231 bp, synthetic construct
  misc_feature 1..231: note = Description of Artificial Sequence: Synthetic coding sequence
  source 1..231: mol_type = other DNA
atggccggacagttcagaagctacgtctgggacccactcttgatattgtcccagatagtactcatgcagaccgtgtattacggctccttggggctgtggctggcgctggtggatgggttggtacgcagtagtccttcgctcgatcagatgtttgacgctgagatacttgggtttagtacccctcctgggaggctgagtatgatgagtttcatccttaatgccctgacatag

SEQ ID NO: 243320 - DNA, 1134 bp, synthetic construct
  misc_feature 1..1134: note = Description of Artificial Sequence: Synthetic coding sequence
  source 1..1134: mol_type = other DNA
atgtctagtccagggacagagtcagccggaaaaagcttgcagtaccgtgtggaccatcttctgtctgcggtggaaaacgagctccaagccggatctgagaaaggcgaccccacagagcgagaattacgggtcgggctagaggagtccgaactgtggctacggtttaaagagctgacaaatgaaatgatagtgactaagaatggaaggcgaatgttccccgtcctgaaagtgaatgtctctggacttgatcctaacgccatgtattcttttctcttggactttgtggcagctgacaatcacaggtggaagtacgttaacggagagtgggtaccaggcggtaaacctgaaccgcaggcaccatcctgcgtgtacatccacccagatagccctaatttcggcgctcactggatgaaagcccctgtctcattcagcaaggtgaaattaacaaataaactcaatggtggtggacaaattatgctcaactcccttcacaagtacgaaccaaggattcacatcgtgcgagttggcggaccccagaggatgattactagccattgctttcccgaaacacagtttatagcagttaccgcatatcaaaatgaggaaataactgccctcaagatcaaatacaatccattcgccaaagctttcctggacgcaaaagaacgctctgaccacaaagagatgatggaggagcccggagactcccagcaacccggatacagtcagtcttactccgataatagcccagcctgcctaagtatgctccagtcccatgacaactggtctagtctcgggatgcctgcacacccgagtatgctgccagtttctcataacgccagccctccaacatcctcatcccaataccccagtctgtggagcgtctccaacggagctgtgacacccggatcacaggcagcggcagtttcaaacgggttaggggcacagtttttccgcggatctcccgctcactatacgcctttaacccatcccgtctctgctcctagctcttcaggttctcccttatacgagggagccgcagccgctacagacatagtggattcgcagtacgatgcagctgctcagggtagactcatcgcctcttggacccctgtgtccccaccttccatgtag

SEQ ID NO: 243321 - DNA, 735 bp, synthetic construct
  misc_feature 1..735: note = Description of Artificial Sequence: Synthetic coding sequence
  source 1..735: mol_type = other DNA
atgcgatggtgcctcctcctcatttgggcgcagggactaagacaggcccctctcgcatcagggatgatgacagggacaattgagaccaccggtaatatttcagccgaaaaaggtgggagcatcattttacagtgccacctttccagcacaaccgcacaagttacgcaggtgaactgggaacagcaggaccaactgttggcaatttgcaatgccgatctgggctggcacatcagtccatcatttaaggaccgcgtggcgcctggacctggcctcgggttgacgctacagagccttacagttaacgacactggggaatatttctgcatctatcacacttaccctgatggcacatacaccgggcgtatcttccttgaggtgcttgagtccagcgtcgccgagcatggcgctagatttcagattcctctattgggagcgatggctgctactctcgttgttatctgtacagcggttattgtggtcgtggctttgactcgcaaaaagaaggccttgaggatccactctgttgaaggggatctgaggaggaagagcgccggtcaggaggaatggtccccctctgccccttcccccccagggagctgtgtgcaagctgaagcggcaccagccggtctgtgtggtgaacagcgaggggaagattgtgccgagctgcatgattatttcaacgtgttgtcttaccgatctctcggtaattgcagcttcttcactgaaaccgggtag

SEQ ID NO: 243322 - DNA, 936 bp, synthetic construct
  misc_feature 1..936: note = Description of Artificial Sequence: Synthetic coding sequence
  source 1..936: mol_type = other DNA
atggcattcctggtcgcacacccgatgcagtttgtgtatcttctgaccactctgtgcgtgttcaatatggtgttcgcaaagctaggcttttcagagacagttttctcacaaagactttcattcactgtcctgagtgccgtcggatacttccagtggcagaagcgccctcacctgctgcctgtcgggccactgggcaggtctatgcggtggtgtctcttgctgatttgggcccagggattgagacaggccccactagcctcggggatgatgactgggacgatagaaaccaccgggaacataagcgctgagaaaggaggatcaataatactacagtgtcacctgagctccaccacggcacaggtgacgcaggtgaactgggaacaacaggaccagttactggccatttgtaacgccgatctgggctggcacattagcccctctttcaaggatcgggtggcgcctggcccaggcctgggtctgaccctgcagagcctgaccgtgaacgacactggagaatacttttgtatatatcacacataccctgacgggacttacaccggcaggatttttctggaagtgctcgagtccagcgtagcggaacatggtgctaggtttcagattcccctcttgggggctatggctgccacactcgtggtgatctgtaccgccgttatcgtggtagtggcgttgaccagaaagaagaaagcgctgaggattcattctgtcgagggggaccttcggagaaaatcggctggccaggaagagtggagccctagtgcccctagcccacctggcagttgtgttcaagctgaagcagcaccagcgggactgtgcggggagcagagaggcgaagactgtgctgaactccacgactactttaacgtcctgtcttaccgtagtttaggcaactgttcattctttacagagacgggatag

SEQ ID NO: 243323 - DNA, 735 bp, synthetic construct
  misc_feature 1..735: note = Description of Artificial Sequence: Synthetic coding sequence
  source 1..735: mol_type = other DNA
atgaggtggtgcctcctgcttatctgggcgcaaggactccgccaagcaccactggccagtgggatgatgacgggcaccatagaaacgactggcaacatctccgccgaaaaaggtggctccattatactgcagtgtcacctgagctctacaactgcacaagtgactcaggttaattgggaacagcaggaccagctactggcaatttgtaatgccgatcttggatggcatataagcccctcattcaaggatagggtcgcacccggaccaggtctcggcctcacacttcagagcctgacagtcaatgacactggagagtacttttgtatttatcacacttaccccgacggcacctatactggcaggatctttttagaggtattggagtcctctgtggccgaacatggggcacgatttcagatccccttgctcggtgcaatggcagccacgctggtggtgatctgtaccgcagtgatcgtggtggtggccctgactcggaagaagaaggccctgcgcatccacagcgtagagggggatctgcggcgaaaaagtgctggccaggaggaatggagcccaagtgctccttcacctcctgggtcttgtgttcaggcagaagctgctccagcagggttgtgcggagagcagaggggtgaagattgtgccgagctgcacgactactttaatgtgctgtcgtatcggtctctcgggaattgtagtttcttcacagagacggggtag

SEQ ID NO: 243324 - DNA, 561 bp, synthetic construct
  misc_feature 1..561: note = Description of Artificial Sequence: Synthetic coding sequence
  source 1..561: mol_type = other DNA
atgtcgggaatctccgggtgcccattttttctgtggggtcttcttgcactgcttggtctggcgttagtgataagcctgatattcaacatttcacactatgttgaaaaacagcgccaagacaaaatgtactcctactccagtgaccacacccgggtggacgagtattacattgaagacacaccaatttacggcaatctggacgacatgatcagtgagcccatggacgagaactgttatgaacaaatgaaagcccgtcccgaaaagagtgtgaacaaaatgcaagaagccacgccttccgcccaggccacgaacgaaactcagatgtgttatgcaagtctcgaccactcagtgaaagggaagcggaggaagcccaggaaacagaacacacatttctccgacaaagatggagatgaacagttacatgctatcgatgccagcgtatccaaaactactctggtcgactccttctccccggagtcccaggccgtggaggaaaacatccacgacgaccccatacgactcttcggactgattagagcaaaaagggaacctattaactag

SEQ ID NO: 243325 - DNA, 1308 bp, synthetic construct
  misc_feature 1..1308: note = Description of Artificial Sequence: Synthetic coding sequence
  source 1..1308: mol_type = other DNA
atgtcgagccccggaacagagagcgcaggaaagtccttacaataccgggtggaccacctcttatctgccgtggagaacgaactccaggccggttccgaaaagggtgacccaaccgagagggagctacgtgtgggactcgaggaaagtgaattgtggcttcgcttcaaagagcttactaatgagatgatcgtgactaagaatgggaggagaatgtttcctgttctgaaggtcaatgttagcggcttggaccctaatgccatgtacagcttcctgctggattttgttgctgccgataatcatcgatggaaatatgtgaatggagaatgggtgcccggtgggaagccggagcctcaagctccaagctgcgtttacattcaccctgactccccaaacttcggggctcattggatgaaggcccctgtcagctttagcaaagtcaaactgactaacaagctgaacggtgggggtcaaataatgctgaacagtctgcataaatatgaaccgcgtatacatatcgtgagagtcggcggacctcagcgaatgatcacgtcacattgcttcccagagacccagtttatcgcagtgacagcctatcagaatgaggagattaccgcactgaaaatcaagtacaatccttttgccaaggccttcttggatgcgaaagaaagatctgatcataaggagatgatggaagagcctggtgatagccaacagcccggatacagtcagtggggctggctgctccccggtacatccactctgtgccccccagccaatccacatccacagtttgggggagctctctctctgccatccacacacagctgcgatcgctaccctactctcaggtcacacagatcctctccttatccttccccttatgctcatcgcaataattcgcctacatacagcgacaattctcctgcgtgtctaagtatgctgcagagccacgataactggtcaagtctgggtatgcccgctcatccgagcatgttaccggtgagtcataatgcaagcccccctacgagcagtagccagtaccccagcttgtggtcagtgagtaatggcgctgtgacacctggttcacaagccgctgctgtctctaacggcctaggtgctcagttctttcgaggatcaccggcacactacacccccttgacccatcccgtatctgcgccaagttcctcagggagccctctgtacgagggcgcagctgccgctaccgacattgtcgattctcagtatgacgctgccgctcaggggaggcttatcgctagctggaccccggtgtctccaccatcgatgtag

SEQ ID NO: 243326 - DNA, 732 bp, synthetic construct
  misc_feature 1..732: note = Description of Artificial Sequence: Synthetic coding sequence
  source 1..732: mol_type = other DNA
atgagttcgccaggaacggaatccgccggaaagagtctgcaatatagagtggaccacctcctgagtgccgttgagaacgagctgcaggcgggttctgagaaaggagatccaaccgagagagaactgcgtgttggacttgaagagtctgagctatggctgcggtttaaagaactgactaatgagatgattgtcaccaagaacgggagacgaatgtttcccgttttaaaggtgaatgtgagtggcctggaccccaacgcaatgtattcctttctcctggatttcgtggccgcagacaaccaccgatggaagtatgtcaatggcgagtgggtgcccggtggaaagcccgagccacaggccccttcatgtgtatatattcatccggatagccctaatttcggcgcacattggatgaaggccccagttagtttctccaaggtgaaactgacaaacaaactcaatgggggtggccagatcatgctgaacagcctgcataaatatgagcccaggatccacatcgtgcgggtgggaggcccacaaagaatgatcacatctcactgcttcccagagacacagttcattgcggttaccgcctatcagaatgaagagattaccgccctcaagattaaatataacccgtttgctaaggctttcttggatgccaaagaaagatctgaccacaaggagatgatggaggagcccggtgattcccagcaacctggctatagccaatag

SEQ ID NO: 243327 - DNA, 366 bp, synthetic construct
  misc_feature 1..366: note = Description of Artificial Sequence: Synthetic coding sequence
  source 1..366: mol_type = other DNA
atgaggataatgctgctgttcaccgccatcctggctttcagtctcgcccaatctttcggcgctgtctgtaaggagccccaggaagaggtagtcccaggagggggaagatcgaagcgggaccccgatctgtatcaacttctgcaacggctcttcaagtcccactcaagtttggagggcctactgaaggccttgtctcaggcctcaaccgatcccaaggaatcaacctctcccgagaaaagagatatgcacgactttttcgtgggcctgatggggaagaggtctgtacagccggatagcccaactgacgtaaaccaggaaaatgttccctcctttggcattctcaaatacccaccccgagccgagtag

SEQ ID NO: 243328 - DNA, 366 bp, synthetic construct
  misc_feature 1..366: note = Description of Artificial Sequence: Synthetic coding sequence
  source 1..366: mol_type = other DNA
atgcggattatgttgttgtttaccgccattctggccttctctttggcccagagctttggcgcagtctgcaaagagccccaggaggaggtggtgccgggtggcggtagatccaagagggatccagacttgtatcagctcctccagcggctgttcaaaagtcatagcagccttgaggggctgttaaaagcactcagccaggcctctaccgatcctaaggaaagtacttctccagagaaaagagatatgcatgatttttttgtgggtcttatgggtaaacgtagtgtccagccggacagccccacagatgttaaccaggagaacgttccatcattcggcattctgaagtatccacctagggcagagtag

SEQ ID NO: 243329 - DNA, 312 bp, synthetic construct
  misc_feature 1..312: note = Description of Artificial Sequence: Synthetic coding sequence
  source 1..312: mol_type = other DNA
atgcgtatcatgctgctatttacggccattctcgcattcagccttgcccagtctttcggtgccgtgtgcaaagagccccaagaggaggttgtgcctgggggtggaagatctaaaagagatcccgatttataccagctcctacagaggctattcaagtctcattccagccttgagggcttattaaaagcactgtctcaggcaagtacggatcctaaggaaagcaccagtccagagaagcacagtccaactgatgtcaaccaggagaacgtcccttcttttggaatactgaagtatccacccagagccgaatag

SEQ ID NO: 243330 - DNA, 366 bp, synthetic construct
  misc_feature 1..366: note = Description of Artificial Sequence: Synthetic coding sequence
  source 1..366: mol_type = other DNA
atgcggataatgcttttattcaccgccattctcgcctttagcttggcccagtcctttggggcagtgtgcaaggagccccaggaagaagtcgtccctgggggtgggagatccaaacgggatcccgatctttaccagttgcttcagaggctgttcaaatcccacagcagcctggaaggactgctgaaagcactaagtcaggcatccactgaccctaaagaatccactagtccggaaaagcgcgacatgcacgatttcttcgtcggtttaatgggtaagcgctcagtgcagcctgattccccaactgatgttaaccaggaaaatgtcccctcttttggcatattgaagtatcctccaagagccgaatag

SEQ ID NO: 243331 - DNA, 1224 bp, synthetic construct
  misc_feature 1..1224: note = Description of Artificial Sequence: Synthetic coding sequence
  source 1..1224: mol_type = other DNA
atggacaacgtgctgcctgtcgatagtgacttgtctcccaacatctccacaaacactagtgagcccaaccagtttgttcaaccagcatggcagattgtcctgtgggcggctgcctatactgtaattgtcgtgacgagtgttgttggcaacgtggtggtgatgtggataatcctagcccacaagaggatgcggactgttaccaattatttcctggtgaacctagcgtttgcagaggccagcatggcagccttcaacacagtggtgaactttacttacgccgttcataacgaatggtattatggtttattttattgtaagtttcacaacttcttccccatagccgctgtatttgcctcgatctactccatgaccgccgtggcattcgacaggtacatggccattatccatccgctccagccgagactgagtgcgaccgctacaaaggtggttatttgtgtgatctgggttctcgcactgctgctggccttccctcaaggctactatagcaccacagagacaatgccaagtagagtcgtctgtatgatcgagtggcctgagcatccaaacaaaatctatgagaaagtttaccatatttgtgtgaccgttttgatctattttctgccgttactggtcataggatacgcttacacagtcgttggtatcaccctatgggctagtgagatcccaggcgatagctcagaccggtaccacgaacaggtcagtgcgaagcgaaaagttgtcaaaatgatgatagtggtagtgtgcaccttcgccatctgttggttgccctttcacatattctttttgctgccttacatcaatcccgatctgtatcttaaaaaattcattcagcaggtctaccttgcaattatgtggctcgccatgagttcaaccatgtataatcccatcatctattgctgccttaacgatcggttccggctcggattcaagcatgcctttaggtgttgtcctttcatatccgccggtgattatgagggacttgaaatgaaatccacgcgttacttgcaaactcagggatctgtttacaaagtgtcccggctcgagacaaccatatcaacagtagttggcgcacacgaggaggagcccgaagacggaccgaaagcaactccgtctagtttggatctcacttccaattgctccagcaggagtgactcaaagacaatgacagaatcttttagtttcagcagcaatgtgcttagttag

SEQ ID NO: 243332 - DNA, 936 bp, synthetic construct
  misc_feature 1..936: note = Description of Artificial Sequence: Synthetic coding sequence
  source 1..936: mol_type = other DNA
atggacaacgtacttccggtggatagcgatttatcccccaatatctcgaccaatactagcgaacccaatcagttcgtccagccagcgtggcagatagtgctctgggcagccgcttacaccgtgattgtggttacatcagtggttgggaacgtggtagtcatgtggattattctcgctcacaaaaggatgcgcaccgtaaccaactattttttggtgaaccttgcttttgccgaggcgagcatggcggctttcaacacagttgtgaatttcacctacgcagtccataacgaatggtattacgggctgttttattgtaagttccacaactttttccctatcgctgctgtattcgctagtatctacagcatgacggcggttgcctttgatagatatatggccataattcatccactgcagcctagactttcggccaccgcaacaaaagttgttatttgtgtgatatgggttctagccctgctgttagccttcccgcagggctactattctactactgagacgatgccttcaagggtggtgtgcatgatagagtggccagagcatcctaataagatatatgaaaaagtctaccacatatgcgttacggtgttgatttacttcctgcccctgctggtgatcggctatgcttataccgtggtggggattacactctgggcctcggaaatcccaggcgacagtagtgatcggtatcacgaacaagtgtctgccaaaaggaaggtcgttaagatgatgatcgtggtggtatgcactttcgccatctgctggctgccattccacattttctttctgctcccctatatcaaccctgatttgtacctgaaaaagttcatccagcaggtctacctggccattatgtggctggccatgtcaagtaccatgtacaaccctatcatctattgctgtctgaatgaccgttag

SEQ ID NO: 243333 - DNA, 1197 bp, synthetic construct
  misc_feature 1..1197: note = Description of Artificial Sequence: Synthetic coding sequence
  source 1..1197: mol_type = other DNA
atgggaacctgtgacatcgttactgaagcaaatatttcttccggtcccgagagtaatacgacaggaatcaccgcattctccatgccttcctggcagctggcgctctgggccacagcctacctggctctggtactggtggcagtgaccggcaatgccatcgtcatttggatcatccttgcccatcgaagaatgcgtacagtgacaaactacttcatcgtcaacctcgcacttgccgatctatgcatggctgcctttaacgctgccttcaactttgtgtatgcctcacacaatatatggtacttcggcagggcgttttgctatttccagaacctgttccctattaccgcgatgttcgtgtcaatttacagcatgaccgccatcgctgcggacaggtacatggctattgtccacccatttcagccaaggttaagcgctccgagcaccaaagcagtaatcgccggtatctggttagtagccttggccttagcgagccctcagtgcttttatagcaccgtcactatggaccaaggggcaactaaatgcgttgttgcatggcctgaagactctggcggaaagacactacttctgtatcaccttgtggtcattgcactgatctatttcttgcccctagctgtcatgtttgttgcgtattcagtgattgggttaactctgtggcgacgcgcagtccctggacatcaggcacatggcgctaacctcaggcacctccaagcaatgaaaaagttcgtcaagaccatggtgttggtggtgctgaccttcgccatctgttggctaccctatcacctatattttattctgggtagcttccaggaggatatatactgtcacaaattcattcagcaggtgtacttggctcttttctggctggccatgtcgagcacgatgtacaatccgattatttactgttgtctgaaccaccggtttcgaagtggattccggctggctttcaggtgctgcccttgggtgaccccaaccaaagaggataaactcgaactgactcctaccaccagcctctccacacgtgtaaaccggtgtcacacaaaggagacactatttatggcaggggatacagctccaagcgaagcaacatcgggagaagccggaaggccacaggatggctctggtttatggttcgggtatgggttactggcacccaccaaaacgcatgtcgaaatttag

SEQ ID NO: 243334 - DNA, 561 bp, synthetic construct
  misc_feature 1..561: note = Description of Artificial Sequence: Synthetic coding sequence
  source 1..561: mol_type = other DNA
atgtttgtggcttatagtgtcatagggctgacactgtggaggcgggctgtcccaggacaccaggcccacggagccaatctccggcacttgcaagctatgaagaaatttgtgaaaacaatggtgctggtggttcttaccttcgctatctgttggctcccctaccacttgtattttatcttgggctcttttcaggaagacatctactgtcataagtttatccaacaggtgtacttagccctgttctggctcgccatgtcttccaccatgtacaaccccatcatctactgttgccttaaccatcggttcaggagcgggtttaggctggcttttcggtgttgtccatgggtgacccctactaaagaggacaaattggagctgactccaacaacctccctgtcaactagagtgaaccggtgccatactaaagagaccctctttatggctggcgatacagccccaagtgaagccacatcaggagaagccggtcgcccacaggacggatctgggctatggttcgggtacggtctactggcaccaactaaaacgcacgtggaaatctag

SEQ ID NO: 243335 - DNA, 1398 bp, synthetic construct
  misc_feature 1..1398: note = Description of Artificial Sequence: Synthetic coding sequence
  source 1..1398: mol_type = other DNA
atggccaccctaccggctgccgagacatggatagatggaggcggaggcgtgggagctgatgcggtgaacctgaccgcctccctggccgcaggcgcagctactggagccgtcgaaactggatggcttcagctgctcgaccaggctgggaatctctcctccagccctagcgcccttggacttcccgtggcctccccagctccgtctcagccctgggccaacttgacgaatcagtttgtccaaccatcttggaggatcgcactgtggagccttgcatacggcgttgtcgtcgccgtcgcagttctggggaacctcatagtgatctggattattctggcccacaagcgcatgcggaccgtgactaattacttcctggtcaacctcgcgttctctgacgcaagtatggccgcatttaacacgctcgtcaattttatatacgccctccacagcgaatggtacttcggggcaaactactgtagatttcaaaacttttttcctatcacagctgtgttcgcaagcatctattccatgaccgccattgccgttgaccggtatatggcgattatcgatcccttaaagccccgactttccgccacggctacaaagatcgtgattgggtccatttggatcctcgcctttctgctagcgttccctcaatgtttgtattccaaaaccaaggtcatgccagggagaactctgtgttttgtccagtggccggaaggcccaaaacagcattttacctaccatatcattgtcattattctggtttactgttttcctctcttaatcatgggtataacttatacgatagtgggcattactctatgggggggtgagattcccggagatacatgtgacaaatatcatgagcaacttaaggctaagcgaaaggtggttaaaatgatgattatagtggtgatgaccttcgcaatttgttggctcccttaccacatctactttatcctcaccgccatctaccagcagcttaataggtggaagtacattcagcaggtttacctcgcatccttctggctcgcaatgtctagcactatgtataaccccataatatactgctgcttgaacaaacggtttcgtgccggtttcaagcgggctttcagatggtgcccattcatcaaggtttcatcatatgacgaattagagctcaagacaacccgcttccaccccaatagacagtcatccatgtataccgtgacccggatggaaagtatgaccgtggtcttcgacccaaatgatgcagacaccacccggtctagcaggaagaagcgcgctaccccaagggatccttcgttcaacggctgctcacggagaaactctaaatctgcctctgctaccagtagtttcattagtagcccatataccagcgtggacgagtactcttag

SEQ ID NO: 243336 - DNA, 5682 bp, synthetic construct
  misc_feature 1..5682: note = Description of Artificial Sequence: Synthetic coding sequence
  source 1..5682: mol_type = other DNA
atgggaccgggttgtgaccttcttttacgcaccgccgctactattaccgccgcagccatcatgtctgatacagatagcgatgaagacagcgccggaggcggacccttctccctcgccggatttctgttcggaaatatcaatggggctggccagttagagggcgaatctgttctcgatgatgagtgcaaaaaacacctggcaggactgggtgccctcggactcggatctcttatcaccgagctaaccgctaacgaagaacttacaggaacagatggagcactcgtgaatgacgaaggatgggtgagaagtacggaagatgccgtggactactcagatataaacgaggtcgccgaggatgaaagtagaagatatcagcagacaatgggatccttacaaccattgtgccacagcgattacgatgaggacgattatgacgcagattgcgaagatattgattgcaagctgatgcctcctccacctcccccaccaggtccgatgaagaaggacaaggaccaagattcaatcacgggcgtgagtgaaaacggtgaaggaatcattcttccaagcataatcgcaccaagctctctggcttccgagaaagttgacttcagcagctcctcagacagcgagtcagaaatgggcccacaggaagctacccaagccgaatccgaggacggaaagttgaccctgcccctggctggtattatgcagcatgatgccactaagcttctaccgtccgtgacggagttattccccgagtttagacctggtaaagtgctgcgtttcctgagactgtttggccctggcaagaatgtgccgtctgtctggaggagcgcgaggaggaaaaggaagaaaaagcatagagaacttattcaggaggaacagatccaggaggttgagtgctcagtggaaagcgaagtgtcccagaaatctctttggaactatgattacgcacccccacccccaccagagcaatgcctgtctgacgatgagatcacgatgatggccccagtggaatctaagttctcgcagtcaacaggtgacatagataaggtaaccgacactaagccgagagttgccgagtggagatacggtccagcgcgtctgtggtatgacatgctcggcgtccccgaggatggcagcggtttcgattacggattcaaattgaggaagactgagcacgaacccgtgattaagagccgtatgatcgaagagtttcggaaattagaagagaacaatggaacagacttgctggcagatgagaacttcttgatggtcactcagcttcactgggaagatgacattatctgggacggtgaagatgtgaagcacaaaggcaccaagccccaaagagctagcctggccggatggctgccgtcttctatgacgaggaatgccatggcctataatgtgcagcaaggctttgctgcgacgctcgacgacgacaagccatggtattccattttccctattgacaatgaggatttagtgtacggcaggtgggaggacaacattatatgggacgcccaggctatgccccgattgctagaaccacccgtgctcacactggaccctaacgatgaaaatctcatactggagatccccgacgagaaggaagaagcaacttccaattctcctagcaaagagtcaaagaaagaaagcagccttaagaaatcacgcatactactgggcaaaaccggggtgattaaggaggaacctcaacaaaacatgtcccagcccgaagtgaaagatccttggaacctcagcaacgacgagtactactaccccaaacagcagggcctgcggggaaccttcggaggaaacatcatacagcactcaattcctgctgtcgagcttcggcagccatttttcccaacccacatgggcccaattaagctgaggcagtttcaccgccctccactaaaaaaatactctttcggcgctctctcacagccgggtccacactctgtgcaacccctgctgaaacacataaagaaaaaagccaagatgcgtgagcaggagcgacaagccagcggcggaggcgagatgtttttcatgagaacccctcaagacttaaccggcaaggacggggatctgatactggctgagtactctgaggagaacggcccactgatgatgcaggtcgggatggccaccaaaattaaaaattactataaaagaaagcctggcaaggaccccggagccccagattgcaaatatggcgaaacggtgtactgtcacacttctcctttcttgggatccctgcaccccggtcagttgctgcaagcctttgagaacaacctgttcagggcccctatttacttgcacaagatgcctgagaccgatttcctgattataaggactcgacaagggtactacattcgagagctggtggacatcttcgtagtggggcagcagtgccccctttttgaggtgcccggacctaactcaaagagagctaatacccatatcagggacttcctgcaggttttcatatacaggctgttttggaaatcgaaggatcgccctagacggatacgcatggaagacatcaagaaggcgttccccagtcactctgaatcttccattagaaaacgccttaaactgtgcgctgacttcaaacgcactgggatggatagcaactggtgggtattgaagagtgactttcgattgccgactgaagaggaaattcgggcaatggttagccctgaacagtgctgcgcctattacagcatgattgccgcagagcagcggctcaaagacgctgggtacggggagaagtcattctttgctccggaggaggagaacgaagaagacttccaaatgaaaattgatgacgaggtgagaacagccccatggaacactaccagggcgtttattgcagctatgaaaggcaagtgcctcctggaagtgacaggcgttgcagatcctactggatgcggcgagggatttagttacgttaaaatccccaacaagccgactcaacagaaggatgacaaagagccccagcctgtcaagaagaccgttactggcacagatgccgacctgcgcaggctgagtctgaagaatgccaaacagctgctgcgtaagttcggcgtgcccgaggaagaaatcaagaagctgtctaggtgggaggtgatcgatgtggtgagaaccatgtcaaccgagcaggctcgttccggggagggccctatgagcaagttcgcacgaggctcacgcttctccgtcgccgaacatcaggagagatacaaagaggagtgtcagcggatcttcgatctccaaaataaggtgctgtcctccaccgaagtgctctcaactgacacagactcgagctctgcagaagatagtgacttcgaagagatgggcaaaaatatagagaacatgttgcagaacaagaaaaccagctcccagctgtctcgggaacgtgaagaacaggagcgtaaggagcttcagaggatgctgcttgctgctggatctgcagcctcaggaaataaccatcgggacgacgacacagcttccgttaccagcctgaactcctccgccacaggaagatgcctgaagatctaccgcacttttagggacgaggaaggcaaagaatacgtcagatgcgagaccgttagaaagccagctgtgatcgacgcatacgtgcggatccggactactaaggatgaggagtttatccgaaagtttgcgctgttcgatgaacagcatagagaagagatgcgtaaggagagacgcagaattcaggaacagttgcggagacttaagaggaatcaagaaaaagaaaagctgaaaggcccaccagaaaaaaaacccaaaaaaatgaaggaacgccctgacttgaagttaaaatgtggcgcatgcggagcaatcggacacatgcgaacgaacaagttttgtcctctctattaccagacaaatgctccaccgtcaaatcccgtcgccatgacagaagaacaggaggaagagctggagaagacagttatccacaacgacaacgaagagcttattaaggtggaaggaaccaaaattgtactcgggaaacagcttatcgagagtgctgacgaggtgaggcgtaagtccctagtcctcaaattcccgaagcagcagttgccccctaagaaaaaacggagagtggggaccactgtgcactgtgactacctcaatagacctcacaagagcattcatcggaggcgaaccgaccctatggtcactctgtcctcaatattggaaagtattataaatgacatgcgggatctgcccaacacataccccttccatacgcccgtcaacgccaaggttgtgaaggactattacaagattatcaccaggccaatggacctccaaaccttgcgcgagaacgtccgcaagaggctgtacccgtcacgggaagaatttcgcgagcatctcgagctcattgttaagaattcagccacctataatggacccaaacatagcttaacccagattagtcagtccatgctggacctgtgtgacgagaagctaaaggagaaagaggacaaacttgctagactggagaaggcaattaacccactcttagatgacgatgaccaggttgcttttagttttatacttgacaatatagtcacccagaaaatgatggctgtgccggatagctggcctttccaccaccccgtcaacaagaaatttgtgcctgattactataaagtcatagtgaatcctatggatctcgagactatcagaaaaaatatttcaaaacacaaatatcagtctcgtgagagcttcctggacgacgtgaacctgatcttggccaatagcgtgaagtataacgggcctgagagtcagtatacgaagacagctcaggagatcgttaatgtatgctaccagacgctgacggagtacgatgagcatctaacccagctcgagaaagatatttgtaccgccaaggaagctgccctggaagaggctgaactcgaaagtctggaccccatgaccccgggaccatacaccccccagccaccagacttatacgacacaaacacttcgctgagcatgtctcgggatgccagtgtttttcaggacgaatccaatatgagtgtgttggacatcccgagcgccactcccgaaaaacaggtcacccaagagggtgaagacggagatggcgacctcgccgacgaggaggaaggaaccgtgcagcagccccaggcatctgtgctgtatgaagacctactcatgtcagaaggagaggacgatgaagaggatgccggatccgacgaggagggcgataaccccttcagcgcaattcagctcagtgagagcggatccgattctgacgtcggttctgggggtatccggccaaaacaacctaggatgttgcaggagaacaccaggatggatatggagaacgaggagtctatgatgtcatacgaaggagacggcggtgaggcaagtcacggattggaggattctaatatcagctacggctcatacgaagagcccgatccaaaaagcaatacacaggataccagcttctcctcaatcggaggatatgaggtctccgaagaggaggaggacgaggaagaagaagagcagcggtccggacctagcgttttaagccaggtgcatctctccgaagacgaggaagactcagaggacttccactcaatcgccggagattcggatctggactcagatgagtac

SEQ ID NO: 243337 - DNA, 5618 bp, synthetic construct
  misc_feature 1..5618: note = Description of Artificial Sequence: Synthetic coding sequence
  source 1..5618: mol_type = other DNA
atgggacctggatgtgatctgctgctgaggaccgccgctacaatcactgccgcagccatcatgtctgataccgattctgatgaggactctgcaggcggtggtccgttctccttagcagggtttcttttcgggaatattaacggcgcaggacagcttgaaggggagtccgtgctggacgatgagtgcaagaagcatctcgctgggctgggcgctttaggcctcggaagtctgataacagaattaacagccaatgaagagctgacagggacagacggtgcactcgtgaacgacgaagggtgggtacgttccacagaagatgctgtggattacagtgatatcaacgaggttgcagaggacgagagtaggagataccagcagacaatgggctccctgcagcccttatgtcattctgattatgatgaggacgactatgacgcagattgcgaagatatcgactgtaagcttatgccacctccccctcctccccctggaccaatgaagaaggacaaagatcaagacagcatcaccggggagaaggtggactttagtagctcttctgatagtgaaagcgagatgggcccacaagaggctacacaggctgagagtgaggacggaaagctgaccctccctctggccggaataatgcagcatgatgccaccaaattgttgcccagtgtgacagagctgttccccgagttccgcccaggtaaggtgctgcgcttcctgagactgttcgggcctggtaaaaacgtaccctcagtctggcggagcgcacgcaggaagagaaagaagaaacacagggagctgatacaggaagagcagatacaggaggtggagtgttccgttgagtccgaagtgagtcagaagtccttgtggaactatgactacgcaccccctccacctcctgagcagtgcctttcagatgacgaaatcacgatgatggcccctgtggaatctaagttctctcagagtacaggcgacattgacaaggtgacagataccaagccccgtgttgccgagtggcgatatgggcctgcaaggctgtggtacgatatgctgggcgtgcctgaggacgggagcggtttcgattatggctttaagcttagaaagacagagcacgagcccgttataaagagtaggatgatagaggagtttaggaaactcgaggaaaataacggcaccgacttgctcgcagacgaaaacttcttaatggttacacagctgcactgggaggatgacataatatgggatggggaagatgttaagcacaagggtacaaagccgcagcgcgcttcactggcaggatggctgccttcatctatgacacgaaatgctatggcctacaatgtacagcagggtttcgccgctaccctggacgatgataagccttggtatagcatattccctattgataacgaggacctggtttacggcagatgggaagataacatcatctgggacgctcaggccatgccgaggttgttggaaccccctgttctgacattggatcctaatgacgagaatctgatcttagagattcccgacgagaaagaggaagcaacaagcaattcaccttctaaggagtccaaaaaggagagctcactcaaaaagagccggattttattaggaaagacaggcgtgattaaagaggagccccagcagaacatgagccaaccggaggtcaaagatccttggaatttgtctaatgatgagtactattaccctaagcaacaaggtttgaggggaactttcggcggaaatataatccaacactcgattcctgcggtggagctgcgacaacctttctttcctacacacatggggcctattaaactgaggcaattccatcgcccaccacttaagaaatatagcttcggcgcactatcccagccgggaccacactctgtacagcctctgctgaaacatattaaaaagaaagctaagatgcgcgaacaggaacgccaggcctcaggaggaggagagatgttctttatgagaactcctcaagacctcacagggaaggatggagatctcatccttgctgaatactccgaagagaatggaccactgatgatgcaggtcggtatggctactaaaataaaaaattattacaagcggaagccagggaaggatcctggcgcacccgattgcaaatacggtgagacggtgtactgccacacctccccattcctcggctcactgcacccaggacagctgctgcaggctttcgagaacaacctgtttagggcccctatatatctgcataaaatgcctgagacagatttcctaatcatacggacacgccaagggtactacattcgggagctcgtggacatattcgtagttggccagcagtgcccactatttgaagtgcccggacctaacagcaaaagagctaatactcacatcagagattttctacaggttttcatctacaggcttttctggaagtctaaagacaggcctcggagaattcggatggaagacatcaagaaggcattcccatctcacagcgaaagctcaatcagaaagagactgaaactctgcgccgattttaagaggaccgggatggattccaactggtgggtgctgaagagtgatttccgcctgcccacggaggaggaaatccgtgcaatggtatccccagaacaatgctgtgcgtactacagcatgattgcagccgaacagagactcaaagacgcgggttatggcgagaaaagttttttcgctccagaggaagagaatgaggaggactttcagatgaagattgacgacgaagtccgaaccgcgccttggaataccacacgcgctttcattgccgctatgaagggtaagtgtctgctagaagttacaggggttgccgaccctacaggatgcggagaaggattcagctatgtaaagatacctaataagcctacccagcagaaggatgataaagagccacaaccagtgaagaagactgtgacaggaacagacgcggacctaaggaggctatctttgaagaacgcgaagcagctcctccgcaagtttggcgtgcccgaagaggagattaagaagttgtctaggtgggaggtcatcgatgtggtgaggactatgtccactgaacaggccaggtctggcgagggccctatgagcaagtttgccagggggtccaggttctcagtggcagaacaccaggaacggtataaagaggagtgccaaagaatatttgatctgcagaacaaggtcttaagttctacagaggtcttgagtacagatacagactctagctccgcagaagattctgacttcgaagaaatgggcaaaaacatcgaaaatatgctccagaacaagaagaccagcagccaactctctcgcgagcgcgaggagcaagaacggaaggagctgcaaaggatgttgctggcggcaggcagcgctgcctccggaaataaccacagggatgacgacactgcaagcgtgacgtcactgaattcttcagcaacagggaggtgtctgaagatctacagaacattccgagacgaggagggcaaggaatatgtaaggtgcgagactgtgcgtaagcctgcggtgattgacgcgtacgtgagaattagaaccacaaaggacgaggagtttattagaaaattcgcactcttcgacgaacaacacagggaggaaatgcgcaaagaacgtcgccgaatccaagagcagctgcggagactgaagcggaaccaggagaaagagaaattgaagggcccaccagagaagaagcccaagaagatgaaggagcgacctgatcttaagctgaaatgtggcgcttgcggcgctattggccacatgcgaactaacaaattctgtccgctgtattatcaaaccaatgctcctcctagcaaccccgtcgccatgactgaagaacaagaggaggaattggaaaaaaccgtgatccacaatgataacgaggaactcatcaaggtggagggaaccaagatcgtcctaggcaagcagctaatagaatcggcagatgaagtgcggaggaaatctttggtgctgaagttccccaagcagcagttgccacctaagaagaaacgacgagtcggcaccaccgtccactgcgactaccttaatcgccctcataaatcaattcacaggaggcgaacagaccccatggtcactctctcttctatcttggagagtattatcaacgacatgcgcgacctgcctaacacatatcccttccacacacctgtgaacgcaaaagttgttaaggactattataaaatcatcactagacctatggacctgcagacactgcgggaaaatgtcaggaaacgactgtacccctcccgcgaagagtttcgcgaacatttggaactgatcgtcaagaactccgccacatacaacggaccaaagcacagcctgacccagatttctcagtccatgttagatttatgcgacgagaaattaaaagagaaagaggataagctggctagactggagaaggctataaatccacttctcgacgatgatgatcaggtggcgttttcctttattctggacaacatagtaacccaaaagatgatggccgtacctgactcgtggcccttccaccaccccgttaataagaagtttgtgcccgattattataaggttattgtgaacccgatggacctggaaacaatccggaagaatatctctaaacataaatatcagtcgagagagtcgtttctcgacgacgtgaacctgattctagctaacagcgtgaagtataacggcccagagtcccagtacaccaagactgctcaagagattgtgaacgtgtgctatcagaccctgaccgagtatgatgagcacctgacccagctggagaaggatatctgcaccgccaaggaagctgccctggaagaagccgagctggagtccctggatccaatgacgccgggtccctatactccacagcctccggatctgtatgatactaacactagcctgtctatgagtcgggatgcttccgtgtttcaagatgaaagtaacatgagtgttctggatattccttcagccacccctgagaaacaggtgactcaagaaggcgaagatggtgacggagacctggctgatgaagaggagggtacagtgcagcagccccaggctagtgtcctgtatgaggacctactaatgtctgagggcgaagacgatgaggaggatgccggatctgatgaagagggggataacccttttagcgccatccagttgtccgagtctggatcggacagtgacgttggaagcgggggaattcggcctaagcaaccccgaatgctccaagagaacactagaatggacatggaaaacgaggagtcgatgatgtcgtacgagggagacggcggagaggctagccatggccttgaggattcaaatattagctacggttcttatgaagaacctgatcccaaatctaacacccaggatacttcattctcctctatcggtgggtacgaggtgtctgaagaagaggaggacgaggaagaagaggaacagcgctcaggtcccagcgttcttagccaggttcacctgagtgaggacgaagaggactctgaagatttccattctatcgctggtgactcagacctggattccgatgagta

SEQ ID NO: 243338 - DNA, 1632 bp, synthetic construct
  misc_feature 1..1632: note = Description of Artificial Sequence: Synthetic coding sequence
  source 1..1632: mol_type = other DNA
atgaccgaagaacaggaggaggagctggagaagaccgtgatccataatgataatgaggagttgattaaggtggaaggaacaaaaattgtcctgggcaaacaactgattgagtctgcggatgaggtgaggaggaaaagcctggtgctgaagtttcctaagcaacaactccctccgaaaaaaaagcgacgagtcgggaccaccgtccactgtgattacctgaacagacctcacaaatccattcaccggcgtcggaccgatcctatggtaaccttgtccagcatccttgaatccataataaatgacatgagggatttgcccaatacttaccccttccatacccccgtgaacgccaaagtggtgaaagattactacaagatcattacccggcctatggatctccaaaccctcagagaaaatgtccgcaaaagactgtatcctagtagggaggagttccgagaacacctcgaactgatagtaaaaaactccgctacttataatggccctaaacactcattgacacagataagccagagcatgctggatctttgtgatgagaagttaaaggagaaggaggataaactcgccaggttagaaaaagccatcaatcccctattggacgatgatgaccaagtggccttttcgttcatcttggacaatattgttacccagaaaatgatggccgtgcctgacagctggcccttccatcaccctgtgaacaaaaaatttgtccccgattattacaaggtgattgtgaaccctatggacttagagactatcaggaagaatatctctaagcacaaataccagagccgagaatcatttttggatgacgtcaacttaatattagctaatagcgtaaaatataatggtccagagtctcaatatacaaaaacggcccaagagatagtgaacgtgtgctatcagactctaacagaatatgatgagcaccttacacagctggagaaagacatctgcaccgctaaggaggcagcattagaagaggcagaactggaatccttagaccctatgactccaggaccatataccccccaagccaaacctccagacctgtatgataccaacacgtccttgtccatgtctcgcgacgcctccgtcttccaggacgagagtaatatgtcggtactcgacatcccgtccgccactcccgagaagcaggtcacgcaaatgaggcagggcagaggtcgcctgggagaggaagactccgatgtggacatcgaaggttatgatgatgaggaagaagacgggaaacctaagacgccagcacctgaaggagaagacggggacggagatctcgcagatgaagaggaaggtaccgttcagcagccgcaggccagcgtgctgtatgaggacttgctgatgagtgagggagaggatgacgaagaggatgcaggatccgatgaggagggcgataaccccttctctgctatacagctcagtgaaagcggatccgatagtgacgtgggtagcgggggtatcagaccaaagcagccacgcatgctccaggagaataccaggatggatatggaaaatgaagagtctatgatgtcatacgaaggcgacggcggagaagctagccacggattagaagattcaaacattagccatcaatag

SEQ ID NO: 243339 - DNA, 5687 bp, synthetic construct
  misc_feature 1..5687: note = Description of Artificial Sequence: Synthetic coding sequence
  source 1..5687: mol_type = other DNA
atgggaccaggatgcgatttgctgttacgcactgctgcaacaattacagctgctgccattatgtccgacaccgacagtgacgaggactctgctggcggtggaccgttctctctcgctggctttctctttggtaacattaatggcgctggccagctggaaggagagagcgttcttgacgatgaatgtaaaaaacacttagctggcctcggcgcactgggcctgggctctcttattactgaacttacggcgaacgaggaattaactggcacagacggtgccctggtgaatgatgagggctgggtgcggagcaccgaggacgccgtggactactccgacatcaatgaggttgcagaagacgagtccaggcgctaccagcaaacaatgggatctttgcagccgctgtgccattccgattatgatgaggacgattatgatgcagactgtgaggacatcgactgcaagctgatgccgccacccccacctccacccggaccgatgaaaaaggacaaagaccaagattctattactggagtatcagaaaacggggaaggcattattctcccgtctattatcgccccaagttctttagcatccgagaaagtcgactttagctcaagttctgatagcgagtcggagatgggaccgcaggaagccactcaggcagaatctgaggacgggaagttgaccctgcctctggcgggaatcatgcagcacgacgcgactaaattacttcccagcgtcactgagttgttccctgagttccgacccggtaaagtcctccggtttctccgattgttcgggcctgggaaaaacgtgccctcagtttggcgctcagcccgacgtaaaagaaagaagaagcatcgcgagctgatccaggaggaacagatccaggaagtcgaatgttctgttgagtccgaggtctctcaaaagtctttgtggaattacgactatgcaccccctcctccacctgagcagtgtcttagcgacgacgagataaccatgatggcccctgtggaaagtaagttttcgcaatctaccggtgatatcgataaggtgaccgacaccaagccccgtgtagccgagtggagatatgggcctgcaaggctgtggtatgatatgctgggtgtgcctgaagatgggtctggatttgactacggtttcaagctgaggaaaacagagcatgaaccagtcatcaaatccaggatgatcgaggagttccgaaaactggaagagaacaatggcaccgacctactagctgacgaaaactttctgatggtcactcaactgcactgggaggatgacatcatatgggatggcgaagacgtaaaacacaaaggcacaaagccccagagggcctccttggcaggttggctccctagttccatgacccgcaacgctatggcttacaacgtccagcagggtttcgctgctacactcgatgacgataagccctggtactcaattttcccgatagataacgaagacctggtatatgggaggtgggaagataatataatctgggacgcccaagccatgcctaggctcctggagcccccagtgctgacgcttgaccccaacgacgaaaacctgattctcgaaatacctgatgagaaggaagaggcgacctctaatagcccctctaaagagtcaaagaaggaatctagtctgaagaaatctcggatcctgctgggtaaaactggcgtcattaaagaggagcctcagcagaatatgtcacagcccgaggtaaaggatccatggaacctgtccaacgacgaatactactacccaaaacaacaggggctgaggggaactttcggaggcaacattattcagcactcaatcccagcagttgagctgagacagcccttctttccaactcacatgggccctatcaaactcagacagttccatcggcctccccttaaaaaatactcttttggagctctctcgcagcccggacctcactctgttcagcccctgctgaaacatatcaaaaagaaggctaaaatgagggaacaggagaggcaggcttcaggcggaggagagatgttttttatgcggacaccgcaggacctgaccgggaaggacggagaccttattctggctgagtattccgaggaaaatggtcccctcatgatgcaagtggggatggccaccaaaattaagaattactacaaaagaaaacccggtaaggatcctggagcccctgactgcaaatatggggaaacggtgtattgtcataccagcccgttcctcggcagtcttcaccccggtcagctgctccaggctttcgaaaacaatcttttccgcgcacctatatatttgcataaaatgccagagaccgatttcttgataatccggacgcgccaaggctattatattcgggaactcgtcgatattttcgttgtgggacagcaatgcccgttattcgaagtccctggccctaattccaaacgagcgaatactcatatccgcgattttcttcaggtttttatttaccgactgttctggaagtcaaaggacagaccgcgacggatcaggatggaggatattaagaaagcatttccatctcactcagagtctagcatccggaaaaggttaaagctgtgcgcggacttcaagagaactggcatggattccaactggtgggttctgaagtccgactttcggctcccgacagaagaagaaattcgggcaatggtgtcacctgagcagtgttgcgcctactattcaatgattgctgccgagcaaagactgaaggacgccggatatggcgaaaagagtttcttcgcccctgaggaagaaaatgaagaagatttccagatgaagattgatgacgaggtccgaactgcaccctggaacacaacccgggcatttatagccgctatgaaaggtaaatgcctgctggaagttacaggagtggccgaccctacaggttgtggcgagggatttagttatgttaagatccctaacaagccaacacagcaaaaggatgataaggagccccagccagtgaagaaaactgtgactggcacggatgccgacctgaggcgactgagcctcaagaatgccaaacagctgctcaggaaatttggggtcccggaggaagaaatcaagaagctgtcccggtgggaggtgattgatgtcgtgaggacgatgtcaacagaacaggcacggagcggcgaaggacctatgagcaaatttgccagaggcagcagattctccgtggctgaacatcaagaacggtacaaggaagagtgtcagagaatatttgacctccagaacaaggtgctgtcgagcaccgaggtattgtctaccgacaccgactcctctagtgccgaggattccgattttgaagagatgggaaagaacattgagaacatgcttcaaaacaagaagacaagcagtcagctttctcgcgagcgcgaggagcaggagcgaaaggagcttcagcgtatgctgcttgcagctggatccgccgcttccggaaacaatcacagagacgacgatacagctagcgtgacttccctgaattctagcgccactggacggtgcctgaagatttacaggacatttagggacgaggagggcaaggagtatgttcgctgtgagactgttaggaaaccagccgttatcgatgcttacgtccgcattcggaccacgaaggatgaagaattcatccgcaaatttgctctattcgacgagcaacatcgcgaggaaatgcgcaaagaaaggagaagaatacaggaacaattgcgacggttaaaacgcaatcaggagaaagaaaaactcaaaggtccaccggagaagaagcccaagaagatgaaggaacgcccagacctgaagctcaaatgtggcgcttgtggagcaattggacacatgaggaccaacaagttttgtccactgtactaccagactaatgcccctcctagtaaccccgtggccatgacagaagaacaggaggaagagctggagaagacagtgattcataatgacaacgaggagctgatcaaggttgaagggaccaagattgtgcttggcaagcagctgattgagtccgcggacgaggtgcgtcgtaaaagccttgtgcttaaatttccaaagcagcaacttccaccaaagaagaaacgaagagtgggtaccacggtacactgcgattacttaaacaggccccataaatccatccaccggagaaggaccgaccccatggtgacacttagctccatcctagaaagcataatcaacgacatgagagatctgcccaacacttacccgttccacaccccagttaacgctaaagtcgtaaaagattattacaaaattataacgaggccaatggatctgcagaccctgcgcgagaatgtgaggaaacgtctctatccatccagagaggaattcagagagcatctagaactgatcgttaagaattccgcaacttacaatggcccaaagcacagcctgacacagatatcccagtccatgctggatctatgcgatgaaaaactaaaagaaaaggaggataagttagcccgtcttgagaaggccatcaacccgctgctggacgatgatgatcaagtagcattcagttttattctcgacaacatcgtgactcagaaaatgatggcagtcccagatagttggcccttccaccaccctgtgaacaaaaaatttgtgccagattattacaaggtcattgtgaatcctatggatctagaaaccattcgcaagaacataagcaagcataagtaccagagcagggagagttttctggacgatgttaacttaattcttgccaattccgtgaagtacaacggccctgagtcccagtataccaagaccgcccaggaaatagttaacgtctgttaccaaacactgacagagtacgacgaacacctgactcagcttgagaaagacatttgtacagctaaggaagcagccctggaggaggcggagctggagagtctggacccaatgacacccggaccctatactccccaggcaaagccacccgacctgtatgatactaacacctccctttcaatgagcagagacgcttcagtctttcaggatgagtctaacatgtctgtcctggacattccctctgcgacccccgagaaacaggtgactcaggagggggaagatggagacggcgacctggccgatgaggaggaagggaccgtgcaacaaccacaagccagtgtgctgtacgaggatctgcttatgtccgaaggtgaggacgatgaagaagacgccggtagtgatgaagagggtgataatccattttctgccattcagctgagcgagtctgggtcagatagcgacgtcgggagtggcggaataagaccgaaacagcctcgcatgctgcaagagaacaccaggatggatatggaaaatgaggagtccatgatgagctatgaaggagacggcggagaagcatctcacggactggaggacagcaacatttcatacgggagctatgaggaacctgaccccaagagtaatacacaggacacatcattctccagtatcgggggatatgaggtgtctgaggaagaggaggatgaggaggaggaggagcagcgatctggaccttccgtattgtctcaggtacacctgagtgaagatgaggaggactcagaagattttcactccattgccggagacagcgaccttgattcagatgaata

SEQ ID NO: 243340 - DNA, 5720 bp, synthetic construct
  misc_feature 1..5720: note = Description of Artificial Sequence: Synthetic coding sequence
  source 1..5720: mol_type = other DNA
atgggacctggttgtgatctcctgcttcgcaccgctgcaactattactgccgcagcgattatgtctgatacagacagcgatgaagattctgcgggaggcggtccctttagcctcgctgggtttttgtttgggaatatcaacggggctgggcagctggagggcgagagtgttttagatgacgaatgcaaaaagcatctggcaggtcttggggctttgggcttaggaagcctgattaccgaactgacggctaacgaggaactcacggggaccgacggtgctctggttaacgacgaagggtgggtgcggtcaaccgaagacgcagtagactatagtgacatcaacgaagtggccgaggacgagtccaggcgctaccagcagactatgggctcgttacagcctttatgtcacagtgactatgacgaggacgactatgatgccgattgcgaggatatcgactgcaagctcatgccacctcctccacctccacctggtcctatgaagaaggataaggatcaagactcgataaccggggaaaaagtggatttctcgtctagctctgactccgaatctgaaatgggtccacaggaggctacacaggccgaaagcgaggacggaaagctcacactccctcttgccggaataatgcaacacgatgccaccaaactgctcccttctgtaacagagctcttccctgagtttcggccaggcaaagtccttaggttcttgcggctgtttggaccaggcaagaatgtgcccagcgtgtggcgttcagccagacgaaagaggaagaaaaaacacagagagctgattcaagaggagcagatccaggaggtggagtgctccgtcgagagcgaagtgtcacagaagtccctttggaattacgactatgctccgcctccccctccggaacagtgtttgagtgatgacgaaatcacaatgatggctccggtggagtccaagttcagtcagtcaacaggagacattgacaaagtaacagacaccaagcctagggtggccgaatggagatacgggcctgccaggctatggtacgacatgctgggtgttcccgaggacggctccgggttcgattatggctttaagctgcgaaagacagagcacgaaccggtcattaaatcccgtatgattgaagaatttcgcaaattagaagaaaacaacggtaccgatctactagcagacgagaatttcctcatggtaacacaattgcactgggaggatgatatcatatgggatggagaggacgtgaaacacaagggaaccaagccccagagggcgtccctcgctggctggctcccctcaagcatgacccgcaacgctatggcctataatgtccagcagggattcgctgctaccctggatgacgataagccctggtacagcattttccctatagataacgaagacctggtgtacgggcgatgggaggataacattatctgggacgcccaggcaatgccacgcttacttgagccaccagtgctcacactcgatccaaacgacgagaacttgatcctcgagatcccagacgaaaaggaagaagcaacatctaactctccgtccaaagagtcaaagaaagaatcatctttgaaaaaatccaggattctcctcggaaagacaggggtaattaaggaggaacctcagcagaatatgtcacaaccagaagtcaaagacccttggaatttaagcaacgacgaatactattatcccaaacagcagggattaagaggaacattcgggggaaatataatccagcatagcattcctgcagtggagctcaggcagcctttttttcccacccacatggggcctataaagctacgtcagttccaccggcctccgctgaagaaatattcttttggcgcactctcacagccgggtccccactccgtgcagcccctgttaaagcatatcaagaagaaggccaagatgagggagcaagagcgtcaggcttctggaggtggtgagatgtttttcatgcggacccctcaggacctgacaggcaaagatggcgatttaatccttgccgagtacagtgaggagaatggaccactgatgatgcaggtgggtatggccactaagattaagaactactataagcggaaaccgggtaaagaccctggagccccagactgcaagtacggggagaccgtgtactgtcatacatcaccgtttctgggatccctgcaccctggacagcttctccaagcctttgaaaataaccttttccgagcccctatctacttgcacaagatgcccgagaccgacttcctgataataaggacaagacaaggatattatatacgggagctggtggacatattcgtcgttggccagcagtgtccactgttcgaggtccccggacccaactccaagagagctaacacacacatacgagatttcctgcaggtttttatataccgcctgttttggaaaagcaaagacagacccagaagaataaggatggaggatatcaagaaggcgttcccttcccactcggagagtagcattaggaaaaggcttaaactgtgcgctgacttcaaacggactggtatggattcaaactggtgggttctcaaatcagactttcgcctgcctaccgaggaagagatcagggctatggtgtcgcctgagcagtgctgtgcttactacagcatgatcgccgcagaacagaggttgaaggacgctggttatggcgaaaaatctttctttgcacctgaagaggagaacgaggaggactttcagatgaaaatagacgatgaggtcaggacagcgccttggaacacgacacgagccttcatcgctgccatgaaaggcaaatgcctgctggaagtaactggggtagccgatcccaccggctgtggtgaaggtttctcttacgtaaagattcctaataaaccgactcaacaaaaagatgacaaggagccacagcccgtgaagaaaactgttaccgggaccgacgcagatttacgcaggttgtccctgaagaacgctaagcagctgctgcgtaaattcggtgtgcccgaggaagagattaaaaagttgtctcgctgggaagtcatcgatgttgttagaactatgagcactgagcaggcacgttcaggggaaggtcccatgtccaaattcgcccgaggcagcaggttctccgttgcagaacatcaggagaggtataaggaggagtgccaaagaatcttcgatctgcagaataaagtgctgtcctctacggaggtgttgtctactgacaccgactcgtcctctgctgaggatagcgacttcgaagagatgggcaagaacatagagaacatgctacaaaacaagaaaacctcatcacagctatccagggagcgcgaggagcaggagagaaaagagcttcaacgcatgcttctagcagcgggatccgctgcctccggcaataaccaccgtgacgatgacaccgctagtgtgacctcactgaacagctctgcaaccgggagatgccttaaaatctatcggaccttcagggatgaggaagggaaagagtacgttaggtgcgaaaccgtcaggaaacccgctgttattgatgcctacgtccggatcaggaccaccaaagatgaggagttcatccgcaagtttgccctgtttgacgaacagcatagggaggagatgcgcaaggagcgcagacgcatccaggagcagctaaggcggttgaagcgcaaccaggagaaggagaagcttaaaggaccccctgagaaaaaacccaagaaaatgaaggagcgcccagatttgaaacttaaatgtggggcttgtggcgctatcggacacatgagaactaacaaattctgcccactgtactaccaaaccaatgcaccaccctccaacccggtggccatgaccgaggaacaggaagaggagctggagaagactgtaattcataacgacaatgaagaacttattaaggtggaggggacaaaaatagtgttgggcaaacagcttatcgaatccgctgatgaggtgaggaggaaatcacttgtgctgaaatttccaaagcagcagctgccacccaagaagaagcgcagagtggggactacggtccattgcgactacttgaaccgaccacataagtcaatccatcgcaggagaactgatcctatggttaccctgtcatcgatcttagaatcaattataaacgatatgagagaccttcccaatacatatcctttccacacccctgtaaacgcgaaggtcgttaaggattattataaaatcattacccgcccaatggatctgcagactctgcgggagaacgtgcggaagcggttgtatccctcaagagaagaatttagggagcatctcgaactgatcgtgaaaaactcggccacgtataatggtcctaagcattctcttactcagatttcacaaagcatgctcgacctgtgtgatgaaaagcttaaggagaaggaagacaaactcgctcgcctcgagaaggctattaacccgctattggacgatgacgaccaggtcgcctttagctttattctcgataatatagttacacaaaaaatgatggcagtgccggacagctggccattccatcaccccgtgaacaagaagtttgttccagactactacaaggtgatcgtgaaccctatggatctcgagaccattcgtaaaaatatcagtaagcataagtatcaaagtagagagagcttcttagatgacgtaaacttgatcttggccaacagtgtaaaatacaatggacccgagtcccagtacacaaaaaccgctcaggaaatagtcaacgtgtgttatcagaccctgactgagtacgacgagcacctgacgcagctggagaaggacatatgcaccgcaaaggaggctgcactggaggaggcagagcttgaatctcttgaccccatgacccccggaccctacactccacagccacctgatctgtacgacaccaatacctcgctgtcaatgagtcgcgatgcatccgtgttccaggatgaaagcaatatgtccgtgctcgatatcccatcagccaccccagaaaaacaggtgactcagatgcggcaaggccgaggtagactgggagaagaagacagcgacgtggacatcgagggctatgacgacgaggaagaggacgggaaaccaaaaactccggctcctgaaggggaggacggtgacggggatctcgctgatgaggaggaggggacagttcaacaaccccaagcctcagtcctctacgaggatcttctgatgagcgaaggagaagacgatgaggaagacgcaggttcggacgaagagggggacaaccctttcagcgcaatacagctgtcagaaagcggaagtgatagcgacgtgggaagcggaggcatccgccctaaacaaccacgtatgctgcaggagaacacaagaatggatatggagaacgaagaaagcatgatgtcatatgaaggggacggaggagaagcctcccacggtctggaggacagtaacatttcctatggatcctacgaagagccggacccgaaaagcaacactcaagatacaagtttttcaagcatcggaggatacgaggttagcgaggaggaagaggatgaagaggaggaggaacagagatccggcccttccgtgctgagtcaggtgcacctgtccgaagatgaagaggacagtgaggactttcactccattgccggagatagtgaccttgattccgacgaata

SEQ ID NO: 243341 - DNA, 897 bp, synthetic construct
  misc_feature 1..897: note = Description of Artificial Sequence: Synthetic coding sequence
  source 1..897: mol_type = other DNA
atgactgaggagcaggaggaagaactggaaaaaacggtgattcacaacgacaatgaggagctcataaaagtggaaggcacaaagatcgttctgggcaagcagctgattgaatctgccgacgaagtccgcagaaagtcactggtgttgaaattcccaaagcagcaactgcctcctaagaagaaaaggcgtgtcggcactacagttcactgtgactatcttaatcggccacacaagtctatccaccggagaaggaccgatcctatggttaccctaagctccattctcgaatccatcataaatgatatgcgggaccttccaaacacttacccctttcacacacccgtgaatgcaaaagtggttaaggattactacaagattattacgagaccaatggacctccaaactctgagagagaatgtcagaaaaaggttgtatcccagccgggaagaattcagggagcatctggaattaatcgttaagaatagtgcgacttacaacggtcctaagcattctcttacacagatcagccagagtatgctcgacctctgtgacgagaagcttaaagagaaggaagataaattagcgaggctggagaaggccatcaacccactgttagatgacgatgatcaggtagcatttagtttcattctggacaacatcgttacgcaaaaaatgatggccgttccggattcctggccattccatcacccagtcaataagaaattcgtgcctgactactacaaggtgatagtgaaccctatggatctggagacgatccgtaagaacatcagtaaacacaagtatcaatctagggagtcctttctggatgatgtcaacctcatcctcgccaacagtgtcaaatacaacggatatatgtgtaccacatgccgcttttag

SEQ ID NO: 243342 - DNA, 657 bp, synthetic construct
  misc_feature 1..657: note = Description of Artificial Sequence: Synthetic coding sequence
  source 1..657: mol_type = other DNA
atgagctgcagcggatccggcgctgatccagaggccgctcctgcctctgctgcatccgcaccaggcccagcgccaccagtgtccgccccagcagccctgccgagctcgaccgctgcagaaaataaggcttcccccgcaggaactgctggtggacctggtgccggtgccgcagccggaggtacagggccacttgccgcacgcgctggtgaacccgctgaaaggcggggagctgcccctgtgtccgccggtggagccgcaccgccagagggtgccatcagcaatggagtgtacgtcctgccttctgccgctaacggggacgtgaagccagtggtttccagtacccccctggtcgacttcttaatgcaactcgaagattacacacccacgatcccagatgcagtcactggatactacctgaatcgggctggcttcgaggcaagcgatcccaggatcatccgcctcatcagtctcgccgcacaaaagttcatctcagacatagccaacgatgccctccagcactgcaaaatgaagggcaccgccagtggctcttcaagatcgaagtcgaaggaccgtaagtataccctcactatggaagacctaactccagctctttccgagtatgggataaacgtgaagaaacctcattacttcacgtag

SEQ ID NO: 243343 - DNA, 636 bp, synthetic construct
  misc_feature 1..636: note = Description of Artificial Sequence: Synthetic coding sequence
  source 1..636: mol_type = other DNA
atggacgatgcccacgagtccccaagcgataaaggcggagaaactggagagagcgacgaaacagcggctgtgcccggtgaccctggagctacagacaccgatggcattcctgaggagacagatggggacgcagatgtcgatctgaaggaggctgcagcggaagagggcgagctcgaatcccaggatgtatccgatcttacaacagttgagcgcgaagattcatcactcctcaacccagctgcaaaaaaactgaagatcgatactaaggaaaagaaagagaagaagcagaaggtggacgaggacgaaatccagaagatgcagattctggtcagttctttttctgaggaacaactcaaccggtacgagatgtaccggaggtcagcattccccaaggccgcaattaagcgcctgattcagagcatcaccgggactagtgtgagccagaatgtggtgatagctatgagcggcatttctaaagtttttgtcggtgaagtggtggaagaagccctcgacgtgtgtgagaaatggggtgagatgcccccactgcagccgaagcacatgcgtgaggcagtaagacggttgaagtccaagggccagatcccaaattcgaaacataagaagatcattttcttctag

SEQ ID NO: 243344 - DNA, 465 bp, synthetic construct
  misc_feature 1..465: note = Description of Artificial Sequence: Synthetic coding sequence
  source 1..465: mol_type = other DNA
atggatgacgctcacgagtctccttccgacaaaggcggtgagacaggtgagagtgacgagactgctgccgtgcccggagatccaggagcaactgataccgatggtatacctgaagagacagatggtgacgccgacgtagatctaaaggaggcagccgctgaggagggtgaactggaaagccaggatgtgagcgatttgaccacagtggagagggaggactcgtccctactaaaccctgcagccaagaagctgaagatagataccaaagagaaaaaggagaaaaaacaaaaggtggatgaagatgagatccaaaaaatgcagatcttagtttcaagcttttctgaggagcagctgaatcgctatgagatgtaccggcgttctgcttttcctaaagcagccatcaagaggcactggatgtgcgttcggagcggcgaaaagtgccatcactacaatccaaacatttag

SEQ ID NO: 243345 - DNA, 486 bp, synthetic construct
  misc_feature 1..486: note = Description of Artificial Sequence: Synthetic coding sequence
  source 1..486: mol_type = other DNA
atgaaccagtttggtccatcagcactgataaacttaagtaactttagctcaatcaaaccggagccagcttcgacaccgccacaagggagcatggctaacagcaccgcagttgtcaagattcctggaaccccgggagctgggggaagattgtctccagagaataaccaagtattgaccaagaaaaagttgcaggacctggttcgggaggtcgaccctaacgagcagctggatgaagatgtggaagagatgctcttgcagatcgctgatgactttatcgaatccgtggtcacggccgcttgtcagctcgcacgccataggaagtcttcaactctggaagtcaaggatgttcagctgcatctcgaacggcaatggaacatgtggatccccggattcggaagcgaagaaatccgaccctataagaaggcctgtactacggaagcgcacaaacagagaatggcactcatccgcaagaccactaaaaaatag

SEQ ID NO: 243346 - DNA, 486 bp, synthetic construct
  misc_feature 1..486: note = Description of Artificial Sequence: Synthetic coding sequence
  source 1..486: mol_type = other DNA
atgaatcagtttggtcccagcgccctcatcaatctgagcaatttttcgagcatcaagcccgagcctgcaagtactcctccacaaggtagtatggctaacagtaccgccgtcgttaaaatccctggcacaccgggtgccggagggcgactgtcacccgagaataaccaggtgctgacaaaaaaaaagctgcaggacttggtgagagaagtagatccaaatgaacagctggacgaggatgtggaagaaatgcttctgcagattgcagacgacttcattgaaagcgtggtcaccgcggcttgccaactggctagacaccggaaatctagcacccttgaagtgaaggatgtccaattgcaccttgaacgtcaatggaatatgtggattccaggctttggttctgaagaaatacgtccgtacaagaaagcgtgtactaccgaggctcataagcagagaatggccctcattaggaagactacgaaaaaatag

SEQ ID NO: 243347 - DNA, 1779 bp, synthetic construct
  misc_feature 1..1779: note = Description of Artificial Sequence: Synthetic coding sequence
  source 1..1779: mol_type = other DNA
atgtccgacagcggctcctatggtcagagtggaggtgaacagcaatcctactcaacctatggaaaccccggaagccaagggtatggacaagcctcacaatcatactctggatacggtcaaacgactgactcctcctatggccaaaactacagtgggtactctagttatggccagtctcaatccggatactcgcagagctacggtgggtacgagaaccagaaacagagctcttatagccagcagccttacaacaaccagggccagcagcaaaacatggaaagttccggaagccagggcggtcgggcaccctcatatgatcagcctgactacggtcaacaggattcatacgaccagcagtcaggttatgaccagcaccagggcagctacgacgagcagagcaattatgatcagcaacacgactcttatagtcagaatcaacaaagttaccattcgcagagagaaaactacagccatcatactcaggacgacaggcgggacgttagccggtacggagaagataacagaggttacgggggatcccaaggcggaggtaggggaaggggtggttacgataaggacgggaggggacctatgaccgggtcatcggggggtgatcggggtgggtttaaaaactttggaggacatagagactacggccctaggactgatgctgactccgaaagtgacaatagtgataataacacaatctttgtgcaagggcttggtgaaggcgtctccacagatcaggtgggggaatttttcaagcagattggtatcatcaagaccaacaagaaaactggaaaacctatgataaacctctacaccgacaaggacacaggtaagcctaaaggagaagcaacggtgagttttgacgatccgccttccgctaaggcagccatagactggttcgacgggaaggaattccacgggaacattataaaagtttcttttgccacccgcaggcctgagtttatgcgaggcggaggtagcggcggagggaggaggggacggggaggttatcgcggaagagggggattccagggacgcggtggagaccccaaatctggagactgggtctgccctaatccgtcttgtgggaacatgaattttgctcgcagaaatagctgcaaccagtgcaatgagcctcggccagaagacagtcggcctagcggaggggattttcgcggtcgtggctacgggggagaacgcggatacaggggtcgtggcggtagaggcggtgatagaggcggttacggaggggaccgtagcgggggaggttacggtggcgaccgcagcagcggagggggttattctggcgatcgctctggtggtgggtacggtggcgatcgctcaggaggcggatatggtggagatcggggagggggttatggcggagatagggggggtggctatgggggtgatagaggaggcggatacggtggcgacaggggcggatatggcggtgatcgtggcggaggttacggtggagaccggggagggtacggaggcgaccgtggagggtacggcggtgaccgagggggttacggaggagaccggggagggtatggaggcgataggtccagaggcggttacggtggtgaccggggagggggttctggttacggcggagataggtccggcggatacgggggtgataggtcaggtgggggttatggcggtgacagagggggaggctacgggggtgacagggggggatatggagggaagatgggaggcaggaatgattacagaaatgaccaacgaaaccgtccttactag

SEQ ID NO: 243348 - DNA, 1779 bp, synthetic construct
  misc_feature 1..1779: note = Description of Artificial Sequence: Synthetic coding sequence
  source 1..1779: mol_type = other DNA
atgagtgactcaggatcctatggccagagcgggggtgagcagcagtcatactccacctacggtaatcctggttcccagggatacgggcaggccagtcagagttatagcggatatggacaaacgacagattcttcttatggccaaaattactccgggtacagctcatacggccagtcacagtctggatactcccagagttacgggggatatgaaaatcagaaacagagttcatatagtcaacagccatacaacaatcagggacagcagcagaatatggagtcttctggatcgcagggaggacgagctccatcttacgatcaaccagactatgggcagcaagattcttacgatcagcaaagtgggtacgaccaacaccagggttcctacgacgagcagtcaaattatgaccagcaacatgacagctactctcagaaccaacagagttatcattctcagagagagaattactcgcatcatacccaagacgaccgccgagacgtgtctagatacggcgaagacaaccgcggttacgggggaagtcagggcggaggtagaggaaggggcggttatgataaggacggtagggggccaatgaccgggtcctctggcggagacagaggtggctttaagaacttcgggggacaccgtgattacggccctagaacagacgctgatagtgaatcggataacagtgacaacaacacaatattcgtgcaaggcttgggtgaaggtgtgtctaccgatcaagttggggaattttttaagcagattgggatcatcaagacgaacaaaaagacaggcaaacccatgatcaacctgtacacagacaaagacaccggaaagcctaagggcgaagcaacggtgtccttcgacgacccccctagcgcaaaagctgccatcgattggttcgacggaaaggaattccacggcaacatcatcaaggtgtcttttgccacccggagaccagagtttatgcgcggagggggttctggaggcggacggcgtggcaggggcggataccgcggaagaggcggttttcagggacgcggtggtgacccgaaatcaggcgactgggtttgtccaaatccttcctgcggcaacatgaactttgcaagaagaaattcctgcaaccaatgtaacgaaccaaggccagaggattccaggcctagcggcggagatttcaggggccgtggctacggcggtgaacgaggctatcgaggccgagggggtcggggtggcgaccgaggagggtatggcggagacagatctggaggaggctacgggggagaccgatcaagcggcggaggctacagtggggaccgcagcggcggaggctacgggggtgaccgttctggcggtggttatggaggtgaccgcggaggcggatacggcggtgaccgaggaggcggttatggtggcgacaggggagggggatatgggggtgatcggggagggtacggcggagaccgcggtgggggttacgggggtgacagaggcggttacggaggcgatcgcggtgggtatggcggtgatcgcggtggatacggaggtgacaggggcggatatgggggagacagaagccggggaggctacggaggcgataggggtggaggcagcggctatggtggggataggtctggcggatatggaggcgatagatccgggggagggtatggaggggataggggcggtggatacgggggtgatcgaggagggtacggaggcaaaatggggggacgtaacgactatcgtaatgaccagcgaaaccgtccttattag

SEQ ID NO: 243349 - DNA, 1188 bp, synthetic construct
  misc_feature 1..1188: note = Description of Artificial Sequence: Synthetic coding sequence
  source 1..1188: mol_type = other DNA
atgacaggcagttcaggcggagaccgcggtggatttaagaatttcgggggacaccgggattatgggcctcgaacagacgccgatagtgagtccgataactctgataacaatacaatttttgtccagggccttggcgagggcgtttccacagatcaagtgggcgaattctttaagcaaattggtataattaagaccaacaagaaaacaggcaagcctatgatcaacctatacacagacaaagacactggaaaaccaaagggtgaggccacggtgtcattcgacgaccctccctccgccaaggcagctatcgactggttcgacgggaaggagtttcacggaaacatcatcaaggtcagctttgcaacgcggcgacctgaattcatgcggggtggagggtccggtggtggtcgcagaggtagggggggttacaggggcaggggcggattccagggccgaggtggagaccctaaaagcggcgactgggtgtgtccgaatccatcttgtgggaacatgaattttgctagaagaaattcgtgtaaccagtgcaacgaaccaaggcctgaagattccaggccgtcaggcggtgatttcagaggcaggggctacggaggagaacgagggtacaggggcagaggcggacgaggtggcgaccgagggggttatggtggggatagatctggcggaggctatggcggtgaccgctcttcgggcggtggttactccggagatcgcagcggcggtggatacgggggagatcgcagcggtggaggatatggaggggaccgtgggggaggttatggaggggaccggggtgggggatacggaggcgaccggggtggcggatacgggggtgaccgagggggatacggaggagatcggggtgggggttatggaggcgatcgcggtggttatggaggcgataggggtggttatgggggagatagaggagggtacgggggagaccgtggcggatacgggggagatcgcagtcggggaggttatgggggagacagaggtggtgggtctggttacggcggagataggagcgggggatacggtggggatagatccggcggaggatatgggggagaccgtggcggtggatacgggggtgaccggggaggttatggtggcaaaatgggaggcagaaatgactatcggaatgatcaaagaaaccgaccctactag

SEQ ID NO: 243350 - DNA, 2790 bp, synthetic construct
  misc_feature 1..2790: note = Description of Artificial Sequence: Synthetic coding sequence
  source 1..2790: mol_type = other DNA
atgtgcgaaagctacagccgtagcctcctgagggtgagcgttgcacaaatttgccaggccctcgggtgggattcagtccaactctccgcctgccacctgttaacagacgtactgcaacgctacttacagcaattgggccgtggatgtcaccgctatagcgagctctacggtagaaccgatcctatcctggacgacgtgggcgaggcattccaattgatgggcgtatccctgcacgaattggaagattatattcacaacatcgaacctgtgacctttccgcaccagatcccaagttttcccgtctccaaaaacaatgttcttcagtttccacaacctggcagcaaggatgctgaggaaagaaaagagtacatcccggactacctgcccccaatcgtctccagccaggaagaggaagaggaggagcaggtccctaccgatggaggaactagcgcggaagccatgcaggtcccacttgaggaagacgacgagctggaggaggaagaaatcattaacgatgaaaattttctagggaagcgtccgcttgactcccccgaggcagaggagctcccagccatgaagcgccctagactcctgagcactaagggcgatactctggatgttgtgctgttagaggcaagggaacctttatcttccatcaacacacagaaaattcctcccatgctgtcacctgtgcacgtgcaggatagcactgatctggctccgccaagccccgagccccctatgttggctccggtggctaaatcacagatgccaacggccaaacctctagagaccaaaagcttcacccctaagaccaaaacgaagactagtagtcctggccaaaaaacaaaaagcccaaagacagcccagagccccgctatggtcggctccccgattaggtccccaaagaccgtttcaaaagaaaagaagtccccagggaggtcaaaatctccgaagtccccgaagtctccaaaggtgaccacacacattcctcagaccccagtgcggcctgagacgcctaatagaacgcctagcgcaacgctctctgagaaaatatcgaaggaaaccattcaggtgaagcagattcagaccccgccagacgccggtaaactgaactccgagaaccagccgaagaaggcagtggttgctgacaagaccattgaagcgtccatagacgctgtgatagctagagcttgcgctgagagagagcctgacccttttgagttcagctccgggtcagagtctgaaggggatatcttcacatccccaaagcggatatcaggtcctgaatgtactactcctaaggccagtacatctgccaacaacttcacaaagagcggaagtaccccactccctctttcaggaggaacctcgtctagcgataattcttggaccatggatgcctctatcgatgaagtcgtgcgcaaagcgaagctcggcacgcctagtaatatgcctcctaatttcccctacattagctcacctagcgtgagcccaccaactccggaacccctgcacaaggtgtatgaagaaaaaacaaaacttccctcttccgttgaggttaaaaagaagctcaagaaggaactgaagacaaagatgaagaaaaaggagaaacagagagatcgggaacgcgaaaaagacaagaataaagacaaatccaaggaaaaggataaggtgaaagagaaggaaaaggataaagagactggacgggagacaaaatatccttggaaggaattcctgaaagaggaggaggccgacccctacaaattcaagatcaaggagtttgaagacgtggacccaaaagtgaaactcaaggacggtctggtccggaaagagaaggagaagcacaaggataaaaaaaaggatcgcgagaaaggcaagaaggacaaagacaagagagagaaagagaaggtgaaagataagggcagagaagacaaaatgaaagcaccagcacctcctcttgttcttccaccgaaagagcttgccttaccgcttttcagccctgcaaccgccagcagggtcccagctatgctgccatccttgttacctgtgctgcctgagaagctgttcgaggagaaagaaaaggtcaaggaaaaggaaaaaaagaaggacaagaaggagaaaaagaaaaaaaaggagaaggagaaggaaaagaaggaaaaggagcgtgaaaaagaaaagcgggaaagggaaaagagagagaaggagaaggagaaacacaagcatgagaaaattaaagtcgagccggtggccctcgcaccaagccctgtgattcctcgcctcacgctgagggttggggctgggcaggacaagatcgtcatctcaaaagttgtgcccgctcccgaggccaaacctgctcctagccaaaaccggcctaagacccctccccctgcacctgcccctgcccctggacctatgttggtcagtcctgcacccgtacctctgcctctgctggcccaagccgcagcgggaccagcactgttgccgtctccgggtccagcagctagcggggctagcgctaaggcaccagttaggtcggtggtgaccgaaacggtgagcacctacgtgatccgggacgaatggggaaatcagatatggatctgtcctgggtgcaacaaacccgatgacggttcccccatgatcggttgcgatgattgcgacgactggtaccattggccttgtgtgggaatcatgaccgccccacccgaggaaatgcagtggttttgcccgaaatgcgcaaacaagaaaaaggacaaaaagcataagaaaaggaagcaccgggcacattag

SEQ ID NO: 243351 - DNA, 852 bp, synthetic construct
  misc_feature 1..852: note = Description of Artificial Sequence: Synthetic coding sequence
  source 1..852: mol_type = other DNA
atgtgcgaatcctatagccgaagcctgcttcgcgtatcagtggcccagatctgtcaggcactgggctgggactctgtacagttatccgcatgccatctgctgactgacgtgcttcaacggtacctacagcagcttggcagagggtgtcataggtactcagaactttatggaagaaccgaccccatattggacgatgttggagaagctttccaactcatgggtgtctctctgcacgagctggaagattatatacacaatattgagccagtcaccttcccccaccagataccaagctttccggtctccaaaaataatgtgttacagttcccccagcctggatccaaagatgccgaagagcggaaagaatacattccggactacttgcccccaatcgttagcagtcaagaggaggaggaggaagaacaggtgcccacagatggaggaacatcagccgaggcaatgcaggtgccactggaggaagacgacgagttggaagaagaagagattatcaatgacgaaaacttcctgggtaaaaggccacttgattcgcccgaggccgaagaactcccagccatgaagagacctcggcttctctctaccaagggtgatacacttgacgtggtgctgctcgaagcgagagaacccttatcctctattaacacccagaaaatccccccaatgctatccccagtgcatgttcaggactccaccgatctagcgccaccatcaccagagcctcccatgctcgcgccagtggctaaatcacaaatgccaaccgctaaaccactcgagacgaaaagttttaccccgaaaactaagaccaaaaaaaaaaaaaaaaagaagaagtcctag

SEQ ID NO: 243352 - DNA, 3258 bp, synthetic construct
  misc_feature 1..3258: note = Description of Artificial Sequence: Synthetic coding sequence
  source 1..3258: mol_type = other DNA
atggccgcaggttccgatctgctggatgaagtcttcttcaattctgaggtcgacgagaaagtagtgtcagatttggtgggatctctcgaatcgcagctcgcggcatcagccgctcaccaccaccatttagcgcctcgcacccccgaggtgagggctgctgcagctggggcactcgggaaccacgttgtctcaggcagtcccgcaggggctgccggtgccggaccagccgcacccgctgagggggctccaggggcagccccagagcctccaccagctggtcgagctcggcctggagggggaggaccccagcgccctggacccccatcgcccaggagacctctcgtcccagccggtcccgctcctcctgccgcaaagcttcggcctccccctgagggctcggcaggatcctgcgcgcctgtccccgctgctgctgccgttgcggctggaccagaacccgcacccgcaggaccagcaaaacctgcagggccagcagctttggctgccagagccggtccagggccagggcctggccctggacctggcccaggccctggtcctggtaaacctgccggacctggtgctgctcagacacttaacggatcagcggctttgctgaatagccaccacgctgcagctcctgccgtctccctggtgaacaacgggcctgcagcccttctgcccctccctaagccggcagccccaggaactgttattcagacaccaccctttgttggagcggctgcccctcccgcacccgcagctccatcaccacctgccgctcctgccccagccgctcccgctgcggcacctccgcctccgccaccagctcccgctaccttagctcggcctcctggccaccccgctggtccccctaccgccgcaccggcagtaccgccacccgcagcggcacagaatggtggttcggcgggagccgctcctgcccctgcccctgccgctggtggacccgctggcgttagcggccagcccggtcctggtgctgctgcagccgcacctgccccaggcgttaaagctgagtcgccgaagagggtggtacaagccgcaccaccagccgcacagacactagcagccagcggcccagcttcaaccgccgcatccatggtgatcggccctactatgcaaggcgctttgcccagcccagccgcagtccccccaccagcccctggcacgcctaccgggctcccaaaaggtgccgcaggtgccgtgacacaaagcctttcacgtactcctactgctaccacttctggtattagggctacactgacccctaccgtcttagcccctagactacctcagccgccacaaaaccccaccaacattcagaactttcaacttccaccgggaatggtccttgtgaggtctgaaaacggacagctcctcatgatacctcaacaggcccttgcccaaatgcaggcacaggcgcatgctcagccacagaccacgatggcaccaagaccggctacccctactagcgctcctccagtacagatatctacggtgcaagccccagggacaccaataatagccagacaagtaactcccaccacaatcattaagcaggtgtctcaggcccagactacggtccagccttcagccacattgcagaggtctccaggcgtgcaaccccaactcgtgctcgggggagcagcccagactgcaagcttggggaccgcaaccgctgtccaaactggtacaccccagagaacggtacctggcgctaccacgaccagttcggccgcaaccgaaaccatggagaacgtgaaaaagtgcaagaacttcctttccacgttgataaaactggctagcagtggcaagcagagtactgagaccgcggctaatgtcaaggagcttgttcagaacctgctggacggtaagattgaagctgaggatttcacttctagactctaccgagaattgaactcatctccccagccgtatctcgtgccctttctgaagcgatccttgccagccctcagacaattgacccccgacagtgcggcatttattcagcaatctcagcagcaacccccacccccaacgtcccaggcaacgaccgccttaactgccgtcgtgctgtcttcatcagtgcagcgcacagctggaaaaaccgcagcaactgtaactagtgctcttcagccaccggtcctgagcctcacccagcctacccaggttggagtgggcaagcagggccagcccactcccttggtcattcagcagccccctaaacctggggctcttatccgacccccacaggtcaccttaactcaaacacccatggtcgcccttaggcagccccacaacaggattatgctaaccaccccgcagcagattcagctgaatccgctccagccggttccggtggttaagcctgcagtacttcccggaactaaagcattgagtgcagtttcggctcaggcagcagccgcacagaaaaataaactcaaggagcctggcggaggctcctttagagatgacgacgacatcaatgacgtggcgagtatggcaggggtgaacctgagcgaggagagcgcaaggatcttggcaaccaactctgaactggtcggcacacttactcggagttgcaaggacgagacctttctattgcaagccccactgcagagaaggattctggagatcggtaaaaaacatggtattacagaactacaccccgacgtcgtctcctacgtatcccatgcaactcagcagcggctacagaacctggtggaaaagatctctgagacagctcagcagaagaatttcagttacaaggatgacgataggtacgagcaggccagcgatgtgagagcacaactgaaattctttgaacagcttgaccagatcgagaaacaaaggaaggacgaacaggagcgggagattctgatgcgagccgctaaaagcagaagtagacaggaagatcccgagcagctgcgtttaaaacagaaggctaaagaaatgcagcagcaggaactggctcaaatgcggcagagagatgccaacttgactgcattggccgcaatagggccaaggaagaaacggaaggtggactgtccaggacctggctccggggcagagggctctgggcctggatccgttgtgccaggctcttccggtgtgggcacacccagacagttcacacgccagcgaattacccgcgtcaacctgcgagatttaatcttctgtctggagaacgagcgagagactagtcatagcttgcttctctataaagcctttttaaaatag

SEQ ID NO: 243353 - DNA, 2850 bp, synthetic construct
  misc_feature 1..2850: note = Description of Artificial Sequence: Synthetic coding sequence
  source 1..2850: mol_type = other DNA
ggacggggactcctccaacagcgcggaggccgagaatcggggccagcaccacctgccgctaagctgagaccacctccagagggatctgcagggagctgcgcccctgtgccagccgcagccgcagtagcagcaggcccagaaccagcccctgctggccctgctaagcccgcaggacccgctgcactggctgccagggcgggacctggccctgggcctggacccggacccggtccaggtcccggaccaggtaagccagctggccctggcgctgcacagacacttaacgggagcgccgctctgctgaactctcaccacgctgctgcgccagctgtgtccctggtgaacaacggccctgccgctttactacctttgccaaagcctgcggctcctgctgctgccccaccaccaccccctcccgcacctgccacgcttgcgagacccccaggccatccggctggcccacctacagctgcacctgccgtgcccccacccgctgctgcccagaacggcggatccgccggtgccgctcccgctcccgctcctgctgccggtgggccagccggagtgtcaggacagcctgggccaggcgcagccgctgctgctcccgcaccaggcgtgaaagctgagtccccgaaacgtgtggtgcaagccgctcccccagcggctcagacactggcagcctcagggcctgcatccacagctgcctcaatggtgattgggcctaccatgcagggcgctttaccgtccccagccgcagttcctccccctgccccaggcacgccaacaggactgcccaagggagctgccggagccgtgacccagtcgctctcccggaccccaaccgccaccactagcggcattcgagccactctgactcctacagtgctcgcacccagactgccccaaccacctcagaatcctaccaacattcagaacttccaactcccccctggaatggtgctagtgcgaagtgaaaatggccagcttctgatgattcctcagcaggcccttgcacagatgcaggcccaggctcatgcacaaccacaaaccactatggcccctaggccagccactcctaccagcgcgccacccgtacagatttcaaccgtgcaggctcccggtactcctatcattgccagacaggtgactcccacaactattatcaaacaggttagccaagcccagaccacagtacagccatctgccacgcttcagaggagccccggtgtgcaaccacagctggtgctgggcggagcagcacaaacagcctctttgggaaccgccaccgccgtgcagacaggcacgccccagagaaccgttcccggagctacaacaacctcttccgcagcgacagagacaatggaaaacgtcaaaaaatgcaaaaattttcttagcacacttattaaactggcttccagcggcaagcagtccacagagactgcggcaaatgtgaaggagttggtgcagaacctgctggatggcaagatcgaagcagaagatttcacgtcccgcctgtacagggaactgaactcctctccacagccctatctcgtcccatttctcaaacgcagtctgccggctcttaggcaactgactccagacagcgctgcgtttattcagcaatcccagcaacaaccccctccccctacaagtcaagctacgactgccctgactgctgtggtgctctcttcttctgtgcagcggaccgctggcaagaccgccgctaccgtgacctcagccctgcagccccctgtcctaagcctaacccaacctacacaggtgggcgttgggaagcagggccagcccacccctcttgttattcagcagcccccaaaacctggcgcattaattcgtcccccacaagtcaccctgactcagacaccaatggtcgctttgaggcagccgcacaatcggattatgcttacaacccctcagcaaatccagctgaatccccttcagcccgttcccgtagttaagcccgctgtgttgcccggaaccaaggccctttctgccgtgagcgcccaagcggcagccgcacagaagaacaaactgaaagagccaggcggagggtcatttagagacgacgacgacatcaacgacgtcgcatctatggcgggtgtcaacctgtcagaggaaagcgcccgtattctggctacaaacagtgaacttgtcggcaccctgacccgtagctgcaaagatgagacgttcctcctacaagctcctctgcagcgaaggatcctggagattgggaagaaacacggcatcacggaactgcatcctgatgtggtttcatacgtgagtcacgcgacacagcagcggctgcagaatctcgtcgagaagatttccgagacagcccagcagaaaaacttcagttacaaggatgacgacagatacgagcaggcatcagacgtgagagctcagctcaaatttttcgaacagctggaccaaatcgaaaaacagcgaaaggatgagcaagagagggaaatccttatgagggccgctaagagtaggtccagacaagaagatcccgagcagctcaggcttaagcaaaaggccaaggaaatgcagcagcaggagctcgcccagatgaggcagcgcgacgctaatctgacagccctggcagccatcggccctagaaaaaaaagaaaggtggattgccctgggcctgggtccggcgcagagggatctgggcctggaagcgtggtgcccggaagctccggggtcggaactccgcgacagtttacaagacagagaattacaagggtgaacctgagggatctgatcttctgtctggagaacgagcgagagacatcacattccttactgctttacaaagcgtttttaaaatag

SEQ ID NO: 243354 - DNA, 2589 bp, synthetic construct
  misc_feature 1..2589: note = Description of Artificial Sequence: Synthetic coding sequence
  source 1..2589: mol_type = other DNA
atgccagcaggactgactgaacccgctggagcagcacccccagccgctgtgagcgccagtggtactgtgacgatggcacccgctggagccctgcccgttagagtggaatcgaccccagtggctttaggcgcagtgactaaggcgccagtatccgtttgtgtggaacctactgcgtcacagccactgaggtctcctgtggggaccctcgtcaccaaagttgccccagtaagtgccccacctaaggtgtcatcaggcccaaggctgccagcccctcaaattgttgccgtgaaggcccctaataccacaacgatacaatttccagccaatctgcagctccctcctggtacagtgctcatcaaatcaaacagtggtccactgatgctagtctctccccagcagaccgtgacacgagcggagaccaccagcaatatcaccagccgcccagctgtgccagccaacccacaaactgtgaagatttgcactgtccccaacagctcgtcacagctgattaaaaaagtggccgtgacgccggtcaagaaattggcacagatcggaacaactgttgtgactaccgtgcccaagccctctagtgtgcagtccgttgcagtaccaacaagcgttgtcacggtgacacctggcaagccccttaacactgttaccaccttaaagccttcttccctgggcgcttcttcgacaccctccaatgagccaaatctgaaggcggaaaacagtgcagctgtgcagattaatctgtcccccactatgttggaaaacgtgaaaaagtgcaaaaattttctggctatgcttattaagctcgcttgcagcggatcacagtcacccgagatgggccagaacgtcaagaagctcgtcgagcagcttctcgatgccaagatcgaagccgaggaatttacgaggaaactctacgtggaactcaagtccagcccccagccccatctggttccattcctgaagaagagtgtcgttgctctgaggcagttactcccaaattctcagtcctttattcagcagtgcgttcagcagacctcttccgatatggtgatcgcgacatgcacgaccaccgtcactacaagcccggtagtgaccactactgtgtcctccagccagagcgaaaagtcaatcattgtctccggtgctacagcaccaaggactgtatcagtgcaaaccctgaatcctctcgctgggcctgtgggtgcgaaggccggagtggtgacccttcattccgttgggcctacagctgcaactgggggaacgaccgctggcacagggctgctccagacctcaaaaccactagttactagcgtcgctaataccgtgacaacagtgtccctccagccagaaaaacccgttgtgtctggcacagccgtcactctgtcactgcccgctgtgactttcggggagacatccggagccgcaatctgcttgccatcagtgaagcctgtcgtgagcagcgccggaacgacctcagacaagcctgtcattggtacacccgtccaaattaagctggcccagcccggacctgtgctctctcaacctgccggaatcccccaggccgtacaagtgaaacagcttgtggtgcagcagccttcaggagggaacgaaaaacaggtgactacaatcagtcactctagcaccctgaccatccagaagtgcggccagaaaacaatgcccgtcaatactataataccaaccagccaattccctccagccagtatcttgaaacagatcacacttcctggcaacaagattctgagtctccaagcgtctccgacccagaaaaatcgcatcaaggagaatgtgacttcctgctttcgcgatgaggacgacataaacgatgtcacatcgatggcgggtgtgaatctgaatgaagagaacgcttgcattctggctacaaatagcgagttggtgggcactctaatccagagctgtaaggatgagccctttttgttcataggagcactgcagaaaagaatactcgatattggcaagaagcacgacatcactgaacttaattcggatgcggttaatctgatctctcaggccacgcaggagcggctaagaggcttactcgaaaaactcaccgctattgctcaacataggatgactacttataaagcctcagagaactacattctgtgttccgacacacggtctcagctgaagttcctggaaaaactggaccagttagagaaacagagaaaagacctggaggaacgggaaatgttgttgaaggcggctaagtcccggtcaaataaggaggatccagagcagctcaggctgaagcaaaaggccaaagaacttcagcaattggaactcgcccaaatacagcacagggatgccaacctcaccgccctcgcagcaataggaccgaggaagaagcgaccacttgagtccggcatcgaaggcttgaaggataatcttttggctagcggtacgagctctctcactgcaaccaagcaactgcaccggcctcggattactagaatatgcctgagggacctgatcttctgcatggaacaggaacgagagatgaagtactcccgagctctgtacctggccctgttgaaatag

SEQ ID NO: 243355 - DNA, 1857 bp, synthetic construct
  misc_feature 1..1857: note = Description of Artificial Sequence: Synthetic coding sequence
  source 1..1857: mol_type = other DNA
atgccagcgggactgacagaaccagctggagctgccccacctgcagctgtgagtgcatcaggtaccgtgacaatggcaccggcaggcgcactccctgtcagggtcgagagtactcctgtggctctcggagcagtgacaaaggctcccgtatccgtctgcgtggagccaaccgcgtcccagcctcttcgttccccagtcggcacactggttacgaaggtcgcacccgtgtctgccccacctaaggttagttcgggtccacgcttacccgcaccccagattgtggcagtaaaagcccctaacaccacaacaatccagttccccgctaatctgcaacttcctcctggcactgtactgatcaagagcaatagtggtccacttatgttggtgtctccacagcagaccgttacacgggctgagacaacttccaacatcaccagtcgtccagccgtccctgccaaccctcagacagtgaagatctgtactgtccccaatagtagcagccagttgatcaaaaaagtggccgtaacccccgtgaagaagctcgctcagattgggaccactgtggtgactaccgtgccgaaaccttcatctgtgcagagcgtcgccgtacccactagcgttgttacagtcacaccgggtaaacctctcaataccgttaccacccttaagccgtcttctctaggagcctccagcactcctagtaatgaacccaatcttaaggcagagaattcagccgctgtccaaattaatctcagtccaacaatgttagagaatgtaaaaaaatgcaaaaattttttagccatgttgatcaagctggcctgttccggaagccagtccccggagatgggccaaaatgtcaaaaaactggtcgaacagcttttagatgcgaagatcgaagccgaggagttcacacggaaactatacgtggaactgaagtcgtcaccacagcctcacctggtgccctttctgaagaaatccgtcgtggccctccgtcagctcctgcccaatagtcagtcctttattcagcagtgtgttcagcagacatctagtgacatggtgatcgccacctgcacaaccacagtaacaactagcccagttgtcactacgaccgtgagtagttcccagtccgaaaaatcaatcattgtatccggagccactgccccaagaaccgtcagcgtgcaaaccctgaacccactggcaggtcctgtgggcgcaaaggccggtgtcgtgaccttacactccgtcgggccaacagctgccactggcggtacgactgctggtacgggactccttcagacatccaaacctctggtgactagtgtcgccaatacagtaactacagtcagcctgcagcctgagaagccggtcgtttccggcactgcagtgacactgtccctgccagcggtgacatttggcgagacttccggggcagctatatgcctgcctagcgtgaaaccagtggtctctagtgccggtaccacctctgacaaacccgtcattggaacaccagtgcagattaagctggctcagcccggtcccgtgctctcacaaccagctggtattcctcaggccgttcaggttaaacagctcgttgtgcagcagccctcgggaggcaacgagaagcaggtgacgaccattagccattctagcacactaactatccagaaatgcgggcagaagaccatgcctgttaatacaatcatacccaccagtcagttcccccctgccagcatccttaagcagatcacgctgccaggcaacaagatactatctcttcaggcctccccaacccaaaagaacagaattaaggagaacgtgacttcgtgttttaggtccacctttatctgcgtttactag

SEQ ID NO: 243356 - DNA, 2598 bp, synthetic construct
  misc_feature 1..2598: note = Description of Artificial Sequence: Synthetic coding sequence
  source 1..2598: mol_type = other DNA
atgcctgctggtttgaccgaaccagcgggagctgccccacccgcagcagtgtctgctagcggcacagtgacaatggcccctgctggcgctctgccagtgcgcgtggagtctacacctgttgcactgggagccgttacaaaagcacccgtttcagtgtgtgtggagcctaccgctagccaacctctgcgtagtccagtcgggaccctagtgaccaaagtcgccccagtctcagcccctcccaaagtgtcctctggacctagacttcccgctcctcagattgtcgcggtcaaggccccaaataccaccacaatccagtttccagcaaaccttcagttacctcccggaaccgtcctgattaagtcaaattccggtcctctgatgctcgtgagcccccagcagactgtcacccgagccgagacgacctctaacataacttctcgtcctgccgttccagccaatcctcagaccgtcaaaatatgcacagtccctaatagctccagtcagcttatcaaaaaagtggccgtgactcccgtcaagaagctcgcccagatcgggaccaccgtggtgacaacagtgccaaaaccatcgagtgtccagagcgtcgctgtgcctacaagcgtggtgaccgtgacccctgggaagccacttaacactgtgacgacccttaaaccgtcctccctgggtgctagctcaacccccagcaacgaacctaacctaaaggctgagaactcagccgctgtgcagattaatctgagccccaccatgctggaaaacgttaaaaagtgcaaaaactttctcgccatgttgattaagttagcctgctccggctcccagagcccagaaatgggccaaaacgtaaagaagctggttgagcagctgctggacgcaaagattgaagccgaagaatttacccggaagctatacgtcgaactgaagagtagtcctcagcctcacctggtccccttcctgaagaagagtgtcgtggctttgcgccagttgctgccaaacagtcagagttttattcagcagtgcgtccagcagacgagctctgacatggtcatcgcaacgtgtacaacaacggtcactacctcacctgtggtcacaactacagtgagttcgagccaatctgaaaagtctattattgtgtcaggggcaactgcgcctaggaccgtgtctgtgcaaacgctgaacccattggcaggacccgtcggagccaaggcgggagttgttactctgcactcagttggtcccacggcagcaaccgggggaaccacggctggcaccggattactgcagaccagcaagcccctggtaactagtgtcgcgaacaccgtaacgacagtgtcgctgcagccagagaagccagtcgtgagtggtactgccgtcacactatccctgcctgccgtcacattcggcgagacttctggggctgcaatttgcctcccatccgtgaaaccagtggtgttctgctgggatcacatcaagccggttatagggacaccggtgcagatcaaattggctcagcccggaccagtcttgtcacagcctgcgggtatcccacaagctgttcaggtgaagcagttattctccctgttccaagttgtgcagcagccctccgggggtaatgagaaacaggtgaccacgatctcccacagtagtaccctcacaattcagaaatgcgggcagaagacgatgcccgtgaatactatcatcccaaccagtcagttccctccagccagcatcttgaagcagatcaccctgcccggaaacaagattctgagtctccaggccagcccaacccagaagaacaggatcaaagagaatgttacttcatgtttcagagatgaggacgacattaacgacgtaacctccatggccggagtgaatttgaatgaggaaaacgcatgtatcctcgcaaccaactccgaactcgtagggacgctcatccaatcatgcaaagacgagccctttttgttcatcggtgcccttcaaaagagaattctagatattggaaaaaagcacgatatcacagagctgaattctgatgccgtcaatttaatatcgcaagctactcaagaacgtctgcgaggcctcttggaaaaattgacagcaatcgcgcagcaccgaatgaccacttataaagcctccgagaattacatcttgtgttcagatacccgatctcagttgaaattccttgagaagctagatcagctggaaaaacagaggaaagatctggaagaacgtgagatgctgctgaaggcggcaaagtctcgctcaaataaagaagatcccgagcagcttaggctgaaacagaaggcgaaggagctgcaacaactcgagctggcccagatccaacaccgtgacgcaaatttaacagccctggctgccattgggccacggaaaaaaagacctttagaaagtggcatcgaagggctgaaagataacctgcttgctagcggaacatctagcctgactgccacaaaacagctgcacagaccgagaattactaggatctgtctcagggatttgatcttctgtatggagcaggagagagagatgaagtactcccgtgcactgtaccttgctttgctgaaatag

SEQ ID NO: 243357 - DNA, 2238 bp, synthetic construct
  misc_feature 1..2238: note = Description of Artificial Sequence: Synthetic coding sequence
  source 1..2238: mol_type = other DNA
atggctgctctggccgaagaacagactgaggtcgcggtgaaactcgagcccgaaggccctccaaccctgttacccccacaagctggagatggagccggagaaggcagcggcggtacgacaaataacggccctaacgggggtggcggtaacgtcgctgcgagctcttccaccggcggagacggcggtacacctaaacccacagtggctgtgtcggctgccgctccggcaggagccgctcccgtgccagccgcagctccagacgcgggtgccccacatgatcgacagacactcctagctgtcctccagttcctgaggcagtctaagctacgcgaagccgaggaagctttaagaagagaggccggactgctcgaagaagctgttgctggaagtggcgcacccggagaagtggatagcgcgggagccgaggtgaccagtgctctgcttagccgggttaccgcaagcgctccaggccctgcagcacccgatccccctggaaccggagcatctggcgcaaccgtggtcagtggctctgcctccgggccagccgctcctggcaaagtcggatctgttgctgtagaggaccagcctgatgtgtcagccgtgttaagtgcttacaatcagcaaggagacccgacaatgtacgaggagtactattccggactgaagcactttatcgagtgctccctggactgccaccgggctgaattgagtcaactcttttatcctttgtttgtgcacatgtaccttgaactggtctacaaccaacatgagaatgaggccaagtctttcttcgaaaagttccatggtgaccaggagtgctattatcaggacgacctcagggtgctgtcttctttaacaaaaaaggaacatatgaagggcaacgagacgatgttggacttccgcacaagcaaatttgtccttcggatcagccgcgattcttatcagctccttaaaagacatttacaggaaaagcagaataaccaaatttggaatattgtgcaagagcatctgtatatagatatatttgacggcatgccaaggtccaagcagcagattgacgcaatggttggatctctagccggagaagccaaaagagaagccaacaagagtaaagtgttcttcggcctcctgaaggaacctgaaattgaagtgccccttgatgacgaggacgaagagggggagaatgaagagggcaagcctaaaaaaaagaagccaaagaaggatagcattggttccaaaagtaaaaaacaggaccccaacgcaccccctcagaatcggattccgttgccggagctcaaagatagcgacaaactggacaagattatgaatatgaaagaaactaccaaaagggtgcgcctcgggccagactgccttcctagcatctgtttctatacttttttaaatgcttaccaagggctgaccgccgtcgacgtcaccgatgatagcagtctgatcgctggaggttttgctgactccaccgtgcgggtctggagcgtcaccccgaagaagttgcgcagcgtgaagcaggcgtctgacctcagtctcattgacaaagagtcagacgacgtcctcgaaagaatcatggacgagaagaccgcatctgagctgaagatcctttacggacactccggccctgtttacggggcaagcttttctcccgatcggttgtgggctactgaccactatcaaccgctccgaattttcgccggacacctcgcggatgttaactgcaccaggtttcaccccaattctaattacgtcgccactggaagcgcagataggacagtccgcttgtgggatgtgctaaatgggaactgtgtcagaatattcactggccacaaggggccaatccactccctcacatttagtccaaacggaagattcctcgcgacaggggctactgacggacgggtcttgttatgggatattgggcacgggctgatggtgggagaactaaaaggccataccgacaccgtgtgtagtctgcggttctctcgcgatggagaaatactggcatctgggtccatggacaacacagttaggctgtgggacgctattaaggcttttgaagatctggagaccgatgatttcacaacagctacaggccatatcaacctccccgaaaatagccaggagcttctgctgggcacatacatgacaaagagtaccccagttgtgcacttacatttcacccgacgtaacttagtgctggctgccggagcatattcccctcagtag

SEQ ID NO: 243358 - DNA, 2403 bp, synthetic construct
  misc_feature 1..2403: note = Description of Artificial Sequence: Synthetic coding sequence
  source 1..2403: mol_type = other DNA
atggccgcactggctgaagaacagactgaagtggcagtcaaacttgaacctgaaggacccccaacactgcttcccccacaggcaggggatggggcaggagaaggaagcggaggcacaaccaacaacggccctaacggagggggaggcaatgtagcagccagctcctccaccggaggagacgggggtacacctaagcccacggtcgctgttagtgccgctgctcccgctggcgcagctccagtgcccgcagcggctcccgacgcaggcgctcctcacgatagacaaactttactcgctgtgctgcagttcctcaggcaaagcaagttgcgcgaagccgaagaggccctaaggagagaggcgggtctgcttgaggaagccgtcgctggctctggggcacccggagaggtggattcggctggcgctgaggtgacatctgccctgctgagccgagtcaccgcttcagcacctgggccagcggctccagatccacccggaaccggagcaagcggagcgactgttgtcagcggaagcgccagtggccctgctgcaccaggcaaagtcgggagcgtggctgtagaagaccaacccgacgtgtcagcagtgctttctgcatataatcagcagggagacccaacaatgtacgaggagtactattctggcttaaagcacttcattgaatgctcgcttgactgccaccgggctgagctgtcacaactattttacccgctcttcgttcacatgtacctcgaactagtctataatcagcatgaaaacgaggcgaaaagctttttcgaaaagtttcacggggatcaggaatgctactaccaggacgacctccgtgtgctgtccagtttaacgaaaaaagaacacatgaaggggaatgagaccatgttggattttcgtaccagcaagtttgttctcaggatctctcgagacagctaccagctgctgaaacgacatcttcaagaaaagcaaaataatcaaatttggaacatcgtccaggagcacctgtatatcgatatcttcgatggcatgcccagatctaaacagcaaatcgacgccatggtcggcagcctcgctggggaagccaagcgagaagctaacaaatccaaagtcttttttggactgcttaaggagcccgaaattgaagttccccttgacgacgaagatgaggaaggcgagaatgaagaagggaaaccaaaaaaaaagaaacccaaaaaagattctataggtagcaagagcaaaaagcaggaccctaacgccccaccacagaaccgcattccccttcccgagctcaaggactccgataagctggacaagatcatgaatatgaaagagaccacaaaacgagtgcggctaggaccagattgtctgcctagcatttgcttctatactttcttaaatgcctatcagggactgactgccgtcgatgtgacagatgactcatcccttattgcaggaggtttcgctgacagcactgtcagagtatggtccgtgacaccaaagaaactccgtagtgttaagcaggcgtccgatctgagtctgatcgacaaggaatcggatgacgtgctggaacggataatggatgaaaaaacagcgtcagagctgaaaatcctgtatgggcatagcggcccagtgtatggtgccagtttctctccggaccgcaattatcttctgagctcttctgaagatggtaccgtgcggttatggtctttacagacttttacgtgcctggttggatacaaggggcacaattaccctgtttgggatacccagtttagcccatatggctattactttgtgtcgggtggccacgatagagtcgctaggctgtgggccaccgaccactatcagcctctgcgcatattcgccggtcacttggccgacgtcaattgcactaggtttcatcccaactcgaattatgtcgccacaggttctgccgatcgaactgtgcgcctttgggacgtgctgaatggaaattgcgtgcgaatctttaccggccataaaggtccaattcactctttaactttctcacctaatggacgcttccttgccacaggagctaccgacgggagggtgctcctctgggatataggccacggtctgatggtaggcgaactgaaagggcacaccgacacggtgtgtagcctccggtttagcagggacggggaaatcctagcctccgggtccatggataacaccgttagactgtgggatgctatcaaggcattcgaagatcttgagaccgacgattttacaaccgcaacaggtcacataaatcttccggagaattcccaggagctgctgctcggtacctacatgactaagtccacccctgtggtgcacttgcatttcacaaggcggaacctcgtcctggccgctggggcttatagccctcagtag

SEQ ID NO: 243359 - DNA, 2034 bp, synthetic construct
  misc_feature 1..2034: note = Description of Artificial Sequence: Synthetic coding sequence
  source 1..2034: mol_type = other DNA
atggccgaggagaagaagcttaagttgtcaaatactgtcctgcccagcgagagcatgaaggtggttgcggaatccatgggcattgcacaaatccaggaagagacgtgccaattgttgacagacgaagtgtcctatcggattaaagaaatagcacaggatgctctgaagttcatgcacatgggtaagagacagaagctcactacttccgacattgattatgccctgaaactgaaaaacgtcgagcccctttacggattccatgcacaagaattcattccatttaggttcgctagtggcggtggacgagagttgtatttttacgaagagaaagaggtggatttgagcgatatcatcaacacccccctgcctagagtgccactggacgtgtgtctgaaggctcactggctgtcaattgaggggtgtcagcctgccattcccgaaaatccaccaccggcacctaaagagcagcagaaggccgaagccactgagcccctgaaatcggccaaacctggccaggaggaagacggccctctgaaaggcaaagggcagggcgctaccaccgcagacgggaaaggcaaggagaagaaggcgcctcctctgcttgaaggagctcctcttaggctcaagcctcgcagtattcatgaactgagcgtcgagcagcagctctattacaaggagattaccgaagcctgtgtgggctcctgtgaagccaagagagcggaagccctgcagagcattgccacagatccgggactataccagatgctaccaagattctctactttcatctctgagggcgttcgggtgaacgttgtccagaacaaccttgcactgctaatctacctcatgcgtatggtgaaagcattgatggacaacccgactctttacctcgaaaaatacgtccacgaactaatccctgctgtgatgacatgcattgtatctcggcagctgtgccttagacccgacgtcgataaccattgggcattgagagacttcgcagccagactggtcgcgcagatctgtaaacacttttccaccactacaaataacatacaaagccggatcactaagacatttactaaatcatgggtcgacgagaagaccccttggacaacaaggtatggttcaattgcgggactggctgagctgggtcatgacgtgatcaagacacttatcctgcctcggctccagcaggaaggagaacgcattcgcagtgttctcgatgggccagtgctctccaatattgatcgcattggagctgatcatgtacagagcctgcttttgaagcactgtgcaccagtgttggccaaactgcggcctccccctgataaccaagatgcctacagagcagaatttgggtctctaggtcctctcctttgttcacaggtcgtcaaggccagggctcaagctgcgctccaagcccaacaggtgaaccggactactttaactatcactcagcctcggcctacactgaccctcagccaggccccacaaccaggtccccgtacgccaggactgctgaaagtaccaggcagcatcgctcttccagtccagaccttggtgtccgccagagctgccgctcccccacagcccagcccaccaccaacaaaattcatcgtgatgtcatcctcaagcagtgccccttccactcaacaagtgctgagtctttctacatccgcccctggatcaggtagcaccactacgtcaccagtgacgactacagtccccagcgtccagcctatcgttaaattagtcagtacagctactactgctcccccatcgacagctcctagtggtccgggaagtgtgcagaagtacattgtagtgtcgcttccacccactggtgagggcaaagggggtcctacgagtcaccccagtcctgtcccgcctcctgctagctccccctctcctctgagcgggagtgctctgtgcggcggaaagcaagaagctggagatagccctcctcccgcacctgggaccccaaaagcaaacggtagccagcctaattccggaagcccgcagccagccccatag

SEQ ID NO: 243360 - DNA, 231 bp, synthetic construct
  misc_feature 1..231: note = Description of Artificial Sequence: Synthetic coding sequence
  source 1..231: mol_type = other DNA
atggccgaggagaagaaactgaagttaagtaacaccgtgcttccaagcgaaagcatgaaagttgtggccgagagcatggggattgcacagatacaggaggaaacttgccaattgttgacagatgaagtaagctacagaatcaaagagattgcccaggacgctttgaaattcatgcacatggggaagcggcagaagctgacgacctccgacatagactatgccctgaagtag

SEQ ID NO: 243361 - DNA, 1806 bp, synthetic construct
  misc_feature 1..1806: note = Description of Artificial Sequence: Synthetic coding sequence
  source 1..1806: mol_type = other DNA
atgcacatgggaaagagacagaagcttacgacctctgatattgactacgccctgaagttgaagaatgtagagcctttgtacggcttccatgcccaggagtttatcccgtttcggtttgcatcaggtgggggtagggaactgtacttttacgaagagaaggaagttgacctatctgacatcattaacacaccactgcccagggttcccttggacgtgtgtctgaaggcccctaaggagcagcagaaagcagaagccacggagccattaaaaagtgctaagcccggtcaggaagaggatggcccacttaagggaaaagggcagggcgcaacgacagcagacggtaagggaaaagagaaaaaggctcctccactgctggaaggagcacccctgaggcttaagccacggtctattcacgagctttctgtggagcagcaactttactacaaagagatcactgaggcctgtgttggatcctgcgaggccaagcgggctgaggccttgcagtcaatcgccacagacccaggtctttaccaaatgttgccaaggttttctacgttcatcagtgaaggagtacgcgtgaacgtcgtgcaaaataatctggcgttgctgatttatcttatgcgcatggtcaaagcactgatggacaatcccacactttacttagagaagtatgttcacgagctgattccagccgtcatgacctgcattgtgtcacggcagctttgcctcaggcctgatgtggacaatcactgggctttaagagattttgccgcacggctggttgcccagatctgcaagcatttctccaccactaccaacaatattcagtccagaataacaaagactttcacaaaaagttgggtggacgaaaagaccccgtggaccacaagatacggaagtatcgccggtctagcagaactgggacatgatgtgatcaagaccctgatccttcctcgattgcaacaagaaggcgagcgaatcaggagtgtgctggacggaccagtgctgtccaatattgaccggataggtgctgatcacgtgcagagcctcctgctgaaacattgtgcacctgtgcttgctaaactcaggcccccacctgataaccaggatgcgtatcgggctgaattcggttccctaggcccactactctgttcccaggtcgtgaaagctcgcgcacaggcagcgctccaagcccaacaagtcaatcgaaccactctgaccatcacacagcctcgccctactcttaccctaagccaggccccacagcctggccctcgaacccccggtcttctaaaagtcccagggtcaatcgctcttccagtgcagaccctggtatctgcacgtgcagccgctccccctcaaccttctcctccgccaacaaagtttatcgtgatgtcttccagctcttctgccccttcaacccagcaggttctgtctttgagcacctcggcacccggatcagggagtacaaccacatcacccgtgacaaccaccgtgccttccgtccaacctattgttaagttggtaagcactgcgacaactgcccctccttcgacagcccctagcggccctggctctgttcagaagtacattgtggtaagcctgcctcccaccggtgaggggaaggggggacccacttcccacccatcacctgtgccacctccagcgagtagcccctcacctcttagcggttctgctttatgtggaggtaagcaggaggcgggagatagtccacctcctgctccaggcaccccaaaggctaatggcagtcagcccaacagcgggagcccacagcccgcaccctag

SEQ ID NO: 243362 - DNA, 45 bp, synthetic construct
  misc_feature 1..45: note = Description of Artificial Sequence: Synthetic coding sequence
  source 1..45: mol_type = other DNA
atggctgaggaaaagaagcttaagctctccaatacggtcttgtag

SEQ ID NO: 243363 - DNA, 2145 bp, synthetic construct
  misc_feature 1..2145: note = Description of Artificial Sequence: Synthetic coding sequence
  source 1..2145: mol_type = other DNA
atgaccaaacgcagactccagacaataacagcctgtctgcaactacgagagggatcgccaagcttacatcgaggacttcatccatccagggaggagaagcgcgatagcaggatggccgaagaaaagaagctgaagctgtcaaacacggtgttgccatccgagtcaatgaaggtagtggcagaatctatggggattgctcagatccaggaggaaacgtgtcagcttttgaccgacgaagttagctatcgtataaaagaaatagcccaggacgcattaaaatttatgcacatgggcaagcgccagaaactcacgacatcagatatcgattacgctttaaaactgaaaaacgtcgagccactctatggtttccacgcccaagaatttatcccattccgtttcgcttctggtgggggtagagagctatacttctatgaggagaaagaggtggaccttagcgacataatcaacacccctctgcccagagtgccactggacgtgtgcctgaaggcccattggctctctatcgagggctgtcagcccgcaatacctgagaatcctccacccgcacctaaggaacagcagaaggccgaagctaccgagcccctcaaatccgccaagcccggacaggaggaggacggaccactgaagggcaagggacagggagctacaactgcagatggaaaggggaaggaaaagaaggctcctcctctgttggagggcgcacctttgcgactcaaacctcggtctattcatgagttgtccgtggagcaacagctctactacaaggagattactgaggcgtgtgtgggttcctgcgaggccaagagggccgaggctctccagtcaattgcaacggatcctggtctgtaccagatgcttcccagattctccacctttatctccgaaggagtgcgggtgaacgtcgttcagaacaatctcgctttgctgatctatttaatgagaatggttaaggcgctcatggacaacccaacactgtacctggagaagtatgtgcacgaactgatacctgccgtgatgacatgtattgtgagcaggcagctctgtctccggcctgacgttgacaaccattgggccctgcgcgactttgccgcacgcctcgtcgctcagatatgtaaacatttctcaacaacaaccaataatatccaaagtagaatcacaaagactttcactaaatcatgggtcgatgagaagacaccctggaccacgagatatgggagtatcgccggactggccgagctaggccacgatgtaattaagacactcatcctgccgaggctgcagcaggagggggaacgtattaggtccgtgctggatggccctgtgctctcaaatatagacagaatcggtgccgaccacgtacagagcttactcttgaagcattgcgcacctgtgctcgcaaaactcaggcccccaccggacaaccaagatgcttatcgtgccgagttcggaagcctcggaccactgctgtgctcgcaggttgtaaaagccagggcccaggccgctctacaggcacaacaagtgaatcggaccacactgacaattacacagccacgacctactcttaccttatctcaggccccacagcccggaccccgaactcccggactgctcaaggttcctggatctattgcccttcccgtgcagacgcttgtgtcggcacgggctgcggcaccccctcaacccagcccacccccaactaaattcattgtgatgtctagctcgtcctccgccccttccacacagcaggtgctgagcctaagcactagcgccccagggtctggctcgactacaaccagcccggttacaacgactgtacctagtgtgcagcccattgttaaacttgtttctacagctacaactgcccctccatccacggcaccctctggcccaggctccgtccagaaatatattgttgtctcccttccgcctacaggagagggaaagggagggccaacgtcccatccgtctcccgtcccaccccctgcaagtagtccgtctcccctaagtgggtccgcattgtgtgggggtaaacaggaagcaggagactcaccacctcccgcacctggcaccccaaaggctaatggcagtcagccaaactccggctcccctcagccagcgccttag

SEQ ID NO: 243364 - DNA, 702 bp, synthetic construct
  misc_feature 1..702: note = Description of Artificial Sequence: Synthetic coding sequence
  source 1..702: mol_type = other DNA
atggccgaagagaagaagctaaaactgagtaacaccgtactgccttctgagagtatgaaagttgtcgcagaaagcatgggtattgctcagattcaggaagagacctgccagctgcttaccgacgaggtttcatacaggataaaggagatcgcgcaggacgccctgaaattcatgcatatgggcaagcgccagaagcttactacctccgacatcgattatgcgctcaagctgaagaacgttgagcccctgtatggtttccacgctcaagagttcattcctttcaggttcgccagtgggggtggacgcgagctgtacttctatgaggaaaaagaggttgacttgtccgatatcattaatacacctcttccacgcgtcccactggatgtgtgcctgaaggctcctaaagaacagcagaaggccgaggccactgagccactcaagagcgcaaaaccaggccaggaggaggacggcccactgaagggcaagggacagggtgccaccacagccgacggaaaaggaaaagagaagaaggcaccccctctgctggagggagcaccgctccgactgaagccacggtccattcatgagctttctgttgaacaacaactgtattataaagaaatcaccgaggcgtgtgtgggatcatgtgaggccaagagagcagaggctcttcaaagtatcgccacagatcccggtttatag

SEQ ID NO: 243365 - DNA, 405 bp, synthetic construct
  misc_feature 1..405: note = Description of Artificial Sequence: Synthetic coding sequence
  source 1..405: mol_type = other DNA
atggccgaggaaaaaaaacttaagctatcaaacacagtactgccttctgaaagcatgaaagtcgtggccgaatcaatgggtattgcgcagatccaagaagaaacctgccagcttctgactgatgaggtcagttatagaatcaaggagatagcccaggacgccctgaaatttatgcatatgggaaagcgccagaaactgaccacttcagacattgactacgcgcttaagctgaaaaatgtcgagcctctgtacgggtttcatgctcaggagttcatacctttccgctttgccagcggcggagggagagaattgtatttctatgaagaaaaggaggtagacctctcggatattattaatactccgctgccccgagtacctctggacgtgtgcctaaaggcgcattag

SEQ ID NO: 243366 - DNA, 345 bp, synthetic construct
  misc_feature 1..345: note = Description of Artificial Sequence: Synthetic coding sequence
  source 1..345: mol_type = other DNA
atggcagaagagaagaagctcaaattgtccaataccgtcttgccaagcgagtctatgaaggtcgtagctgaatctatgggaatagcccagattcaagaagaaacttgccagctcctgacggatgaagtgagttacaggattaaagagattgcgcaagacgccttgaaattcatgcatatgggcaaaaggcagaagctaactacatccgacatagactacgcactcaaactcaaaaatgtcgagcccctgtacggtttccacgcgcaggaattcatccccttcagatttgctagcggcggtgggagagagctgtacttctacgaggagaaagaggtggatctctag

SEQ ID NO: 243367 - DNA, 2034 bp, synthetic construct
  misc_feature 1..2034: note = Description of Artificial Sequence: Synthetic coding sequence
  source 1..2034: mol_type = other DNA
atggccgaagagaagaaactgaagctctcaaacacagtgctcccatcggagagcatgaaggtagtggcggagagcatgggcattgctcagatccaagaggagacctgtcaattgctcactgacgaggttagctacaggattaaggagatcgcccaagacgcactgaagttcatgcacatgggtaaaagacagaaactcactacctccgatattgactatgcattgaagttgaaaaacgtcgagcccttgtacgggtttcatgcgcaagaatttatcccgttccgattcgcttcgggagggggtagagagctttatttttacgaggagaaggaggtggatttgtcggacataatcaataccccattgccgagggtacctctagatgtatgcttaaaagctcattggttgtccatagaaggctgtcagcctgctattccagagaacccccctcccgctcccaaggagcagcagaaggcggaagcaaccgagcccttaaaatcagccaaacccggacaagaagaggatggccctcttaaaggtaaaggtcaaggcgcaaccactgccgacggcaagggcaaagagaaaaaagcacccccactgctcgagggcgcacccttaagactaaaaccaagaagtatacacgagttgagcgtggagcaacagttgtactataaggaaatcactgaggcttgtgtagggtcctgcgaagccaaacgcgctgaggcattgcagagtatagctacggaccccggactctaccagatgctgcccagattttctacctttattagtgaaggggtgagggtgaatgttgttcagaacaaccttgctctgctgatttatttaatgcgcatggtcaaagccttaatggacaatcctaccttatacctggagaagtacgttcacgagttgataccagcagtaatgacatgcattgtttcccgccaactctgtcttagacctgacgtcgacaatcattgggctttgcgagatttcgccgctcggctcgttgcacaaatatgtaagcatttttcgaccacaacaaacaatatccaatcacggatcaccaagactttcactaagtcgtgggtggacgaaaagaccccatggacaacccgatacggctccatcgccggtcttgcagagctcggccacgacgtcatcaagactttaattcttcccagactgcagcaagaaggcgaaaggattagaagtgtacttgacggaccagttctgtctaacatcgataggattggagcagaccatgtccagagtctccttctcaaacactgtgctcccgttctggcaaagttaagacccccacccgataaccaagatgcatacagggctgagttcggatctctcggcccactgctctgcagccaagtggttaaagcacgcgctcaggcagccctgcaggcccagcaggttaataggacaacactgactataacccagccacgaccaaccctgactctgagtcaagccccacaacctggacccaggaccccgggtcttctgaaagtgccgggttccattgcactgcccgtacagactctggttagtgctcgggctgccgcacccccacagccctccccccctcctacgaaattcatcgtgatgtcttcgagcagcagtgcccctagcactcaacaggtgctgagtcttagtacttccgctcctggctccggctctactaccacttcccccgtcaccacaaccgtgccctccgtgcagccaatcgtgaaactggtcagtacggccaccaccgccccaccatccactgcaccgagcggacccggatcagttcagaaatatattgtggtgtctctcccacccacaggcgaagggaagggaggcccaacgagccacccttcaccagtgcctcctcccgcttccagtcccagccccctgagcggatctgctctctgtggaggaaagcaggaagcgggagacagcccacctccggctcccggtactcccaaagcaaatggaagtcagcctaactcgggatcgccccagcccgctccctag

SEQ ID NO: 243368 - DNA, 2034 bp, synthetic construct
  misc_feature 1..2034: note = Description of Artificial Sequence: Synthetic coding sequence
  source 1..2034: mol_type = other DNA
atggctgaagaaaaaaaacttaaactgtctaacactgtactgccatcagagtccatgaaggtcgttgccgagagcatgggtattgcgcagattcaggaagaaacttgccagttactaacagatgaagtctcatataggatcaaagagatcgcacaggatgctctcaaattcatgcacatgggtaagagacagaagctgacaacgtctgatattgattacgcccttaagttgaaaaacgtagagcccctttacggcttccatgcacaggagtttataccattcaggttcgcatccggaggcggaagagagttgtacttctatgaggaaaaggaggtggatctaagcgatatcattaacaccccccttccacgagtgccactagatgtgtgtttaaaagcacactggctgagcatcgagggttgtcagcctgccatcccagagaatccccctcccgcacccaaggaacaacagaaggccgaggccacggaacccttgaagtctgccaagcctggacaagaagaggacggcccactgaaagggaaagggcaaggagcaacaaccgcagacgggaaaggaaaggaaaaaaaggcaccacctctcctggagggcgcaccactccgcctcaagccaaggagcattcacgagctgtcagtggagcagcagctgtactacaaagaaataacagaggcttgtgtcggatcctgtgaggctaaacgggcagaagctctccaaagtattgcaaccgaccccggactgtaccagatgctaccacgcttctctacattcataagcgagggagtgcgcgtgaatgtggttcaaaacaacttggcattactcatctacctgatgcgcatggtaaaagccctgatggataacccaactctttatttagagaaatacgtgcacgagcttattccggctgtgatgacctgtatcgtgagccgtcagctatgcctgcgcccagacgttgacaatcattgggccctgagagatttcgcagccagactcgtggcccagatctgcaagcacttttccacgacaacgaacaacatccagtcacggattaccaagacttttacaaagtcctgggtggatgaaaagaccccatggaccactcgatacggatcaatcgcgggattagcagagctggggcatgatgtcattaaaaccctgattctcccccgactacagcaagaaggagagaggatccgctctgtccttgacgggcctgttttgagtaatattgacagaatcggtgccgatcacgtgcagtctctgctgcttaaacattgcgcaccggtactcgcaaaactccgccctcccccagataaccaggacgcatatagggccgagttcggctccttgggccctctgctctgctcccaggtggtcaaagctagggcacaggctgctctgcaggctcagcaggtgaaccgaactactttaacaataacccagcctaggcccaccctaacgttatctcaggcgcctcagcctggtcccagaaccccgggacttctgaaggtacccggatctatcgccctgcctgtccagaccttagtgagcgccagagccgctgcccctcctcaaccttcccccccacctactaaattcattgtgatgagtagctccagttcagccccaagtacccaacaagtccttagcttatctactagtgccccaggatccgggagcacaaccactagccctgttaccaccacagtaccaagtgttcagcccattgtgaaactggtgagcaccgctacaaccgccccaccatccacagcccctagcgggcctgggagcgtgcagaaatatatcgtcgtgtctctccctcctacaggtgaaggcaagggcggaccgacatcacatccaagtcctgtgccaccacccgcttcttctcctagccccctgtctggaagcgccctctgtggaggcaagcaagaagcaggtgactcacccccaccagctccaggcacgccaaaggctaacggcagccagccgaacagtggttctccacaaccagccccatag

SEQ ID NO: 243369 - DNA, 30 bp, synthetic construct
  misc_feature 1..30: note = Description of Artificial Sequence: Synthetic coding sequence
  source 1..30: mol_type = other DNA
atggccgaggaaaaaaaactgaagctctag

SEQ ID NO: 243370 - DNA, 2205 bp, synthetic construct
  misc_feature 1..2205: note = Description of Artificial Sequence: Synthetic coding sequence
  source 1..2205: mol_type = other DNA
atggacattcgccatagcgagtttttaccctgtctgcactgccctccctttgtggggcctttgcccgtgtcccacgtctcgttttcaagtgcctgccccgtgcccctaccgggttctccttctctacataggggactacacccctctcgggaagagaaacgagacagtcggatggcagaagagaagaagctcaaattgagtaacaccgtactaccctctgaatctatgaaagtggttgcagagagcatgggcattgcccagatccaagaggaaacctgccagctgctgactgatgaagttagctatagaattaaggagatcgcacaggatgcactgaaattcatgcacatgggaaagagacagaaactgaccacctcagatatagactatgccttgaaacttaagaacgtagaacctttgtatggtttccacgcccaggaattcattcccttcaggtttgcgagtggagggggtcgtgaactgtatttttacgaagagaaagaagtcgaccttagtgacattatcaacaccccccttcctagagtccccctggacgtttgtctgaaggcacattggttaagcatcgaaggttgtcagcctgcaatcccagaaaacccacctccagcgcctaaggagcaacagaaggcagaagccacggaaccactcaaatccgccaaacctgggcaagaggaggacggtccattgaaaggaaaggggcaaggcgcaacaaccgcggacgggaaaggtaaagagaagaaggctccacccctgctcgaaggcgcacccttgagactgaagcctcgctccatacatgaattaagtgtcgaacagcagctctactacaaagaaatcaccgaggcgtgtgtggggtcttgtgaagctaaaagggccgaggccttgcagtcgattgcgactgatcccggactataccagatgcttccacgtttctcaacctttatctcagagggagtgagggttaatgtggtgcagaacaacctcgctctcctgatctatctgatgagaatggtgaaagccctgatggacaaccccaccctgtacttagagaagtatgtgcatgagcttataccggcagtaatgacctgcatcgtttcccgtcaactctgccttaggcctgatgtggataatcattgggcactgcgggattttgctgccaggctcgtcgctcagatttgtaaacattttagcacaacaaccaacaacatccaatctagaataacgaagacctttaccaaaagctgggtcgacgagaaaacaccctggactacacggtatggatccatcgcaggattagccgagcttggccatgatgtgattaaaaccttaattctcccgaggctccagcaagagggggaaagaatccgtagtgtacttgacggacccgtcttatccaacatagatcgcattggtgctgaccatgttcagtcattactgctcaaacactgcgcgcctgttctcgctaagctccgtccccctcccgacaatcaggatgcctatagggccgaattcgggtccttaggtcctttactgtgcagtcaggtggtcaaggcccgtgcccaagccgctctccaagcccaacaggtaaataggacaaccctaacaatcacacagccgagacccacactgaccttatcgcaggctccacaacctggcccacggacaccagggctgctcaaagtcccgggatctatagcactcccagtacaaactcttgtttccgcgcgagctgccgcacctccacagccatcaccccctcctactaagtttatcgtgatgtcatcctcgtcaagcgcaccctcaacacagcaggttctttcactgtctacctctgcccctgggagcgggtccacaactacctcccccgtaacaactacagttccctcggtacaacccatcgtgaagctcgtatctacggcgaccacagcccctccctcaacagccccaagtgggcctggtagcgtacaaaagtacattgtggtcagcttaccccctacaggcgaaggcaagggtggccctacctcacacccctcacccgtcccccctccagccagctccccgtccccgttatctggttccgcattgtgtggtgggaagcaggaggctggggattcccctccgcctgcccctggaacccctaaggctaatggcagtcagcctaactctggcagtccccaaccagccccttag

SEQ ID NO: 243371 - DNA, 768 bp, synthetic construct
  misc_feature 1..768: note = Description of Artificial Sequence: Synthetic coding sequence
  source 1..768: mol_type = other DNA
atggcagaagagaagaagcttaagctgtccaacactgtgttaccaagcgaaagcatgaaagtcgtggcggaaagtatgggtatcgctcaaatacaggaagagacctgccaactcctaaccgatgaggtttcctacaggattaaggagatcgcacaggatgctctgaaatttatgcatatgggtaaacggcaaaaacttacaacttctgatattgattacgcgttgaagctgaagaatgtcgaacctttgtacggcttccatgcacaagagtttataccattcaggttcgcctccggcggtggaagagaactctatttctacgaggagaaagaggtggacctgtccgacattatcaatacccccttgccacgtgtgcccctggatgtgtgtctgaaggctcattggctgagcattgagggatgccaaccagctattcccgagaatccccctcccgcacccaaagagcagcagaaggcagaggccacagaaccactcaaaagtgcgaaacccggacaggaggaggatggccctttaaagggaaaagggcagggcgctacgacagccgatgggaaaggaaaggaaaagaaagccccaccattgctggagggagcacctctccgcctgaaacctcgcagcattcacgagcttagcgtggagcagcaactatattataaagagatcaccgaggcctgtgtggggtcgtgcgaagcaaagagagctgaggccctccaaagtatcgctactgatccaggactctatcagatgtag

SEQ ID NO: 243372 - DNA, 1050 bp, synthetic construct
  misc_feature 1..1050: note = Description of Artificial Sequence: Synthetic coding sequence
  source 1..1050: mol_type = other DNA
atgtcaaaatcaaaggacgatgcaccccacgaactggagtctcagttcatcctccgcctccctccagagtacgcctccacagttcggagagccgtgcagtcaggacatgtcaatttgaaagacagactgaccatcgaacttcaccctgatggccgacacggcatcgtccgagtggatagggttccgttggccagtaagcttgtggatctgccctgtgtgatggagagtctgaaaactatagacaagaaaactttctataaaacagctgacatttgccaaatgttagtttctactgtggacggggacctctatccacccgtggaggagcccgtggcatctacggatcctaaagccagtaagaagaaggacaaggataaagagaaaaagtttatctggaatcatggcattaccctgcctcttaagaatgtgaggaagcgccgattcaggaagaccgccaaaaagaaatacatcgaatcccccgatgttgaaaaggaggtcaaacggctgctctccacagacgcagaggctgtgtccacccggtgggaaatcatcgctgaagatgaaactaaggaagcagagaaccagggtctggacatttcttcccccggaatgtctggtcaccgccaaggacatgactccttggaacacgacgaactgcgcgaaattttcaatgatcttagtagttcttctgaggacgaagatgaaacgcagcaccaggacgaagaagatattaatataatagacactgaggaggacctggaacgccagctgcaggacaagctgaacgaaagcgacgagcagcaccaggagaacgaggggacaaaccagctggtgatggggatccagaaacagatcgataacatgaaagggaaattgcaagagactcaggacagggctaaacgtcaggaagatctgattatgaaagtcgagaacttagccctgaagaaccgattccaggccgtcctggatgagcttaagcagaaggaggatcgggaaaaagagcagctgagtagtctgcaggaggagctcgagagcctattggagaagtag

SEQ ID NO: 243373 - DNA, 909 bp, synthetic construct
  misc_feature 1..909: note = Description of Artificial Sequence: Synthetic coding sequence
  source 1..909: mol_type = other DNA
atgtccgagagccaagatgaggtgcctgacgaagtggagaaccaatttatactaaggcttccccttgagcacgcctgcaccgtgaggaacctagcgaggtcccagagcgtcaagatgaaggataaattgaaaattgatcttctcccagatggccgacacgccgtagtggaggtcgaggatgtcccattggctgccaaattggtagatttgccatgcgtgatagagagcctgcgcacactcgacaaaaaaaccttttacaaaaccgccgatatcagccagatgttagtgtgcacagctgatggtgacattcacctgtcacccgaggaacccgctgctagcaccgaccctaatatcgtgcggaaaaaagagcgtgggagagaagaaaaatgcgtgtggaaacacggaattactccaccgcttaagaacgttcgcaagaagcgctttaggaagacccagaagaaggtgccagatgtgaaagagatggagaaatccagctttacagagtacatcgaaagtcccgacgtggaaaacgaagtaaaaagactgctccggtctgatgccgaagccgtttcaacacgatgggaggttattgcggaggatgggaccaaagaaatcgagagtcaaggcagtatccctggcttccttatctcgagcggcatgagctctcataagcaaggacatacctcatcagttatggaaatccagaaacaaatcgagaagaaggagaagaaattgcataagatacaaaacaaggcgcagcggcagaaggacctgattatgaaggtggagaatctcactcttaaaaaccacttccagtctgtcctggaacagttggagttacaggaaaagcagaagaatgagaaattgatctcccttcaggaacagctgcagagatttctgaaaaaatag

SEQ ID NO: 243374 - DNA, 1131 bp, synthetic construct
  misc_feature 1..1131: note = Description of Artificial Sequence: Synthetic coding sequence
  source 1..1131: mol_type = other DNA
atgtctgagtctcaagacgaggtccccgatgaagtagagaatcagtttattctgcgtctccctctggagcatgcttgcacagtccgcaacttggcgcgatctcagagcgtgaagatgaaggacaaacttaagatcgatctactcccggacggaagacatgccgtcgttgaagtggaagatgtgcccctggccgctaaactagtagatctcccctgtgttattgaaagcttgcgcactctcgataaaaaaacattctataaaaccgctgacatctcccaaatgctggtctgcaccgctgacggagatattcacttgagccctgaagaaccagcagcaagtacagaccctaacatcgttcgcaaaaaggagagagggagggaggaaaaatgtgtgtggaagcatgggatcacaccgccactgaagaatgttaggaagaagcgttttagaaaaacccaaaagaaggttcctgacgtgaaggagatggagaagagcagctttaccgagtatattgagtctccagacgtggagaatgaggtaaaacgcttattgaggagcgatgctgaagccgtctctactaggtgggaggtgattgctgaagacggaaccaaggaaatcgaatcacagggatcaatccccggattcctgatctcctcggggatgtccagccataagcagggccacacatcatctgaatacgacatgctgagagagatgtttagcgattcaaggtcaaacaacgacgatgatgaggacgaggatgacgaggacgaggatgaagacgaagacgaggacgaggacgaagataaggaggaggaggaggaagactgcagcgaggagtacctggaacgacagctgcaggccgaattcatcgaaagcgggcagtatagggccaacgaaggcacgtctagcatagttatggaaattcagaagcagattgaaaagaaagagaaaaaactgcacaagatccagaacaaagcccagcgacagaaggacttgatcatgaaggtcgagaacctgacgttaaagaaccacttccagtctgtactcgagcaactggaattacaggagaaacagaagaatgagaagctgattagcctgcaggaacagctgcagcggttcctcaaaaaatag

SEQ ID NO: 243375 - DNA, 909 bp, synthetic construct
  misc_feature 1..909: note = Description of Artificial Sequence: Synthetic coding sequence
  source 1..909: mol_type = other DNA
atgagtgagtcccaagacgaggtacctgatgaggtcgagaaccaattcattttgcggctgcctttagagcacgcgtgcacagtacgcaacttggcgcgatcccaatcagtgaaaatgaaggacaaactgaaaattgatctgctgcctgatggacgtcacgcagtcgttgaagtcgaggacgtgcctttagccgctaagctggtggatctgccttgtgtgatagagtccttgaggaccctcgataagaagacattttacaagaccgcggatatcagtcagatgctcgtgtgcacggccgatggcgacatccacctgagccccgaggaacctgcggctagcaccgaccctaatattgttagaaaaaaggagcgcggacgggaggaaaagtgtgtgtggaagcacggcattacccctccattgaaaaacgtgagaaagaaacggttccgtaagacgcagaagaaggtgccagacgtcaaagaaatggagaaaagcagctttacagaatacatcgaatccccagacgtcgaaaacgaagtcaagaggctgctcagatcagatgccgaagctgtcagtacaagatgggaagtcatcgccgaggacggcactaaagaaatagagtctcagggaagcatccccggttttttgatttcatctggaatgagctcacacaagcaggggcacacgtcttccgtcatggaaatccagaagcagattgaaaagaaggaaaagaaactccataagattcagaacaaggcccagcggcagaaggacctaattatgaaagtggaaaatctcacacttaaaaatcactttcagtctgtcctggagcagctcgaactgcaagagaaacagaaaaacgaaaagctgatttcacttcaggagcagctgcagaggtttctgaagaaatag

SEQ ID NO: 243376 - DNA, 1389 bp, synthetic construct
  misc_feature 1..1389: note = Description of Artificial Sequence: Synthetic coding sequence
  source 1..1389: mol_type = other DNA
atggaatgtcccgagggacagctgcccatttcaagcgaaaatgattctacacccactgtaagtacttccgaggtgacaagtcaacaggagcctcagattcttgtggaccgtggcagcgaaaccacatatgagtccagtgcagacatcgctggagatgagggtacccagatccccgctgatgaggacactcagacagacgctgacagctcagcccaagcagccgctcaggccccagagaactttcaggagggcaaggacatgtcagaaagccaggatgaagtcccagacgaagtcgagaatcaatttatcctcagactgcccctcgagcatgcctgcactgtgagaaacctcgcacgctctcagagcgtgaaaatgaaagataagctgaagattgatctcttgcctgacggcaggcacgccgtagtagaagtggaggacgtcccgttggcagctaagttagtcgacctgccttgcgtaatcgagtccttaagaacactggacaagaagactttttataagacagctgatattagccaaatgttagtgtgtacagcggacggcgatattcatctgagtccagaggaacccgctgcctccaccgatccgaatatcgtgcgtaagaaagagagggggcgagaagagaagtgcgtctggaaacacggcattaccccacctctgaagaacgtgaggaaaaagcgctttagaaagactcagaagaaggtccccgatgtaaaagagatggagaagagtagtttcactgagtacattgagagtcctgatgttgagaatgaagtgaagcggctactcaggagcgacgctgaggccgtaagtacacgctgggaggtgatcgccgaggacggcaccaaagagatcgagagccaggggtccataccaggttttctaattagctcaggcatgagctcccacaaacaggggcacacctcatctgagtacgatatgctgcgtgaaatgttctcagattctcgtagtaataacgatgacgacgaagacgaggatgacgaggatgaagacgaggacgaagatgaggacgaggatgaagataaagaagaggaagaagaagattgttctgaagagtacttggagcgccagctgcaggccgaattcatcgaatcggggcagtaccgtgccaacgagggaacatcgtcaattgttatggaaatacagaagcagatcgaaaagaaagaaaaaaaactgcataagatccagaacaaagcccagagacaaaaagacctgattatgaaggtcgagaacctcacattgaagaaccatttccagtcagtgctcgagcagctggagttgcaggagaaacagaagaatgagaagttgatatctctccaggaacagctccagagatttttaaaaaagtag

SEQ ID NO: 243377 - DNA, 1548 bp, synthetic construct
  misc_feature 1..1548: note = Description of Artificial Sequence: Synthetic coding sequence
  source 1..1548: mol_type = other DNA
atggggaactgggtggtgaaccactggttctccgttctgttcctcgtcgtgtggctgggattaaacgtgttcctgtttgtcgacgcatttcttaagtatgaaaaagccgacaagtattattacacacgcaagatattgggctcgacgttggcctgtgcacgggcttcagccctgtgcctgaacttcaactccaccctgatcctgttgccagtgtgccgcaacctgctgagcttcctccgtggcacttgttcattttgcagtaggacactgcggaaacaactggaccacaacttaacatttcacaagctcgtcgcatatatgatctgtctccatacggctattcacatcatagcccatttgttcaactttgattgctacagccgaagcagacaggccacagacgggtccctggcgtccatcctgtccagcctgtctcacgacgagaagaagggtggttcgtggctgaacccaattcaaagcaggaatacaacagtcgaatatgtgacatttaccagcatcgctgggcttacaggagttattatgactatcgcccttattctcatggtgacttccgccacagagttcattagaagatcctattttgaggtcttctggtatacacatcatctgttcatcttttacattctggggctcggtattcatgggatcggcggtatcgtccgcggacagaccgaggagtctatgaatgaatcccaccctcggaaatgcgctgaatcatttgaaatgtgggatgatagagattcccattgtcgtaggcctaaattcgagggacacccacccgagagttggaaatggattctcgcaccagtgattctgtatatctgcgaacggatcctgcggttctatcgtagccaacagaaagttgtgattaccaaagttgtgatgcacccttccaaggtgctcgaactgcaaatgaacaagagaggattctcgatggaagtgggacaatatatttttgtgaactgtcccagtatatcactgcttgaatggcatccattcactttaacctctgcccctgaggaggacttcttcagcatccatattcgcgctgctggcgattggactgagaatctgatccgggctttcgaacagcagtatagccccattccaaggatcgaggttgatggcccttttggcacggctagtgaggacgttttccagtatgaagtggccgtgctcgtgggggctggcatcggcgtgactccctttgctagtatcctcaagtccatttggtacaagtttcaatgcgccgaccataatctcaagacgaagaaggtcggacacgccgctctgaacttcgacaaggctacagatattgttactggcctgaagcagaaaaccagtttcggcagaccaatgtgggataatgagttctccacgatcgcaacatcacacccgaagtctgtggtgggcgtgttcctgtgtgggccaagaaccctggctaagagcctgcggaagtgttgtcatcggtactcttccctcgaccccaggaaggtacagttttactttaacaaggagaatttttag

SEQ ID NO: 243378 - DNA, 795 bp, synthetic construct
  misc_feature 1..795: note = Description of Artificial Sequence: Synthetic coding sequence
  source 1..795: mol_type = other DNA
atggaatctggcaaaaccgccagcccaaagtctatgccaaaagacgcgcagatgatggcccagatccttaaagacatgggaataaccgaatatgagccccgagtcattaaccagatgctcgagtttgcctttcggtatgtgactactatactggacgatgcaaagatctacagctcccatgctaaaaaggcaactgttgatgccgacgacgtgagactggcaatccagtgtcgtgcagatcaatcgttcacctcccccccacctcgggactttctactggatatcgccaggcagaggaaccagactcccctgccactgatcaagccttacagcggccctcgtctgcccccagatcggtactgtttaactgccccaaactatcgcttgaagtctctgcagaagaaagccagcacgtctgcgggaagaataaccgtacctaggctaagtgttggcagtgttacttctcgcccatccaccccgactctaggcacgccaacaccgcagacgatgagtgtgtccaccaaagtcggtacccccatgtccctgacggggcagcgattcaccgttcagatgcctacaagccaaagccccgcagtgaaagccagcatacctgccacctctgccgtccagaacgtgcttatcaacccctccttaattggaagcaaaaatatcttgataacgaccaacatgatgtccagccaaaacacagctaacgagtcctcgaatgcattaaaacgcaaaagggaagacgacgacgacgatgacgatgatgatgatgactatgacaacctgtag

SEQ ID NO: 243379 - DNA, 510 bp, synthetic construct
  misc_feature 1..510: note = Description of Artificial Sequence: Synthetic coding sequence
  source 1..510: mol_type = other DNA
atgtgccacagaaagcctgggacacctggtgtgggtaagaccacactcggcaaagaactggcctctaaatctgggttgaagtacatcaacgtgggtgacctcgcacgggaagagcaactgtacgacggctacgatgaggagtacgactgtcctatcctagacgaggatagagtagtggacgagctggacaaccagatgagagagggaggcgtgatcgtggactatcacggctgtgatttctttcctgaacgatggtttcacattgtctttgtcctgcgaaccgacacgaacgtactttacgaacgcttggagactcggggttacaatgaaaagaaactgaccgataatatccagtgtgagatattccaggtgctttatgaagaggctactgcaagttacaaagaggagatagtgcaccagctgccttccaacaagccagaagaactggagaataacgtggatcagatactgaagtggattgagcagtggataaaggaccacaattcctag

SEQ ID NO: 243380 - DNA, 519 bp, synthetic construct
  misc_feature 1..519: note = Description of Artificial Sequence: Synthetic coding sequence
  source 1..519: mol_type = other DNA
atgctgttgcctaacattctgcttaccggtaccccgggagtcggtaagacaacactgggaaaggagctcgcgtctaagtccggactgaaatatatcaacgtgggagaccttgccagggaggagcagttgtatgatgggtatgatgaggagtacgattgccccattctcgatgaggatcgagtcgtggatgagctggacaatcagatgcgtgaaggcggagtgattgttgattatcacggctgtgacttttttccggaacgatggtttcacattgtctttgtcctgaggacagacaccaatgtgttatatgaacgactcgaaaccagaggatacaatgagaagaaactgacagataacatccaatgtgaaattttccaggttttgtacgaagaagctaccgctagctataaagaggaaatcgtacatcagctgccaagcaataaaccagaggaactggaaaataatgttgatcagatcttgaagtggatcgagcagtggatcaaggatcataacagctag

SEQ ID NO: 243381 - DNA, 597 bp, synthetic construct
  misc_feature 1..597: note = Description of Artificial Sequence: Synthetic coding sequence
  source 1..597: mol_type = other DNA
atggaaagcggcaagacagcctcacccaagtccatgccgaaagatgcccaaatgatggcccaaatcctgaaagatatgggcattacagaatatgagcccagggtaattaaccaaatgctcgagtttgctttccgttacgtgactactatcttagatgacgcgaaaatctactcctctcatgctaagaaagccactgtagatgctgatgacgtgcgtcttgcgattcagtgccgtgccgaccagtccttcaccagccctccgcctcgtgactttctccttgatatagcacgtcagagaaatcaaaccccactcccactgatcaaaccttattccggacccagactgccacccgatcgttactgccttaccgcacccaactaccggctaaagtctctacagaagaaagcctccacttccgccggacgcataaccgtgcctcggctttctgtcggatcggtgactagcaggccaagcacacctaccctcggaactcctacacctcaaacgatgagcgtgtctaccaaggtgggcactcccatgagcctcacaggccagcggttcacagtgcagatgccaaccagccagtccccggcatag

SEQ ID NO: 243382 - DNA, 411 bp, synthetic construct
  misc_feature 1..411: note = Description of Artificial Sequence: Synthetic coding sequence
  source 1..411: mol_type = other DNA
atggaatcagggaaaacagcttcccccaagtctatgccaaaggacgctcagatgatggctcagattttgaaggacatggggattaccgagtatgaaccccgtgtaatcaatcagatgctggagttcgcattcaggtatgtcaccactatacttgacgatgccaaaatttacagctcccacgctaagaaggctaccgtggatgcagacgacgtgagactggccattcagtgccgagcagatcaatccttcaccagcccacccccacgtgacttcttactagatattgccagacaacgtaatcaaaccccactaccacttatcaaaccttattcgggccctaggctgcctcccgaccgatattgcctcacagccccaaactatcgcttaaagtcattgcagaagaaagcttag

SEQ ID NO: 243383 - DNA, 795 bp, synthetic construct
  misc_feature 1..795: note = Description of Artificial Sequence: Synthetic coding sequence
  source 1..795: mol_type = other DNA
atggagtctgggaaaacagccagtcccaaatcgatgcctaaagatgcccagatgatggcacagattcttaaagacatgggcataacagagtatgagccacgggtgatcaaccaaatgttagaatttgcctttcgttacgtgaccacaattctggatgacgctaagatatatagctctcacgcgaaaaaggctaccgtggatgctgacgacgtgcggctggctattcagtgccgggctgaccagtcattcacaagcccccctccccgagacttcctcctcgatattgccaggcagcgcaatcagacaccactgcccctcattaagccatactctggaccgcgtctccccccagaccggtattgccttaccgcgcctaactaccggctcaaatcattgcagaagaaggccagcacctcagcaggacgtatcaccgtgcctcggttaagtgttggatccgtcaccagccgtccatcaacacctacactgggaactcctacaccgcagactatgtcagtaagcacaaaagtcggaacacccatgtctctgacaggccagcggtttacggtgcagatgcccacatcacagtcccccgctgtgaaggcctccatccccgcaacatctgctgtgcagaatgtgctcatcaatccctccctaataggatcgaagaacatactgattactactaatatgatgagttcccaaaacactgcaaacgaaagctcaaacgccttgaaaaggaaacgggaagacgacgatgatgacgatgacgacgacgatgattacgacaacttgtag

SEQ ID NO: 243384 - DNA, 309 bp, synthetic construct
  misc_feature 1..309: note = Description of Artificial Sequence: Synthetic coding sequence
  source 1..309: mol_type = other DNA
atggagagcggcaaaactgcgtcgcccaagtctatgcccaaagacgcacagatgatggcacagattctcaaagatatgggtatcacagagtacgaacccagggtgattaaccagatgctggagttcgctttcaggtacgtgacgacgattctggatgacgccaagatttatagttcccacgctaagaaagccaccgtagatgccgacgatgtcaggctggccattcagtgccgggctgatcaatcctttacttccccaccccctcgtgacttcctcttggatatagccaggcagaggaatcagacgtag

SEQ ID NO: 243385 - DNA, 501 bp, synthetic construct
  misc_feature 1..501: note = Description of Artificial Sequence: Synthetic coding sequence
  source 1..501: mol_type = other DNA
atggagagtggaaaaactgcctccccaaagtcaatgccgaaggatgctcagatgatggcccaaatcctgaaggatatgggaatcacagagtacgaacctagggtcatcaaccagatgttggaatttgctttcaggtatgtgacaaccattctagatgatgccaagatatattcttcgcacgctaagaaggctactgtcgacgcggatgacgtgaggctcgctatccagtgccgggcagatcagagtttcacgtcgcctccccctagggactttctcctggatattgccaggcagcgaaaccaaactccactgccactgattaagccgtacagtggcccacgcttgccgcctgatcgatattgtctcaccgctccaaattacagactcaagtccctgcagaaaaaagcaagtacatctgccggtcgtattaccgttcctcgcttgtcagtgggctctgtgaccagcaggccgtctacgcccacactgggtacacctacttag

SEQ ID NO: 243386 - DNA, 384 bp, synthetic construct
  misc_feature 1..384: note = Description of Artificial Sequence: Synthetic coding sequence
  source 1..384: mol_type = other DNA
atggagtcagggaagacagcttcccctaaatccatgccaaaagatgcccaaatgatggcccagatactcaaggacatgggaatcactgagtacgagccacgcgtcataaatcagatgttagagttcgcttttaggtacgtgaccacaattctagatgacgccaaaatctattccagccatgcaaaaaaggccaccgtggatgctgacgatgtgcgtctggcgattcagtgtagagccgatcagtcgtttacttccccacctcccagggatttcctactcgacatcgcccgtcagcgaaatcaaacgcctttaccactgatcaaaccctacagtggcccacgactgcctcccgaccggtactgcctcacagctcctaattattag

SEQ ID NO: 243387 - DNA, 756 bp, synthetic construct
  misc_feature 1..756: note = Description of Artificial Sequence: Synthetic coding sequence
  source 1..756: mol_type = other DNA
atggaaagcggaaagatggcccctcccaaaaacgcacctcgcgacgccttggttatggcccagattctgaaggacatgggaattacagagtacgaaccaagggtgattaatcagatgctggaatttgcctttcggtacgtgactacgatcctagacgacgcaaagatatatagctcccatgccaagaagcccaatgtggatgccgacgacgtgaggttggctatccagtgtagggctgaccaatccttcacctctcccccaccacgtgactttctgctggacattgcccgtcagaagaatcagacccctctccccttaatcaaaccgtacgcagggcctcgtctgcctccagacaggtattgtttgactgcccctaactaccgactaaaatctctgatcaagaaagggcctaaccagggacgattggtgccgaggctttccgttggcgcagtgagcagcaagcctacaacgccaacaatcgccaccccccagaccgtctccgtgccaaacaaggtggctacccctatgtccgtgacctcacagcggtttacagtacagatacctcctagccagtccactcctgttaaacccgtccctgcaacaacagccgtgcagaatgtgttgatcaatccttccatgatcggtcccaaaaacatcctcattacaacaaacatggtaagctcccagaacacggctaacgaagcaaaccccctgaagcgtaaacatgaggacgatgacgacaatgatataatgtag

SEQ ID NO: 243388 - DNA, 879 bp, synthetic construct
  misc_feature 1..879: note = Description of Artificial Sequence: Synthetic coding sequence
  source 1..879: mol_type = other DNA
atgccgctgcacgtgaaatggccgtttccagcagttcctcccctgacgtggaccctggcatcctcagtagtcatgggccttgttggcacatacagctgtttctggacaaagtacatgaatcatctaacagtccacaatcgtgaggtactttacgagctgatcgagaagaggggcccagccacacccttaataacagtatcgaaccaccagagttgcatggatgacccgcatctgtggggaatcttaaagctgcgtcatatttggaatttgaaactgatgcgctggacccccgcagccgctgacatatgttttaccaaagaactacatagccatttcttctcactcggaaaatgtgtacctgtgtgtcgaggcgctgaattttttcaggccgaaaacgagggcaagggtgtgcttgatactggcagacacatgcccggagctgggaaaagacgtgagaagggggacggcgtctatcaaaaggggatggacttcattctggaaaagctgaatcatggcgattgggtgcacatcttccccgaggggaaagtgaacatgtcttcagaattcctgagattcaagtggggtatcggcaggttaattgccgagtgccacctgaatcctatcatactgcccctttggcacgttgggatgaacgacgttttgccaaactcaccgccatacttccccaggttcggacagaaaattactgttctaatcggaaagcctttctctgccctgcctgtactggaacgattgagagcggaaaataagtcagctgtagagatgcgcaaggctttgaccgatttcatccaggaggagtttcaacatttgaaaactcaggccgaacagcttcataatcacctgcagccgggaagatag

SEQ ID NO: 243389 - DNA, 789 bp, synthetic construct
  misc_feature 1..789: note = Description of Artificial Sequence: Synthetic coding sequence
  source 1..789: mol_type = other DNA
atgccgctgcacgtgaagtggcccttcccagctgtgcccccactcacatggactctggcctcttcagttgttatgggcctcgtcggcacatactcctgtttctggaccaagtacatgaatcacctcaccgtccataacagggaagtgctatatgaactgatagagaaacggggtccagccactcctcttatcaccgtgtcaaatcaccagtcttgcatggatgatcctcacttgtggggaattcttaaactaagacatatctggaacttgaaactaatgcgatggacaccggctgccgcagacatctgtttcacgaaggaactgcacagtcacttcttctcactgggtaagtgtgttcccgtatgccggggtgatggtgtgtaccagaaggggatggacttcattctggaaaagctcaaccacggtgattgggtgcacatatttcccgaaggaaaagtgaatatgtcaagcgagtttctcagattcaaatggggcatcggcagactcattgccgagtgccacttgaatccgataatccttccgttatggcacgtcggcatgaatgacgtcttgcctaatagtccaccttacttcccccgtttcggacaaaaaatcaccgttctcataggaaaaccattcagcgcactacctgtgttagaaagacttcgtgccgaaaataagtccgctgtagagatgagaaaagctctgacggactttattcaggaagagtttcagcacctgaagacacaggcagagcagctgcacaatcacctccaacccggaaggtag

SEQ ID NO: 243390 - DNA, 837 bp, synthetic construct
  misc_feature 1..837: note = Description of Artificial Sequence: Synthetic coding sequence
  source 1..837: mol_type = other DNA
atgccattgcacgtaaaatggccatttcctgcagtcccccctctgacttggacccttgcctcctcggtcgtgatgggcctggttgggacttattcttgtttctggaccaaatacatgaaccacctgacagtgcataatcgggaggtgctttacgaactcatcgagaagaggggtccagcgacacctcttataactgtcagtaaccaccaatcctgcatggatgacccacatctctggggaattctgaagcttcgccacatttggaatttaaagttaatgagatggacgcccgcagccgctgatatctgcttcaccaaggaactccactctcactttttctctctcggaaagtgtgttcccgtgtgccgcggtgctgaatttttccaagctgaaaatgaagggaaaggcgttctggatacagggagacacatgccgggtgccggaaagcgaagagagaagggagatggcgtttaccagaagggcatggactttatcctggaaaagcttaaccacggcgactgggtccacatttttccggaaggaataggaaggctcattgcggaatgccatctgaaccctatcatactgcccctttggcacgtcggcatgaatgacgtactccctaatagtccaccctatttcccccgattcgggcagaaaattacagtgctaataggaaaaccatttagcgccttgcccgtgctggaacgcctgagggctgagaataagtctgccgttgagatgcggaaggccctcactgacttcatccaagaggaatttcagcatcttaagacccaagccgaacagctgcataatcatttgcagccagggaggtag

SEQ ID NO: 243391 - DNA, 747 bp, synthetic construct
  misc_feature 1..747: note = Description of Artificial Sequence: Synthetic coding sequence
  source 1..747: mol_type = other DNA
atgcccctgcacgtgaaatggccttttcccgcagttcctccacttacatggactttggcgtcctccgtcgtgatggggttagtgggaacctactcctgtttctggaccaaatacatgaatcatctcaccgtccacaaccgggaagtgctctacgaacttatcgagaagaggggacccgctaccccgctgatcacagtatcgaatcatcagagctgcatggacgatccacacctatgggggatccttaaactgcgtcacatctggaaccttaaactgatgagatggaccccagcagctgcagatatatgctttacgaaagaactgcactcgcattttttctctctcgggaaatgtgtccccgtttgccgcggagatggagtctatcagaagggcatggactttatccttgaaaaactgaatcacggggactgggtacatatctttcccgagggaatcgggaggctaatcgcagagtgtcatcttaacccgatcattctgcccttatggcacgtcggcatgaatgatgttctgccgaattcaccgccttattttcctaggttcggtcaaaagattaccgtgttgatcggaaagccattctcagcacttcccgtcctcgagcggctccgggcagagaacaagagtgcagtggagatgaggaaagcgttgacagactttatacaggaagagttccagcacttgaaaacacaggcagagcaactgcacaaccacttgcaacccggaagatag

SEQ ID NO: 243392 - DNA, 798 bp, synthetic construct
  misc_feature 1..798: note = Description of Artificial Sequence: Synthetic coding sequence
  source 1..798: mol_type = other DNA
atgcccctgcacgtcaagtggccttttcctgccgtccccccactgacatggaccctggcttcgtcagttgtcatggggctcgtcggcacctactcttgcttttggacgaagtacatgaaccaccttacggtacataacagagaagtgctctacgaactgatagagaagagaggcccagccacgccactgattaccgtatccaaccatcagtcttgcatggacgatccacacttgtggggcatcctgaagttaagacacatctggaatctgaaacttatgcgctggacaccggctgctgccgatatctgtttcaccaaagagctccactcacattttttttcactcggcaagtgtgttccagtctgtagaggagctgaatttttccaagctgagaatgaaggaaagggcgttctggacacagggcgacatatgcctggagcaggcaagcgacgggagaagggcaaagtgaacatgagtagtgagtttctcaggttcaagtgggggatcggtcgactaatagcagagtgtcatctgaatccaataattttaccactctggcatgttggcatgaatgatgtcctaccaaattccccaccttatttcccgagatttggacagaaaatcaccgtccttattggcaagccattttctgctctccccgtcctggaacggctccgagccgagaacaagtccgccgtggaaatgcgcaaggctctaactgacttcatccaggaggaatttcaacatttaaaaacacaagctgagcaactgcacaaccacttacagccgggtcgttag

SEQ ID NO: 243393 - DNA, 7629 bp, synthetic construct
  misc_feature 1..7629: note = Description of Artificial Sequence: Synthetic coding sequence
  source 1..7629: mol_type = other DNA
atggtggctctcagtcttaaaatctgtgtgaggcactgcaatgtggtgaagacaatgcagtttgaaccatctactgccgtgtacgacgcatgccgcgttataagggaacgcgtacctgaagctcagaccgggcaagcatcagactatggcctgttcctgagcgacgaagaccccaggaagggaatctggctggaggctggccgtacattagactactatatgctccggaacggagatattttggaatataagaagaaacagcggcctcagaaaattcgaatgctcgacggctccgtgaagaccgttatggtcgacgacagcaagactgtgggcgagttgttggtgaccatctgtagccggattgggataaccaattacgaagagtatagtctcatccaggagacaatagaggaaaaaaaagaggagggcaccggtaccctgaagaaggatcggacccttctgagggatgaacgcaaaatggagaagttaaaagctaagcttcatacagatgatgacttaaattggcttgaccacagccgaaccttccgcgagcagggagtggatgaaaacgaaacattattactgagacggaaattcttttattctgaccaaaatgtagatagcagggatcccgtgcagttaaatcttctgtacgtccaggcacgggacgatatcctgaatgggtctcaccccgtgtctttcgagaaggcctgcgagttcggcggatttcaagcacagattcagttcggtccacatgttgaacacaagcacaagccaggattcctggacctgaaagaatttctgcctaaggagtatatcaaacagcgtggggctgaaaagagaattttccaggagcataaaaattgtggagaaatgtctgaaatcgaagcaaaggtcaagtacgttaaactggctaggtcccttagaacatatggcgtctcgtttttcctggtgaaagaaaaaatgaagggtaagaataagctggttcctcgcctcctgggaatcaccaaggatagcgtcatgagagtcgacgagaagactaaagaagtcctgcaggagtggccgctcactaccgtgaagcgttgggcggctagtccaaagtcgtttactcttgatttcggcgaatatcaagagtcttactactcagttcagactacagagggggagcagatatcgcaactcatcgctggctacatagacattattttaaagaagaagcagtcaaaagatagattcggactggagggcgacgaggagagcacaatgctcgaagaaagtgtctcgcctaaaaagtccaccatacttcagcagcagttcaacagaacagggaaggccgaacacggttccgtggccctacctgccgtgatgaggtccggctcctccggacccgaaacatttaatgtgggtagtatgccttctccacagcagcaggtcatggtgggccaaatgcatcgcggtcatatgccgcctctcactagcgcccagcaggccctcatgggtaccattaacacctccatgcacgctgttcagcaagcccaagacgacctgtccgaacttgatagtctcccaccccttggccaggatatggcttccagggtctgggtccagaataaggtggatgagagcaaacatgaaattcattcacaggttgatgctatcaccgccggaacagcatcggtcgtgaatctgaccgctggcgacccagctgatacggattacaccgcagttgggtgtgccatcacaacgatttccagtaatctgacagagatgagcaaaggtgttaagctactggctgccctaatggatgatgaagtcggttcaggggaagatttacttcgcgcagcgaggacccttgctggtgccgtaagcgacttgctgaaagccgttcaacccacctcaggagagcctcgccagaccgtgctgactgccgctgggagcataggccaggcctctggcgatctgctccgacagattggcgaaaatgagactgacgaacggttccaggacgttctgatgtcgctcgccaaggctgtcgctaacgccgctgcaatgctcgtgctgaaggcaaagaatgtcgcccaggtagccgaagacactgtgctgcagaaccgggtgatagcggctgcaacgcagtgtgccctgtcgacctcacagctggtcgcgtgtgcaaaggtagtgagcccaaccataagcagccccgtttgtcaggagcagctcatcgaggctggaaagctcgtggatcgcagtgtggagaactgcgtgagggcttgccaggccgcaaccacagatagcgaactactcaagcaagtgtccgccgctgcgtccgttgtgagccaggccctacacgacctcctccaacatgttcgacagtttgccagtcggggagaacccattggacgatacgaccaggctaccgataccatcatgtgcgtcaccgaaagtatcttcagctccatgggagatgccggtgaaatggttcgccaagctcgagtgctggcacaggccactagtgatctggtgaatgccatgaggtctgacgccgaagcagagatcgatatggagaactccaaaaaattgctcgccgcagccaagctgctggccgattcgacagcgcgtatggtggaggctgccaagggcgcagcagccaacccagagaatgaggatcagcagcaacgtctgagagaggccgcagaaggtcttagagtggccacgaacgcagcagcccagaatgccataaagaaaaagatcgtaaatcgtcttgaagttgcagcgaagcaggctgcggcagccgcaacccagacgattgctgcttcccagaacgcagctgtctccaataaaaaccctgcggcacagcagcagttggtccagagttgtaaggctgttgctgatcacattccccagctcgttcagggcgttcggggttctcaagcacaggcagaggacctcagtgcccagctggccctaatcatttccagccagaatttcctgcaaccgggttcaaaaatggtgagttctgccaaagccgctgtgcctacagtttccgaccaggctgccgcaatgcaactctcacagtgcgccaagaacctggctacatctttggccgagttacgcactgcatcccagaaggcacacgaggcttgtggacctatggaaattgatagtgcactcaacacggtgcagaccctaaaaaatgagctccaggacgccaaaatggccgcagtggagagccaattgaagcccctgcctggagagacattagaaaagtgtgcccaggacctcggcagtacaagtaaggccgtcggttcaagcatggcccagctactgacttgtgccgctcaaggcaacgagcactacactggcgtggcggcacgtgaaacagcgcaggccctcaagactcttgcgcaggccgcacgcggagttgctgctagtaccaccgatccagctgctgcccatgccatgctcgacagcgcccgtgacgtgatggaagggtcggcaatgctaatccaggaagccaagcaggctctgatcgcacctggagatgccgaacggcagcagcgcctggcccaggtggccaaggccgtgtctcactcactgaataattgtgtgaattgcctgcccggacaaaaggatgtagatgttgctctgaaaagcattggtgagtcttcaaagaagttgctagtcgactctctccccccttcaaccaagccatttcaggaggctcaatccgagttaaatcaggccgctgccgacctgaatcagagcgcaggcgaggtggtgcacgccaccagagggcagagcggagagctggcagccgcatccggcaagttctctgatgactttgacgagtttcttgatgcgggaatagagatggcaggccaggctcaaacaaaagaagaccaaatccaggtcatcggaaatctgaaaaatatatccatggcatccagcaaactgctccttgccgcaaagtccctctcagtggacccaggggcacccaacgcaaaaaacttgttggctgctgccgcacgtgctgtaacggagtctattaatcaactaatcacactctgcacccaacaggcaccagggcagaaagagtgcgacaatgctttgagggaattggagacggtcaaaggaatgttggacaaccccaatgaaccagtgtccgacctttcatacttcgactgtattgagagcgtgatggagaactcaaaggtacttggcgagagtatggccggaataagccagaatgccaagactggagatcttcccgcattcggcgaatgcgtcggcattgcttcaaaggcgctgtgcgggctgactgaggcggctgcacaggctgcatacttagttggcattagcgatccaaattcccaggccggtcaccagggcctggttgacccaatccagtttgctcgggctaatcaggcaatacaaatggcctgtcagaatctggtcgatcccggtagctcaccgagtcaggtcttgtctgccgctaccatcgtggctaaacatacatccgccttgtgcaatgcttgcagaattgcttccagtaagaccgccaatcctgtggctaagcgacacttcgtccaatcagccaaagaggtagccaattcaactgccaacctggtaaaaaccattaaagcgctggatggcgacttttccgaagacaatcggaacaagtgtcggatcgccaccgccccactcatagaggctgtagagaacctcacagccttcgcatcaaaccccgagtttgtgtctatcccagctcagatctcctccgaagggagtcaggcacaggagcccatcctggtttccgctaaaactatgctggagtcaagttcctacttgatccggaccgcgcgatcacttgcaattaacccaaaggatcctcctacctggtccgtgctggcgggacatagtcataccgtatcagatagtatcaaatctcttataacctccattcgagacaaagctccaggccagagagagtgtgactacagcatcgacggtatcaatagatgcattagggacatcgagcaggccagcttagctgcagtgagtcagtccctggccacaagagacgacatcagcgtggaggccctccaggagcagctgacatctgttgtgcaggaaattgggcacttaattgacccaattgcaaccgctgcacggggagaagcagcccaactgggccacaaggtgactcagttggcaagctactttgaacctctgattctggccgcagtcggtgtagcgtctaaaatactcgaccaccagcagcagatgacagtgctggaccagactaaaacgcttgctgaatcagcacttcagatgctgtatgccgctaaggagggcggtgggaaccccaaggctcagcacactcatgatgctatcactgaggccgcacaacttatgaaagaggcagtggacgacatcatggttacgctgaacgaagcagcctccgaagtcggacttgtcggcggaatggtggatgccatcgcagaagcaatgtcaaagttagatgagggtactcctcccgaacctaagggaacattcgtggattatcaaaccacagtcgttaagtattccaaggccattgctgtgacagctcaagagatgatgaccaagtctgtgactaatccggaggaactgggaggcttggccagccagatgacctccgactatggacacctcgcatttcaaggccagatggctgccgcaactgccgagccggaggaaattggattccagattcgaacccgggtacaagacttaggccacggctgtatctttctggttcaaaaagcaggagccctacaggtctgtccgaccgacagctatactaagagggaattgatcgagtgtgccagggctgtgaccgagaaagtctcactagtgttgtctgcgctgcaagccggtaataagggcacccaagcgtgcataactgccgcaactgcggtttccggcattattgcggacctggatactacaatcatgtttgccaccgcaggaactctcaacgcagaaaactctgagacttttgccgaccatcgggaaaatatcctgaaaaccgccaaggccctggtcgaggatactaaactgctggtctctggtgccgcttccacccccgataaactggcccaggcagcccagtcaagtgccgcaacaataacgcagctcgcggaggtggtgaaactgggagccgctagccttggcagcgacgatcctgaaacgcaagtggttttaatcaatgccatcaaagatgttgccaaagcattgagcgacctaataagtgctacgaaaggcgcagcgagtaagcctgttgacgacccttctatgtaccagctcaagggggctgctaaggtgatggtcaccaatgtgacttccctgctgaagacggtgaaagcggttgaggatgaggccaccaggggtacccgagccctggaagccaccattgagtgtattaaacaggagttaacagttttccaaagcaaggacgttcccgagaagaccagtagccctgaggagtcaatcaggatgacaaagggaataacaatggcgaccgctaaagcggtcgcagctggcaacagctgtcggcaagaagatgtcattgccacggccaatctgtcccggaaagctgtgtctgatatgctgactgcgtgtaagcaggcctcgttccaccctgacgtgtccgacgaggtgagaacccgagccctacgatttggcacggagtgcactctggggtacctcgacctccttgagcacgtgcttgttatcctgcagaagcctacccccgaattcaagcagcagcttgccgctttctccaagagagtagccggtgctgtgaccgagctgatccaggcagcagaggccatgaaaggaactgagtgggtagacccagaagatccaaccgtgatcgccgagactgagctcctgggagccgctgcgtccattgaggccgcagcaaagaagctcgagcagctgaagcctagggcaaaaccaaagcaggcggatgaaactttggacttcgaggagcagatactggaggcagccaagagtatagccgcagccacgtcggctctcgttaagagtgcctccgcagctcaacgggaattggtggctcagggaaaggtaggcagtatcccagctaatgccgctgacgatggacaatggtctcagggtctgatatcagccgcaaggatggtagccgcagctacctctagtctctgtgaagccgctaacgcatccgtccagggccacgcttcagaagagaaattaataagttctgctaagcaggtggcagccagcaccgcccagctcctggtggcatgtaaagtgaaggccgatcaggattcggaggcaatgaggaggctgcaggccgctggaaatgccgttaagcgagctagcgacaatcttgttcgcgctgcacagaaggcagccttcggcaaggcagatgatgacgatgttgtggtgaaaaccaagttcgttgggggaatcgcccaaattatcgcagcacaggaggagatgttgaagaaggaacgcgagttggaagaagcaagaaaaaaacttgcccagatcagacaacagcagtataagtttctccccaccgaactccgtgaggatgaaggctac

SEQ ID NO: 243394 - DNA, 7628 bp, synthetic construct
  misc_feature 1..7628: note = Description of Artificial Sequence: Synthetic coding sequence
  source 1..7628: mol_type = other DNA
atggtcgccctgagtctaaagatttgcgtacggcactgcaatgtggtgaagactatgcaattcgagccgtcaaccgcagtgtatgatgcctgcagggtcattcgtgaaagagtccctgaagctcaaaccggtcaggcatccgactacggactctttttatccgacgaagaccccagaaagggcatctggcttgaggcaggacgtactctggactactacatgttgaggaacggcgatattctcgagtacaagaagaagcaacggccacagaagatacggatgctggacggcagtgttaagacagtgatggtagatgatagtaagacggtgggcgaactgttggtgacgatctgctccagaattggtattaccaactatgaggagtatagcctcattcaggagacaatagaggagaaaaaggaagagggaacgggaacccttaaaaaagaccggaccttgctgcgggacgagaggaagatggagaaacttaaggccaagctccacactgacgacgatctgaattggcttgatcattccagaactttccgcgaacagggcgtggacgaaaacgagacactgttgctgaggcggaaatttttctactcagaccagaatgtagacagccgagatccggtccagctgaacctcctctatgtgcaagccagggacgacatccttaatggttcccaccccgtgagctttgagaaagcatgtgaatttggtggtttccaagcgcagatacagtttgggccacatgtggagcataagcataaacctggattcctcgatctgaaagagttcctccccaaggaatacatcaaacaacgaggggcagagaagaggattttccaggagcataagaactgtggcgagatgtcggagatcgaagctaaagtaaagtatgttaaactggcacgatctctgcgtacatatggcgtatcatttttcctagtaaaagaaaaaatgaaaggaaaaaacaagctcgtgcccaggctgttgggcataacgaaggacagcgtgatgagggtggacgagaaaaccaaggaggtattgcaggagtggcctttaactaccgtgaaaaggtgggccgcaagcccaaaatctttcactctggattttggggagtatcaggagtcttattacagtgtccaaactacagaaggagaacagatttcccagttgattgccggatatatcgacattatactgaagaaaaaacagtccaaagataggttcggcttggaaggtgatgaagagagcacaatgctcgaagaatctgtttccccaaagaagtcaacgatcctgcaacagcaattcaatcgaacagggaaagccgaacacgggtccgtggccctgccagcggtgatgaggtctggatctagcggcccagagacgtttaatgtgggatctatgccttcaccacaacagcaagtgatggttggccaaatgcatcgagggcacatgcccccactgacatccgcccagcaagcgctgatgggaacaattaacacttctatgcacgccgttcagcaagcccaggatgatctgagtgaattagactccttgccacccctggggcaggacatggcctcgagggtgtgggtgcagaataaagttgatgaatccaagcacgaaatccattctcaggtggatgccattaccgcaggcaccgcatcagtggtgaacctgactgctggggatcccgctgacacagactacacagccgtgggttgcgccatcaccacgattagctctaacctgactgagatgagtaagggggtgaagttgctggccgctcttatggatgatgaggttgggtccggcgaggacctgcttcgagcggctcgtaccctggccggtgccgtgtccgacctgttgaaggccgtccagcccactagcggcgagcccaggcagaccgtgttgacagcagcaggaagcattggccaggcctctggagatctgctgaggcagattggcgagaatgagacagacgagagatttcaggacgtccttatgagcttggcaaaagccgtcgctaatgctgccgcaatgcttgtgctcaaggctaaaaatgtggcacaggttgccgaggacacggtccttcaaaatcgcgttattgcagccgcaactcagtgtgcgttatccaccagccagctggtcgcctgtgccaaggtcgtcagtccgaccatttcaagccctgtatgtcaggagcagctgatagaggcaggtaaacttgtcgacagatccgttgagaactgcgtccgggcatgccaggcagcaaccaccgacagcgagctcctcaagcaggtatccgcagcggcatcggtggtcagtcaagccctgcacgatttgttgcagcatgtgcgccaattcgccagtagaggagaacccattggtcgctacgaccaggctaccgataccattatgtgtgtaaccgaatcaatcttcagctctatgggtgatgctggcgagatggtccgtcaggccagggtgctggcccaagctacatctgacttggtaaacgctatgcggtccgacgctgaagcagagatcgacatggagaattctaagaagctgctggcagcagctaagctgctcgctgattcaaccgctaggatggttgaggctgccaaaggcgctgccgctaatccagagaatgaggatcagcaacagcgcctccgggaggctgcagaaggactgagggtggccactaatgcagccgcacagaatgccattaagaaaaagatcgtcaaccgactggaggttgcggctaaacaggcagctgccgcagcgactcaaaccatcgccgcatcacagaatgcggctgttagtaacaagaaccccgcagcccaacagcagctcgtacaaagttgtaaagccgtcgctgaccatattccgcagctcgtccaaggagtcagaggctcccaggcccaagccgaggacctgagtgctcaactcgcgctgattatctcctctcagaactttcttcagccaggcagcaagatggtctcaagcgcaaaggccgctgtccccacagtctccgatcaggctgccgctatgcaattgagccagtgcgcgaaaaatctcgccacgtccctcgccgaactgcgcactgcctcacagaaagcccatgaggcctgtgggcctatggagattgactctgccctaaatactgtacaaacacttaagaatgaactacaggatgcaaagatggccgctgtggaatctcagctgaaacccctgcctggagaaactctcgaaaagtgcgcccaagatctcgggtccacctctaaagcagtgggatctagcatggctcagctgttaacctgcgccgcacagggaaatgagcactatacaggtgtggccgcaagagaaacagcacaagctctgaagactctggcccaagccgctcgaggggtcgctgccagtaccacagaccctgcggcagcccacgctatgttagacagtgctagggatgtgatggaaggatctgccatgctgatccaggaggcaaagcaggcgctgattgctcctggagacgcagaacggcaacagcgcctggctcaggtggccaaggccgtttcccattccctcaataactgcgtgaattgtctgcctggccaaaaagacgtggacgtggcattgaagagcatcggcgaaagctcaaagaagttgcttgtcgattctcttccacccagcaccaagccatttcaggaagcccagtccgagctcaatcaggccgctgccgatcttaatcagtctgccggagaggttgtgcatgcaacccgtgggcagagtggtgagctggccgcagcttcaggtaaattttccgatgacttcgatgagttcttagacgccggtatcgagatggcgggtcaggcccagacaaaggaagaccagatccaggtgattggcaacctcaaaaacattagtatggcttcaagtaaattactgctggctgcaaaatccctgagcgtagaccctggagcccctaacgcaaaaaacctgctggccgcagcggctcgcgcagtcacggagagcatcaatcagctcattacactctgcacacaacaggcgccaggccaaaaagagtgcgataatgcgttgcgagaactggagaccgtgaaaggcatgctggacaacccgaacgagcctgtgagcgatctcagctatttcgactgtattgaaagcgtgatggagaactccaaagtactgggcgaatcaatggccggtatttcccagaatgccaaaacaggcgatttgcctgcctttggtgagtgtgtgggcatcgccagcaaagcactatgcggccttaccgaggcagcggcacaggccgcttacctggtcggtatttcagaccctaactcacaggctggccatcagggactcgtggatccaatccagtttgcaagagctaaccaggcaattcagatggcgtgtcagaatttggttgaccctggttctagcccttcacaggtattaagcgctgccacaatcgtagctaaacatacctctgccttatgcaatgcctgcagaatagcctccagtaaaaccgcaaatccggtggccaaacgacatttcgtacagtcagctaaggaggttgcaaattcaactgctaacctcgtgaaaacgatcaaggcgcttgatggggatttttcagaggacaaccgcaacaaatgcagaattgcgaccgcgccactcattgaagccgttgaaaacctaacagcttttgcctcaaatcctgagtttgtaagtatacctgcccagatcagctccgaaggctcccaagctcaggagccaattttagtctcggccaagaccatgttagaaagttcctcatacctgatcagaaccgcaagaagcctggccattaatcccaaagatccaccaacctggtccgtgctcgccggacattcacacaccgtctccgacagtatcaagtccctcatcacttcgattcgcgataaggctcccggtcagagggaatgcgactattcaatcgacggtattaataggtgcatcagagatattgagcaagcgagcctcgctgcagtttcccagagcttggccacccgcgacgacattagcgtcgaggccttgcaggaacaattgacaagtgttgttcaggaaattggtcatctgattgatcccattgctacagccgctaggggagaggccgctcagctgggccacaaagtgacccagctggcttcatatttcgaaccgttgatcctggccgctgttggcgtagcaagcaagattctcgatcaccagcaacaaatgactgtgcttgatcagaccaagaccctggcagaaagtgctcttcagatgttgtacgctgctaaggaaggcggagggaatcctaaggctcagcatacccacgatgctattacagaggccgctcagcttatgaaggaggccgtcgacgacatcatggtgacacttaacgaggccgcatccgaagtcggcctggtaggtggcatggttgatgccatcgctgaggctatgtctaaactcgatgaaggcaccccccctgagcctaagggcacattcgttgattaccagacgacagtcgtcaagtactctaaggctattgccgtgacagctcaagaaatgatgaccaagtctgtgacaaaccccgaggagctcggtggtctggctagtcagatgacaagtgactacggacatctggcattccagggtcagatggccgctgccacggctgaacctgaagaaatcggcttccagattcgaactagagtacaggaccttggacatgggtgtatattcctggtccagaaagccggtgctttgcaagtgtgcccaaccgactcctacaccaaacgtgagctgatagaatgcgcgagagctgtcacagagaaagttagtctcgtgctctccgctctgcaggcagggaacaagggcactcaggcctgtattaccgctgctactgccgtgagcggcattattgcagatctggacaccactatcatgtttgccactgcagggactctcaatgccgaaaattccgaaacatttgcagaccatcgcgagaacatcctgaagaccgccaaggctctcgttgaggacacaaaactcctagtgagcggcgcagcgtctactcctgataagctcgctcaggctgcacaatctagcgcggctactattactcagctggctgaagttgtcaagctcggagcggctagcctggggtctgacgaccctgagacacaggtggttttgattaatgcaatcaaggacgtagctaaggcattgtcagatctcatcagtgcgacaaagggagccgcttcgaagcccgtggacgatccatcaatgtaccagctcaagggagccgctaaggtgatggtcacgaatgtaacctccctgttgaaaacagttaaggcagttgaggatgaggcaacccgtgggacccgggctctggaagccactatcgaatgcattaagcaggagttgaccgtgtttcagtctaaggacgtcccggagaagacatccagcccggaggagtccatcaggatgaccaaaggcattactatggctaccgcaaaagctgttgccgcagggaattcctgtagacaggaagatgttatcgcgaccgccaatctttctcgcaaggccgtgtctgatatgctgaccgcctgtaaacaggctagcttccaccccgacgtgtcagatgaggtccgcacaagagccctgcgctttggcaccgaatgtacacttgggtatctcgatctgctggagcatgttctggttattctgcagaaacctacgccggagttcaaacagcagttagctgctttcagcaagagggtggctggggctgtcaccgagctgatccaggcagcagaggcgatgaaaggtacggaatgggtcgatccggaagaccctactgtgatcgctgaaactgaactcctgggcgctgctgcaagcatcgaagccgcagccaagaaattagagcagctcaaaccacgggctaaaccgaagcaggcagacgaaacactagatttcgaggagcagatactggaggcagcgaagtctatcgccgcagcgacctccgctctggttaagtctgcatccgcagctcaacgtgaactggtggcccaaggaaaagtgggatccatccccgcaaatgccgctgacgatggccaatggtctcagggcttgatctctgccgctcgcatggtcgccgctgccacatcttctttgtgcgaggcagctaacgcttccgtgcaaggccacgcgtccgaggaaaagctgattagcagtgcgaaacaggtggctgcaagtactgcccagctcttagtcgcttgcaaagtgaaggctgaccaagattcagaggctatgaggaggctgcaagccgcagggaacgccgttaaacgggcttccgacaacctcgttagggcagcccaaaaagcggctttcgggaaagccgacgacgatgacgttgtcgtgaagacaaaatttgtcgggggaatcgcacaaattatcgccgctcaggaagaaatgctcaagaaggaacgcgagctggaagaagccaggaaaaaactcgcacagattcggcaacagcagtacaagtttttgcccacagagctccgggaggacgaaggtta

SEQ ID NO: 243395 - DNA, 5190 bp, synthetic construct
  misc_feature 1..5190: note = Description of Artificial Sequence: Synthetic coding sequence
  source 1..5190: mol_type = other DNA
atgaaagtgagcacacttcgggagagtagtgctatggctagtccattaccccgtgaaatggaggaagagctggtgcctacggggtcagagccaggcgacacaagggccaagccaccagtaaaaccaaaacctagagccctgccggcaaagccagctctgccggcaaagccgtcactgcttgttccagtgggcccacgacctccccgaggcccattggcagaactcccctctgcgaggaagatgaacatgttggccggaccgcaaccctacggaggctccaaaagaccactgcccttcgcacctcgaccagctgttgaggcctcgaccggaggagaagccacccaggagactggaaaggaagaggcaggtaaggaggaacctccccctttgacaccccctgctcggtgtgccgctccgggtggggtgaggaaggctccagcaccattccgcccagcctctgaaaggttcgcggctaccaccgtggaggagattctagccaaaatggaacaaccaaggaaggaggtcctggcgagccccgatcgattatggggatcccgcttgaccttcaatcatgacgggagctctcggtatgggcctaggacatacggaactacaactgcccctagagatgaagacggatctacacttttcaggggatggagtcaggaaggcccagtcaaatcacccgctgaatgtcgcgaagagcattctaaaaccccagaggagaggagcctgccgtctgacctggcatttaatggcgaccttgctaaagcagctagcagcgagcttccagctgatatcagcaagccatggatcccgagtagcccagccccttcctcagaaaacgggggaccggcatcccctggactcccagcggaggcctcaggaagtggtccgggatcccctcaccttcacccacccgataagagctccccatgccattcacaactactagaagcccaaacgcctgaagcaagccaggcatcaccctgtcctgccgtcacccctagcgcacccagcgctgcattgccggatgagggatctcggcacacgccttcgcctgggctgcccgcagaaggggctccggaggcacctaggccatcctccccacctccagaggtcttagaaccacacagcctggaccagccccctgccacatccccccgaccattaatcgaggtaggcgaactgctggatctgacacgcacttttcccagcggcggagaagaagaggctaaaggcgatgctcacttgagacctacaagcctggtacagagacggttttcagaaggtgtgctgcagagcccatcacaagatcaggaaaagctgggcggatccttggccgctctacctcagggtcagggcagccagctggccctggacagacccttcggcgctgagtccaactggagtctctcgcagtcctttgagtggacattcccgactcgaccttccggactcggcgtttggagactggatagtccacccccatctccaatcacagaagcaagcgaggcagctgaagcagccgaagctggaaacctcgcggtatcatctagggaggaaggcgtctcacaacaggggcagggggcaggctctgctccatccggaagcggaagctcttgggtccagggggatgatccctctatgagtcttacccagaagggggacggcgaatcccagccgcagttccctgctgtgccactcgaacctcttcccaccaccgaggggactcccggtctccccctacagcaggctgaagagcgctacgaatcccaagagccactggcaggccaggagagtcccctgccactagctacccgggaagcagctctgcctattctggaacctgtgctgggtcaggagcagcccgctgcaccagaccaaccttgcgtgctgtttgcagatgcaccagaacccggtcaggctctgccagtcgaggaagaggcagtgacgcttgcccgagcagagacaacacaggctagaactgaggcgcaggatctctgtcgcgcatcaccagagcctcctgggcctgagtcatctagtaggtggctcgatgatctgctagcctcccccccacccagtgggggaggagcaagacgcggagctggcgctgagctgaaagacacccagagtccctctacctgcagcgagggactgcttgggtggtcgcagaaagacctacagtctgaattcggcataaccggggatcctcaaccctcatccttttctccatccagctggtgccagggggcatctcaagattatggccttgggggagctagccccaggggcgatccgggactcggcgagagggattggacctctaagtacgggcagggcgcaggagaaggtagtacaagggagtgggcctctcggtgcggcatcggtcaggaggagatggaagccagttcaagtcaggaccagagtaaggtctctgctcctggcgtgttgacagcccaggatcgggttgtaggcaaacctgcccagctggggacacagaggagccaggaagccgacgtgcaggattgggagttcaggaagagagattctcagggcacctactcatcccgggacgccgaactgcaagaccaggaatttggcaaaagagattcactgggcacatactcaagccgggatgtgtccctaggggactgggagttcgggaaacgggatagtttaggggcatacgctagtcaggatgcgaatgagcaaggacaggaccttggtaaaagagaccatcatggtagatacagctctcaggacgctgatgagcaggactgggagttccagaaacgagacgtcagcctggggacctacggatcccgggcagcagagccccaggaacaagagtttggaaagtcggcctggatccgcgactactcctccggagggagctcgcgcaccttggatgcccaggatcgctctttcggcacccgacccttgagttcaggtttttctccagaggaagcacagcagcaggatgaagagtttgagaagaagatcccctcagtggaagatagcctgggagaaggctcccgcgacgccggaaggcctggcgaacggggttctggcggactttttagcccttctaccgcccatgtgcccgacggagctctgggccagagggaccagtcgagctggcagaatagcgacgcttctcaggaggtaggtggccatcaagagcgtcagcaagctggagcacagggaccaggctcagctgatctggaagatggtgaaatgggaaagcgtggttgggtaggcgagtttagtctgtccgtcggaccgcagagagaggcggctttttcaccaggtcaacaggattggtcccgcgacttctgcatcgaagcctccgaaagatcataccaatttggaatcatcggaaatgatcgggtgtctggcgcaggattctctccatcctccaagatggaaggaggacatttcgttccccctggcaagaccacagccggatcggtggactggacagaccagctgggacttaggaacctcgaagtgagctcatgcgtgggctccggcggaagttcagaggcccgagagtcggctgtgggacagatgggatggagcggagggttgtccctgcgagacatgaatctaacagggtgcctggaaagcggtgggtcagaggagcctggtggcatcggggtgggcgaaaaggactggacctccgatgtgaacgtcaaatccaaggacctggccgaggtgggcgagggcggagggcacagccaagcccgagaaagcggggtcggccagacagactggtccggggtggaggccggtgaattccttaaatcaagggaacgaggagttggccaagccgattggacccctgacctggggctacgtaacatggctccaggcgctgtgtgctcaccaggtgagagcaaagagctcggggtaggccagatggactggggaaataacctggggctccgtgatctggaggtgacttgtgatcctgactctggtggaagccaaggcctaagagggtgtggagttggccaaatggattggacgcaagacttggccccacagaatgtggagctgttcggggcaccctctgaagctcgcgaacatggcgtgggaggcgtgagtcagtgcccagagcctggcctcaggcacaatgggagcctcagcccaggactcgaagcccgtgatcctttagaggcacgggaactgggcgttggagagacttccggaccagaaacgcaaggtgaagattatagtagttcatcgctagagcctcatccagcggatcctggcatggaaacaggtgaggcactgtcatttggagccagtcccggacggtgtcccgctcgacctcctccgagtggttctcagggtttgcttgaagagatgctggcggctagtagcagcaaggccgtcgccaggagagagtcagccgctagcgggctggggggattgctggaggaagagggcgcaggggcaggagccgctcaggaggaggtcctcgagcctggccgtgatagcccaccctcctggcggcctcagccagatggcgaggcgtctcaaacggaggacgtggatggcacatggggatcatctgccgctcgatggtctgatcagggtccagctcagacctctaggaggccctcccaaggccctcctgcgaggtcaccctctcaagatttctctttcatcgaagataccgaaattctcgacagcgctatgtacagaagccgggcaaatctagggagaaagcgaggccaccgcgctccagtcatcaggcctggcggaacactgggattgagtgaagctgctgacagtgatgcacacttgtttcaggactcgactgaacccagggctagccgcgtgccttccagtgacgaggaagtggtggaggagcctcagagccggaggaccagaatgtccctgggcaccaagggccttaaggtgaacctgttcccgggactgtccccctctgcccttaaggcaaagcttcgaccaaggaataggtctgcagaggagggtgagcttgcagaatcaaagtctagtcagaaagagtccgcagtccagcgaagcaaatcatgcaaagttcccggattaggaaagcctctgacccttcctccaaagcctgagaagagctcaggtagcgaaggctctagccccaactggctccaggccttaaagctgaagaagaagaaggtctag

SEQ ID NO: 243396 - DNA, 432 bp, synthetic construct
  misc_feature 1..432: note = Description of Artificial Sequence: Synthetic coding sequence
  source 1..432: mol_type = other DNA
atgaaggtgagcacactgagggaaagctccgccatggcctccccactccctcgggaaatggaagaggagctagtcccgaccggttcagagccaggggacacaagagccaaaccaccagtcaaacccaaacctcgagcacttcccgctaaacccgctctccctgccaagcccagtcttcttgtgccggtcggcccaagacccccaaggggccctttggccgaattgcccagtgcccgtaagatgaatatgctagccggtccgcagccatacggagggtcgaagcgccctctgcccttcgcccctcgtccggctgtggaggcgagtaccggcggtgaggctacgcaggaaaccggaaaagaagaagccggtaaggaagaaccaccccctctgactcctccggcacgctgcgctgctcccggtggggtccgttag

SEQ ID NO: 243397 - DNA, 5189 bp, synthetic construct
  misc_feature 1..5189: note = Description of Artificial Sequence: Synthetic coding sequence
  source 1..5189: mol_type = other DNA
atgaaggtgagtactttgcgtgagtccagtgcaatggccagccccctgcctagagagatggaagaggaattagtcccaacgggatctgagcccggtgacactagagcaaaacctccggtcaaacccaaacccagggccctcccggcaaagcctgcgctgcccgctaaaccaagcctcctggtcccagttggccctagacccccacgtggaccactggctgaactgccaagcgccagaaaaatgaatatgcttgccggtccccaaccatatggcggaagtaaacgccctctgccctttgcacctcgacccgcagtggaggcttccacaggaggtgaagcaacccaggaaacgggcaaggaggaggccggaaaagaagagcctcccccacttacgcccccagcccgatgcgccgcacctggaggcgtgcggaaagccccagcaccgtttcgccctgctagcgagaggttcgcagccactaccgtcgaggagatcctcgcaaaaatggagcagcctagaaaggaagtgctagcaagtcccgataggctgtggggctcccgactcacattcaatcacgatggcagtagtcgctacggtcccagaacatacggcacaaccacagccccacgggacgaagacggctcaacattattccgagggtggagccaggaagggcctgtcaagagccccgcagaatgtcgggaggagcattcgaaaaccccagaagagagaagcctgcccagcgatctggctttcaatggcgacctggccaaggcagcaagttccgaactgcccgcagacatttccaagccatggatcccttcaagtcctgctccctcttcagaaaacggtggtcccgcatcaccaggactgcctgcggaggccagcggctcaggtcccggatcaccgcacttgcaccctcccgacaagtcttcaccctgtcattcacagctactcgaggcacagaccccggaggccagtcaagccagtccttgccccgcagtcacaccgagcgctccctctgccgctcttcctgatgagggctctcgccacacaccttcccctggcttgcccgcagagggtgctcctgaagcacctcgacctagttctccccctccagaagtcctggaaccgcattctctcgatcaacccccagccacttctccaaggccccttatcgaggttggtgagctcctcgatcttacaaggacgtttcctagcgggggagaggaggaagcgaaaggcgacgcccaccttcggccaaccagcctggtgcagcgacgcttctcggaaggcgttcttcaatccccatctcaggatcaagaaaagctcggcggttccctggccgctctgccccaaggccagggcagccagcttgctctggaccggccattcggggctgaaagtaactggagcctgagccaatcatttgaatggactttccccaccagaccttctgggcttggcgtgtggcgcctcgacagccctcctccctctcccatcaccgaagcctccgaagcagctgaggcagcagaagcaggcaacctggccgtgtcctcccgcgaggaaggcgtgtctcaacaagggcaaggcgctgggtctgccccaagtggcagcggatcctcttgggtgcagggagacgatccctcaatgagcctgactcagaagggggatggcgagtcccagccccagtttcccgctgtcccattggaaccactcccaaccaccgagggcacccctggcttacccctgcagcaggccgaagagagatacgagtcccaggaacccctggctgggcaggagtcgccattgccactggcaacacgcgaggctgctctacccatcctggaacctgtgctgggacaggagcagccagccgcaccggatcagccttgtgttcttttcgccgatgcacccgaacccggacaggctttgccagttgaagaggaagctgtcactctggccagggcagaaacaacccaggcccgaactgaggcccaggatctgtgtcgtgcatctcccgagccacccggtcccgagtcgagctctagatggctggacgacttgctggcctccccgccaccatccggaggaggggcacggagaggcgctggagcagaattgaaagatacacagtctccttctacctgttcggaaggcctccttggctggtcccagaaggatcttcaaagcgaattcgggattactggggatccccagcccagctcattttctcctagcagctggtgtcagggagcctctcaagactatggccttggcggtgccagccccaggggcgacccagggctgggagaaagggactggacttccaaatacggccagggcgctggagagggcagcacccgagagtgggcgagtcgatgcggtattggccaggaggagatggaagcctcctcatctcaggatcagtcaaaggtgagtgctccaggtgtgcttaccgcccaagaccgggttgtgggcaagccagcccaactgggaacgcagcgttctcaggaggccgacgtgcaggactgggaattcagaaaacgcgactcccagggcacatattcttctagggacgctgaactgcaggaccaggagtttgggaagcgcgacagtctgggaacctatagttccagggacgtgtccctgggtgactgggaattcgggaagagagactctctgggggcttatgcctcccaagacgcaaacgaacaggggcaggatcttggcaagagagatcaccatgggaggtatagttctcaagatgccgacgagcaagactgggagttccagaagcgcgacgtatccttgggaacctacggcagtcgggctgctgagcctcaggagcaggaatttggcaaatccgcatggatccgcgactactcatccggaggaagttcacggaccctagacgcacaagatcggtccttcgggaccaggccactgtctagtggcttcagccctgaagaagctcagcagcaagatgaggaatttgaaaagaagattccctcagtcgaagattctctcggggaaggaagcagagacgcgggacgcccaggggagagagggagtggcggactgtttagcccttctacagcacacgtaccggatggcgctctaggtcagagagaccagagctcatggcagaattcagatgcctctcaggaagtcgggggacaccaggaacgtcagcaggccggagctcaaggtccaggctccgccgacctggaagacggagagatggggaagaggggttgggttggtgagttcagtctgtccgtcggaccccagcgggaagccgctttttccccaggccaacaagactggtcacgggacttctgtattgaggctagcgaacgctcctatcagtttggaatcatcggcaatgaccgcgtcagtggcgcaggattttcacctagttcgaagatggagggagggcacttcgtaccacccggaaaaaccaccgccggatccgtcgattggaccgaccaactgggtcttagaaatttagaagtctcctcttgtgtgggtagcggtggcagttccgaagcacgcgaatccgcggtgggacagatggggtggtctggaggtctgtccctgcgtgacatgaacctgaccggctgcctggaatctggaggaagcgaggagcctggtggtatcggcgtcggcgagaaagattggacttccgacgtaaacgtaaagagtaaagacctggcagaggtaggggaagggggaggccattcccaggctagggaatccggtgtgggccagaccgattggtccggggtggaggccggtgagttcttaaaaagccgcgagcggggagtgggacaggcagactggactcctgacctgggcctgcgcaacatggctcccggagcggtgtgttccccaggagagagcaaagaactgggcgttggccaaatggattgggggaataacctcggtttaagggatctcgaggtgacctgtgatcctgacagtggcggatcacagggccttcggggttgtggcgtaggacagatggattggactcaggacttggcaccccagaatgtggagctgtttggtgcaccatcagaagcgagggaacacggggtaggaggggtatcccaatgtccagagcccggactgcggcataacggaagcttgtctcctggactggaggccagggaccctctggaggctagggaattaggcgtaggtgagacctcgggtcccgagacccaaggagaggactactcctccagctcactggagccccaccctgcggatcccggaatggagacgggggaggctctctccttcggagcctctcccggacggtgtccggctcggccaccacctagcggctctcagggtcttctggaagagatgctcgcagcgagctcttctaaggccgtggccagaagggaatctgctgcttcaggactaggaggccttctggaggaggagggggcaggcgctggcgcagcccaggaggaagtgctggaaccaggaagagactctcccccttcgtggcgtcctcagccagatggagaggcctctcaaaccgaagacgtggacggaacctggggttcttcagctgctcggtggtccgatcagggacccgctcaaacttccaggcgcccaagtcagggccctcccgctcgatcaccatctcaggacttttcatttattgaggacacggaaattctcgattccgccatgtaccgttctagggcgaatttggggagaaaacgaggacaccgcgctcccgttatcaggcccggtggaactctcggcctgtcagaagcggctgactctgacgcccatctgtttcaagattcaaccgaacccagggctagcagagtgccaagctccgacgaagaagtggttgaggaacctcagagtcgcagaaccaggatgagtttagggaccaagggccttaaagtgaatctgttcccgggactgagccctagtgccctgaaggctaaactgagacctcggaatagatctgccgaggagggcgagttggcggaaagcaaatcttctcaaaaggagtctgcagttcaacggtccaaatcttgcaaggtgccaggcctcgggaagcctctaactttacctcctaaacctgagaaatcctccggttcagaaggctcttctccaaactggttgcaggctctgaagttgaaaaaaaaaaaggtgta

SEQ ID NO: 243398 - DNA, 3006 bp, synthetic construct
  misc_feature 1..3006: note = Description of Artificial Sequence: Synthetic coding sequence
  source 1..3006: mol_type = other DNA
atgccatctaccaatcgggctggtagtctcaaggatccagaaattgccgagctgttcttcaaagaagacccagaaaagctgttcaccgaccttcgggaaatagggcacggaagttttggcgctgtgtactttgccagagacgttcggacgaacgaagtcgtggccattaaaaaaatgtcctactctgggaaacaatcaaccgagaaatggcaggatatcatcaaggaggtcaagttcttacagcggattaagcacccaaacagtatcgagtataaaggatgctacttgcgcgaacatacagcttggctggtaatggagtactgcctcggatccgctagtgatctgctggaagttcataagaagcccttgcaagaggtcgagatagcggctataacccatggcgcattacagggtttggcttatcttcactctcacaccatgatccatagagacatcaaagcgggaaacattctgctgaccgagcctggtcaggtgaagctggcagactttggatcggccagtatggcaagccccgcaaactcatttgtgggcacgccttactggatggctcctgaggtcatcctggccatggatgaggggcagtatgatggtaaggttgacgtttggtccctgggcataacttgcatagagttagccgagcgcaaacctcccttgttcaatatgaatgctatgtcagctctgtaccatatcgcccaaaacgaatcacccactctgcagtcaaacgagtggtctgattatttccggaactttgtggactcttgcctccagaagatcccgcaggatcggcctactagcgaagagctgcttaaacacatcttcgttttgcgagagagacccgagaccgttctaattgatctcatccaaagaaccaaggacgctgttagggagctggacaatctgcagtatcgcaagatgaagaagctgctgttccaggaggcccacaatgggccagcagtagaggcgcaagaagaggaggaagagcaagatcacggagttggcaggacaggaaccgtgaattccgtgggttcgaatcaatctattcctagcatgagcattagcgccagttcccaatcctcttctgtaaactcgctccctgatgtgtccgatgacaaatcagaacttgatatgatggaaggcgatcatacagtcatgagcaactcttccgtaatccacctgaaacccgaagaggaaaattacagagaagagggggatcccaggactcgggcatcagacccccagagtcctcctcaggtaagccgccacaaatcacattacaggaatcgcgagcactttgctacaatacgcacagcctctctcgtcacacgccagatgcaagagcacgagcaggactccgaacttcgggagcagatgtcagggtataaacgaatgagaagacagcatcaaaaacagctaatgacgttagagaataaactgaaggccgagatggatgagcacaggctccggcttgacaaagatctggaaacacaacgcaataatttcgccgctgaaatggaaaaattgatcaagaagcatcaggccgcaatggaaaaggaggccaaagtaatgtcaaacgaagagaaaaaatttcaacaacacattcaggcccagcagaagaaggaattgaatagctttctggaatcccagaagcgagagtacaagctgcggaaagaacagttgaaagaagagctcaacgagaaccagagcactccaaagaaagaaaagcaggaatggctatcaaaacagaaggaaaatatccagcattttcaggccgaggaggaggccaatctccttaggcggcagcgacagtacctcgagttggagtgcaggcgattcaagcggaggatgctgctggggagacacaacctcgagcaagacttggttcgggaggagcttaataaaagacagacccagaaggatctggagcacgctatgcttctaaggcagcacgagtctatgcaagagctagaattccggcacctgaacaccatccaaaagatgcgctgcgaactgatccgcctgcaacaccagacggaactgaccaaccagctagaatacaataagcgaagggagagagagctgaggagaaagcacgtgatggaagtgcgccaacaacccaaatcactcaagtccaaagaactgcagataaaaaaacagtttcaggatacatgcaagattcagacacggcagtataaagcattgagaaaccatctcctggagactacgcccaagagcgaacacaaagcggtgctgaaaagattaaaagaggaacaaacccgcaaactggcgatcctagccgagcaatatgaccactctattaacgagatgttaagcacccaggccctgcgattggacgaagcacaggaagccgaatgccaggtgttgaagatgcaactgcagcaggaattagaacttctaaatgcttaccagtcgaagatcaaaatgcaggcagaagcacaacacgacagagaactacgtgagctggaacagcgcgtcagccttcggagggccctcctagagcaaaaaatcgaggaggaaatgctcgctttacagaatgaaagaaccgaacggatacgatcattgctggagaggcaagccagagagatagaggcattcgacagcgagagcatgagactgggattctccaacatggtgctgtcaaatttgagcccagaagccttctcgcactcctaccccggtgccagcggatggtcacacaatcccaccggaggacccggacctcattgggggcacccaatgggcggacctccccaggcttgggggcatccgatgcaaggtggccctcaaccctggggacacccgagtgggccaatgcagggagttccgagaggctctagcatgggggtgcgcaattccccacaggcgcttcggaggaccgcttctggtggacggactgagcaaggcatgtctcgctctacctcagtaactagccaaatctcaaacgggagccacatgtcttatacctag

SEQ ID NO: 243399 - DNA, 2562 bp, synthetic construct
  misc_feature 1..2562: note = Description of Artificial Sequence: Synthetic coding sequence
  source 1..2562: mol_type = other DNA
atgccaagcacaaatagggccggttctctgaaagatcccgaaattgcagagctattttttaaggaagatcctgagaaactgtttacagacttgcgggaaataggtcatggaagctttggtgccgtgtattttgcgagagatgttaggacaaacgaagtggtggcaattaaaaagatgtcgtatagtggaaagcagtctactgaaaaatggcaagacattatcaaggaggtaaagtttttacagaggatcaaacacccaaattccattgagtacaaaggatgctatctgcgcgagcacacagcttggctggtcatggaatactgccttggctccgccagcgacctcctggaggtgcataagaagcctttacaagaggtggagattgctgctattactcatggtgcactgcagggactggcttacttgcattcacatacaatgatacaccgcgacatcaaggctggaaacatcctgcttaccgaaccaggacaggtcaagctcgctgactttggtagtgccagtatggcaagcccagctaatagctttgtgggaacaccttactggatggctcctgaagtgatattggccatggatgagggccagtatgatggaaaggttgatgtctggagcctcggcattacatgcatcgagctggccgagaggaaaccccctttgtttaacatgaatgcaatgtccgccctgtatcacattgcccagaacgagagcccgactcttcagagcaatgaatggtctgactatttccgtaattttgtcgacagctgcctccagaagattccacaagaccggcctacctccgaggagctgctgaagcacatcttcgtgctgagggaacggccagaaacagtgctgatagacctgatccaacgtactaaggacgccgtacgcgaactggataacctgcagtaccgtaaaatgaaaaaactcttgtttcaagaagctcataacggcccagctgtggaagcacaggaagaggaagaagaacaagaccacggagtgggcaggacggggactgtgaactccgtcggttccaaccaatccattccctctatgtctatctctgcctctagtcaatcttcatctgtgaattcactgcccgatgtgagtgacgacaagtcagagctggatatgatggaaggggatcacaccgttatgtctaattcaagcgtcatccacctaaaaccggaggaggaaaattacagggaagagggcgatcctaggacacgtgcctcggacccccagtcacctcctcaagtctctcggcacaagagccactatcgcaatagagaacactttgcaaccattcgcacagcatcgttggtgacccggcagatgcaggagcacgagcaggactccgagttacgggagcaaatgtctggatacaagcgcatgcgccgacaacaccagaaacagctgatgacacttgaaaataagctcaaggccgagatggacgagcaccgcctgagactcgacaaggacctggaaacccagaggaacaattttgcagccgaaatggagaaacttatcaaaaaacatcaggctgcaatggaaaaagaggccaaagtaatgtccaatgaagagaagaagtttcagcagcacattcaggcccaacagaaaaaagaactcaactctttcctggaatctcagaaaagggagtacaagctgcggaaggagcagctgaaggagtctaaagaactgcagatcaaaaaacaatttcaggacacctgcaagatacagacacggcagtataaagccttgaggaaccatttattggagactacacctaaaagcgagcacaaggccgtgctaaagagactgaaagaggagcagaccaggaaacttgccatccttgctgagcagtacgatcattctatcaatgaaatgttgagcactcaggctctaaggctcgatgaggcccaagaggctgaatgccaggtcctgaaaatgcagctccagcaagaactcgagctgctaaacgcttaccagtccaaaatcaaaatgcaggcagaagcacaacacgacagagagcttagggagctcgaacaacgcgtgtcactccgaagagcgctactggaacaaaaaatagaagaggaaatgctcgccctgcagaatgaacgaaccgagagaattagatcattactcgaacgccaggctagggagattgaggcattcgacagcgagtctatgaggcttggcttttccaatatggtactttccaacctctcccccgaggctttcagccacagctaccctggagcttccgggtggtcgcataaccccactggcggacccggacctcattggggccatcccatggggggaccaccccaggcatggggtcaccccatgcagggcggaccgcagccatgggggcacccatctggcccaatgcagggtgttcctcggggatcctcaatgggggtccggaatagccctcaagctctgcgccgaacagccagcggcggacggaccgaacagggcatgagccggtcaacatcagtcacctcacaaatctctaacgggagtcatatgagctacacatag

SEQ ID NO: 243400 - DNA, 3150 bp, synthetic construct
  misc_feature 1..3150: note = Description of Artificial Sequence: Synthetic coding sequence
  source 1..3150: mol_type = other DNA
atgcccgcaggaggcagagcaggctccttgaaagatcctgacgtcgcagagctctttttcaaagacgacccagagaagctattctccgatctgcgcgagatcgggcatggaagtttcggagctgtgtattttgctagggacgtgcgcaatagtgaagtagttgcaatcaagaaaatgagctacagcggaaagcaatctaatgaaaagtggcaagacattataaaagaggtcagatttctgcagaaactccggcatccaaataccatccagtatcggggatgctacttacgcgagcacacagcatggttggttatggaatactgtctggggagcgcgtcggacctgttagaagttcacaagaaaccacttcaggaggtcgagatcgccgctgttactcatggtgccctgcagggcctggcctacctgcactcacataacatgatccatagggatgtgaaagcagggaatatcctgctgtccgagcccggtctggtgaagctcggggacttcggcagcgcctcaatcatggcacccgcaaatagctttgtgggcacaccctattggatggcaccggaagtgatcctggcgatggatgaaggccagtatgacgggaaagtcgacgtctggagtcttgggatcacctgtattgaactggcagagcgcaaacctcccctcttcaacatgaatgctatgagcgctctgtatcatattgcccagaatgagagtcctgtacttcagtcaggccactggtctgaatatttcaggaactttgtggatagttgtctccagaaaatccctcaggatagacctacttccgaggttctattgaagcaccgctttgttttgcgagagagaccgcctaccgtaatcatggacttgattcagcggacaaaagacgctgtacgtgaactggacaatctacagtacagaaagatgaagaagatactcttccaggaagcacctaacggacccggtgcagaggcaccagaggaagaggaggaagccgagccatatatgcacagggccggaactctaacttcacttgagtctagccactccgtgccttctatgagcatcagtgccagtagccagtcaagctctgtgaactctttagccgacgctagtgataacgaagaggaggaagaggaagaggaagaggaggaagaagaagaagaaggccctgaggcacgagagatggctatgatgcaggagggcgagcacacagtcacctcacattcttccattattcacagacttcccggaagtgataacctctatgacgatccctaccagccggagatcaccccaagcccactgcagccacctgccgctcccgctcctactagcactacatcttcagcgaggcgtagagcttactgccgcaacagggatcattttgccaccatccgtacagccagccttgtatccaggcagattcaggagcacgagcaggactccgccctgcgagagcagttgtcaggctataagcgaatgagacgacagcatcagaagcagctccttgctctcgagtcacggctccgcggtgagagggaggagcactccgccaggctgcagagggagttagaagctcaacgcgctggctttggcgctgaagctgaaaaattggcacgacggcatcaggcaataggtgagaaggaagctcgcgcagctcaggctgaagaaaggaaattccagcagcatattctgggacagcagaagaaggagctcgcagcactccttgaagcacagaaaaggacatacaaattgcggaaagagcagctgaaagaagaactgcaggagaacccctcaacacccaagcgtgaaaaggccgagtggctgctgcgacaaaaagagcagttgcaacaatgtcaagccgaggaggaggccggtctgctgaggaggcagagacagtacttcgaactgcaatgcaggcagtacaaacggaagatgctgttagcaagacacagcctcgaccaagatcttcttcgcgaagacctgaataaaaaacagacccagaaggatcttgagtgcgccttgctgctgagacaacacgaggccacaagagaactcgagctgaggcagctccaggccgtacagcgaaccagggcagagcttacccggctacaacaccagactgagctgggcaatcagttggagtacaacaagcgtcgcgagcaggaactaagacaaaagcatgcggcacaagtacgacagcagcccaagagtctcaaaagcaaggagttgcaaatcaaaaaacagtttcaggaaacctgcaaaattcaaacacgtcagtataaagccctgagagcacacctgctcgagaccacgcccaaggcacagcacaagagcctgttaaaaaggcttaaagaagagcagacgcggaagcttgcaatcctggctgagcaatacgatcagtccatatcagaaatgctatcttcccaggccctccgtctggacgagactcaagaggctgaatttcaggccctaaggcaacaactgcagcaggagttagagttgctgaatgcttatcaaagcaagataaaaatccggaccgagtctcagcacgaaagagagctccgtgagctggagcagcgtgtggcactgaggagagctctcctggaacagcgcgtggaagaagagctgttagctttgcaaacaggtcgatccgagcggatcaggtccctgctggaaaggcaggcaagggaaattgaggcctttgacgcggagagcatgcgtttgggtttcagctctatggccctaggaggaattcccgcagaagctgcggcacaggggtatcccgctccacctcctgcacctgcctggcccagtcggccagtccccagaagcggagctcactggtcgcatggccctcctccacctggaatgcctcctcccgcatggagacagccatctttgcttgcaccgcctggtccaccgaactggctgggcccacctacacaaagcggcaccccacgaggaggcgctctcctgctgctccgtaactcacctcagccactgagaagggcagcatctggcggatcaggatctgaaaatgttggacccccagccgcagccgttccagggccactgtctaggagcacttcagtggcttcacacatattgaacggctcgtctcatttttactcctag

SEQ ID NO: 243401 - DNA, 3708 bp, synthetic construct
  misc_feature 1..3708: note = Description of Artificial Sequence: Synthetic coding sequence
  source 1..3708: mol_type = other DNA
atgcccgctggaggtcgagccggatcactaaaggaccccgatgtggctgaacttttttttaaggatgaccctgagaagttatttagtgaccttcgggagatcgggcacggcagctttggcgctgtttatttcgccagggacgtgagaaactcggaagttgtggccatcaagaaaatgagttactccggtaaacagtcaaatgagaaatggcaggacattattaaggaggtgagattcctgcagaagcttcggcacccgaacacaattcaatatcggggatgctatctgcgtgagcacacagcctggctcgttatggaatactgtctcgggagtgctagtgatctgctggaggtccataagaaaccactgcaagaagtcgaaatagcagcggtcacccatggcgctttgcagggccttgcctatcttcattctcacaatatgatacatcgcgacgtgaaggctggcaacattctgttgagtgagcccggtctcgtaaaactcggggattttggcagtgccagcatcatggcacctgcaaattccttcgtgggcaccccatactggatggcaccggaggtgatcttagccatggacgagggccagtacgatggcaaggttgatgtttggtctctgggaatcacgtgcatcgaattagccgaaagaaagccacctctttttaacatgaatgctatgagcgctctctaccacatcgcccagaacgagtcccctgtgctccaatctggacattggtctgagtattttcgcaactttgtggactcctgcctccagaagattccgcaagataggcccacatctgaggtcctcctgaagcaccgctttgtcctgagagagcgccctcccaccgttataatggacctcatccagagaacaaaagacgcagtaagagagctggacaacctccagtatcgaaagatgaaaaaaattctcttccaggaggccccaaatgggccaggagcagaggctccagaagaggaggaggaagcagagccatacatgcatcgagctggcactctcacgagtctagagtcctcgcattccgtgccttccatgagtattagcgcctcaagccagtcaagttctgtcaacagcctcgctgatgccagcgacaatgaggaggaagaggaggaggaagaggaagaagaagaggaagaagagggtcctgaagctagggagatggcaatgatgcaggaaggcgaacatactgtaacttcccactcatctattatccaccgcttgcctggatccgacaacttatacgacgacccctatcaaccagaaatcaccccttctcccctgcagcctcccgctgcacctgcaccaaccagtacaacatcctctgctcgcagacgggcatactgccggaatcgggaccattttgcgaccattaggacggcctctttggtaagcagacagatccaagagcatgaacaggattcggctctacgcgagcagctctctggatacaagaggatgcggcgtcagcaccagaagcagttgctggcgcttgagtcgaggctaaggggggagagagaggagcacagcgccagactccaacgagagctcgaggcccaaagagccggattcggcgcagaagcagaaaagcttgccaggcgccaccaggcgatcggggagaaggaagcgagggcagcgcaggccgaggaaaggaagttccagcagcacattctcgggcagcagaagaaagaattggcggcactgcttgaggcgcagaagaggacgtataagctccgtaaggagcagttaaaggaggagctgcaggagaacccaagcacgccaaagcgggaaaaggctgaatggttactccgccaaaaggaacagttacagcagtgtcaggcggaggaggaagctgggcttctgcggagacagcgtcagtacttcgagctccagtgtcgtcagtacaagcggaaaatgctactggcccgacatagcctggaccaggacttgctgcgagaggaccttaacaagaagcagacacagaaagatctggaatgtgcactgctccttaggcagcatgaagcaacgcgagagctggagctcaggcagctccaggccgtgcagcgtactcgggcagagctgaccaggctgcagcaccaaacagagctcgggaaccaactggagtacaacaagagaagggagcaagaattaaggcagaaacatgcggcacaggtgagacagcagcctaaatcactgaaggtgcgggctggccagaggccaccgggactcccattaccaatccctggagcactgggccctccaaacaccggcaccccgatcgagcagcagccttgcagtcccggacaagaggcagtgttagaccagcgtatgttgggtgaagaagaagaggccgttggggagcgccgtatcttgggcaaagaaggcgcaacactggagccaaagcagcaacgtattcttggagaggaatctggagcccctagcccgtcacctcagaagcacggttcattggttgacgaggaagtgtggggcctgccggaagagatcgaggaacttcgggtcccgagccttgtccctcaagagcggagcatcgtagggcaagaagaggccggtacctggtccctgtgggggaaggaagacgagtctctgcttgatgaggaattcgaactgggatgggtccaggggcctgccctcaccccagttccggaggaggaagaggaagaggaagagggcgcacctatcgggacacctcgcgatccaggcgacggctgtccctctccagacatccctcctgagcctccgcctacccacctccggccatgccccgcaagccagctgccgggtttgctgagccatggcctactggccggtctgtccttcgctgtggggtctagctccggccttctgcccctgctgctcctgttgctgctgcctctgctggcagcacaaggcggaggcggactgcaggcagcactgctcgctctagaggtgggcctggtgggcttgggggcaagttacctcctgctatgtaccgcactgcacttgccatcctccctctttctgctgctcgcccagggtaccgcgctgggagctgtgttagggctgtcctggcgcagaggcctgatgggtgttcctctggggcttggcgctgcttggctcctggcgtggccaggactggcgctacctttggtggcaatggctgccggaggcaggtgggttcgacaacaggggccaagggtgcgaagggggatttctcgcctctggctgcgcgttctgctacgcttgtcacccatggccttccgggcactgcaagggtgtggcgcagtgggagaccgcggactgttcgctctgtacccaaaaactaacaaagatggctttagaagcaggctgcccgttcctggcccacgtaggaggaatcctaggaccacacagcatcctcttgcattgttggccagagtgtgggtactgtgtaagggttggaactggcgcctggctcgcgcaagccagggcctggcctcccacctgcctccatgggctatccacaccctggcctcctggggcctccttaggggggaacgccctacacgaatccctaggctgcttcccagatcacagagacagctggggcctccggctagcagacagccattgcctggcaccttagccggtcgcagatcgcgcaccagacagtcacgagccctgcccccatggcgctag

SEQ ID NO: 243402 - DNA, 2268 bp, synthetic construct
  misc_feature 1..2268: note = Description of Artificial Sequence: Synthetic coding sequence
  source 1..2268: mol_type = other DNA
atgcctgcaggcggtagggctggatctctgaaagacccagatgtcgcggagctcttctttaaggacgacccagagaagttattttccgacttacgcgaaataggccacgggagcttcggggcagtgtactttgcaagggatgtgaggaacagcgaggtcgtagctataaaaaagatgtcatattctggaaaacagagtaatgaaaagtggcaagacataattaaagaggtccgttttctgcagaaacttaggcatcctaatacgattcagtaccgcggatgttatctccgcgaacacaccgcttggctcgtcatggaatattgtctgggctctgcaagtgacctactggaagtccataaaaagcccctgcaggaagttgagatcgccgctgtcacacatggagccctgcagggcttagcctatctgcacagtcacaacatgattcaccgggatgtgaaagctgggaatatattactcagcgagcccggacttgttaaacttggagatttcgggtccgcaagtatcatggctcctgctaatagttttgtgggtacaccatattggatggcacccgaagtgatactggctatggatgaagggcaatacgacggaaaagtggacgtgtggtcactgggaatcacgtgtatcgaactggcggaaaggaaaccacctctctttaacatgaacgctatgagcgcgctgtatcatatcgcccagaatgagagccccgttctccagtctggccactggtctgagtacttcagaaacttcgtagacagctgccttcagaagatcccacaggacagaccgacttccgaggtcctgctgaagcatcggttcgtactgagagagcgaccccctacggtgatcatggacctcatacagagaacaaaggatgccgtgagggagctggataacctgcagtatcgaaagatgaagaaaatcctgtttcaggaggctcccaacggcccaggggctgaagcccctgaggaggaggaggaagccgagccatatatgcatcgcgcagggacactcacttccctggaaagctcacactctgtaccatctatgtcaattagcgctagtagtcagagctcctcggtgaatagtctggccgatgcaagcgacaacgaggaggaagaggaggaggaggaagaagaggaggaggaggaggaggggccagaggccagagagatggctatgatgcaagagggagaacataccgtgaccagtcacagttcaatcattcatcggctgcccggatccgataacctctacgacgatccctaccagccagaaattacaccgtccccactgcagccaccagccgctccagctcctacatcaacgacatccagcgcccgacggcgagcttattgtaggaaccgcgatcattttgctacaattcgtacggcatcccttgtcagccggcagattcaagaacacgagcaagactctgcattacgggaacaactgtccggctacaaacgaatgcggagacagcaccagaagcagcttctcgcactagaatcacgcctgcgtggcgagcgggaggaacattctgccaggctacagagggaactggaagcccaacgcgctggtttcggagcagaggccgaaaaactggcacggaggcaccaggcgatcggagaaaaagaggcgagggccgctcaggccgaggagagaaagttccagcagcatatactgggacagcagaagaaagaacttgccgcacttctggaagcgcagaaaaggacctataagttgagaaaggagcaactcaaagaggaattgcaggagaatccaagcactccaaagagggagaaggctgaatggttgctacgacagaaagagcagttacagcagtgccaagcagaggaggaggcagggcttcttcgtcggcagagacagtacttcgaactgcagtgcaggcaatacaagaggaagatgctcctcgcaaggcacagccttgatcaggacctcctgcgggaagatttgaataagaagcagactcagaaggacttggaatgtgcgttactactacgccagcacgaggccacgagggagttggagttgcgccagctgcaggctgtgcagcgtacccgggctgagcttaccagattacagcaccagacagagcttggaaatcagttagagtataataaacgccgtgagcaggagcttcggcagaaacacgccgcacaggtgcggcagcagcccaagagcttaaagaaaaagaccaacacaaataaaattagcgaacggtag

SEQ ID NO: 243403 - DNA, 3369 bp, synthetic construct
  misc_feature 1..3369: note = Description of Artificial Sequence: Synthetic coding sequence
  source 1..3369: mol_type = other DNA
atgcccgcaggtggcagagccggttcattgaaagatcctgacgtagctgagctgtttttcaaggatgatccagaaaagcttttttctgacttgagggaaattggccacgggtccttcggcgctgtatactttgccagagacgtgaggaacagcgaggtggttgcgatcaaaaaaatgtcctatagcgggaaacagagtaacgagaaatggcaggacatcatcaaagaagtgaggttcttacaaaagttgcggcaccccaatacgatccaatacagagggtgctatcttcgggagcacactgcctggctggtcatggagtattgtctcggcagtgcctccgacctgctcgaggtgcacaagaaacccctgcaagaagtagagatcgccgctgtgacacacggtgcgctgcagggcctcgcatacttgcactcccacaatatgatacaccgagacgtgaaagctgggaacattctgttgagcgagcccggtctcgtgaaactaggcgactttgggagtgccagcatcatggcaccagctaacagctttgtggggaccccttactggatggccccagaagtgatactggcaatggatgagggccagtatgatggaaaggtggacgtgtggtcactgggaattacctgcatcgaattggccgaaaggaaacccccactgtttaatatgaacgccatgtccgccctctatcatatcgcccaaaatgagagtccggttctgcagagcggtcattggagtgagtatttccgcaactttgttgattcttgcctccagaagattccacaagaccgtcccacatcagaagtgctcctgaagcacaggttcgtcctccgtgaaaggcctcctacggttattatggatctgatccagaggaccaaggacgctgtaagagaactcgacaacttgcaatatagaaaaatgaaaaaaatcctgttccaggaggccccaaacgggccaggggcagaggcacccgaggaggaagaagaggccgagccgtatatgcatagagccggaaccctcaccagcctcgagagtagtcactctgtgcccagcatgtctatctctgctagctcccagagtagttcagttaatagcttagctgatgcttcagataatgaggaagaagaagaagaggaggaggaggaggaggaggaggaggagggcccagaagctagagaaatggctatgatgcaggagggggagcatacagtcaccagtcatagctccatcatccacagactcccaggcagtgacaacctgtacgatgacccttaccagcccgagattacgcccagccctttacagcccccagctgcacctgccccaacttccactacctcttccgcacggaggagggcctattgtaggaatagagatcacttcgccacaattcgaaccgctagtttggtttcccgacagattcaagagcacgaacaagattctgctctgagagaacagctctcggggtataaaagaatgcgtcgacagcaccagaagcagctccttgccctggaatcaagattgcgtggagaacgtgaggagcacagtgcaagactgcagcgcgagctggaggcccaacgtgccggattcggcgcagaagccgagaaactagcaagacggcatcaggcaattggggagaaagaagctagagcagcccaggccgaagaacggaagttccagcaacatattttgggccagcagaagaaggagttagctgctctgctcgaggcccagaagcgtacatataaactgcggaaagagcagctcaaggaggagctccaggaaaatccctctacccccaagagagagaaagcagagtggcttctccgacaaaaggaacagctgcaacagtgtcaggctgaggaggaggctggcttgttgcgcaggcagagacaatattttgaattgcaatgccgccagtacaaacggaagatgctgctggctaggcacagcctggatcaagaccttttgagagaagatttgaacaaaaaacaaacgcagaaggatctggagtgcgccctcctgctgcgccagcacgaagcaactcgggagttggaactgcggcagttgcaggcagtccagcgaactagggctgagctgacccgattgcagcatcagaccgagctgggtaatcagttggaatacaataaacgacgtgagcaggagctccgtcaaaagcatgcagcccaggttaggcaacagcctaagagcctcaaagaaaggagcatcgtgggccaagaagaggcgggaacctggagcttatggggaaaggaggacgagagtctgttggacgaggagttcgaattgggttgggtgcaagggcctgctctgacccctgtgccagaagaagaagaagaggaggaggagggcgctccaatcggcacccccagggaccccggagacggttgcccaagccctgatattccccctgagccacctcccactcacctgcgtccctgtcccgcatcacagcttccagggctcctatcacacgggttactggcaggactatccttcgcagtcgggagctcttcaggtctgctgccactgctgctgctcctgctgttaccccttctcgcagcccagggaggtggaggtctacaggccgcacttctggccttagaagtcggcttggtgggactgggggcttcataccttcttctgtgcacagcattgcatctcccatcctctcttttcttgcttctggctcagggaaccgcccttggcgctgtgctcggcctctcatggagaaggggcctgatgggtgttcctcttggtctaggagccgcttggctgctggcctggcccggactggctctgcctctggtggctatggccgctggaggccgttgggtcaggcagcagggccctcgtgtgcgaagagggatctccagactgtggctccgcgttttgttgaggctttctcctatggcattcagagccctgcagggctgtggagccgtcggggaccgtgggctcttcgccctataccctaagactaataaagacggcttcaggtctcgcctgcccgtgccaggcccacgtcgccgtaaccccaggactacacagcaccctctcgcactcctcgcacgggtatgggtgctctgtaagggctggaactggcgtctcgctagggcaagccagggcctggcaagccaccttccaccatgggccattcacacactcgcatcttggggacttctgcggggagagagaccgactcggatcccacggttgctgcccagatcacaaagacagttgggtcccccagcatcccgccagcctctgccaggaacactggctgggagaaggagtcgcactcggcagtcccgcgctctgccaccctggcgatag

SEQ ID NO: 243404 - DNA, 1401 bp, synthetic construct
  misc_feature 1..1401: note = Description of Artificial Sequence: Synthetic coding sequence
  source 1..1401: mol_type = other DNA
atgaagtcactcagtctgcttctggcagtcgcgcttggactcgcaaccgccgtttcagcaggcccagctgtgattgaatgctggtttgtggaagatgcctctgggaagggtctggccaagagaccaggcgcactgctgctgcgccagggcccaggggagcccccacctcggccagatctggaccctgaactatatctgagtgtacacgatccagcgggtgccctccaggccgcattccggagatatcctcggggtgcccctgcccctcattgcgagatgagccggttcgttccactccctgcgtccgcgaaatgggcatcgggactgacccccgctcagaattgccccagagctttggacggtgcctggttaatggttagcatcagtagcccagtcctgagtttatcttcccttttgagaccacagcctgaaccgcagcaggagcccgtattaatcactatggccaccgtggaaatgggctttcatcatgtgggtcaggccgcattagagcttttgacaagcgtggtgctcaccgtgctcacgcacacaccagcgcctagggtaagactgggccaggacgctctgctcgacttaagcttcgcctatatgccacccacttcagaggcggctagctcgttggcacccggtccacctcccttcggtctcgaatggcggaggcagcatctgggaaaaggccatttgcttctcgctgcaaccccaggattgaacggacagatgcctgccgcacaagagggagccgtggctttcgcagcctgggacgatgacgagccatggggaccctggactgggaatggaactttttggctgcccagagtccaaccatttcaggagggcacctatctggccactatccacttgccatacctccaaggccaggtcaccctggaattagcagtatataagcctccgaaagtttccctcatgcctgctacactcgcacgtgccgctcctggtgaggcaccccctgagcttctctgcttagtgtcgcacttttatccatccgggggactcgaggtagagtgggagctgaggggaggacccggtggaagatcccaaaaggctgaaggtcagagatggctgtctgccctgcgccatcacagcgacggctcagtcagcctgtctggtcacctccagccacccccagtgactacagagcagcatggcgctagatacgcctgtcggatacaccatccaagcctgcccgctagtggcaggtctgcggaagtgacccttgaagtggccggacttagcggtcccagtcttgaagattctgtcggactgtttctaagcgcctttctgcttctgggcttatttaaggcgctgggctgggctgcagtatatctgagcacgtgcaaggattctaagaagaaggcagaatag

SEQ ID NO: 243405 - DNA, 1347 bp, synthetic construct
  misc_feature 1..1347: note = Description of Artificial Sequence: Synthetic coding sequence
  source 1..1347: mol_type = other DNA
atgaaaagcctgtctttgctattggccgtggcattaggcctggcaaccgccgtgtcggctgggcctgccgtcattgaatgctggttcgttgaggacgccagcggcaaaggtctggcaaaaagacccggagccttgctgcttagacaaggaccaggggaacccccacccaggccagaccttgaccccgagctatacttgtctgtgcatgaccccgcaggggcactgcaggctgctttcaggaggtaccccaggggagcaccagcccctcattgcgagatgtcaagattcgtcccactccctgcctccgcaaagtgggcctctggcctgacgccagcccaaaactgcccacgggctctggatggcgcatggctcatggtgtctatctcttcaccggttctcagcctgagctccctcttaaggccacagccagagccacagcaagaaccagtgctgatcactatggccactgtcgtcctgaccgtgctgacccacactccggctcctagagtgaggctagggcaggatgctctgctggatctatcctttgcctacatgccacccacatccgaagcagcctctagtctggccccaggtccaccaccattcggcctagagtggaggagacaacacctgggaaaaggacatctattgcttgctgcaaccccaggcctgaacggtcagatgcctgccgcacaggaaggtgcagtagcctttgctgcctgggacgacgatgaaccatgggggccatggactgggaacgggaccttctggttgcctagggtgcagccctttcaggaggggacatacctggcaaccatccatttgccctaccttcagggacaggtcacgttagaactggccgtatacaaacctcctaaggtgtcacttatgcctgctacacttgcaagggcggcacctggcgaggctccccctgagctcctctgtctcgtctctcacttttacccatcggggggattggaggtcgaatgggaactgcgaggtggaccgggaggtagaagccagaaggccgaggggcaacggtggctgagcgccctgcggcatcacagcgatggctccgtttctttgtccgggcacctccagcccccacctgtcaccacagagcagcatggagccaggtacgcctgtcggatccatcaccccagtttaccggcatcaggccgatccgcagaagtgacattagaggtggccggattatccggcccatctctcgaggacagtgtcgggctgttcctgtcagcttttcttctgcttggactgtttaaggccctggggtgggctgcagtgtacctgagcacgtgcaaggactctaaaaagaaagctgagtag

SEQ ID NO: 243406 - DNA, 1515 bp, synthetic construct
  misc_feature 1..1515: note = Description of Artificial Sequence: Synthetic coding sequence
  source 1..1515: mol_type = other DNA
atgaaaagtttaagtttgctgctggcagtcgccttaggactggccaccgcagtgagcgccggaccagcagtgattgagtgttggttcgtggaggatgcgtctggaaaaggtttggcaaagaggccaggtgcgcttctcctgaggcagggccctggagagccccctcctaggcccgacctagacccggaactgtacctcagcgtccatgatcccgcaggggctttgcaggcagctttccgccgataccctcgcggagcgccagctcctcattgtgagatgagccgctttgtgcctcttcctgcatcggccaaatgggcctcaggcctgacccccgcacaaaattgtccacgagccctggacggtgcctggttgatggtttcaatttcctcacctgtcctgagtctctctagcctgttacgtccccagcccgaaccccaacaggaaccagttttgatcacaatggctacagttgtcttgactgtgctaacacatacgcccgctccacgtgtgcgcttgggacaagatgccctcctcgacttgagcttcgcctacatgcctcctacatcagaagccgctagtagtctcgctcccggaccaccgccatttgggttagagtggcgacgccagcaccttgggaagggacacttactgctcgccgctacccctggtctcaatggtcaaatgcctgccgcacaggagggggcagtggcatttgcagcctgggatgacgacgaaccatggggcccatggacaggaaacggaactttttggctgcctaccgtgcagcctttccaggagggaacttatctggctaccatccacttgccatacctacaaggtcaggtgacattagagttggcagtgtataagccgccaaaggtcagtctcatgcccgctacgctggcacgggcagcccctggggaagcccctccagaactgttgtgcctcgttagccacttctatcctagcggcggtctcgaagtcgagtgggagctaaggggcggacccggaggcaggagccagaaggcagaagggcagcggtggctgagtgccctccggcatcacagcgacggatcagttagcctcagcgggcatctccagcctcccccagtgacgacagagcagcacggggctcggtacgcctgcagaattcatcacccatccctgcctgccagtggcaggagcgccgaagtcactctcgaggttgctgggctctccggaccatcactcgaagactctgtaggcctgtttctctccgcattcctgctgctgggcttattcaaagcacttgggtgggcggctgtctatttgtccacttgcaaagacagtaaaaaggtgcaatgctccacatcactgtacctgtccctcgttacactcagcccccaccctatctcaaaaccaatggaaggcggatgctggtgtgggagacagaacctgggcctggagttcacactgatatgggttaagacttggcactatatcctcactgtcggcctattcgagcacgccacttag

SEQ ID NO: 243407 - DNA, 1347 bp, synthetic construct
  misc_feature 1..1347: note = Description of Artificial Sequence: Synthetic coding sequence
  source 1..1347: mol_type = other DNA
atgaagtctctgagccttttgctcgctgtcgctcttggtctggctactgccgtatcagccggtccggcagtcatcgagtgttggtttgttgaggacgcttccggtaagggactcgccaaacgtccaggcgctcttctgctgcgacagggccctggggaacctcctccacgcccagatctggaccccgagttgtacctgtctgtccacgaccctgcaggagccttgcaggccgcttttagacgttatccgaggggagctcccgcaccacactgcgaaatgtctcgcttcgtgccgctccccgcttcagctaaatgggcgtcagggctgactcctgctcagaattgccctagggcccttgatggtgcttggttgatggtctccatttcctcaccagtcctgtcactcagcagtctgctcaggccgcagcctgaaccccagcaagagccggttctcatcaccatggccacggtcgtgttgaccgtgttgacccacacgcctgcacctcgagtgagactggggcaggacgctcttttggacctgtctttcgcatatatgccccctaccagcgaggctgcctcctcccttgccccaggccctcctccgttcggactggaatggcgacgacaacaccttggcaaggggcatctgctgctggctgccactccaggacttaacggccagatgccagcggctcaagagggtgcagtggctttcgctgcgtgggatgatgatgaaccatggggtccctggaccggaaacggtactttttggctgcctactgttcagccattccaggagggaacttacctcgcgactatccatttaccttaccttcagggtcaggttacgcttgagctggctgtctacaaaccaccaaaggtgtccttgatgcctgccacgctggcaagggccgcacctggagaagcccctccagagctgctttgcctcgtgtcacacttttacccttccggcggtttggaggtagaatgggagttgagaggtgggccagggggtcgctcccaaaaagccgagggccaacggtggttatcagccttacgtcatcatagcgacgggagcgtttccctgagcggccatctgcagccacctcccgtgacaaccgaacagcatggagcacgctacgcttgtaggatccaccacccctcgctcccagcctcggggaggagtgctgaagtaaccttggaggtcgcgggtctttccgggcctagcctcgaagactcagtgggattattcctgagtgcttttctgctgttaggcttgtttaaagcacttggctgggccgcagtgtatctgtccacctgcaaggatagcaagaagaaggcggaatag

SEQ ID NO: 243408 - DNA, 1401 bp, synthetic construct
  misc_feature 1..1401: note = Description of Artificial Sequence: Synthetic coding sequence
  source 1..1401: mol_type = other DNA
atgaaaagtctcagcctgttactagcggtcgcccttggactggcgaccgctgtaagcgccggaccggcagtgatcgagtgttggttcgtagaggatgcttcagggaagggactcgccaagcggcctggtgccctattgttacgccagggacccggagagcctcctcctcggcctgatctcgaccctgagctgtacctcagtgtccatgaccccgctggcgcactgcaggcagcttttagacggtacccacgaggtgctcctgcccctcactgcgaaatgagtcgctttgtgcccctgcctgcaagcgccaaatgggcatcggggcttacaccagcgcagaactgcccaagggcactggacggcgcatggctaatggtcagcattagctcgcccgtactgagtcttagtagtttactgcgcccacagcctgagccccagcaagagcccgttctcattaccatggccacagtggagatgggcttccatcacgtgggacaggctgcactggaacttctcacatccgtggtcctgacagtgttaacccacaccccggcacctcgggtgcggttgggccaggatgcgctgttggacctgagcttcgcatacatgccccctacctcggaggcggctagttcactggcccctgggccacctccctttggcctagagtggcggagacagcatttaggcaaaggacacctgctgttagctgccacccctggcctgaatggtcagatgcccgctgctcaggagggagcagtagccttcgctgcatgggatgatgatgaaccatggggcccatggacaggtaatgggaccttctggcttcccactgtacagcccttccaagagggcacatatctggctactatccatctgccatacctgcagggtcaggtgacgctggaactcgccgtctacaaaccccctaaggtgtccctgatgccggctaccttggccagagcagcgccaggggaggcgcctcctgagctgctgtgcctggtcagtcacttctatcccagcgggggactggaagttgagtgggagcttcgtgggggtcccggtggtcggtcacagaaggcagaaggtcagaggtggctcagtgcactgaggcaccatagcgacggctccgtatccctatcaggccacctccagcccccaccagtaacaaccgagcagcatggcgcacgttacgcgtgcagaatccaccacccttctttgccagcctcgggcagatccgctgaagtgacattagaggttgcgggactctccggccctagcctggaggactccgtggggctcttcctttccgccttccttctgttgggtttgtttaaagcactgggttgggctgccgtctacctgtccacatgtaaagacagcaaaaagaaagccgagtag

SEQ ID NO: 243409 - DNA, 1515 bp, synthetic construct
  misc_feature 1..1515: note = Description of Artificial Sequence: Synthetic coding sequence
  source 1..1515: mol_type = other DNA
atgaagtcattatctttgctcctagccgtcgcactggggctggcaaccgccgtttccgcaggtccagcggtgatcgagtgctggttcgtcgaggatgcaagcggcaaaggcctcgctaaacgacccggtgcccttctgttgagacagggacccggagaaccacctccacggccagatcttgaccctgaactgtatctatccgtccacgatcccgcaggcgcactacaggccgctttcaggagatatcctcgtggggctccagctccccactgcgaaatgtcccgcttcgtccccctgcctgctagcgctaaatgggccagtggactgaccccagcccagaactgtccgagggcactggacggtgcctggttgatggttagcattagttctcccgttctcagcctttcctccttattgcgccctcagcccgagccacagcaggagcctgtgctgatcaccatggctacggtagtactcaccgttttgactcatacccctgctccccgtgtgagactgggtcaggacgcacttttggacctgtctttcgcgtatatgccaccgacttccgaggcagcttctagcctagccccaggccctcccccattcggcctggagtggcgcaggcaacacctgggaaagggccatctgctattggcggctacacccggattgaacggtcagatgccagcagctcaggagggcgcagtggcttttgccgcttgggacgatgacgaaccttggggaccttggactgggaacggtactttctggttgccaagagtgcaacctttccaggagggcacttacctggcaactatccacctcccatatctgcagggccaggtgacactagagctggctgtctataaacccccaaaagtcagtcttatgcctgctactctggctcgggcagccccaggtgaagcccctcccgagcttctctgtctggtctcgcacttttacccttccggcggactggaggtcgaatgggagctcaggggcggacccggtggtagatctcagaaggccgagggacagagatggctatcagcactgcggcaccactcagatgggtccgtgtccctctccggtcatcttcagccgccaccggttaccaccgagcagcatggagctagatacgcatgtcgaattcaccatcctagcctaccagctagcgggaggtctgccgaagtcacgttagaggtcgctggattgagcgggccttcactggaagatagcgtggggctgttcttgtcagctttcctgttgctgggcctcttcaaggccctggggtgggcagccgtctatctcagtacatgtaaggattcaaagaaggtgcagtgcagcacttccctgtatttatcacttgttactctgagtcctcaccctattagcaagcctatggagggcggttgttggtgcggcagacaaaacttggggctggagttcaccttgatttgggtcaaaacgtggcattatatcctgactgtcgggctctttgagcatgctacctag

SEQ ID NO: 243410 - DNA, 1347 bp, synthetic construct
  misc_feature 1..1347: note = Description of Artificial Sequence: Synthetic coding sequence
  source 1..1347: mol_type = other DNA
atgaagtccctgtcactgcttctagccgtggccttgggcttggccacagcagtgtctgctggcccagctgtgattgagtgttggtttgtggaggatgcaagcggaaaaggcttagctaaacggcctggagctctgctgctacgtcagggtccaggcgagccaccaccacggccagacttggacccggaactttatctgagcgtccacgacccagctggagcccttcaggctgcctttcgcagatatccgcgaggcgcaccagctccacactgcgaaatgagtcgttttgtgccactcccagcctctgcaaagtgggcatctggactcacccccgctcagaattgtccacgcgctttggatggggcttggctgatggtctccatctcaagtcccgtgctgtctctgagcagcctcctacggccacagcccgaacctcagcaggagccggttttgataactatggccactgtggtgctgacagtgctgacacacactccagctcccagagttcgtttaggtcaggatgcccttcttgacctgtcctttgcttacatgccaccaacaagcgaggctgcgagcagcctcgctccaggaccgcctccattcggtctcgagtggcgtcgccagcacctgggtaaggggcacctactgctcgcagcaacgccgggtttaaatggccagatgcctgctgctcaagaaggggcagtcgcttttgctgcctgggatgatgatgaaccctggggaccgtggaccgggaatggtaccttctggcttcctcgagtgcagcccttccaggaaggtacatacctggcaaccattcatctgccctacttacaagggcaggttactctggaactggccgtatataagcctccgaaggtgtcgctgatgcctgcgactttagccagagctgcccctggcgaagcccctccggaactgctgtgcctggtatcccacttttacccttccgggggattggaagtagagtgggaactgcgtgggggacctggtggcaggagtcagaaagctgagggacaacgatggctgtctgctctgcgacatcatagcgacggatctgtgtcactgagtggccacctacagccccctccagtgaccactgagcagcatggagcacgctatgcctgtcgaatacatcacccctccttgccagccagcggccgaagcgcagaggtgaccctcgaagtcgcagggttatcgggtccttccttagaagatagtgtaggcctctttctgagtgcgttcttgctgctaggtctgtttaaagcactaggctgggccgcagtatacctgtcaacctgcaaggacagcaagaaaaaagcagaatag

SEQ ID NO: 243411 - DNA, 1515 bp, synthetic construct
  misc_feature 1..1515: note = Description of Artificial Sequence: Synthetic coding sequence
  source 1..1515: mol_type = other DNA
atgaagtctttatcattgttgttggcggttgccctgggccttgcgactgcagtcagcgccggacctgctgtgatcgagtgctggttcgtggaagacgcgagcggaaaaggcctggccaagagaccgggagctctccttctgcggcaaggtcctggtgaaccccctccgcgtccggaccttgatcctgagctgtatttaagtgtgcacgaccccgctggcgctctgcaggcggcttttaggcgctatcctaggggagcccctgcccctcattgcgaaatgtcccgtttcgttcccctccccgcttccgctaaatgggcttccggactgactccagcccagaattgtcccagggctctggacggagcatggctaatggtgagcatctcatctcccgtcctgtccctttcatccttgctgagaccccaacctgaaccccagcaggagccagtgctgatcaccatggcaacagtggtgttgacggttctgacccacacgcccgctccacgcgtgagactgggacaagatgctctgctggacctaagttttgcttacatgccgccaaccagcgaggctgcctcttcattggcacccggtcccccaccatttgggctggaatggcgcagacagcacctgggcaaagggcacctgctgctcgccgcaacccccggactgaatggacaaatgcccgctgcacaggaaggagctgtcgcttttgctgcttgggacgacgacgagccctggggaccctggaccggcaacggaacattctggctccccagggtgcaaccatttcaggaggggacatatctggccacaattcacctcccatatctccagggacaggtgacactggagctcgctgtatacaagccccctaaggttagtctgatgccagccacactcgcgagagccgcacctggggaggcccctcctgagctactctgtctggtgtcccatttttacccctcgggaggtctggaggtcgagtgggaactgcgcggtgggcctggaggcaggagccaaaaggctgaaggacagaggtggctcagtgcactgcgacaccactccgacggctccgtttccctcagcgggcacctccaacctccccctgtgacgaccgagcagcacggtgctcgttatgcttgccggatccaccacccctccctgccagccagtggcagatcagccgaagtgacgctggaagtcgccggtctgagtgggccttccctggaggatagcgtggggcttttcctgagtgcttttcttttgcttggtctgttcaaggctttgggttgggccgcagtgtacctgtccacttgtaaggattctaagaaagtccagtgcagcacctcactgtacctgtctttagttacactttcaccccacccaatctccaaaccaatggagggtggatgttggtgcgggagacagaacctgggcctggaatttaccctgatctgggtgaagacctggcattatattcttaccgtcggactcttcgaacacgctacttag

SEQ ID NO: 243412 - DNA, 1401 bp, synthetic construct
  misc_feature 1..1401: note = Description of Artificial Sequence: Synthetic coding sequence
  source 1..1401: mol_type = other DNA
atgaagagtttgagcctgctattggcagtggcgctcgggttagccaccgcagtcagcgctggcccagctgtaatcgaatgctggttcgttgaggacgcgagtggcaagggattggccaagcgtcctggagccctcctgcttagacagggcccaggcgaacccccaccgagacctgatctggacccggagttgtatttaagcgtccatgaccccgctggagccctgcaggctgctttcagaagatatcccagaggcgctcctgctccccattgcgagatgagtcggttcgtgcctttgcctgccagcgctaaatgggcctccgggctgacgcccgcacaaaattgtcctcgcgctctggatggcgcatggctgatggtttcaatcagctctcccgtcctgtccttgagctcactgctgagaccgcagcctgaaccacagcaggagccggtgctaattacgatggcgactgtggaaatgggcttccaccatgtgggtcaggccgcactggagctacttacctcggtggtgttgactgtgctcactcatacacctgcccctagggtccgccttggccaggatgctctgcttgacttatcctttgcctatatgcctcccacatcagaggccgcatcttccttggcccctggccctcctcccttcggtctagagtggcgcagacaacacctggggaagggccacctcctgctggcagccacccccggtctgaatgggcagatgccagcagctcaggagggcgctgttgctttcgcagcatgggacgacgacgaaccctgggggccttggactggcaacgggacattctggttgcctcgggttcagcccttccaggagggaacctaccttgcgacgattcatcttccgtatttacagggtcaagtgacgctcgaacttgctgtatacaagcccccaaaggtgtctctgatgcctgcaaccctggccagagctgctccaggtgaggcaccacccgaactgttgtgcttagtgtcccatttttatcctagtgggggtctggaagtggagtgggaattacgaggagggcctggaggccgatcccagaaggcagagggccaaaggtggctgagtgctcttagacaccattccgacggatctgtgagtctgagcggacacctgcagcctccgcctgtgacaactgaacaacatggggcaaggtacgcttgtcgcatccaccaccccagtctcccagcatccgggaggagtgccgaggtgactcttgaggtggctgggctgtctggcccaagcctggaggattcagttggcctgtttctgtcagccttcctgctcctgggattattcaaagctttaggctgggcagccgtttatctcagcacttgtaaagactcaaagaagaaggctgagtag

SEQ ID NO: 243413 - DNA, 1347 bp, synthetic construct
  misc_feature 1..1347: note = Description of Artificial Sequence: Synthetic coding sequence
  source 1..1347: mol_type = other DNA
atgaagagtttatcgctgttgctcgctgtggctctggggttggccaccgccgtgtccgcgggacccgctgtgattgagtgctggttcgtggaagacgcatctggcaaaggcttagccaaacgcccaggagcactcctgcttcgccagggacccggtgagcccccacccaggcccgacttagatcccgagctgtatctgagcgtgcacgatcctgccggagccctacaggctgcattcagacgttacccccgaggagcgcctgcgccacactgtgagatgtcgaggtttgtgcccctgccagcttcagccaagtgggctagcggtctcactccagcccagaactgcccacgcgctttagacggagcctggctcatggtgagtatctcttcccctgtgttgagtctatcaagtctgctgaggccccagcctgaaccccaacaggagccagttctgattacaatggctacggtggtcctgactgtactcactcatacacccgctcctcgtgtcaggctgggccaggacgccctcctggacctttcattcgcgtatatgccccctacgagcgaagccgcttcgtcactggccccaggtcctcctccttttggactggagtggagaagacaacatttaggcaagggccatctgctgctcgccgctactcccggtcttaatgggcagatgccagcggctcaggagggggcagtagccttcgctgcgtgggacgacgacgagccctgggggccatggacagggaatggcactttctggctgccaagggtacagcccttccaagaaggcacatacttggccacaatccatctgccttacctgcagggccaggtaactcttgaactcgctgtatacaagcccccaaaagtgagcctgatgccagccacccttgccagggccgcacctggagaggcccctccggaattgttgtgtttggtatcccacttttacccaagcgggggactggaagtcgaatgggagctgagaggcggacccggtggacggagtcagaaagccgaaggccagcggtggctgagcgcactgcgccatcactcagacggctctgtctcactgtctggacatttgcagccccctcccgtaactacagaacaacacggtgccaggtatgcttgtcgcatacaccatccgtccctgcctgctagtggaaggtctgccgaagtgacattggaggtcgctggactgagcgggccatctctggaagatagcgtgggactttttctttcagccttcttgctgctcggcctttttaaggctttgggctgggcagctgtgtatctgtccacctgcaaggactcaaagaaaaaggcagaatag

SEQ ID NO: 243414 - DNA, 1515 bp, synthetic construct
  misc_feature 1..1515: note = Description of Artificial Sequence: Synthetic coding sequence
  source 1..1515: mol_type = other DNA
atgaagtctctctctctcttgcttgctgtcgccttagggctggccactgccgtgagtgcagggccagcagtgatcgagtgctggtttgttgaggatgcttcaggaaaaggcctggctaaaaggcccggagccctcctgttgaggcagggtccaggtgaaccacccccacgtccagatctggacccggagctgtatcttagcgttcacgatcctgccggagcacttcaggccgctttccgcaggtaccctaggggagcgcctgcaccacattgtgagatgagtcgatttgtgccactgccggctagcgcgaaatgggcttccggcctgacacctgcccaaaactgtccacgggcactggatggcgcttggcttatggtgagcatatcttcccctgtacttagcttaagctctttgctgagaccacaacctgaaccccagcaggaaccggtccttatcaccatggccacggtggttctaaccgtcctaacacacaccccagcaccaagagtccgccttggtcaagacgccctgctcgacctaagcttcgcatatatgccacccacatcggaggccgctagctctcttgcacccggaccacctcctttcggtctagaatggcggaggcagcatctcgggaaggggcaccttctgttggctgccacaccaggcctgaacggccagatgccagccgctcaggaaggcgcagtcgcattcgctgcctgggatgatgacgaaccctgggggccttggaccggaaacgggactttctggctgcccactgtgcagccgtttcaagagggcacttatctggctactatccatcttccatacctgcagggacaggtgaccctggaactggccgtgtataaacccccaaaggtgtctctcatgccagccactttagcgagggccgctcccggtgaggcaccaccagagctgctgtgcttagtgtcccacttctatcccagtggaggcctcgaagtggaatgggagctccggggaggccctggcggacgttcacagaaggccgaggggcagcgatggctctccgccctccgacaccacagcgatgggtcagtttccttatccggtcacctccaaccccctcccgtcacaactgaacaacatggggcaaggtatgcttgccgcatccaccatccttctttacctgcctccgggcgttctgctgaggtgactctagaagtggcaggcttgtccggcccttccttggaggatagcgtcggcctatttctcagtgcattcctgctgctgggcctgttcaaagctctgggatgggcagctgtgtatctgtcaacctgcaaggactcaaaaaaggtccaatgctccacaagcctgtatctcagcctggtgaccctttccccgcaccctattagtaaacccatggaaggaggttgctggtgtgggcgacagaacctgggactggagtttacactcatctgggttaaaacttggcattacatcctgactgtggggcttttcgaacatgcaacctag

SEQ ID NO: 243415 - DNA, 609 bp, synthetic construct
  misc_feature 1..609: note = Description of Artificial Sequence: Synthetic coding sequence
  source 1..609: mol_type = other DNA
atgaaaagtctcagtctcctccttgccgttgccctggggctggccacggctgtgagcgccggacccgcagtcatcgaatgctggttcgttgaggatgcatccggcaagggcctagcaaaacgaccaggagccctcctattgcgccagggccctggagagcctccgcctcggccagatcttgacccagagctgtacctgtcggtgcacgtggtacttaccgtccttactcatacaccagcccctagagtgagattgggacaagacgcactgctcgatctgagtttcgcttatatgcctcctacaagcgaggcagctagttctctcgcccctggtcctccccctttcggcctcgaatggcgcagacagcacctgggtaaaggacacctgctgttggcggcaacacccggactcaatggtcaaatgcccgctgcgcaggagggggctgtggcgttcgctgcttgggacgacgacgaaccatggggcccatggacaggcaacggtactttctggctccctagagtccaaccgtttcaggaaggcacatacttagctaccattcacctgccatacctgcagggacaggtgaccctcgagctggccgtctactag

SEQ ID NO: 243416 - DNA, 1347 bp, synthetic construct
  misc_feature 1..1347: note = Description of Artificial Sequence: Synthetic coding sequence
  source 1..1347: mol_type = other DNA
atgaaatcactgtcactgctactggccgtcgctctgggcctcgccacggctgtttccgctggcccagccgtgatcgagtgttggttcgtggaggatgcgtccgggaaaggcctggcgaaacgcccaggcgctctgctccttcggcagggcccaggagaaccacctccaaggcctgatctcgatcctgagctgtatctgagcgtgcatgaccccgcaggtgcgctgcaggctgcctttcgcaggtaccctcgcggagcccctgctccgcattgcgagatgtcgagatttgtgcctttgccagccagcgcaaagtgggcttccgggctgacacccgctcaaaactgtccgagggccctagatggggcttggttaatggtgtcaataagctcacctgttctttcattgtcctccctgctgaggccacagcccgagccacaacaagaaccggtgctgattactatggctactgtggtgttgacagtgctcacacataccccagctccccgagtccgcctgggacaggacgccctgctggatctgagcttcgcatatatgccgccaacttcggaggcagcctcttccttagcaccaggccctccgccatttgggcttgaatggcgcagacagcatctgggtaagggacacctgctgcttgcggcaacgcctggtctgaacggccagatgccagccgctcaggagggcgctgtagccttcgctgcttgggacgacgatgagccatgggggccatggaccggcaatgggaccttctggttacccaccgtccagccatttcaagagggaacgtacctagccactattcaccttccttatctccagggccaggtgacacttgagttggcagtctataaaccaccgaaggtgagtctgatgccggctaccctcgctcgggcagcaccaggagaagcaccgcctgagctgttgtgcctggtatcacacttctaccccagtgggggtttagaagtcgagtgggaacttaggggtggcccagggggtaggtcccaaaaggctgaggggcagcgctggcttagcgcccttaggcaccacagcgatggaagcgttagcttaagcggacatctccagccaccccctgttacaacagagcagcacggggctagatacgcgtgccgcattcatcatccctccctgcccgcttccgggaggtcggcagaggtgacactggaagtggctgggttgtcaggtcctagcctggaggacagtgtcggtctgttcctgtcagccttcctgctcctgggcttatttaaggcactgggttgggcggcagtgtacctgtccacatgtaaggacagcaaaaagaaggcagaatag

SEQ ID NO: 243417 - DNA, 1401 bp, synthetic construct
  misc_feature 1..1401: note = Description of Artificial Sequence: Synthetic coding sequence
  source 1..1401: mol_type = other DNA
atgaaatctctgagcctgctcctggctgtggcactcggcctcgcgacagcggtaagtgcgggacctgccgtgatcgaatgctggttcgtggaagatgcgtctggaaaaggcctggccaaacgcccaggggcactcctcctgaggcaaggacccggtgagccacctccacgtcctgacctcgatcctgagctctacctgagcgtgcatgaccccgctggcgctctccaggctgcctttagacgttatccgcgaggagccccagctccccactgcgagatgagtcgattcgtccctctgccagcatcggctaaatgggcatctgggctgacccccgcacaaaattgccccagggcactggatggcgcatggctcatggtgagcatttcgtcaccggtgctttcactttcatccttgctgaggcctcagccagaacctcaacaagagccggtacttattacgatggcaaccgtggagatgggattccaccatgtgggccaggccgctttagagctgttgacatctgtagtgctgactgtcctaactcacactccagcccctcgcgttagattgggtcaggacgcccttctcgatctctcattcgcttatatgccacctacctcagaggccgcaagcagcctggcaccaggacctccgccattcggcctggaatggcggaggcagcatcttggaaaaggccatctgttgttggctgccacacccggactgaacggccagatgcccgctgcacaagaaggagcagtcgcatttgccgcttgggacgacgacgaaccctggggaccttggaccggcaatggcactttctggctgccacgggttcagccgtttcaagagggcacctatctggcgactatccatctgccttacctacaaggacaggtgaccctcgagttagctgtttataaaccacctaaagtgtctttgatgcccgcaactctggcccgagcggctccaggggaggcccctcctgagctcctgtgcctggtgagccacttctaccctagcggcggtcttgaggtagagtgggaactccgcggtggcccagggggaagaagccagaaggccgagggtcagagatggttatccgcactaaggcaccactcggatggatccgtgtccttgtcgggacacctgcagcctccccctgtgaccacagaacagcacggggctaggtacgcttgcagaatccaccatccttccctccctgccagcgggagatccgccgaagtcacattagaggtggctggactgagtggtcccagccttgaggactcagtgggcctgttcctaagcgcgtttctgttgctgggcctctttaaagcgcttggatgggctgccgtttacctgagcacgtgtaaggacagcaaaaagaaagccgagtag

SEQ ID NO: 243418 - DNA, 609 bp, synthetic construct
  misc_feature 1..609: note = Description of Artificial Sequence: Synthetic coding sequence
  source 1..609: mol_type = other DNA
atgaaatcgctctcacttctgctggcggtcgcactgggactcgcgaccgcggtgtctgccggacctgctgtgatcgagtgctggttcgtggaagacgcctcaggtaaaggactcgccaagcgaccaggtgcgcttctgttgagacaaggaccaggagagcccccacctaggcctgaccttgatccagagctgtacctgtccgtccacgtggtcctgaccgtgctaacgcacacacctgctcccagggtcagactggggcaggacgcccttctcgacctgagctttgcctacatgccgccaacctcagaggcggcaagcagcttagccccaggcccaccgccttttggcctggaatggcgcagacaacacctgggaaaaggacacctgcttcttgccgctaccccgggactcaacggccaaatgccggctgctcaggaaggggctgtggccttcgccgcttgggatgacgacgagccctgggggccatggactggcaacgggaccttctggctgcccactgttcagcctttccaggaggggacctatttggctaccatccacctaccttatctccaggggcaagtaaccttagagctggccgtgtactag

SEQ ID NO: 243419 - DNA, 609 bp, synthetic construct
  misc_feature 1..609: note = Description of Artificial Sequence: Synthetic coding sequence
  source 1..609: mol_type = other DNA
atgaaaagcctgagtctgttgctggccgtcgctctcggactggctaccgcagtgtccgcgggaccggcagttatcgaatgttggttcgtggaagatgcttccgggaaaggtctcgctaaaagaccaggcgcattgctcttgcgccagggtccgggagagccacctcctcgacccgatcttgacccggagctctacctgtctgtgcacgtggttctaaccgttcttacccatactcctgctccaagggtgcggctcggacaggacgctctcttggatctttcgtttgcatacatgccacctacttcggaggccgcatccagcttggccccagggcctcccccattcggtttggaatggcgccgtcagcacttgggaaaaggacacctcttacttgccgctacacctggcctgaacggccagatgcctgcagctcaggagggagccgtggcatttgcggcttgggacgatgacgaaccatgggggccttggaccggaaatggtactttctggttgcccagggtacagccattccaggaggggacgtacttagctactatacacttgccttacctgcagggacaagtcaccctcgagttggcggtttactag

SEQ ID NO: 243420 - DNA, 609 bp, synthetic construct
  misc_feature 1..609: note = Description of Artificial Sequence: Synthetic coding sequence
  source 1..609: mol_type = other DNA
atgaagtcactgtccctgctcttggctgtggctttgggacttgccaccgccgtgtcagcgggtccagccgtgattgaatgctggttcgtggaggacgcctctgggaagggattggcaaaacggcctggagctctgctactgcggcaaggacctggcgaaccccctccaaggccggacctcgatccagagttatacctgtctgttcacgtcgttctgactgtcctcacccacactccagccccacgggtgaggctcggtcaggacgccctactggacttgagctttgcctacatgccccctacctcagaggccgcaagttctcttgcaccagggccacccccttttggactggagtggcgcagacagcatttggggaaggggcatctccttctggcagcgacccctggactgaatggtcagatgccagctgcccaggaaggagcagtggcctttgccgcttgggatgatgacgagccttggggcccttggactggaaacggaacgttctggttaccacgtgtacagccgttccaggaagggacatacttggccacaatacatctcccttacttgcagggccaggtaaccctggagctggccgtgtattag

SEQ ID NO: 243421 - DNA, 1347 bp, synthetic construct
  misc_feature 1..1347: note = Description of Artificial Sequence: Synthetic coding sequence
  source 1..1347: mol_type = other DNA
atgaagtccctgagtttactgctggctgtcgctctgggactggcgaccgcagtatcagctggaccagctgtcatagagtgttggttcgttgaggatgcttctggcaaggggctcgcaaaacgcccaggggctctactcctcaggcaaggccctggggagccccctccccgtccagacctggatccagagctgtacctcagcgtgcacgatcccgctggggctctccaggcagcttttaggcgatacccaagaggggctcctgccccacactgtgaaatgagtagatttgtgccattgcccgctagcgccaagtgggctagcggtcttacccccgcacagaactgcccacgggcattagatggcgcatggctgatggtatcaatttcgtcgccagtgctaagtttgagttcactgttgagacctcagccagaacctcagcaggaacctgtgctcatcaccatggctaccgttgttttgaccgtgctcactcacacacccgctccaagagtgagactagggcaagatgccttgctcgatctcagcttcgcatacatgcccccaacgtcggaggccgcaagctctctagctccgggaccacctccattcggactggagtggagacggcagcatctcggaaaaggccatctgctcttagctgctactcctggtctgaatggccaaatgccggctgcccaggaaggcgcagtggcgtttgctgcttgggatgatgacgaaccctggggaccctggacagggaatggcacattttggctgccgaccgtgcagccttttcaggaaggcacatacctcgcgacgattcacctgccctaccttcagggccaggtgacactcgaactggctgtgtataagccgccaaaggtgtctttgatgccagctacacttgctcgagctgcacccggagaagcacctccggagctactgtgccttgtttcacatttttaccctagcggaggcttggaagtggagtgggagctgaggggcggtcccggaggccgatcccaaaaggcggaaggacagaggtggctttccgcactgcgccatcattcagatggttcagtttccctgtcaggccatctacaacctcccccagtcacgaccgaacaacatggtgcacgctacgcctgcaggatccatcacccatcccttccggcatccggacgctccgcggaagtgacgttggaggtggcaggtctgagtggcccttcactggaagactctgtgggtctgtttctatcagccttcctgctgctcgggcttttcaaagcccttggttgggccgctgtctatctttccacatgcaaagacagtaaaaagcatgcaacatag

SEQ ID NO: 243422 - DNA, 1515 bp, synthetic construct
  misc_feature 1..1515: note = Description of Artificial Sequence: Synthetic coding sequence
  source 1..1515: mol_type = other DNA
atgaagtccctctctctcctcctcgccgtagctttggggcttgcaacagccgtgtctgccggtccagccgtgatcgagtgttggttcgtggaagacgcctctgggaaaggcctcgcgaagcgccctggcgctcttctgctcagacaggggccaggagaacctcccccaaggccagatctagaccccgagctttacctgtccgtccacgaccctgccggagccctgcaggccgcttttagacgatatccccgaggcgctcctgcccctcactgtgagatgagcaggttcgtcccgctccctgcttcagcgaagtgggcctctggactcaccccagcacagaactgccccagagcactggatggagcgtggcttatggtgagcatttcttcaccggtgctgtctcttagctctctgctaagaccgcagcccgagcctcagcaggaaccggttctgattacaatggccaccgttgttctgactgttttaacgcacacacccgctccccgagtgagactcggccaagacgccctgctcgacctttcattcgcttacatgcctccaacttccgaggccgcaagctccctcgccccaggaccacccccattcggtttagaatggcgtcgccagcacttgggaaaaggtcaccttctccttgcagctacccctggcctgaacggccagatgcccgctgcccaggaaggagccgtggcctttgctgcctgggatgacgacgaaccctggggcccatggactggaaatgggaccttctggctcccaagagttcagcccttccaggaagggacatatctagcaacaattcatctaccgtacctgcagggccaagttacgctagaacttgccgtctataagcctccaaaagtaagcttgatgcccgctaccctcgcgagggcagctccgggtgaagcccctccagaattgctgtgcctggtgtctcatttctacccaagcgggggactcgaagtggaatgggagttgaggggcggacccggtggtcggagtcaaaaggccgaaggccagaggtggctgtcagccctgcggcaccattcggacggaagtgtctccctgagcgggcacctgcagcctcccccagtgaccacggaacagcatggggctcggtacgcctgcagaatccaccaccccagcctccctgcctcaggcagaagcgcggaagtcaccttggaagtagctggactgtccgggccttctctcgaggatagcgtggggctcttcctcagcgcctttttacttctgggcctgttcaaggcattaggctgggctgccgtgtacctttcaacatgtaaggattccaagaaagtacaatgcagtaccagcctttacctgagcctggtgacgctctcgccccacccaatcagtaaacccatggaaggaggctgttggtgtggccgacaaaacctgggtctggaatttactctgatttgggtcaagacctggcattacattctgactgtgggtctattcgaacatgcaacatag

SEQ ID NO: 243423 - DNA, 471 bp, synthetic construct
  misc_feature 1..471: note = Description of Artificial Sequence: Synthetic coding sequence
  source 1..471: mol_type = other DNA
atgaaatctctaagcctgctcctagctgtagcgctaggattggccaccgctgtgtctgctggtcccgcagttatagagtgttggtttgtggaggacgcaagcggcaaagggttggccaagcgccctggcgcactcttactacggcagggtccaggtgaacctccaccgcgacccgatctcgatcccgagctgtacttgtccgtccatgatccagccggtgctctgcaggcagcattcagaaggtatccacggggtgctccagcccctcactgtgagatgagtcgcttcgtgcccctgccggcttccgccaaatgggcatccggactcacgcctgcccaaaattgccctcgtgcattggacggcgcttggctgatggtctctatctccagcatggggcacgcaatgccagtggaattcaccatacccgcttgtctaccacggggtgcggcactccggagcccctggcggtag

SEQ ID NO: 243424 - DNA, 1401 bp, synthetic construct
  misc_feature 1..1401: note = Description of Artificial Sequence: Synthetic coding sequence
  source 1..1401: mol_type = other DNA
atgaagtccctcagcctgcttctggcagtggccctggggcttgctaccgcagttagtgcgggaccggcagtgatcgagtgctggttcgtggaagatgcctcagggaagggtctggcaaagaggccaggagccttactgctaaggcaaggccctggcgagccccctccaagacctgatctggaccccgagctgtatttgagcgtccacgatcccgcaggcgctctccaagcggcatttcgccgttacccgagaggcgcacctgcccctcactgcgaaatgtccaggttcgttccacttcccgcttccgccaagtgggcctctggactgaccccagcccagaactgtcctagggcactcgacggggcatggctgatggtgagcataagctccccagtgctgtcactttcctccctgctcaggccacaaccggaacctcaacaggagcccgtcctgatcactatggccacagttgagatgggcttccatcatgtgggccaggccgctctggaactgctcactagcgtcgtgctcactgtgctcactcataccccagcccctcgggttaggttagggcaggatgcccttctggatctgtcattcgcctacatgcccccaacatccgaagccgcaagtagcctggcgccagggccaccgccttttggactagaatggcggcgtcagcacctgggtaagggacacctgttactcgccgctacacccggtcttaacggacagatgcctgctgcccaggagggggctgttgcttttgccgcatgggacgacgacgagccctggggaccctggaccggcaacggaactttttggctcccaaccgtgcagcctttccaggagggcacatatctagccaccattcacctaccctatctacagggacaagttacactcgagctcgctgtctataaaccccctaaggtgtcactaatgccagccaccctggctcgtgcagcccctggtgaagctcctccagaactgctttgcctagtcagccacttctaccccagcggtgggctggaggttgaatgggagctgcggggaggaccaggagggaggagccagaaggctgaagggcaacgctggctgtccgccttgagacaccacagtgacggctcggtctctctgtccggccacctgcagccaccccctgtcactacagaacaacacggggcacggtatgcctgccgaatacatcaccctagtctccccgcttctggtcgatccgctgaggtgaccctagaagtagccggtctttctggacctagtcttgaagatagcgtcggtctatttctgtcagcttttctgctcctggggctcttcaaggcactcggttgggccgctgtgtatctctcaacctgtaaggactcaaagaagaaggccgagtag

SEQ ID NO: 243425 - DNA, 1086 bp, synthetic construct
  misc_feature 1..1086: note = Description of Artificial Sequence: Synthetic coding sequence
  source 1..1086: mol_type = other DNA
atgaagtccttgtccttgcttcttgccgtagcgcttggactggccactgccgtctccgctgggcctgcagtcatcgagtgctggttcgttgaggatgcttcgggcaagggcttggcaaagcgcccaggggctctcctgctgcgccagggcccaggcgagcctcccccacggccagatttggaccctgaactatatctgtccgtgcacgttgtactcacagtgctcacgcatactcctgccccacgggtacggttgggccaggatgctctgctggatcttagctttgcctatatgcctccaacctcggaggccgcaagcagccttgcgccaggtcctcctccgtttgggcttgagtggaggcgccaacaccttggaaaggggcatctgttgttggccgctacacctgggttaaacggccagatgcccgcagcccaggagggcgctgtggcctttgcagcttgggacgacgatgaaccatgggggccttggaccggcaatgggaccttttggctccctacagtccagccgtttcaagaaggtacctatctcgccaccatccacttaccctatctccagggacaggtgacacttgagctggccgtgtacaagccacctaaggtgagcctgatgccggctactctggccagagcagctcccggtgaagcgcctccagagctcctgtgtttggtcagccacttctatccgtctggcggactggaagtggagtgggagcttcgcggaggtccagggggaagatctcagaaagccgaaggccagcgctggctgagcgcccttcggcatcactcagatgggtctgtgtctctctctggccacctgcagcctcccccagtgaccacagaacagcacggggctcgctatgcctgtagaatccatcatccgtcactcccagccagcgggagaagtgcagaggtgacactggaggtagcgggactttctggtccttcactagaggattctgtgggcctttttctgagcgccttcctgctgcttggcctgttcaaagccctgggatgggctgccgtttacttgtcaacctgcaaagatagcaagaagaaagccgaatag

SEQ ID NO: 243426 - DNA, 1347 bp, synthetic construct
  misc_feature 1..1347: note = Description of Artificial Sequence: Synthetic coding sequence
  source 1..1347: mol_type = other DNA
atgaagagcctatctctgctcttagcggtggcactcggactcgccacggcagtgtcagctggacctgcagtgatcgagtgctggttcgttgaggacgcctcaggaaaaggccttgcaaaaaggcctggtgccctactcctccgacagggtcctggtgagccccctcctcggcctgatcttgatcctgagctttacctgtctgtccacgacccggctggcgcacttcaggcagcctttcggcgatatccacgaggtgcaccagcaccacattgtgagatgagtagattcgtcccgttacccgcaagcgcaaagtgggccagtgggctcacccctgcgcagaattgcccaagggccctggacggtgcgtggttaatggttagtatttctagccctgtgctgtctctgagctcgctgctgcgaccccaacccgagccccagcaggaaccggtcctgattaccatggctacagtagtgcttactgtgcttacccacacacctgcaccaagagtacgtttgggccaagacgctctacttgatttgtcctttgcttacatgccaccaacatccgaggccgcatcatcactggcaccaggcccaccaccttttggcctggagtggcgcagacagcacctcgggaagggccatctcttactggctgccacccccggactgaacggacagatgcccgctgcccaggagggcgcagtggccttcgccgcttgggacgacgatgagccatggggtccttggacaggaaatgggacgttttggcttccaacagtgcagccctttcaggaggggacctacctggcaacaatccaccttccatatctgcagggccaagtgacccttgagctggccgtttataagccaccgaaggtcagcctgatgcccgctactctggcgcgagcagcccctggagaggcacccccagagctgctctgcctggtttctcacttttaccctagtggcggactcgaggtcgagtgggaactccgcggaggcccaggtgggaggtcgcagaaggcagagggacagcgatggctctcagccttgaggcatcatagtgatggcagcgtgtcgctaagtggccacctgcagccccctcctgttacgactgaacagcacggcgctcggtacgcctgtaggatccaccaccccagcctaccggcttcaggtagaagcgctgaggtgaccttagaggtagctggcttaagcggccctagcctggaagactcggtggggctgtttttgagtgcttttctgctcctcggtctgtttaaggctctgggatgggctgctgtctacctttctacgtgcaaagattcaaaaaagcatgccacttag

SEQ ID NO: 243427 - DNA, 471 bp, synthetic construct
  misc_feature 1..471: note = Description of Artificial Sequence: Synthetic coding sequence
  source 1..471: mol_type = other DNA
atgaagtccctgagtctcctccttgccgtggccctgggactggccactgctgtgagcgctgggcctgccgtgatcgaatgttggttcgttgaagatgcctcagggaaaggcttggccaaaagacctggcgcattattattgaggcagggtccaggtgaacctcctcctagaccagacttggacccggagctgtatctcagtgtccacgatccggctggggctctacaggccgcatttcgacggtacccgaggggagcgccagctcctcattgtgagatgtcacgcttcgttccccttccggcttcagccaagtgggcatccggtctcaccccagctcaaaactgcccgagggcgcttgacggcgcatggctaatggtgtcaattagcagcatggggcacgcaatgcctgtggaattcaccatccctgcctgtctgcctcggggagcagccctgcgtagcccatggcgttag

SEQ ID NO: 243428 - DNA, 1086 bp, synthetic construct
  misc_feature 1..1086: note = Description of Artificial Sequence: Synthetic coding sequence
  source 1..1086: mol_type = other DNA
atgaagagcctctccctcctcctggctgtagccttagggctagcaaccgccgtgagtgctgggccagcagtcatcgagtgttggtttgtggaggacgcctcaggcaaaggccttgccaaacgcccaggcgctcttctcctacggcagggacccggtgagcctccgcctcggccagatcttgaccctgaattgtatcttagcgtgcacgtagtcctgaccgtactgacgcacacccctgccccacgcgtgcgtcttgggcaagatgcactcctcgacctgtcattcgcttacatgccccctacatccgaggcagcctccagtctggcaccaggccctccaccattcggactagaatggaggcgccagcacttaggaaaagggcatttgcttctcgccgcaactcccggtctgaacggccaaatgcccgctgcccaggaaggagccgtcgctttcgccgcttgggacgatgatgaaccttggggaccttggaccgggaacggaaccttctggctgccaagagtccaaccttttcaggaaggaacgtacctagcaacgatacacttaccctacttgcaggggcaggtcacgctcgagttagctgtgtataaaccccctaaggtgtcccttatgcccgctaccttagccagggcggctcccggagaggccccacctgagctcttgtgtctggtgtcccacttttacccatctggtggtctggaagttgagtgggaactccggggtggtcctggaggaaggtcacagaaagctgaaggccagagatggctatctgcactgcgacaccactcagatggtagcgtctcactttcaggtcatttgcaaccgcctcccgtcaccaccgagcagcacggggctcgttatgcatgtcgaattcaccacccctctctccctgctagcggccgtagtgccgaggtaaccttagaagtggctggcctgtcaggtccttccctggaagacagtgtggggctttttctgagtgccttcctgctgctcggcctgttcaaagccctcgggtgggcagccgtgtacttgtccacctgtaaagattccaagaagcacgctacttag

SEQ ID NO: 243429 - DNA, 1347 bp, synthetic construct
  misc_feature 1..1347: note = Description of Artificial Sequence: Synthetic coding sequence
  source 1..1347: mol_type = other DNA
atgaagtcactgtctttgctgctagctgtggccctgggcctagctacggcagtgtcagcagggcctgcggtgatcgagtgttggtttgtcgaggacgctagtggcaaaggactcgctaagaggcccggagctcttttgctcaggcagggaccaggcgaaccccctcccagacctgacctagatccagagctctatctgtccgtgcacgaccccgctggcgctcttcaggccgctttcagaagataccctcgaggagcacctgccccacactgcgagatgtctcgctttgtacccctgcctgcttccgccaagtgggcaagtggcctgaccccagctcagaattgtccacgcgcactggacggtgcatggctaatggtatcgatatcatcaccagtgctgagtctgagtagtttgctcagacctcaaccagagcctcagcaggaaccagtgctgatcacaatggccaccgtcgtcctgacagtcctaacccacactcccgctccccgagtacgactgggacaggatgcgttgctcgacctcagcttcgcatatatgcctcccacaagtgaggccgcatccagcttagccccaggccctcccccatttggtttggaatggcgaagacaacatctcggcaagggccacttgctccttgcagcaacccccggacttaatggccaaatgcccgctgcacaggaaggggcagtcgcctttgctgcctgggacgatgatgagccatggggaccgtggactggcaatgggaccttttggctccctagagtacagccatttcaagagggcacgtatctggctactatccacctcccatacctccaggggcaagtgacactcgagctggcggtttataagccgcctaaagtttcactgatgcccgcaacgctggcaagagctgccccaggagaggctccgcctgaactgttgtgccttgtgtcgcacttttacccctcaggcggacttgaggttgagtgggagctgcgcggtggccctggcggacgttcccagaaggcagagggacagaggtggcttagtgccctgaggcatcattctgatggatcggtgagcctgtccggtcacctgcagcctccacccgtgaccaccgagcagcatggagccaggtatgcatgtcgaatacatcaccccagtctgccagccagcggtagaagtgctgaagtgacgctcgaagttgctggtctgagcggtccgtctctcgaagacagtgtgggtctcttcctgagcgcctttctgcttctgggactctttaaggcactcgggtgggcagcagtgtacctaagtacctgtaaggatagtaagaagcacgccacatag

SEQ ID NO: 243430 - DNA, 1086 bp, synthetic construct
  misc_feature 1..1086: note = Description of Artificial Sequence: Synthetic coding sequence
  source 1..1086: mol_type = other DNA
atgaagagcctgtcgctgttgctggctgtggcactaggcctagcaaccgcagtgtcagcaggaccagcagtgatagagtgctggttcgtcgaggacgcctcaggtaaggggcttgccaaacgccctggcgcattgttgcttcggcagggcccaggagagcctcctccccgacctgacctagatcctgaactttatttgtctgtacacgtggtgttaactgtactgacccatacgccggctccccgagtgcggctggggcaggacgccctgttagatcttagcttcgcctatatgccaccgacgtctgaagccgctagcagccttgcaccaggccctcctcctttcggcctggagtggcgcagacagcatctgggcaagggccaccttctactggcagccacccctggactgaatggacagatgcccgcagcccaggagggcgcagtggcttttgccgcatgggacgacgatgaaccatggggcccttggacaggaaatgggaccttctggcttccacgtgttcagccttttcaggaaggcacatatctggccacgattcatctgccttatctgcagggacaggtgacgctcgaactcgctgtttacaagcctccaaaggtgtccttgatgcccgctactttggcccgagccgcacctggggaagctcccccagagctgctgtgtcttgtcagtcacttctacccaagcgggggactcgaggtggagtgggagctccgaggcggacccggaggaaggtcccagaaagccgaaggacagagatggctctcagcacttcgccatcacagcgacggatcagtgtctctgagtggccatttgcagcccccaccagtcacaactgagcagcatggcgcacggtacgcttgcaggattcaccacccctccctgccagcttccggtcggagcgcagaggtgacgttagaagtcgcaggtctcagcggtccgtccctcgaagacagtgtaggcttattccttagcgctttcctccttctgggactgttcaaagcccttggctgggccgctgtgtatctctcaacatgcaaagactccaagaagcatgccacatag

SEQ ID NO: 243431 - DNA, 471 bp, synthetic construct
  misc_feature 1..471: note = Description of Artificial Sequence: Synthetic coding sequence
  source 1..471: mol_type = other DNA
atgaagtcattaagcctcctcctggccgtggcgctcggcctcgccacagccgtgagcgcaggacccgctgtgatcgagtgttggtttgtggaggatgcgtccggaaaggggctggcaaagagaccaggtgctctgctcttgcgacagggtccaggcgagcctcctcccaggcccgacctggatcctgagctgtacctctcggtccatgatcccgcaggcgctctccaagccgctttcagaaggtacccccgtggcgcaccggcaccgcactgtgaaatgtctagattcgtccctctgccggctagcgctaagtgggcgtccggtcttacacctgcgcagaattgcccacgtgccctggacggggcatggctaatggtcagcatctctagcatgggacatgctatgcctgtagaatttacgatccctgcctgtctgccacgcggagcagctcttcgcagcccatggaggtag

SEQ ID NO: 243432 - DNA, 1347 bp, synthetic construct
  misc_feature 1..1347: note = Description of Artificial Sequence: Synthetic coding sequence
  source 1..1347: mol_type = other DNA
atgaaatcactatccctgcttctggctgtggctttgggactggctactgccgtgagtgcgggtccagctgtgatcgaatgttggtttgtagaagatgcctcaggtaaagggcttgcgaagagacccggagctctcctgctgcggcaagggccaggcgagcccccacctcggccagatctggacccagaactttacttatctgtgcacgaccccgctggagctcttcaggcggctttccgtaggtatccaagaggcgcaccggcaccccattgcgagatgtcccgttttgtgcccttgccagctagcgccaagtgggcctcaggtctcaccccagcacagaactgccctagggccttggacggagcctggctgatggtctccatctcaagcccggtgctgtctctttcatccttactacgccctcaacctgagccccagcaggaacctgtcctaatcacgatggctaccgtggtcttgactgttttaactcatacgccagccccacgcgtgcggctgggtcaggacgctttgttagatctgtcgttcgcttatatgccccctacaagcgaagccgcatcatccttagctccaggcccacctcccttcggtcttgaatggcgaagacagcacctgggcaaaggacacctgcttttggcggctactcccggtctgaatgggcaaatgcctgcagctcaggaaggcgctgtggccttcgccgcatgggatgatgatgagccatggggcccttggaccggcaatgggaccttttggttacctcgggtgcagccttttcaggagggaacatatctggccacgatccatttgccatatctgcagggccaggttacgttagaactggccgtatacaaacccccaaaggtgtctctaatgccagccacgctggccagggccgcaccgggtgaagcgcctccagaactattatgtctggtatcgcatttttatcctagcggcggtttagaagtggagtgggaacttagaggaggcccagggggtcgctcacagaaggccgaaggccagcggtggctaagtgcgctgagacaccactcagatggcagcgtgtctctgagcggacatctccagccgcctccggttaccactgagcaacacggagcgagatacgcctgccgcatacaccacccgtccctgcctgctagtggtagaagtgctgaagtgacactggaagttgccggattgagtgggccttcccttgaggatagcgttggattattcctctctgcctttctgctgctgggcctttttaaggctctcggatgggctgctgtctacttgtctacctgcaaggattctaaaaagcacgcaacgtag

SEQ ID NO: 243433 - DNA, 1086 bp, synthetic construct
  misc_feature 1..1086: note = Description of Artificial Sequence: Synthetic coding sequence
  source 1..1086: mol_type = other DNA
atgaagtccttgtcactgctactagccgttgccctgggactggcgaccgcagtctcagcaggaccagccgtgatcgaatgctggttcgttgaagatgcgagtggcaaaggcctggcaaaaagacccggagctctcctgctgcggcaaggaccaggagagcctccccctcgacctgacctggaccccgaactatacctgtcagtgcatgtcgtactgacagtactcactcatacccccgcaccgagggtgagactgggccaggacgctctgttggacctgtccttcgcctatatgcctccaacgtctgaagcggcatcttcactggccccaggaccccctccttttggacttgagtggagacgccagcacctgggaaaaggccaccttctccttgccgcaacacccggtctgaatggacagatgcccgctgctcaggaaggcgctgtggcttttgctgcatgggatgacgatgaaccttggggcccttggactggaaatggaacattttggcttcctacagttcaacccttccaggaagggacctatctggctaccatccacctaccatacttacagggtcaggtgaccctggaactggcagtgtacaaaccccctaaggtgtccctgatgcccgctacacttgcgagagcggcacccggagaagcgccacccgagctgctctgcctagtcagtcatttctatcccagcggaggccttgaggtcgaatgggaactgcggggaggcccaggtgggagatcccagaaggcggagggacaacgttggctgtccgcattacggcatcatagcgacgggagtgtttccttgtctggacaccttcagcctccacccgtcaccactgaacaacatggcgcacgatacgcctgccggattcaccatccgtccctcccagcctcagggaggagcgccgaagtgacactggaggtagcgggattgagtgggccaagtcttgaggactcggtcgggttgttcttgagcgcatttctcctgctaggccttttcaaagccctcggctgggctgcagtctacttatccacctgtaaggatagcaagaaaaaagcagagtag

SEQ ID NO: 243434 - DNA, 1347 bp, synthetic construct
  misc_feature 1..1347: note = Description of Artificial Sequence: Synthetic coding sequence
  source 1..1347: mol_type = other DNA
atgaagtccctgtccctgctgcttgccgtggccttgggtttggctactgctgtgtcggcaggccctgcagttatcgagtgctggttcgtcgaggatgcctcgggcaaaggccttgctaaacgtccgggtgctttgctgctgcgccagggaccaggtgagcctccacccaggccagacctcgaccccgagctgtatctgtcagttcatgatcccgctggcgcactacaggctgcttttcgccgataccccagaggcgctcccgctccacattgcgagatgagtcgattcgtgccattgccagcttctgccaagtgggcctctggacttacgcctgctcagaactgcccacgtgcacttgacggagcctggttgatggtaagcattagctcccccgtcctctccctttccagcctgctgcgacctcagccagagccccagcaggaaccggtgctgattacaatggctactgttgtcctgactgttcttacgcacacacccgcacccagagtaaggctagggcaggatgccctgctagatcttagctttgcctacatgccgcctacctccgaggccgcatcgtcattagctccaggacccccaccgttcggcctggaatggcgaaggcaacaccttgggaaaggccacctgctgcttgctgcgacacctggtcttaatggacagatgccggctgcacaagagggcgctgtcgcttttgcggcttgggacgatgatgagccctggggaccgtggaccgggaatgggacattttggctgccaagggtgcagccgttccaagagggaacatatctcgctactattcacttgccgtatctgcagggacaggtaacgctggagcttgccgtgtataagcctccaaaagtctcccttatgcctgccactctggcaagagccgcacccggagaggcgcctccagagctgttgtgtcttgtcagccacttttatcctagcggaggcttagaagtcgaatgggagctaaggggtggtccgggtgggaggagtcaaaaagccgaaggtcagagatggctctccgccctgcgtcaccacagcgacggttcagttagtcttagcggtcatctgcaaccccctccggtcactaccgaacagcacggtgcacgctacgcttgcagaatacatcacccttctctgcccgcatcaggccgttccgccgaagtcactctggaagtggcaggtctgtctggcccttctctcgaagatagcgtcgggttgtttttatccgcattcctgcttctcggtctgttcaaagcactgggctgggcggcagtgtacctgagcacttgtaaggactcgaagaagcacgcaacttag

SEQ ID NO: 243435 - DNA, 1086 bp, synthetic construct
  misc_feature 1..1086: note = Description of Artificial Sequence: Synthetic coding sequence
  source 1..1086: mol_type = other DNA
atgaagagccttagcttacttctcgcagtggcccttggcctcgccacagcagtgagcgcaggccctgccgtgatcgagtgctggttcgtggaggatgcaagcggaaagggactagccaagcggcctggcgctctcctcctacgccagggacccggagaacctcctccgaggccggacctggacccagagctctatctgagcgtccacgtggtccttaccgtcctgacccatacgccagcaccacgtgttcgcttaggccaggacgctctgctggacctgtcattcgcttacatgccgccaacctctgaggcggctagcagcctggccccagggcctccaccattcgggctggagtggcggaggcagcatttgggcaagggccacctcctcctagcagccacgcccggactgaacggacagatgcccgcagctcaggagggcgcagtcgcatttgcggcttgggacgatgacgaaccatggggcccatggacaggcaacggaaccttttggctccctcgcgtgcaaccatttcaggaggggacctacctcgctaccatccatttgccatatctgcaaggccaagttactttggagctggccgtttataagcctccaaaggtcagtcttatgcccgctacacttgctcgggctgctcccggtgaggcgcctcccgagttactctgcctggtcagccatttttacccgtctggtggccttgaggtggaatgggaattaagaggagggccaggaggcaggagccaaaaagctgaagggcaacggtggttgtccgccctgaggcatcactctgatggtagcgtgagtctgagcggtcacctgcagcctcccccagtgactaccgagcaacatggcgcacgatatgcttgcaggattcatcatccatctttacccgcttccggaagaagtgcagaggtaactttagaggtagcgggtctgtctggacccagtctagaggacagcgtcggactgtttctatccgcctttctgctccttggtctgttcaaggctctggggtgggctgccgtgtatctttcaacgtgtaaagatagcaaaaagcatgcgacctag

SEQ ID NO: 243436 - DNA, 2037 bp, synthetic construct
  misc_feature 1..2037: note = Description of Artificial Sequence: Synthetic coding sequence
  source 1..2037: mol_type = other DNA
atgctgctggaagctgagaggaggaggggcggtggcgctgcaggggctagactgctggagcggtacagaagagtccctggcgtgcgggcactgagagcggactcggttcttattatcgagacagtgcctggatttccccctgcaccacccgctcccggtgctgcccagataagggccgctgaggtgttagtgtatggggcaccgccaggaagggttagtaggctcctggagaggttcgaccctccagcggcacctcggcgaaggggctctcctgaaagagctaggcctcctcctcctccccctcccccagcccctcctcgaccccctcctgccgctccctctccacctgccgctccaggccctaggggaggcggtgcctcccctggtgccagaaggtccgattttctccagaagactggaagcaatagctttacagttcacccacgagggcttcacagaggcgctggcgcaaggctgttgtccaacggacatagcgcacctgaaccacgtgcagggccagccaatcgtcttgcgggaagccccccaggctctggccagtggaaacccaaggtggagtcgggcgatccctccctacatcctcccccttctcctggaactccgtctgcaaccccagcgagtcccccagcatccgccactccctctcagaggcagtgcgtcagcgcggcaacgtctaccaatgacagcttcgaaatcaggcctgcccctaaacccgtaatggaaaccattcccctgggagatctacaagcgagagctctggcttccctgagggctaactcccgtaattcttttatggtgattccaaagtccaaggcaagtggcgcaccaccacccgaagggaggcagagcgtagaactgcccaaaggcgatctcggcccagcatccccgtctcaggagctgggctcccaacctgtgccagggggagacggagcacccgctttgggaaagagcccactcgaggttgaagcccagtgggcggtcgaagagggcgcatgcccccgaactgcaacagcactcgctgaccgggctatccgatggcagaggccctcctcccccccaccatttctgccggctgcatcagaggaagccgaacccgctgagggattaagggtgccagggctcgcaaagaacagccgcgagtatgtgcgccctgggctgccagtgacctttattgatgaggttgactcggaagaggctccccaagctgcgaaactgccttatctgccccatccagcccgacctttacaccctgctagaccaggttgcgtcgcagagctccaacccagaggctcaaacaccttcactgtcgtgcccaaacgaaaaccgggtacactgcaggaccagcatttttcacaggccaatagagagccgcgaccacgggaggctgaagaggaagaagcatcttgcctactgggccctaccctgaaaaaacgctaccccaccgttcacgaaatcgaagtgattggtggttaccttgcacttcagaaaagctgcctgaccaaggccggaagcagccgcaagaaaatgaagatcagttttaacgataagtctctgcagaccacattcgagtacccctccgaatcaagtcttgagcaggaagaggaggtggaccagcaggaggaagaggaggaagaggaggaggaggaggaagaagaggaagaagggtcaggcagtgaagagaaaccattcgctcttttcctacctcgcgcaacatttgtgagtagtgtgcgccctgagagtagtcgattaccggaaggttctagcggtctgagcagctacacccctaagcactcagttgcattcagcaagtggcaggagcaggcgctggagcaggcacctcgcgaagcagagcccccaccggttgaggctatggttagatgcgggggagtggagaggtggggagagagcgacacacgtgcctcaccgtgcgtgcacatcctcagttctcactttcaacttaccccggcttctcagaatgacctgagcgacttccggagtgagcctgcactgtatttctag

SEQ ID NO: 243437 - DNA, 2136 bp, synthetic construct
  misc_feature 1..2136: note = Description of Artificial Sequence: Synthetic coding sequence
  source 1..2136: mol_type = other DNA
atggccgcactcgggagaccaggctcagggcctagagcagcagtcccagcttggaagcgggaaattctggaacgaaagagagctaaattagccgctctaggcggaggagcaggacctggcgctgccgaaccggaacagagagttttggccgaatctctgggcccactgagagagaacccttttatgcttctggaagcagaacggaggcggggagggggagcggctggcgctagactgctggagcgttaccgcagggtgcctggagtcagggccctaagggcagatagcgtgctgattatagaaaccgtccccggatttcctcccgcacctccagctccaggcgctgcccagatccgcgctgcagaagttctggtgtatggcgcaccaccaggacgcgtgagccggctccttgaacgttttgaccccccagctgctccgagacgcagggggtctcccgagagggcgcgtccgccacccccacctccccctcctgccccaccaaggcccccaccggcagccccttctcctccggcagcaccaggcccacggggagggggagcaagccccggtgccagaaggtctgacttccttcagaagactgggtccaactctttcacagtgcatccgagggggctgcatcgcggagcaggcgctcggctccttagcaatgggcacagtgcacccgagccacgggctggacccgctaatagattggccggatcacctcccggtagcggccagtggaagccgaaggtcgagtctggtgatcctagcctgcatccccctccgagccctggaactccatccgcaactccggcaagcccccctgcgtccgctaccccgagtcagcggcagtgtgtttctgccgcaactagcacgaatgattcgtttgaaatacgcccagcccctaaacctgttatggagacaataccacttggagacttacaggcaagggctctggcctccttaagagccaactcccgtaactcatttatggtgatcccaaaaagtaaggcttctggcgctccacctccggaggggcgacagtcagtcgaactgcccaaaggagacctgggccctgctagcccctcgcaagaactgggcagtcagcctgtccctggcggtgatggagccccagccctgggaaagagtccgctcgaggtggaagcacagtgggcagtggaagagggggcttgccctagaactgccaccgccctcgccgaccgcgcaattcggtggcagcgtcccagcagtcccccacctttcctacctgcagcgagcgaagaggccgaacctgcggaaggcttaagagttccaggccttgccaaaaattcaagggaatacgttaggcccggactccctgtgaccttcatcgatgaggttgattctgaggaggccccacaagcggcaaaacttccttacctgcctcatcccgcaaggcctctccacccggcaagaccaggatgcgtggctgaactacagcctcgtggcagcaacaccttcactgtcgtcccaaagcggaaacccggaaccctgcaggatcagcacttttcccaggctaacagagagccacgacctagggaggccgaggaggaagaggctagctgtttgttgggccctacgttaaagaagaggtatccaaccgtccacgaaatagaggtcattgggggataccttgctttgcagaaatcatgcctcactaaagctggaagttccagaaagaagatgaaaattagctttaatgataagtctctgcaaaccactttcgaatacccctcagaaagttctcttgagcaggaagaggaggtggatcagcaggaggaagaagaagaagaggaagaggaagaggaagaagaggaagaggggtcagggtccgaggagaagccgtttgccctgttcctgcctagggcgaccttcgtttcgtctgtgagacccgaatccagtaggctgccagagggctcatcaggcctcagtagttacacccccaaacacagtgtggccttcagcaagtggcaggaacaagctctggaacaagcacctagggaggccgagcctccgccagtggaggcaatgctgacaccagcgtcccagaatgacctgtccgatttcaggtccgagcccgcactgtatttttag

SEQ ID NO: 243438 - DNA, 4866 bp, synthetic construct
  misc_feature 1..4866: note = Description of Artificial Sequence: Synthetic coding sequence
  source 1..4866: mol_type = other DNA
atggagtgggttcttgccgaagcattgttaagtcagtcaagggaccctagagccctgctgggagccctctgtcagggagaggcgtcagccgagagggttgaaacgctcaggttccttctccagagactggaggacgaagaagctcgcggtagtggaggggctggggcattgccggaagcggctagagaggttgcggctggataccttgtgcctctccttcgatccctgcgcggacgccctgccggagggcctgacccttccctgcagcctcgtcacagacgacgagtactgcgggctgccggagcagccctacggtcttgtgtgcgattagcaggcaggcctcagctggccgcagccttagctgaagaggcactgcgtgacctgctggcagggtggcgggctcctggcgctgaagcagcggtggaagtgctggccgcagtcgggccttgtctgaggccccgagaggacgggcctctgctggagcgcgtagcaggaaccgctgtggctttggcactagggggaggaggtgatggtgacgaggcaggccctgctgaagatgctgctgccctggtagccggtaggctcctccccgtgctcgtccagtgtgggggagctgccctgagagccgtgtggggcggactggccgctcctggcgcatcattgggctcagggagagtggaagaaaagttgctcgttctgagcgcactggcagagaaactcttgccagagccagggggtgacagggccaggggggctcgggaagccggacccgacgcacgtcgctgttggaggttttggcgcaccgtccaggctggcctgggccaggcagatgcgttgaccaggaagcgcgcacggtacctgcttcagcgggctgtcgaggtgagcgccgagcttggggctgactgtacctgcggaccccaggagggaaacggaccctcccttttctggtggagcgagaggaaaaaagatgagctgcttaagttctgggagaactacattcttatcatggagacccttgaggggaatcagattcatgttatcaaacctgtcctgcccaagctcaacaacctttttgaatatgctgtgagcgaagagaacggctgctggctttttcatcccagttggcatatgtgtatctacaaacggatgttcgagtccgagaacaaaattttgagcaaggagggtgttatccactttttggagctgtacgaaacaaagatcctccccttctctcccgaattctcagagtttataatcggccctctcatggacgctctttctgagagcagtctgtatagtcggtccccaggacagcctataggctcttgttcccctttggggctgaagctgcaaaagttcctggtaacatacatctcgctcttgccagaagaaatcaagagctccttcctgttgaagttcatccgcaagatgacttccaggcactggtgtgctgttccaatcctcttcctgtccaaggccctggctaacgtgcccagacacaaggctctgggcatcgacggcttgcttgccctcagggacgtgattcactgtactatgatcacacaccagattttgcttcgcggtgctgcccagtgttacttgctgcagacagcgatgaacctgttagacgtggagaaagtctctttatccgacgtgtctaccttcctgatgagtttgaggcaggaggagtccctcgggcgtggaacgagcctctggaccgaactttgcgattggctgagggtcaatgagagttattttaagccgagcccgacctgctctagcataggtttacacaaaacttccttaaacgcgtacgttaagtcaatcgtccaagaatacgttaagtcatctgcctgggaaactggagagaactgctttatgcccgactggttcgaggcgaaactagtgtccctcatggtgttgctggcagtggacgtggaaggcatgaaaacacagtactctgggaaacagcgcaccgaaaatgttctgcgaatttttcttgacccacttctggatgtccttatgaagttttcaacgaacgcttatatgcccctcctgaaaaccgatcgttgtctgcaacttctactgaaactcctgaacacctgccgattgaaaggcagtagcgcccaggatgatgaagtgtcaaccgtgttacagaatttcttcatgagcaccaccgagagcatctcggaattcattctgcggagactgactatgaatgagctgaactcggtcagcgatctcgatcggtgtcacttgtacttgatggtgctgactgagctgattaacctccatctcaaggtgggatggaaaagaggcaaccccatatggagagttataagtcttcttaagaatgcctcaattcagcatctccaggagatggattcaggacaagagccaaccgtgggctcccaaattcaacgggtcgtttccatggctgctctggcgatggtgtgtgaggccatagaccagaagccagagttgcagctggatagtttgcatgcaggcccattggagagtttcttgagttcactgcagctaaatcagacgttgcagaaacctcacgctgaggagcagtcaagctatgctcatcccctagagtgctcgagcgtgttagaggagtcaagtagttcccagggatggggcaagatcgtcgcacaatatatccacgaccagtgggtctgcttaagtttcttgctgaaaaaataccacacccttataccaacaacaggctcagagattttagagccgtttctgcccgctgtgcagatgccgatcaggaccttacagtccgcactggaggcgttgaccgtgctcagcagcgatcaggtcttaccagtgttccactgcctcaaggtcttggttcctaaattgctcacctcctcagaaagcctgtgcatagagtcattcgatatggcatggaagataatttcttcactgtccaacacacagttgattttctgggctaatttgaaagcttttgttcagttcgtattcgataacaaggttttaaccatcgcagctaaaatcaagggacaggcttatttcaagatcaaagagattatgtacaagatcatcgagatgagcgccatcaaaacaggcgttttcaacaccctgatcagctactgttgccagtcctggattgtcagcgcttcgaacgtatcacagggcagcctgtcttccgctaagaattactccgaactgatattagaggcctgtatctttggcacagtctttcggcgtgaccagcgccttgtacaagatgtccagactttcatagagaacctcggtcatgactgcgcagcaaacattgtcatggaaaatacgaaaagggaagaccactacgttaggatctgtgcagtgaagttcctctgcctgttggatgggagcaatatgtcccacaaactgttcatagaagaccttgctatcaaactactggacaaggatgagctggtctcgaaatccaagaagcgatactacgtcaacagccttcagcaccgggtcaagaacagggtgtggcaaaccctccttgttctgtttcctcgtctagaccaaaactttctcaacggtattatcgacagaatcttccaggccggtttcacgaacaaccaagcatctatcaaatactttattgagtggatcatcatccttatcctacacaaattcccccagtttttacctaagttctgggactgtttctcctatggtgaggagaatctgaagacttccatctgcacttttctcgcagtgctttcccatctggatataattacccagaacattccagagaagaaactgattctcaagcaggcccttatcgttgtcctgcagtggtgcttcaatcataacttcagcgtcagactgtatgcattggtcgccctcaaaaaactctggaccgtttgcaaggtgctgtcagtcgaagaatttgacgccctcaccccagtcattgagtcatcactgcaccaggtcgaatctatgcatggggcaggaaatgccaagaaaaattggcagcgcatccaagagcactttttcttcgcgacattccatccattgaaggactattgtctcgagaccatattctatattctcccccgactcagcggactgatcgaggacgagtggatcacaattgataagtttacccgattcacagatgtgccgctggccgcaggatttcagtggtatctttctcagactcagctttcaaaactgaagcccggtgactggtctcagcaagacatcggcaccaatctcgtcgaggccgataaccaggcggaatggacagacgtccagaaaaagataatcccatggaattcgcgtgtgtctgacctggacctggagctgctgttccaagaccgagcagccagactggggaaatcgatctcccggctgatcgtcgtcgcaagtttgatcgataaacccacaaacctgggcggactatgcaggacatgcgaagtctttggagcgagcgtgcttgttgttggttctctgcagtgcatttcggataaacagttccagcacttgtcagtttctgccgagcaatggctgcccttggtggaggttaaacctccacagctgattgactacttgcagcaaaagaagacagagggatacactatcataggggtggaacagaccgccaaatctctagatctcacccagtattgctttccggaaaaatcactgttgcttcttggcaatgaacgagagggcatacctgccaatcttatccaacaactggatgtttgcgtggaaattccccagcagggcattatcaggagtcttaatgtgcacgtgagcggggcactcttgatttgggagtacactcgccagcagctgttgagccatggtgacaccaaaccctag

SEQ ID NO: 243439 - DNA, 1101 bp, synthetic construct
  misc_feature 1..1101: note = Description of Artificial Sequence: Synthetic coding sequence
  source 1..1101: mol_type = other DNA
atgtccgaggaggagcagggcagcgggacgactaccgggtgtggccttccttcaattgaacagatgttggcagctaacccaggtaaaactccaatcagcttgctccaggaatatgggacacgcatcggtaagacccctgtctacgatcttctaaaggcggaggggcaggcacatcagcccaatttcactttcagagtaaccgtgggagatactagctgcaccggacagggcccatctaagaaggccgcaaagcataaagcagccgaagtggccctcaagcatttgaaaggtggtagcatgttagaacccgctctcgaggacagcagcagcttcagccctctggatagctcgctgcccgaggacatccctgtcttcacagctgccgcagccgctacccccgtgccatccgttgttctcaccagaagcccccctatggagctgcagccaccggtttcgccacagcagtccgagtgcaaccccgttggcgctctgcaggagcttgttgtgcagaagggatggagactgccagagtacactgttacccaggagagtgggccagcccaccgaaaggaatttaccatgacttgtagagttgagcgttttatagagattggaagcggaaccagcaaaaaactggccaagagaaatgcagcagcgaaaatgctgctgcgggtacatacagtgcccctggatgcaagagacggcaacgaggttgagcccgacgacgatcactttagcattggggtggggagtcgcctggatggcttaaggaaccggggaccagggtgtacctgggatagcctgcgtaattctgtgggagaaaagatcctgagcctccgcagctgttctcttgggagcttgggggctctgggtccggcttgctgccgcgtgctttccgaactgtcagaagaacaggcattccacgtgagctatcttgacatcgaagagcttagtctgagtggtctgtgccagtgtcttgtcgaactcagcacacagccagccacggtctgccacggtagcgctactacaagagaggccgctcgtggagaagcggcacggagagccctccaatacctaaaaataatggccggaagcaagtag

SEQ ID NO: 243440 - DNA, 1038 bp, synthetic construct
  misc_feature 1..1038: note = Description of Artificial Sequence: Synthetic coding sequence
  source 1..1038: mol_type = other DNA
atgttagcggcaaacccaggcaagactcccattagcctacttcaggaatacggcaccaggattggtaaaactcctgtgtatgatcttcttaaggctgagggacaagcgcaccagcccaattttacttttcgggttacggttggcgatacaagttgtactggacagggtccaagcaagaaggccgctaagcataaggcagccgaggtggcactcaaacatttgaagggcggaagcatgcttgagcccgctcttgaagattcatcatccttttcgcctctggactctagcctgcctgaggacatacctgtctttacagctgccgctgcggctacccctgtcccttccgtcgtgctgactcgttctcctccgatggaactccagcctccggtctctccccaacaaagcgagtgcaatcccgtgggagccctccaggaattggtcgtgcagaaaggctggaggctcccagagtacaccgtgactcaggagtcagggccagcacatcgtaaagaattcacaatgacatgcagagtggagagatttatagaaatcggcagcggtacttccaagaaacttgctaagagaaacgcagctgcgaaaatgttgcttcgcgttcatacagtgcctctggacgccagggatggtaatgaggtcgagcccgacgacgatcatttcagcatcggtgttggctctcggctcgatgggcttcggaatcggggacctggatgtacatgggatagcctgcggaactctgtgggcgagaagattttaagtttgcgctcttgttcactgggctccctcggagccctgggaccggcatgttgccgcgtgctatccgagctgtcggaggagcaggcctttcacgtgtcctacctggacatcgaggaactttcgctcagtggattgtgtcagtgccttgtcgagctgtccacccaacctgcgacagtctgtcacggaagcgctaccaccagggaggccgcaaggggagaggctgcgcgacgagcgctgcagtacctcaagatcatggccggtagcaaatag

SEQ ID NO: 243441 - DNA, 1038 bp, synthetic construct
  misc_feature 1..1038: note = Description of Artificial Sequence: Synthetic coding sequence
  source 1..1038: mol_type = other DNA
atgctggccgctaatcccggaaaaaccccaattagtctgctgcaagagtacgggactcgaataggtaagacacccgtgtacgatctgctgaaagccgaggggcaagctcatcagcctaattttacttttcgtgtaacagtgggggacacctcgtgcacaggccagggccctagtaagaaggcagcaaaacataaagcagctgaagtcgccctgaagcaccttaaggggggaagcatgctggaacctgcattggaagacagctcctctttctccccactagattcttccctgcccgaggacatcccggtcttcacggcagcggctgctgctacacctgtgccatcagttgtactgacgcgatccccccctatggagctgcagcctcctgtgtctccccagcagtctgagtgcaacccggttggagccctccaagagctggtcgtgcagaaaggctggcggctccccgaatatactgtcacgcaagagtcagggcctgcccaccgcaaggaatttaccatgacgtgccgagttgaaaggtttatagagattggaagcgggacaagcaagaagcttgccaaacgcaacgcggctgccaagatgctactccgtgttcatacggtgcctctggacgctcgggatggaaacgaggttgaaccagacgacgatcacttctctattggggttggttctcgcctggacgggctgaggaacagaggcccagggtgcacctgggacagcctcaggaattcagtgggggagaagatcctgtctttacgcagttgttctctgggctcactgggagcacttggcccagcatgctgtcgtgtgttatccgagttgagcgaagagcaggccttccatgtgtcatatctcgatatagaggaactttctttgagtggactttgtcagtgcctggtggaactatccacacaacctgctactgtgtgtcatggctctgccacaacaagagaagccgctcgcggagaagccgctagaagagcactgcaatatctgaaaatcatggcaggatctaagtag

SEQ ID NO: 243442 - DNA, 1245 bp, synthetic construct
  misc_feature 1..1245: note = Description of Artificial Sequence: Synthetic coding sequence
  source 1..1245: mol_type = other DNA
atgagcgagtatattcgggtgactgaggacgagaacgatgagccgatagaaatcccttccgaagatgacggtacggttcttctttcaactgtaacggctcagttcccaggggcatgtggtctgagataccggaatccggtgagtcagtgcatgcgcggagtccggctggtagagggcatcctgcacgcgccagacgctggctggggcaatcttgtgtacgttgtgaactatcctaaagataacaagcggaagatggatgagacagacgctagctctgccgttaaagtgaaaagggccgtccagaagacctccgacctgatcgttctcggcttgccctggaagaccacagagcaggatttgaaagagtactttagcaccttcggggaggttttaatggtgcaggtgaagaaggatctaaagaccggacacagtaagggatttgggttcgtaaggttcaccgaatatgagacacaggtcaaggtcatgtcgcaacggcatatgatcgacggacgctggtgtgattgcaagctacctaatagtaagcagagtcaggacgaaccactgcgatcacggaaagtttttgttggacggtgcacagaagacatgaccgaggatgagttgcgtgaattctttagccagtacggggacgtaatggatgtgttcatccccaaacctttcagggccttcgcctttgttaccttcgccgacgaccagatagctcagtcgctctgcggagaggacctgataattaagggaatcagcgtgcacattagcaatgccgagcctaaacacaatagcaatcgccagctggagcgttccggccgatttgggggtaatccaggtggctttggcaaccagggcggatttgggaacagtcgcggagggggtgccggactcgggaataatcaggggtcaaatatgggcggaggcatgaatttcggggcattttctataaaccctgctatgatggcagccgcacaggctgcactgcagtcgtcttggggcatgatgggcatgctagccagtcaacagaatcagtctgggcctagcgggaataaccagaaccagggaaatatgcagagagagcctaaccaggcttttggctctggaaataattcttattcaggctctaatagcggagccgctatcggatggggatccgcgtccaatgccggttcagggtccgggtttaatgggggatttggaagctctatggacagcaagtcctcagggtggggcatgtag

SEQ ID NO: 243443 - DNA, 888 bp, synthetic construct
  misc_feature 1..888: note = Description of Artificial Sequence: Synthetic coding sequence
  source 1..888: mol_type = other DNA
atgagcgaatacattagagtcaccgaggacgagaacgacgagccaatcgaaatccctagcgaggatgatggaacagtcttgctgagcactgtgacagctcagtttcccggtgcctgtggtctgcgctacaggaatcccgtttcacagtgcatgaggggcgtcaggcttgtggaggggattttgcacgctccagatgcaggctggggcaatttggtgtacgttgttaattatcccaaagacaataaacggaagatggatgagacggacgcctcttctgcagtgaaggtgaaaagagccgtgcaaaagacaagtgacctgatcgtgctgggactgccttggaagacaaccgagcaggatctgaaggagtatttcagcacattcggggaagttctcatggtacaagtcaagaaagatttgaagactgggcactccaaaggctttggttttgtgcgcttcaccgaatacgagacgcaagtgaaagtcatgtcacaacggcatatgattgatggtagatggtgcgactgtaaactgccaaatagtaagcagtctcaggacgagcctctgcgcagccggaaggtgtttgtgggaaggtgcacagaagacatgacagaggatgaattacgcgaatttttcagccagtacggcgatgtcatggacgtgttcatccccaagccgttccgcgcttttgccttcgtgacgtttgcagatgatcagatcgcccaatcattgtgtggggaggacctcataattaagggaatcagtgtacacatttctaacgcagagccaaaacataatagcaacagacaactcgagaggtctggcagatttggcgtgcacttgataagtaatgtttacgggagatccacaagtttgaaagttgttctctag

SEQ ID NO: 243444 - DNA, 897 bp, synthetic construct
  misc_feature 1..897: note = Description of Artificial Sequence: Synthetic coding sequence
  source 1..897: mol_type = other DNA
atgcctcagatgctggccggagaaatttggtgtatgctgtccacgattcagaaggttaagaaagatctgaagaccggacatagcaaggggtttggcttcgtccgattcacagaatatgagactcaggtcaaggtgatgagccagcgacacatgatagacggtaggtggtgtgattgcaagctgccgaacagtaagcagagtcaggacgagccgctgagatccagaaaggtattcgtaggtaggtgcaccgaggatatgaccgaagacgagcttcgtgagtttttcagtcagtatggggacgtgatggatgtgtttatacccaagccctttcgggcttttgcatttgtgacgttcgcagacgatcagattgcccagtcactatgtggggaagacctcattatcaaagggatttccgtccacatatccaacgccgagccaaagcacaattcgaatagacagctggaaaggtccggacggtttggcggaaacccaggcggattcggaaatcaggggggattcggaaattcaaggggcggaggagcaggccttggcaacaatcaggggtccaatatgggcggtgggatgaattttggtgcattcagcatcaaccccgcaatgatggcggctgcccaggctgccctgcagagcagctggggtatgatgggtatgctggcctcacaacaaaaccaatcaggaccatcaggaaataaccaaaatcagggcaatatgcagcgggagccaaatcaggctttcgggagcgggaataattcatattctggatcaaacagcggtgcagccatcggctggggttcagcaagcaatgccggaagcggaagtggcttcaacggcggtttcggaagctctatggactcaaagagctcggggtggggaatgtag

SEQ ID NO: 243445 - DNA, 1533 bp, synthetic construct
  misc_feature 1..1533: note = Description of Artificial Sequence: Synthetic coding sequence
  source 1..1533: mol_type = other DNA
atggcagccgacagcgacgacggagccgtgtccgccccagcggcaagcgatggcggagtcagtaagtctactacgagcggcgaagagctagttgtgcaggtaccagtcgtggacgtgcagtccaacaattttaaagagatgtggccatcgctactgctggcgatcaagaccgcaaactttgttgcggtagacacggagctatccggactgggggacaggaaatccctcctcaaccagtgtatcgaagaaaggtacaaagcagtgtgccatgccgcacgaaccagatctatactcagtctgggcctggcttgcttcaaaaggcagccagataagggggaacacagctacctggcgcaggtgtttaaccttactctgctatgcatggaggagtatgttatcgagccgaagagcgtccagtttttgatccagcatggcttcaactttaatcagcagtatgcccagggaattccctatcacaagggaaacgacaagggagatgagagccagtcacaatcagtaaggaccctattcctggagctgatccgcgctcgacgaccgctggtgctgcacaacggccttattgatctggtgtttctgtaccaaaatttttacgcccacttgcccgagtcactggggaccttcaccgcggatctgtgcgagatgtttccggcaggaatttacgacacaaagtacgcagcggagttccacgcacgattcgtggcgtcctacctggagtatgcttttcgcaaatgcgagagggaaaatggaaaacagagggcagccggatctccacacctgactctggaattctgcaactatccttcgagtatgcgggaccacatcgactatcggtgctgtttgcccccagccacacataggccacatcctacttcgatttgtgacaacttttctgcctacggatggtgtccattgggaccacagtgtccacaatctcatgatatcgatcttataatagacacagacgaagctgctgctgaggataaaagaaggaggagacgcagacgcgagaaacgcaagagagccttgttgaatctgccaggcacccagacctccggagaggctaaggatggccctccaaaaaagcaggtgtgtggagattcaatcaagccagaggagacagagcaggaagtggccgcagatgagaccagaaacctgccgcattcaaaacagggaaacaaaaatgatctggagatgggaatcaaggccgcacgcccagagattgccgatcgcgcaacctccgaggtgccagggagccaggctagtcccaatcccgtgcctggagacgggctgcatagggctggttttgacgcctttatgacgggctatgtaatggcttatgtggaggtgtcccaggggccacaaccttgttcctcagggccatggttacctgagtgccacaacaaggtatatctttccggtaaggccgtacctttgacagttgccaaatcacagttttcccggtctagtaaagcgcataatcaaaaaatgaagttgacctggggctcttcctag

SEQ ID NO: 243446 - DNA, 1293 bp, synthetic construct
  misc_feature 1..1293: note = Description of Artificial Sequence: Synthetic coding sequence
  source 1..1293: mol_type = other DNA
atggccgcagatagcgacgacggggctgtatcagccccagccgcatccgatggggctgagtgggcctggggtcaagaggagtttgccgaacctggtgaacactcctacttggcccaagtgtttaacctaacgcttctttgcatggaggaatacgtaatcgaacccaagagcgtccagtttctgattcaacatgggttcaacttcaaccagcagtatgcccaaggaatcccttaccacaaagggaatgacaagggcgacgagagccagtctcaatctgtgcgcacactcttcctggagttaattagagcaaggcgccctctcgtgctgcacaacgggctaatcgacctagtgtttctttaccaaaatttctacgctcatctccctgaatccctgggcaccttcactgctgatttatgtgagatgttccctgcaggcatctacgacacaaagtacgccgcagagttccatgcacgttttgtggccagttacttagaatatgctttcagaaagtgcgaacgcgagaacgggaaacaacgtgcagcaggcagtccgcacctgacccttgaattctgcaattacccttccagcatgcgggaccacattgactacaggtgttgtctgcctcccgcaacccacagacctcaccccacgtcaatctgtgacaatttcagcgcatatggctggtgcccccttggcccacaatgtccccaatcccacgacatcgatctgataattgataccgacgaggctgcggcagaagataagcggagacgtcggagaaggcgtgagaaacgcaaacgcgcactcctgaaccttccaggtactcagacgtctggcgaagccaaggatggtccaccaaagaagcaggtctgcggtgactcaattaagcctgaagagacagaacaggaagtggccgctgacgaaacgcgcaatctgcctcacagcaagcagggcaataaaaatgatctggagatgggcattaaggccgctagacctgagatcgccgatagggctacttctgaggtcccgggaagccaagcttcaccaaatcccgtgccgggtgacggattacatcgtgctgggttcgacgccttcatgactgggtacgtcatggcatatgtggaggttagccagggccctcagccatgtagcagtggaccctggctgccagaatgtcacaataaggtatatctgtcagggaaggcagtgcctcttaccgtggctaagagccagttcagcagatcctccaaagcacataatcagaagatgaaattaacctggggctcatcttag

SEQ ID NO: 243447 - DNA, 1263 bp, synthetic construct
  misc_feature 1..1263: note = Description of Artificial Sequence: Synthetic coding sequence
  source 1..1263: mol_type = other DNA
atgacaatggagaagggaatgagctccggcgaaggcctgccaagccggtcaagccaggttagtgccggaaagatcacggccaaggaactcgagacaaaacagtcctataaggaaaagcgcggaggattcgtccttgtacatgccggtgctggctaccacagtgagtctaaagccaaagagtataagcacgtatgtaagagagcttgccaaaaggcaatcgagaaattgcaggctggagccctcgcaacggacgctgttacagctgccttggtggaactggaggatagcccattcactaacgccggtatgggctccaatctaaatctcctcggcgaaatcgagtgcgacgcctctatcatggatgggaagagcctgaattttggggcagttggggctctgtctggaataaagaaccccgtcagcgttgccaatagacttctgtgcgagggccagaaaggaaaactgtcggctggccgaatcccaccttgcttcctcgtgggggaaggcgcatacaggtgggctgtcgaccacggtatccccagctgccctcccaatatcatgacaacacggttcagcttagcagccttcaagcggaataagagaaagctggagctggccgagagagtggacaccgattttatgcagcttaagaagcggcgtcagtccagcgagaaagagaacgatagcggaacactcgacacggtcggagccgtggtcgtggaccacgagggcaatgtagccgctgcagtgagctctggaggcctcgcactcaagcacccaggcagagtgggccaggccgctctgtatgggtgtggctgctgggcagagaataccggggctcataacccatattccacagctgtatcgacttctgggtgtggcgaacacctcgtgaggactatcctcgcaagagaatgtagccatgcacttcaggctgaggacgcgcatcaggcgctactggaaaccatgcagaataagttcatctcttcccctttcctcgcctctgaagatggggtgctgggcggagtaatcgtgttgaggtcttgtagatgtagcgcagagcctgactcctcccaaaacaagcaaacactactggtagagtttctttggtcccacaccactgagtcaatgtgtgtgggttatatgtctgctcaggacggtaaggcaaagactcatatttcacggttgcctccaggcgctgtagctggccagtcagtggccatagagggtggcgtatgtcggctcgaatcccctgtcaactag

SEQ ID NO: 243448 - DNA, 918 bp, synthetic construct
  misc_feature 1..918: note = Description of Artificial Sequence: Synthetic coding sequence
  source 1..918: mol_type = other DNA
atgaccatggagaaagggatgtcgtccggcgagggcctcccttcgcgaagctcccaggtcagcgccggtaagattacagccaaagagctggagaccaaacagagctacaaagagaaaaggggaggattcgtgcttgttcatgccggagccggataccactccgagagcaaggctaaggagtacaaacatgtctgcaaacgcgcttgccagaaagatagtccattcacaaacgcaggaatgggttccaacctgaacttgcttggggaaatcgaatgcgatgcctccataatggatgggaagagcctgaacttcggcgcagtaggtgcgttgtctggaatcaagaacccagtgtcagtggccaataggctcctgtgcgaaggccaaaagggaaaacttagtgctggaaggattcctccttgttttctggttggcgagggagcctatcgttgggccgtcgaccatgggatccctagctgcccgcctaatatcatgaccacacgtttctcgttagcagcttttaaacggaacaagagaaaactggaattagctgagcgtgtcgatacagacttcatgcagcttaagaagaggagacagtcttcggaaaaggaaaatgatagcggcacactggataccgtgggtgcagtggtcgtagaccacgaaggtaacgtcgccgcagcagtgtcgtctggaggattagctcttaaacatccgggtagggtcggccaggcagcactctacggttgcggatgttgggccgagaacacgggggcacataatccatactcaaccgctgtcagcaccagcggctgtggcgagcatttggtgcgcacaattctcgcccgtgaatgctcccatgccctgcaggccgaagacgctcaccaggcactacttgaaaccatgcaaaataagttcatatag

SEQ ID NO: 243449 - DNA, 333 bp, synthetic construct
  misc_feature 1..333: note = Description of Artificial Sequence: Synthetic coding sequence
  source 1..333: mol_type = other DNA
tagaaaattactgccaaagaactggagacaaaacagtcttataaagaaaaacgcggaggttttgttctggtgcacgcgggagccggttatcactccgagagtaaggccaaggaatataagcatgtctgcaaacgggcttgccagaaagcaattgagaagctacaggccggagccttggctacagatgctgtcaccgccgcacttgtcgagctcgagctcatgtggaaaggtcagttccaggtgctctgtgtgctgaccaatctgtttttagacattatcaaaaaccctacaaagacaaagtttaagaccatcagcaatgtgaaggtctattag

SEQ ID NO: 243450 - DNA, 918 bp, synthetic construct
  misc_feature 1..918: note = Description of Artificial Sequence: Synthetic coding sequence
  source 1..918: mol_type = other DNA
atgacaatggagaaaggtatgagctctggcgaggggctgccctcccgatcctcacaagtgagcgctggtaaaattactgcaaaggagctggaaactaaacagagttacaaagagaaacggggtgggtttgtcctggtccacgccggagccggataccactcagagagtaaggccaaagaatacaaacacgtctgcaagcgtgcgtgccagaaggattccccttttaccaacgcagggatgggaagcaaccttaatctgcttggggaaatcgaatgcgacgcctctatcatggatgggaaaagcttgaatttcggagccgtgggcgcattatcagggatcaaaaacccagtctcagtagcgaaccggctgctctgtgagggtcaaaagggcaagctgagcgcagggagaatacctccatgttttcttgtcggagaaggggcatacagatgggccgtggatcacgggattccgagctgtccacccaatataatgacaaccaggttcagcctggccgctttcaaaagaaataagaggaaactggaattggccgagcgcgtggacaccgactttatgcaactaaaaaaacgtagacagagtagtgaaaaagagaatgactccgggaccctcgataccgtgggtgcagtcgttgttgatcacgaaggtaacgttgccgcagccgtgtccagtggcggtctagctcttaaacacccagggcgtgttggacaggcagctctctatgggtgtggttgttgggccgagaataccggggctcacaacccttattcgactgctgtgtctactagcggctgcggcgagcatttggtacgcacaattctagcccgtgagtgtagtcatgccctccaggccgaggacgcccaccaagccctactagagactatgcaaaacaagttcatttag

SEQ ID NO: 243451 - DNA, 438 bp, synthetic construct
  misc_feature 1..438: note = Description of Artificial Sequence: Synthetic coding sequence
  source 1..438: mol_type = other DNA
atgactatggagaagggcatgagttcgggggagggactgccatctcggtcatcacaggtgagtgctggaaaaattaccgctaaagaactcgaaaccaaacagtcgtacaaggagaaaaggggtggattcgtgttagtgcacgctggggctggttaccacagtgagagtaaagcaaaggaatacaagcatgtttgcaagagagcatgccagaaagctattgagaagttgcaggcaggcgctctggccaccgatgccgtgacagctgctctagttgagcttgaagatgtggagtctatcctgtgcgcaccatattggctggaaaatgtccatatgttatataaactgaggatgttgacgaaaccctgctggcggttatgtaagaccagtctttctgtgcatttatccctcccagtgaagatggcctgtttggctgaatag

SEQ ID NO: 243452 - DNA, 390 bp, synthetic construct
  misc_feature 1..390: note = Description of Artificial Sequence: Synthetic coding sequence
  source 1..390: mol_type = other DNA
atgacaatggagaagggcatgtcctcgggcgagggccttccaagtaggagttctcaggttagtgcgggtaaaatcacagcaaaagaattggaaaccaagcaaagttacaaagaaaaaagaggcggatttgtgcttgtacacgccggagctggttaccattccgagtcaaaggccaaagagtataagcacgtgtgtaaacgagcctgccagaaagcaattgagaaattgcaggccggagcactggccacagacgctgttactgctgcactggttgagctggaagtgtacacacattcgtatacctcttggagctgcatccaaccttccatacatgttctcctggtgaagcggcagagaaagagtccgctcccgcgtattagcactttctag

SEQ ID NO: 243453 - DNA, 1443 bp, synthetic construct
  misc_feature 1..1443: note = Description of Artificial Sequence: Synthetic coding sequence
  source 1..1443: mol_type = other DNA
atgctgctgtgcaccgcgagactggtggggttgcagctgctaatctcttgttgttgggccttcgcttgccactccactgagagctctcccgatttcaccctcccgggagattatctgctcgccggactgttccccctacacagcggttgcctgcaggtgcgacatagacctgaggttactctgtgtgataggtcctgtagtttcaatgagcacgggtaccacttgttccaggccatgcgcctcggggtcgaggaaatcaacaattctacagctttgctgccaaacataacattgggttaccagttgtatgatgtctgttctgactccgccaatgtctatgccaccttgcgagtcctgagcctcccagggcagcaccacatcgaattgcagggcgatttgctccactatagtcccactgtgctagccgtgatcgggcctgactcaactaacagggcagcaactaccgccgcactgctcagcccattcttagtgcctatgattagctacgctgcctctagtgaaaccctgagcgttaagcgccagtatccaagtttcctgcgaacaattccgaatgataagtatcaagtcgaaaccatggtcctcctgctccagaaatttggctggacctggatctccctggttggtagctctgatgactacggccagttgggtgtccaagctctcgagaatcaggctacagggcaggggatttgtatagctttcaaagacatcatgccctttagtgcgcaggtaggggacgagaggatgcagtgcctgatgcggcacctcgcccaagccggtgccaccgtggtggtggttttttcttctagacaactcgctcgagtgttttttgagagcgtggtgctgactaatcttaccggcaaagtgtgggtcgcaagtgaagcttgggccctgtctaggcacattaccggcgttcctggaatccaaaggataggtatggtcctgggtgtcgctattcagaaaagggctgtcccaggattgaaagctttcgaggaggcgtatgctagagcagacaaaaaagcgcctcggccatgccacaagggcagctggtgcagcagtaatcaactgtgccgcgaatgtcaggcctttatggctcacaccatgcctaaactgaaggcattctcgatgtcttcagcatacaatgcttatcgcgctgtttatgccgtcgcacacggtctgcatcagctgctggggtgcgcgagtggcgcatgctctagaggtagagtttacccatggcagacaagtaccgatgcctccctggtcggcaaaaaatcaggccatcttagggaagcccgtccagccagcagggcgctttggtgtttctggctatgcgtgtcaactcctctgggctgttgttggcagttgaccagatgttgttgttgctgctgtctgggactgctggcttgcctgcccggtacttag

SEQ ID NO: 243454 - DNA, 2526 bp, synthetic construct
  misc_feature 1..2526: note = Description of Artificial Sequence: Synthetic coding sequence
  source 1..2526: mol_type = other DNA
atgctgctgtgtaccgcacggctggtaggtctgcagctgctgatctcttgctgctgggcatttgcctgccattccacagagagttcccccgatttcaccctccccggtgattatctgctggcaggcctgttccccttgcatagcggatgccttcaagtccggcacagacccgaagtgacactctgcgatcgcagttgtagcttcaacgaacacgggtatcatctgttccaggccatgaggttgggggtggaggaaataaacaacagcacggccctgttaccgaatatcacgttgggctaccagctatacgatgtgtgttcagactccgctaatgtctacgccacactgcgggttttaagcctgcccggacagcaccacatagaattacagggggatcttcttcattactcacccaccgtactcgctgtgattggccctgacagcactaaccgggctgcaactaccgctgccctgctgagccctttccttgtacccatgatatcctacgcagcctcttcagagacactgtcggtcaaaagacagtacccttccttcctgcgcacaatccccaacgacaaatatcaggtagaaacaatggtactccttctccaaaaatttggatggacctggatcagcttagtagggtctagcgatgattacggacaactgggagtccaggccctcgagaatcaggctacgggacagggcatttgtattgccttcaaagacatcatgccattcagtgcccaggtgggagatgagaggatgcagtgtctcatgcgacatttggctcaggccggagcgactgtggtggtggtgttcagttcccgacaacttgctcgcgtttttttcgaatctgtcgtgttaactaatctgaccgggaaggtgtgggtcgccagcgaggcatgggctctgtctcggcatattaccggggtacctggcatacagcgcataggcatggtcctgggcgtcgctatacagaagcgagccgtgccagggttgaaagcgttcgaggaggcctacgctcgggcagacaagaaggccccacggccttgccataaggggtcgtggtgcagctctaatcagctgtgccgggagtgccaggcctttatggcccacactatgcccaaactgaaggccttcagtatgtcaagtgcctataatgcatatagggctgtctacgccgtggcgcacgggctgcaccagctgctgggatgcgcaagcggggcatgctctagaggccgagtgtacccctggcaacttctcgagcagattcacaaagttcactttctgctccacaaagacactgtggccttcaacgacaaccgcgatcctctgagttcatataatattattgcatgggattggaacggtcctaaatggacatttactgttctgggatcttctacctggtcccccgtgcagctgaatatcaacgaaacaaaaatacagtggcatggcaaggacaatcaggtgcctaagtccgtatgtagctccgactgcctcgagggacaccagagagtcgtgacagggttccatcactgttgcttcgaatgcgtcccttgcggggctggaaccttcctcaacaagagcgacctgtatagatgtcagccatgcggaaaggaagagtgggcccctgagggaagtcagacttgctttcctagaaccgtggtgttcctggctctgagggaacacacttcgtgggtactccttgctgccaacacactgctcctgttgctgctgctgggcacggcaggtttgttcgcttggcacttagacaccccggtcgtcagatctgctggcggacgcctctgcttcctgatgcttggttctctggccgcaggcagcgggagtctctacggtttcttcggagagcctacccgtccagcttgtctgctccgccaagcgctgttcgccctgggatttaccatattcctgtcttgtttaacagtcaggtccttccagctgatcatcatttttaagttttcaacaaaagtgccaacattctatcacgcttgggtccagaatcacggcgctggtttgttcgtgatgatctcaagtgcagcccagctcctgatatgcctaacatggttggtggtatggaccccactccccgcacgcgaataccagcggttccctcacctggtcatgctggagtgcactgaaacaaatagccttggctttattctggcttttctttataacggccttctcagtatctccgcgtttgcctgcagttatctggggaaagacctgccagagaattacaatgaggccaaatgcgttacattcagcctattgtttaatttcgtgtcttggatcgctttctttactaccgctagtgtttatgacggcaagtacctccccgcagccaatatgatggcaggactaagctctctgtcaagtgggtttgggggttacttcctgcccaagtgctacgtgattctgtgtcggccagacctgaatagcacggagcactttcaggccagcatacaggattatacaaggaggtgcggaagtacctag

SEQ ID NO: 243455 - DNA, 1764 bp, synthetic construct
  misc_feature 1..1764: note = Description of Artificial Sequence: Synthetic coding sequence
  source 1..1764: mol_type = other DNA
atgcttctctgtaccgctcggctcgtcggactgcagttgctaatctcgtgttgttgggcatttgcatgtcactccacagaatccagccctgatttcaccctcccaggggattacttgctcgccggtctgttccctctccattctggttgcctacaggttcgccacaggcccgaagtaacactctgtgataggagctgcagctttaatgagcacgggtatcacctctttcaagcgatgcgtctcggagtcgaggagataaataatagcactgccctgttacccaacatcaccctggggtaccagctatacgatgtgtgttcagattccgcaaatgtgtatgccactctccgggtgctatccctcccgggacagcaccacattgagctacagggcgatttgcttcattattcccctaccgtgctggcagttatcggcccagattccaccaatcgggctgctaccactgctgcactgctgtctccatttttggtaccgatgctgctggaacaaatccacaaggtgcatttcctgctgcataaagacactgttgcctttaatgataaccgcgatcccttgagctcttacaacatcattgcatgggattggaacggaccaaagtggaccttcactgtgttgggatcctcaacctggagcccagttcagctgaacataaatgagaccaagatccaatggcacgggaaggacaaccaggtcccaaagtcagtgtgcagctccgactgcttagagggccatcagagagtggtcacaggcttccaccactgttgtttcgagtgtgtaccatgtggcgctggcactttcctgaacaagagtgatctgtatcgctgtcagccttgcggtaaggaagagtgggctcctgagggtagccagacatgcttcccacggactgtcgtttttctggctctgcgtgagcacacgtcctgggtactgctcgcggcaaacactcttttgctgctgctgctcctggggactgcaggcctattcgcctggcacctggacactccagttgtgcggagtgcaggcggacgcctgtgtttcctaatgctcggaagcctcgccgcaggcagcggttcactttacggctttttcggagagccaacccgtcctgcctgtctgctgaggcaggccctgtttgccctgggctttacgatttttctcagttgcctgactgtgcgcagtttccagctaataataatttttaagttctccaccaaggtgcctacattctatcatgcctgggtgcagaatcacggtgcaggcctgttcgtgatgattagttcagccgcacaattactgatttgcctaacttggttggtggtctggaccccactgccagccagggagtaccagagattccctcacctggttatgctggaatgtactgaaactaactcacttggcttcatcttagcttttctgtacaatggacttctgtcaatctctgcgtttgcctgctcctacctgggcaaagacctgcctgaaaattacaacgaggctaagtgcgtcaccttttccctgctgtttaacttcgtgagttggatcgcattttttactaccgcaagtgtgtacgatgggaagtatctaccagctgccaatatgatggccggactatcttcactgagctcagggttcggtggctatttcctgcccaaatgttatgtcatattatgcaggcccgacctgaattctaccgagcactttcaggcatcaatccaagactatactcggagatgcggaagcacatag

SEQ ID NO: 243456 - DNA, 921 bp, synthetic construct
  misc_feature 1..921: note = Description of Artificial Sequence: Synthetic coding sequence
  source 1..921: mol_type = other DNA
atgcgcctgggcgtcgaggagatcaacaactctactgccctcctgcctaacatcacgttaggctatcagctttacgacgtctgtagcgatagtgctaatgtctacgccactttgagggtcctgtccttgccaggccagcatcatatcgagctgcagggggatctgctgcactacagccctactgttctggcagtgattgggccagacagtactaaccgcgcagcaactaccgcggcactcctgtctccatttctggtcccgatgcttctggaacagatacacaaagtgcatttcctgctccacaaagatactgtcgcttttaacgataaccgcgatcctttatcatcttacaacataattgcctgggattggaacggccctaagtggacttttacagtccttggtagtagtacttggtctcccgtgcagctgaacataaacgagaccaagatccagtggcatggcaaagataaccaggtgccaaagagcgtgtgttctagcgactgtctcgaaggtcaccagagagtggttacagggttccaccactgttgctttgaatgtgtcccttgcggggcaggaacctttctgaacaagtccgatctttataggtgccaaccctgtgggaaggaagaatgggctccagagggcagtcagacatgctttccaagaacagtagtgttcctcgcactgagggaacatacaagctgggtcctgctggcagccaacacactgctcctgttattgctattaggaactgccggtctctttgcatggcacctggatacacccgtggtgaggagtgctggcggacgactgtgcttcctcatgcttgggagcttggccgctggtagcggaagcctgtatggcttttttggcgaaccatcgttgcctctcgtttccccaagttcgtgtccagcttag

SEQ ID NO: 243457 - DNA, 2520 bp, synthetic construct
  misc_feature 1..2520: note = Description of Artificial Sequence: Synthetic coding sequence
  source 1..2520: mol_type = other DNA
atgggcccaagggctaaaactattagttcccttttcttcctgctgtgggtcctggcagagcccgctgaaaacagcgatttctatctaccgggtgattatctgttaggaggattgttttctttgcatgctaacatgaaaggtattgtacacctcaattttcttcaagttcctatgtgcaaagagtatgaggtgaaagtcatcggctacaatctgatgcaggctatgaggtttgcggttgaagaaataaacaacgattcttccctcctgcccggagtcctgctgggctacgaaattgtagacgtttgttatatctcgaacaacgtacagcctgtgctgtatttcttggcgcacgaggataatcttttgccaatccaggaagactactcaaattacatttcccgggtagttgcagtcataggacccgataattcagagagtgtcatgaccgtcgcaaacttcctcagtctatttctgctccctcagattacgtactctgcaatcagtgacgaactgagagacaaggtgagattccccgcacttttaaggacgactccttctgctgatcatcacattgaagcaatggtgcagcttatgctgcactttaggtggaactggatcatcgtattggtttcttccgatacatacgggcgagataacggtcagttgctgggagaacgggttgccaggagagacatctgtatcgctttccaggaaaccctgcccacgctccagcccaatcagaacatgacctcggaagaaagacagagactcgtaaccattgtagataaactgcagcagtcaacagccagggtggtcgtagtattttcgccggatctcacactgtaccatttctttaacgaagttctgaggcagaacttcaccggtgctgtttggatcgctagcgagtcctgggcaattgaccctgtgctccacaatcttacagaactgcggcacctgggtacgttccttgggatcacaattcagtcggtgccaataccgggattctcggagttccgtgagtgggggccacaagccggtcctccccctttatccaggacatctcagtcttatacctgcaaccaggagtgcgacaactgtctcaacgccactttaagtttcaacactatactgcggctgtccggtgaacgggtggtgtactcagtctattcggccgtttatgctgtagcacatgcactgcactcattgctgggctgtgacaagtccacttgtactaagcgggttgtttatccctggcaactgttggaagaaatctggaaagtcaacttcacactacttgatcatcagatcttctttgacccgcaaggtgacgtcgcccttcacctggaaattgttcaatggcagtgggataggtcccagaacccctttcagagcgtggcctcttattaccctctgcagcggcaactgaagaatatccaggatatttcatggcatacaatcaataataccatcccaatgtccatgtgcagcaagcggtgccagtccggtcagaagaaaaagccagttggaatccatgtgtgctgtttcgagtgtatcgactgcctcccaggaacgttccttaatcacacagaggacgaatatgagtgccaggcctgtcccaacaacgaatggagttatcaatccgagacgagctgttttaaaaggcagctggtctttttagagtggcatgaggccccaactatagccgtggccctgcttgccgcactcggtttcctgtccacactcgccatactcgttatcttctggcgacactttcagacacccatagtgcgatccgcagggggtcctatgtgttttcttatgctgacactgttactggtggcctatatggtggtccccgtgtacgtcggaccaccaaaggtcagcacatgtctgtgcaggcaggccctgttcccactatgcttcacaatttgcatcagctgcattgcagtccgaagtttccaaattgtctgcgcctttaagatggcctcaaggttcccaagagcctattcatattgggtgcgctaccagggcccttacgtgagtatggccttcattactgttctgaagatggtaatagtggtgatcggaatgctcgcgactggactaagccccaccaccaggaccgatccggacgaccccaaaatcaccattgtttcatgtaatcccaactatcgaaactccctgctcttcaacactagtttggatctgctgctctctgttgtgggtttctcattcgcctacatgggaaaggagctgcccacaaattataatgaggccaagttcatcacactgagcatgacattctattttacctcctccgttagtctctgcacctttatgtccgcctatagcggcgtgttggtcacgattgtagatctgctcgttactgtcctaaatctactcgccatttccctcggttattttggacctaagtgttacatgattttgttctacccagagcgcaacacgccagcgtatttcaatagcatgatacaggggtacactatgcgcagagactag

SEQ ID NO: 243458 - DNA, 2559 bp, synthetic construct
  misc_feature 1..2559: note = Description of Artificial Sequence: Synthetic coding sequence
  source 1..2559: mol_type = other DNA
atgttaggccctgcagtgttaggtctctcactgtgggctctgcttcaccctggaacgggggctccactgtgcctgtcccaacaactccgaatgaagggagattacgtgttgggcggactatttccactgggtgaggccgaagaggcaggtctacgatcccggacaagaccctcgtctcccgtttgcactcgatttagtagcaacgggctgctgtgggcactggcaatgaaaatggccgtggaggaaatcaataacaagtctgacctccttccgggtctgcgactcggctatgacctgttcgacacctgctctgagcctgtcgtcgccatgaaacccagtctcatgtttctcgcgaaggcaggtagcagagatattgcagcctattgcaactatactcagtaccaaccgagagtgcttgctgtcatcggaccccactcgagcgaactggcgatggtgacaggcaagtttttctcatttttcttgatgccccaggttagttacggggcaagtatggagctgttgagcgctagagagacctttcctagcttttttagaacagtgccctcggaccgggtgcaactaactgccgctgcagagctgttgcaggagttcggttggaactgggtggcagcactgggatccgacgacgaatatggacgacaaggtctctccatcttcagcgctctggccgcagcgcgaggcatctgcatcgcccacgagggcttggtgccactgccccgagctgacgactccagattggggaaagtgcaggacgtactgcatcaggtgaatcagtcttcagtgcaggtggtactgcttttcgcgagtgttcacgcagctcatgccctatttaactacagcatcagctctcgcctgtccccaaaggtgtgggttgcgtctgaagcctggctgactagtgatttagtaatggggctccccggaatggcacagatggggacagtgctaggattcctgcagcggggtgcacagttacacgagtttcctcagtatgtgaagactcatttagccctggccacagaccccgctttctgctcggccctgggagaacgagaacagggccttgaggaagacgttgtggggcagcgctgcccccaatgtgactgtattaccttgcagaacgttagtgcaggactgaaccaccatcagaccttttctgtttacgctgctgtatacagcgtggcccaggcattgcacaacacactacagtgtaacgcaagcgggtgtccagctcaggaccccgttaaaccatggcaactcctggaaaacatgtataacctgaccttccacgtgggcggtctacccctaaggttcgattcctccggtaatgtcgacatggagtacgacctgaagttgtgggtctggcagggctccgttcctcgcttgcatgacgtaggcagatttaatggatccctgagaacagagcgtctcaagatcaggtggcacacctccgacaaccagaagcctgtgagcagatgttccagacagtgtcaagagggacaggttaggcgcgtcaaaggtttccactcttgttgctacgactgcgttgattgcgaggccggatcatataggcaaaatcctgacgacattgcgtgcactttctgtggccaggatgaatggtcacctgagcggtctacacgctgtttcaggcgcagatctaggtttctggcgtggggtgagcccgctgtacttctgctgctcctgttgttgtcactggccctgggtttggtgttggctgcattgggtttatttgttcatcaccgtgatagtccacttgtccaggcctccggcggtccactcgcatgcttcgggctggtctgtttgggtctggtatgtctctccgttttacttttccccggacagccctcacctgcaagatgcctcgctcagcagccactgagccacctgcctctgacaggatgtctatccacactctttctgcaagcagctgaaatattcgttgaatctgaacttcccctgtcctgggcagataggctctccggctgtttgaggggcccatgggcctggttagtggtgctattagcaatgctggttgaagttgctctatgcacatggtatctggtggcatttcccccagaggtcgtgacagattggcacatgctacctacagaggcacttgttcactgccgaacccggtcctgggtctctttcggtctggcccatgccacaaacgccacactagccttcctatgcttcctcggcacattcctagtccggtcacagccaggatgttataaccgcgctcggggactgacgtttgctatgctcgcttacttcataacgtgggtctctttcgttcccctgttggccaacgtgcaggttgttttgcgtcccgcagtccagatgggagctttactgctctgcgtgttaggtattcttgccgcatttcacctgcctcgatgttacctgcttatgaggcagcccggtctgaacacccctgagttcttcctagggggagggccaggtgatgcgcaagggcaaaatgacggcaacactggcaaccagggaaagcatgagtag

SEQ ID NO: 243459 - DNA, 876 bp, synthetic construct
  misc_feature 1..876: note = Description of Artificial Sequence: Synthetic coding sequence
  source 1..876: mol_type = other DNA
atgatcccgatccagttgacagtctttttcatgatcatttacgtcttggaaagtctgaccataattgtgcagtctagcctgattgttgctgtgttgggcagggagtggctgcaggtgaggagacttatgccagtggacatgatcctgatatcactgggaatttcccgcttctgcctgcagtgggcgagtatgctaaacaatttctgctcatatttcaatctgaattacgttctatgcaacctcacgattacctgggaattctttaatattcttactttctggttaaactccctcctcaccgtgttttattgcataaaagtgtcaagtttcacccaccatattttcctgtggctgcggtggcgtatccttcgtctgttcccatggattctccttggcagccttatgatcacctgtgttactatcattccttctgcgatcgggaactatatacagatccaactcctcactatggaacacctaccaagaaactcaactgtgactgataagctcgaaaacttccaccagtaccagttccaggcacacacagtagctctagtcatccccttcatccttttcttagcatccaccatcttcctaatggcctctctgaccaagcaaatccaacaccattctacgggtcactgcaatcctagcatgaaagccagattcacagccctgcggtccctggctgtactatttattgttttcacctcctattttctcactatcctgataaccatcattggcacactgttcgataagcgctgttggctttgggtctgggaggcgttcgtttacgccttcattctcatgcacagcacatctctgatgctatccagccctacactcaaacgaatcctcaaaggaaagtgttag

SEQ ID NO: 243460 - DNA, 900 bp, synthetic construct
  misc_feature 1..900: note = Description of Artificial Sequence: Synthetic coding sequence
  source 1..900: mol_type = other DNA
atgatgtgttttctgctcataatctcctctatcttggttgtatttgctttcgtcctggggaacgtggctaacgggtttatcgccttggtcaatgttatagactgggttaacacaagaaaaatttcttcggccgaacagattttaactgctcttgtcgtgtctcgtatcggtctgctgtgggtcatgctgttcttgtggtacgcgacggtttttaactccgccttgtacggtctggaagtgcgcatagtagcctctaacgcctgggctgtgacaaaccacttctccatgtggttagcggcttccctctcaatcttctgccttctcaaaatcgcaaacttctcaaatctgattagcctgcacctgaaaaagaggattaaatccgtcgttctcgtgatcctgctgggaccgctggtgtttctgatctgcaatctcgccgtgattacaatggatgaacgggtgtggaccaaggaatatgagggcaacgtgacgtggaagatcaaactccgaaacgcgatccatctgagttccctgacggtcacaacgcttgctaaccttatacccttcaccctttccttaatctgctttctcctacttatctgctctttgtgcaagcatctcaaaaagatgcggctacatagcaaagggagtcaggacccatctacaaaagtgcacatcaaggcacttcagacggtgacatcattcttgatgctgttcgctatctatttcctgtgcataatcacttccacctggaacctccggacccagcaaagcaagcttgtcttactcctctgtcagacggtggctatcatgtacccaagttttcactcattcatcctgatcatgggatcaagaaagctaaagcaaactttcctgtctgtcctgtggcaaatgacaagatag

SEQ ID NO: 243461 - DNA, 930 bp, synthetic construct
  misc_feature 1..930: note = Description of Artificial Sequence: Synthetic coding sequence
  source 1..930: mol_type = other DNA
atgatgtctttcttacatattgtcttctccattctggttgtggtggccttcattctcggcaatttcgcaaatggatttatagctttgattaactttatcgcctgggtgaaacgccagaaaatttcttctgctgaccaaatcatcgccgctctggcagtcagtagggtaggcttgctctgggtgattttactccattggtactccaccgtgttgaaccctacttcatctaacctgaaggtgatcattttcatctcaaacgcctgggccgttaccaatcatttttctatatggctggccaccagcctgtccatcttttatctcctgaagatcgtgaacttttcgagattaatcttccaccacctcaaacggaaagccaaatccgtggttctggtaatcgtgctaggcagtttgttcttcctggtgtgccatctggtcatgaagcacacatatattaacgtctggacagaggaatgcgagggtaatgtcacctggaagatcaagcttcgcaatgccatgcatctctccaatctgacagtggcaatgctggcaaacctaatccctttcacattgacactcatttctttcctgctgctgatttactccctctgtaaacacctgaagaagatgcagcttcatggcaaagggtcacaagatccgagcacaaagatacacattaaagcactccagactgtgaccagcttcctcatcctgcttgccatctacttcctctgcctgatcatatctttctggaatttcaaaatgaggcccaaggaaattgtcctgatgctgtgccaggccttcggaataatctacccaagcttccatagttttattcttatttggggcaataaaactctcaagcaaacattcctcagcgttctttggcaagttacctgttgggctaaaggacagaaccagagcaccccttag

SEQ ID NO: 243462 - DNA, 951 bp, synthetic construct
  misc_feature 1..951: note = Description of Artificial Sequence: Synthetic coding sequence
  source 1..951: mol_type = other DNA
atgatggggctgactgaaggggtgttcttgatcctgtccggcacacaatttaccctggggatactggttaactgtttcatcgaactggtaaacggcagcagttggtttaaaacaaagaggatgtctctctctgattttattatcaccacactggctttgttaaggatcatcctgctatgtattatcctgactgactccttcctaattgaatttagccctaatacccacgattccgggatcatcatgcaaatcatcgacgtgtcttggacattcacaaaccacctttcgatctggctggcgacttgcctaggggtgctctactgcctgaaaatcgccagttttagtcatcccacattcctgtggctgaagtggagagtaagccgagtgatggtatggatgctgctcggcgctctcctgttatcatgcgggtctactgcctctctgatcaacgagtttaaactctacagcgtgttccgcggaattgaagctactcgaaatgttacagagcacttcaggaaaaaacggtccgagtactatctaatacacgtgctgggcaccctgtggtacctgccccctcttattgtttccttggctagctactccctgctgattttctccctggggagacatacaagacagatgctccagaatggcacttccagcagagaccccacaacagaagcccataagcgggctataagaattatcttaagtttcttcttcctttttctgctgtactttttggcattcctaattgcttcgttcggaaacttccttcccaagacaaaaatggcgaagatgatcggggaagttatgacaatgttttaccctgcaggccattccttcatcctgatcttgggaaacagcaagctgaaacaaacctttgtcgtgatgttgcggtgcgaaagcggccaccttaaacccggtagtaaaggtcctattttcagctag

SEQ ID NO: 243463 - DNA, 960 bp, synthetic construct
  misc_feature 1..960: note = Description of Artificial Sequence: Synthetic coding sequence
  source 1..960: mol_type = other DNA
atgatcaccttccttcctatcatcttctctatcctgatcgtagtaattttcgtgatcggtaactttgccaacgggttcatcgctttggtcaactccatcgaatgggttaaacgccagaagatttcttttgtcgaccagatcctaacagcactcgccgtgtcacgagtagggctgctgtgggtgttactgctccactggtatgcaacacaactgaatccagcattctactcggttgaggttcggataactgcatacaacgtatgggctgtgactaaccacttttcgtcttggttggctacatctctttccatgttctacctgctgcgcattgccaacttttccaatctgatcttccttagaatcaaacgcagagttaagtccgtggtcctcgtaatcctgttaggcccactgttgtttttggtgtgccatctatttgtgattaacatggacgagactgtttggaccaaagagtacgagggcaacgtgacctggaaaatcaagctgcggtcggctatgtaccactcaaatatgactcttaccatgcttgcgaacttcgtccctctgacccttaccctcatctcttttctcttactgatctgctccctttgcaagcatctcaaaaagatgcaactccatgggaaaggcagccaggacccaagcaccaaagttcacatcaaggccctgcagacagtcacctctttcctattattgtgcgccatttacttcctgagcatgatcatttccgtttgtaattttgggcgactggagaagcagccggtgtttatgttttgccaggctattatcttcagctatcccagtacccatcctttcatccttatcctgggcaataagaaattgaagcaaattttcctctctgtgctacgccatgtgcgctactgggtcaaggatcggagtctgcggctgcaccgctttacgcggggtgctctttgcgtgttctag

SEQ ID NO: 243464 - DNA, 930 bp, synthetic construct
  misc_feature 1..930: note = Description of Artificial Sequence: Synthetic coding sequence
  source 1..930: mol_type = other DNA
atgactacatttataccgattattttcagttcagtcgtggttgtcttgttcgtaatcggtaatttcgcaaacggctttattgccctcgttaattctatcgagagggtgaagcggcagaaaatcagcttcgctgatcaaatattgactgctttagctgtatctagggtaggactcctatgggttctgctcctgaactggtactccacagtctttaatccagcgttctacagcgtggaggtaaggaccactgcgtacaatgtctgggctgtgaccggacacttcagtaactggctcgcaacctcgctctctattttttaccttctcaagatcgcaaatttctccaacttaatctttcttcatctgaagagaagggtaaagtctgtaatacttgtcatgctccttggtcctcttctatttcttgcctgtcagttattcgtgattaacatgaaggaaatagtaagaacaaaagaatatgaaggtaacctcacttggaaaattaagcttcgatccgcagtctatctgtctgatgccaccgtcaccacccttgggaatttagtacctttcacactgacactattgtgttttttgctgctgatttgctctctgtgtaaacacctgaagaagatgcaactccatgggaaaggtagccaggatccctctactaaggttcatatcaaagcactacaaacagtaattttctttctgctgctgtgtgcagtttatttcctgagcattatgatctcagtttggtccttcgggtcgttagaaaataagccagtcttcatgttctgtaaagccattcgcttctcgtatccatccatccatcccttcattcttatctggggaaacaagaagctcaagcaaacgttcctgtcagtgctcaggcaggtgaggtactgggttaagggcgagaagccctcaagcccctag

SEQ ID NO: 243465 - DNA, 1002 bp, synthetic construct
  misc_feature 1..1002: note = Description of Artificial Sequence: Synthetic coding sequence
  source 1..1002: mol_type = other DNA
atgctgaccctgaccaggataaggacagtgtcctatgaagtgaggtccacctttctgtttatatcggtcctggaattcgctgtgggtttcctgacgaacgcatttgtcttcctggtcaacttctgggacgtggtcaaacggcaggccttaagcaattcagactgcgtccttctgtgcctgtcaatctcacgactttttctccatggactcctctttctgtctgccatccagttgactcatttccagaagcttagtgagcccctcaaccattcgtaccaggcgatcatcatgctgtggatgatcgcaaatcaggccaatctttggttggccgcttgcctgagccttctttattgcagcaaactgatcaggtttagccacacctttcttatttgtctggcaagttgggtgtcaagaaaaatatcccagatgctcttggggattatactgtgttcctgtatctgtaccgttctgtgcgtctggtgtttcttttcacggcctcatttcaccgtgactaccgtgttgtttatgaacaacaacaccaggcttaactggcagattaaggatttaaacctgttttatagttttttgttttgctacctgtggagtgttcccccattcctgctgttcctggtgtcttcgggcatgctgacggtgagtctcgggaggcacatgagaaccatgaaagtgtacacacggaacagccgcgacccctccctggaagcccacatcaaggcccttaagtccctcgtatcctttttctgcttttttgttatcagttcgtgcgctgccttcataagcgtgccactgttgatcctgtggagggacaagattggggttatggtatgtgtgggcataatggcggcatgcccctctggccatgccgcaatcctgatttctggcaacgcgaagttgcgcagagctgttatgacaatacttttgtgggcacagagttctttgaaagtgagagctgaccacaaagctgactcacggactctctgctag

SEQ ID NO: 243466 - DNA, 900 bp, synthetic construct
  misc_feature 1..900: note = Description of Artificial Sequence: Synthetic coding sequence
  source 1..900: mol_type = other DNA
atgttgagacttttctacttctcggctattatcgcctccgttatccttaactttgtgggtatcatcatgaatctgttcattaccgtcgtgaattgcaaaacctgggtgaaatcacacagaatttcttccagtgatcgcatcctgtttagcctgggaatcacacggtttctgatgctgggcctctttttggttaacacaatttacttcgtgagctccaataccgagcggtcagtatatctgtccgctttctttgtcctgtgctttatgtttctggattcatcctccgtttggtttgtaaccctgctgaacatcctgtactgcgtgaagataaccaatttccagcattcagtgtttctgctgctgaaaagaaatatcagccctaagatccccaggctcttattggcctgcgtgctgatttccgcattcaccacctgtctttatatcacactatcacaggcttctccgttccctgagctggtcaccaccagaaacaacacaagcttcaacatatccgagggtatactgagcctcgtggtgtctttagtgttgagttcaagcctccaatttattattaatgtgacgagtgctagcctgctgatacattcattgcggaggcacatccagaagatgcagaagaatgcaacgggtttttggaatccacagacggaggctcatgtgggcgctatgaaactcatggtgtacttcctcatactttatatcccatactcagtggccacgctggtacagtatctgcccttttatgcgggaatggacatgggaactaagtctatctgcctgatctttgcaaccctgtactctcctggtcactcagtgctcatcattatcactcatcccaagctaaagaccaccgccaaaaagattctctgcttcaagaagtag

SEQ ID NO: 243467 - DNA, 972 bp, synthetic construct
  misc_feature 1..972: note = Description of Artificial Sequence: Synthetic coding sequence
  source 1..972: mol_type = other DNA
atggctactgttaatacagatgcgacagacaaggatatttccaagttcaaggtgacctttaccctggttgtgtccggcattgagtgcattacaggtattttggggagtggctttattaccgctatttatggtgcagagtgggctagaggcaaaaccctcccaacaggcgatagaatcatgcttatgttgagcttttctcgactgttactgcaaatctggatgatgctggaaaacatcttttcgctgctttttagaattgtctataaccagaactcagtgtatattctgttcaaggtgataaccgtctttcttaaccattcgaatctgtggttcgctgcatggctcaaggtgttttattgcttaagaatcgccaactttaaccaccccctgttttttctgatgaaacgaaagatcattgtcctcatgccttggctattgcgtctgtctgtgcttgtttcactttctttttctttccctctatcaagagacgtgttcaatgtctatgttaactcatcaattcctattccttcatcgaacagtactgaaaagaagtatttcagtgagaccaatatggtgaatttggttttcttctacaacatgggcatttttgtgccactgataatgttcatcttagcggcaactctcctgatactgtccctaaaacgccataccttacacatgggttctaatgcaaccggcagccgcgatccttctatgaaggcacacattggcgcaataaaggcaacaagttacttcttgatcttgtacatcttcaatgccatcgcattattcctgtctaccagtaatattttcgatacctatagcagttggaacattttgtgcaagattattatggcggcataccccgctgggcacagtgtgcagctgatccttggcaaccccggactgcgaagggcctggaagagattccagcatcaggtgcctctctaccttaaggggcagacgctttag

SEQ ID NO: 243468 - DNA, 924 bp, synthetic construct
  misc_feature 1..924: note = Description of Artificial Sequence: Synthetic coding sequence
  source 1..924: mol_type = other DNA
atgcaagctgccttgaccgccttttttgtcctgttgttctctctcctgagtctgctaggaattgccgctaacggctttatcgtattggttctggggagggagtggcttcgctacgggaggctgctccctctggacatgatcctgattagtcttggagccagtcgcttttgcctccagctcgttggtacagtacataatttctattactcagcccagaaagtcgagtacagcggtgggctgggccgtcagtttttccacctacactggcactttctgaatagtgccacattctggttttgcagttggctgtccgtgttgttttgcgttaaaatcgctaacattactcactcaacattcctatggctcaaatggcgcttccccggatgggtcccatggctgctgctgggatcagtactgatttccttcataatcacactgctgtttttctgggtcaactacccagtctaccaggaatttctaattagaaaattctcaggaaacatgacttataagtggaacacacgtatagagacatactatttcccctctctgaagctcgtcatatggagcattcccttctccgtcttcctggtgagtatcatgctactcatcaactctttgcgaaggcatacacagagaatgcaacataatggccattccctacaggatccctccactcaggctcacacccgtgccttaaaatctctcatttccttcttgatcttatatgcgcttagctttttgtccctaatcattgacgccgctaaatttatctccatgcaaaacgatttctattggccctggcagatcgcagtctacctctgtatcagcgttcatccgtttatcctgatctttagcaatctgaagctccggtcagtgttttcccaactgttgctgctggccagagggttttgggttgcctag

SEQ ID NO: 243469 - DNA, 945 bp, synthetic construct
  misc_feature 1..945: note = Description of Artificial Sequence: Synthetic coding sequence
  source 1..945: mol_type = other DNA
atggcgaccgagcttgataagatcttcctgattctggccattgcagagttcatcatcagcatgctcggaaacgtgtttatcggcttggtgaattgtagcgagggcatcaagaaccagaaagtcttctccgccgactttatactcacttgtctcgcaatcagtaccattggccagctgttagttattctgtttgatagcttcctggttggattagcttctcatctctatacgacatacaggctcgggaagactgtaattatgctttggcacatgaccaatcacttgaccacatggctcgcgacatgtctgagcatcttttactttttcaagatagcccattttccccatagccttttcctctggctgcgttggcgcatgaacggtatgatcgtcatgctgctgatcctgtcgctatttcttctgatattcgactcactcgtgctggaaatcttcatcgatattagcctgaatattatcgataaaagtaatctgacactgtacctggatgaatctaagaccttatatgataagctgagtatcctcaagactctcttgtcactgacaagcttcatccctttcagcctgttcttgacttcactcctgttcctgttcttatcgctggtaaggcatacaaggaatcttaagttgtcttctctggggagccgagatagctcaacagaagctcaccgcagggccatgaaaatggttatgtcattcctgtttctgttcattgtccactttttttcccttcaagttgccaacgggattttcttcatgctgtggaataacaagtacatcaagttcgttatgctcgcgctgaacgcattcccctcctgccattctttcatactgattttaggaaatagtaaactgagacagaccgccgttaggctgctgtggcacctccggaattacactaaaactcccaatgccctgcccttgtag

SEQ ID NO: 243470 - DNA, 930 bp, synthetic construct
  misc_feature 1..930: note = Description of Artificial Sequence: Synthetic coding sequence
  source 1..930: mol_type = other DNA
atgatcacctttttacctatcattttctcctcactggtagtcgttactttcgtgataggcaacttcgccaacggtttcattgcactggtgaatagtatcgagtggttcaaaaggcagaagatttccttcgcggaccagatcctgaccgccctcgctgtgtcgcgagtggggctgctgtgggtcctcttactaaactggtactctactgtgttgaatcccgctttcaatagcgtggaagttagaacaacagcatataacatttgggcggtgataaaccatttctcaaactggctggcgacgacactatcaattttctatctcctcaagattgctaatttttcgaattttatcttcctccatcttaaaaggcgggtgaagtccgtcatactagtgatgcttctggggccacttttattcctcgcctgtcacctttttgtgattaatatgaatgaaatcgtccgcactaaagagttcgagggtaatatgacctggaagattaaactgaagtctgcaatgtacttctccaacatgactgtcaccatggtagccaacctcgtacccttcacacttacacttctgagcttcatgctgctcatctgtagtctatgcaagcatctaaaaaagatgcagttgcacggtaaaggctctcaggacccaagcaccaaggtccatattaaggcactgcaaaccgtaatctccttcttactcctctgtgccatctacttcctcagcattatgatctctgtctggtcatttggttcactggagaacaagcccgtgtttatgttctgtaaagctattcgtttcagttatccgagcatccacccctttattctgatctggggtaacaaaaaactgaagcagacctttctctcggtgttttggcagatgcggtactgggtgaaaggcgagaaaacaagcagtccgtag

SEQ ID NO: 243471 - DNA, 930 bp, synthetic construct
  misc_feature 1..930: note = Description of Artificial Sequence: Synthetic coding sequence
  source 1..930: mol_type = other DNA
atgatcactttccttcccatcatcttttccatcctcatcgtcgtgaccttcgttattggtaactttgcaaacgggttcatcgcccttgtgaattcaatcgagtggtttaagcggcaaaaaatctccttcgctgaccagatcctgacagctctcgcagtatctagagtcgggctgttatgggttctcgtcctgaattggtatgcaacagaattgaatcctgccttcaattcgatcgaggtccggattaccgcgtataatgtttgggccgttattaatcacttcagtaactggctggctactagtctttccatattttacttgctcaaaattgccaatttcagtaatttgatcttcttgcatctgaaacgacgcgtcaaatctgtagtgctggtaatcctactaggaccgctcctttttctggtttgtcacctgttcgtgataaatatgaaccagatcatatggactaaggaatatgagggaaacatgacctggaagataaagttgaggagcgccatgtatttgtcaaatacaacagtgacgatcctggcaaatctggtgccatttacgctgacactcataagctttctgctgctaatttgttccctttgcaagcacctgaaaaagatgcagctgcatggcaaaggatcacaggacccaagcatgaaggtccatataaaagccctgcaaacagtgacatctttcttactcttgtgtgctatttattttctgagtatcattatgtcagtatggtcgtttgaaagccttgaaaataagcccgttttcatgttctgcgaagccatcgctttcagctatcctagtacccatccctttatccttatctggggcaataagaaactgaagcaaacatttcttagcgtgctgtggcatgtgcggtactgggtcaagggagagaaaccatctagctcttag

SEQ ID NO: 243472 - DNA, 900 bp, synthetic construct
  misc_feature 1..900: note = Description of Artificial Sequence: Synthetic coding sequence
  source 1..900: mol_type = other DNA
atgctcagcgcaggcctaggtttattaatgttggtggccgtagtggaatttctgattgggctcatcgggaacggatcactcgttgtatggagttttagagagtggatcagaaaattcaactggagcagttataatctgatcatcctgggcttggctggatgtcgttttctgctgcagtggctgattatcctcgatttgtctctattcccgttattccagtccagtcggtggcttcggtacctcagcatattctgggtgcttgtatcccaagctagcctgtggtttgcaacattcctgtccgtgttttattgcaagaagattacaaccttcgataggccagcctacctgtggctcaaacaaagagcctataacctttctctttggtgcctccttgggtactttataatcaatctcctgctcaccgtgcaaatcggcctgacgttttaccaccctcctcaggggaactcttctatacgctatcccttcgagtcttggcagtatctctatgccttccagctgaacagcggctcatatctgcctttagtggtgttcctcgtttcctctgggatgcttatcgtatctctttacactcaccacaagaagatgaaggttcatagtgcaggaagacgggatgtgagggctaaggcacacataacagcactcaaaagcttaggatgcttcctgcttctgcacctggtttacatcatggccagccctttttcaatcacatctaagacataccctcctgatctcacaagcgtgttcatctgggagaccctgatggctgcttacccgtcccttcattcgctcatactgataatgggcattcccagggtgaagcagacctgccagaagatcctttggaagaccgtatgtgctcgaagatgttggggtccatag

SEQ ID NO: 243473 - DNA, 900 bp, synthetic construct
  misc_feature 1..900: note = Description of Artificial Sequence: Synthetic coding sequence
  source 1..900: mol_type = other DNA
atgatcacgttcctttatattttcttcagcatcttgatcatggtgctgttcgtgctaggcaactttgctaacgggttcattgctctggttaattttattgattgggttaagcgaaaaaagataagtagcgctgatcagattcttaccgcactggccgtctcccggattgggctcctctgggccctgctgctcaactggtacctcacagtgttgaatcccgcattttatagcgtcgagctccgcattacttcctataatgcctgggtagtgactaaccacttttctatgtggttggccgctaacctgagcattttttaccttctcaagatcgcgaatttctctaatcttctgtttctacatctaaagcggcgtgtcaggtcagtgatcctggtcatcttactgggaactcttattttccttgtgtgtcacctgttagttgccaatatggatgaatccatgtgggcggaagaatacgagggcaacatgacgggaaagatgaagctcagaaacacagtgcacctgagctatttgactgtgaccaccttatggtccttcattccttttacactgtcccttatctcttttcttatgctcatctgcagcctttgtaagcatctcaagaaaatgcagctccacggcgaaggctcccaagacctttctacaaaggtccacattaaggcactgcagactctcatctctttcctattactgtgtgcaattttttttttgttcctgattgtcagtgtgtggtcccccagacgactcaggaatgaccctgtggtgatggtgagcaaggccgtgggtaatatttacctcgccttcgactctttcatcctgatttggcgcactaagaaactaaaacacaccttcttgttgatactgtgccagattcgttgctag

SEQ ID NO: 243474 - DNA, 957 bp, synthetic construct
  misc_feature 1..957: note = Description of Artificial Sequence: Synthetic coding sequence
  source 1..957: mol_type = other DNA
atgaacggggatcatatggtgcttgggagtagcgttacagataaaaaggcgattattctggtgacaatccttctactacttcggctggtcgccattgctggcaacggtttcatcacggctgccctaggagttgaatgggtgctgcgcaggatgttactaccatgcgacaagctgctcgtgtctcttggggctagccgcttctgtctgcagagtgtggtgatggggaaaactatttacgttttcctgcatcctatggcgttcccatataaccctgttttgcagttcctagccttccaatgggacttcctgaatgccgctaccttatggtcttccacttggctgagtgtgttctattgtgtcaagatagccacattcacccacccagtgttcttctggttaaagcataagctcagtgggtggctgccttggatgttgttttcatccgtaggcttgagcagcttcactacgatcctgtttttcatagggaaccaccgaatgtatcagaattacctccgcaatcacctccagccctggaacgttacaggcgactctatacggtcctattgcgaaaagttctacctgttcccgctgaagatgatcacctggactatgccgaccgctgttttcttcatctgcatgatacttcttataacatccctggggcgtcacaggaaaaaagccctgttgaccacgtcagggtttcgtgaacccagcgtgcaggcccacattaaggccctccttgctctgctgagttttgcaatgctatttatctcctacttcctgtcccttgtgttttctgcagcgggaatctttcctccactcgactttaaattctgggtctgggaaagcgttatctacctctgcgctgcggtgcacccgatcattcttctgtttagtaactgtaggttgagggcagtattgaaatctaggagatcaagtaggtgtggtacaccttag

SEQ ID NO: 243475 - DNA, 1314 bp, synthetic construct
  misc_feature 1..1314: note = Description of Artificial Sequence: Synthetic coding sequence
  source 1..1314: mol_type = other DNA
atgcccaaattcaaggcagcacgtggggtcgggggtcaggaaaagcatgcaccgttggccgaccagatattagctggaaacgccgtcagggctggcgtgagagaaaagcgcaggggaaggggaacaggggaggcggaggaagagtacgtggggcctcgcttaagtcgtagaattctgcagcaggctcgacagcagcaggaagagcttgaagccgagcacggaacaggggataagcccgctgctccacgggagcgcaccacgaggctgggtcccaggatgccgcaggatggaagtgacgatgaggacgaagaatggcctacactggagaaagccgctaccatgaccgccgcaggccatcatgcagaggtcgtggtggatcctgaggacgagagagcgatcgaaatgtttatgaacaaaaatccaccagccagaaggaccttggctgatatcattatggagaaattgacagagaagcagactgaggtcgagaccgtgatgtctgaagtttctggctttccaatgcctcaactcgaccccagggtgttggaagtttaccggggagtgcgagaggtgttgagtaaatataggtcaggtaagctcccaaaggcatttaaaatcatcccagctttatctaattgggaacagatcctctatgtgaccgaaccagaagcttggacagcggcagccatgtaccaggccacaaggatatttgctagcaatctgaaggaaagaatggcccagaggttctacaatttggtcttattgccaagagttagggatgatgtggccgagtataaaagactaaacttccacctttacatggccctcaaaaaggccctattcaagccaggagcctggtttaaggggattctaatccccctgtgcgagagcggcacctgcacactaagggaggccatcatagtgggctctattatcactaagtgttcaatcccggtcctccattcctcggctgccatgctgaaaatagccgagatggaatacagtggcgcaaactcaatcttcctccgtctactgttggataagaagtacgccctgccatatagagtcctggacgccctggtgtttcacttcctgggctttcgaacagagaagcgggagctgccagtcctgtggcatcaatgtcttctgacactcgtgcagagatataaagctgacttggccaccgatcaaaaagaagcgctgctggagctactcaggttgcagccacacccccagctttccccagaaatccgccgagagctgcagtcagctgtaccacgtgatgtagaagatgtgcctatcactgtcgagtag

SEQ ID NO: 243476 - DNA, 951 bp, synthetic construct
  misc_feature 1..951: note = Description of Artificial Sequence: Synthetic coding sequence
  source 1..951: mol_type = other DNA
atggatcagaacaatagcttgccaccatatgcacaaggattagcttctccacaaggcgcaatgacccccggaatcccgatttttagcccaatgatgccctacgggactgggctcacaccacagccaattcaaaacacaaactctctcagcattctcgaagaacaacagcgccagcagcaacagcagcagcagcagcagcagcaacaacagcagcaagccgtagccgcagccgctgtgcaacagagtacctcacaacaggctacacagggcacttccggccaggcaccccaactgttccatagccagacccttaccacagctcccctgccaggtaccacacctctgtacccatctcccatgacgccgatgactccgataactcccgctacccctgcatctgagagctcaggaatcgtcccccagctccaaaatatcgtgtccacggtcaaccttggctgtaaactggatcttaagacaatagccctgagagccaggaacgcagaatacaaccctaagcggttcgcagccgtcatcatgaggatccgcgagcccaggacaacagctttaatctttagttccggtaagatggtttgtacaggggcaaagtctgaagaacaaagtcgtctggctgccagaaagtacgccagagtcgtgcagaagctgggtttcccggcaaaatttctggatttcaagatccaaaatatggtcggctcctgcgacgttaaatttcccatccgcctagagggtctggtcttgactcaccagcagtttagctcctatgagccagagttattcccaggcctaatctacaggatgatcaagcctaggatcgtgcttttgatttttgtgagtggtaaggtagtgctcacaggcgctaaggtgagagccgagatctacgaggccttcgagaacatctatccaattcttaaaggtttccgcaagacaacctag

SEQ ID NO: 243477 - DNA, 1020 bp, synthetic construct
  misc_feature 1..1020: note = Description of Artificial Sequence: Synthetic coding sequence
  source 1..1020: mol_type = other DNA
atggatcaaaacaacagtttaccaccatatgcccaaggactggccagcccgcagggcgctatgacacccggaatccctatcttcagtcccatgatgccctatggcaccgggctgacgccacaacctatccaaaataccaatagtttatccatcctggaggaacaacagcgccagcagcagcagcagcagcagcagcaacagcagcagcagcagcaacagcagcagcagcagcagcaacagcagcagcagcagcaacagcaacagcagcagcagcagcaacagcaggcagtggccgcagcggcagttcaacaatcgactagtcagcaagccacccagggtactagcggacaggcccctcagctctttcactcgcaaaccctgactaccgctcctcttcccggaaccacgcccctctaccccagcccgatgacgccgatgacgcctataacaccggctacccctgcctcagaatcctcaggaatcgtgccacaactccagaacatcgtttcaactgttaacctcggttgtaagttggatctcaagacaattgctttacgagctcgtaacgccgaatataatcctaaaaggttcgcagctgtcatcatgagaatccgggaaccacggaccactgcactgattttctccagtggtaagatggtgtgcaccggcgcaaagagcgaagagcagtcccgccttgccgctaggaagtacgcccgagtggtgcagaagctcggttttcctgcaaaatttctggattttaagatacagaacatggtgggctcgtgtgacgtgaagttccctattcgcttagaggggctggtactgactcatcagcagttttcctcgtacgagcccgagctgttccctgggctcatttatcgcatgatcaaacccaggatcgtgctcttgatattcgtctcaggtaaagtagtcctcaccggggctaaggtccgtgcagaaatctatgaagcgttcgaaaacatatacccaatccttaaagggtttaggaaaaccacatag

SEQ ID NO: 243478 - DNA, 627 bp, synthetic construct
  misc_feature 1..627: note = Description of Artificial Sequence: Synthetic coding sequence
  source 1..627: mol_type = other DNA
atggatcagaacaatagcctgcccccttatgcccagggcttggcgtctccccaaggtgctatgacaccaggcatccctattttcagcccaatgatgccttatggtacagggctgaccccccagccgatccaaaacaccaactctctgagtattttggaggagcagcaacgacagcagcagcagcagcaacaacagcagcagcaacagcaacagcaacagcagcagcaacagcaacagcaacagcagcagcaacagcagcagcaacaacagcagcagcagcagcaagctgttgccgcagccgcagtgcagcaatcaacaagccagcaggccacccaagggacatcaggtcaagctcctcagctctttcactctcagaccctgaccaccgcacccctgcccggtaccacacctttgtacccttcaccgatgacacctatgacccctataaccccagctaccccagccagcgagtcaagcggcattgttcctcagcttcagaacatcgtttcgacagtgaacctaggctgtaaactggatctgaagaccatcgcccttagggcacgcaacgcagaatacaatcctaagcggtttgcggcagtgatcatgaggatacgagagccacggtag

SEQ ID NO: 243479 - DNA, 456 bp, synthetic construct
  misc_feature 1..456: note = Description of Artificial Sequence: Synthetic coding sequence
  source 1..456: mol_type = other DNA
atggatcaaaacaactctctccctccctatgcgcaagggttggcttctccacagggagcaatgaccccgggaatccccatttttagcccgatgatgccatacggaaccggcttgacgcctcaacccattcaaaatactaactcgttatccatcttggaggagcagcagcgacagcaacagcaacagcaacaacagcagcaacaacagcaacagcagcaacagcagcagcagcagcagcaacagcagcagcaacagcagcagcagcagcagcagcagcagcaacaggccgtggcggctgccgcagtgcagcaaagcacaagccaacaggccacgcagggcacttccggccaggccccacagctctttcattctcaaacgttaacgactgctcctctgccgggaactacacccctgtatccaagtcccatgacgccaatgacacccattacaccctag

SEQ ID NO: 243480 - DNA, 306 bp, synthetic construct
  misc_feature 1..306: note = Description of Artificial Sequence: Synthetic coding sequence
  source 1..306: mol_type = other DNA
taagaggagcagtcgagactggcagccagaaagtacgctcgagtggttcagaaactgggtttcccagcgaagtttctagactttaaaatacagaatatggtaggctcctgtgacgtgaagttcccaatcagttatgagcctgagttgtttcccggtttaatttataggatgattaaacctcgtattgtcctgcttatctttgtgagcggcaaggtcgtgctgactggcgcaaaggtgcgagccgagatctacgaagccttcgaaaacatttaccctatactaaaaggtttccgcaaaacaacatag

SEQ ID NO: 243481 - DNA, 960 bp, synthetic construct
  misc_feature 1..960: note = Description of Artificial Sequence: Synthetic coding sequence
  source 1..960: mol_type = other DNA
atgaccccaggcatccctattttctccccaatgatgccatatggcacgggtctgactccacagcctatccaaaatacaaatagcctttcaattctcgaagaacaacaaaggcagcagcagcaacagcagcagcagcagcagcagcagcaacagcagcagcagcagcagcaacagcaacaacaacagcagcagcaacagcagcagcaacagcagcaacaacaacaggcggtggcagccgctgccgtccagcagtctaccagccagcaagcaacacagggtacaagcgggcaggctcctcagctttttcatagtcagaccctgaccaccgctccacttcccggtaccacccccttatacccgagcccaatgacccccatgaccccaattactcctgctacccctgcaagcgaatcatcaggcattgttccgcagttgcagaacatagtttcaactgtaaatcttggttgcaagctggatctaaagacaatcgctctccgggctaggaatgcagagtacaaccccaaaaggtttgctgcagtcattatgcggatccgcgaaccgagaactacggcactgatattctctagtggaaagatggtgtgtaccggggcaaagtccgaggaacagagcaggctggccgctagaaaatacgcacgcgtggtccagaagttaggcttccctgccaagtttctcgacttcaaaatccagaatatggtggggtcctgtgatgtcaagttccctatccgccttgaaggtctagtgctcacgcatcagcaattctcctcatacgaaccggagctctttcccggtctgatttaccggatgatcaaaccacggatcgtcctcttgatctttgtgtccgggaaagtggttctgaccggtgccaaagtacgtgcagagatttacgaagcttttgaaaacatctatcctatcctcaaaggcttccggaagaccacatag

SEQ ID NO: 243482 - DNA, 2610 bp, synthetic construct
  misc_feature 1..2610: note = Description of Artificial Sequence: Synthetic coding sequence
  source 1..2610: mol_type = other DNA
atggatttccctagttcactgcggccagcattgttcctgactggcccacttggcctgtctgatgttccggacctgagcttcatgtgtagttggcgcgatgctctgaccctgcccgaagcccaacctcagaactccgaaaatggtgcactccatgtgacaaaagacctcctgtgggagcctgcgacaccgggtccactccccatgctgcctcctctgatcgatccctgggatcctggactgaccgctcgggatctcctgtttcgtggcggatgccgctacaggaagagacccagagtcgtgttggatgtaacagagcaaatcagtcgctttctgttggaccacggtgatgtagccttcgctccattgggaaaactgatgctcgagaatttcaagcttgagggtgctgggtcccggactaagaagaaaacagttgttagcgtcaagaagctgttgcaggatctcggaggccatcagccctggggctgtccttgggcttacctttcaaaccgccagcgtcgcttttcaattctgggaggacccatcctgggaacatctgttgcatcacacctcgctgagttgctccacgaagagcttgtactaagatgggagcagcttttacttgatgaggcctgtacagggggtgccctcgcttgggttccaggcaggacgccgcagttcggtcagctcgtgtaccctgccggtggtgcccaagatagactccactttcaggaggtcgtcctgactcccggagacaaccctcagtttctgggaaaacctggcagaatccagttgcaaggtccagttaggcaggtggtaacatgcaccgtccaaggtgagtcaaaggcactgatttatacttttctcccacactggctgacatgttacctcacacccggtccatttcatccgagttctgctttgctggcagttaggtcggattaccactgtgccgtctggaagtttggcaagcagtggcagccaactctcttacaagccatgcaggtggagaagggcgctaccgggattagcctcagccctcatctgccaggtgagctggctatttgctcccggtccggcgcagtctgtctttggtcccccgaagatggattacggcaaatttaccgggatcccgagacgctggtctttagagatagctcctcctggaggtgggccgactttacggcgcatccccgagtgcttacggtgggcgatcgcaccggggtaaaaatgctggatacgcagggcccacccggatgtgggctcctgttatttaggttgggcgcagaggcatcctgccagaagggagagcgggttctgctaacccagtacctcggccattcaagccctaagtgtttacctccaacactacatcttgtgtgcacacagttttcactctatctggtggacgaacgcttacccttggtgcctatgcttaagtggaaccatggacttccctctcccctcctgttggccagactcctccccccaccacgcccttcctgtgtccaaccactcctactcgggggtcagggaggccaactgcagttgttgcatctggcaggcgagggagccagtgtacctcgactcgcgggacccccacagagcctcccctctagaattgacagtttacccgctttccctcttttggagcctaagattcagtggcgtctgcaggagaggctaaaggcgcctaccattgggctggccgcagtggtgcctccattgccaagtgcgcctacccccggactggtattgttccaactgtccgctgccggtgacgtattctaccagcagctgagaccacaagtggattctagtctccggcgagacgccggaccacctggagatactcaacctgactgccacgcgccaacagcatcatggacaagccaggatactgccggatgcagccagtggctgaaggccttactgaaagttcccctagcacctcccgtgtggactgcacctacatttacccaccggcagatgctcggctccacagagttgcgccgtgaagaggaggaaggtcagaggttaggcgtgttacgaaaagctatggcccgaggacagctcctgttacagcgagatctgggctcactgccagctgccgaaccacctccagctcccgaatcgggattggaagataagcttagcgagcgcctaggcgaggcctgggcgggacggggtgccgcatggtgggaacgccagcaggggcgaacatctgagcctggcagacagacaagacgtcccaaacgtagaacacaattatcctctagcttctctctctctgggcacgtggatccgtccgaagataccagcagcccccactcccccgagtggcctcccgctgacgctctgcccctgccgccaactaccccccctagtcaggagctgaccccagatgcttgtgcccagggcgtgccgtctgaacagcggcaaatgctgcgagactatatggccaaacttcctccgcaaagggacacccccggatgtgccactacccctccgcactctcaggcttcaagcgtccgggcaactagaagccagcagcatacacctgtgctatcgtcctcccagcctctgagaaagaagccccgaatgggattttag

SEQ ID NO: 243483 - DNA, 1353 bp, synthetic construct
  misc_feature 1..1353: note = Description of Artificial Sequence: Synthetic coding sequence
  source 1..1353: mol_type = other DNA
atgtccgacttttccgaggagttgaaaggaccagtgactgatgacgaagaggtggagacttccgtgttgtccggagcaggaatgcactttccttggctgcagacctacgtggaaacggtggccatcggaggcaagcgccgtaaggactttgcccagaccacgtcggcctgcttgagttttatccaggaggccctgctcaagcaccaatggcagcaggccgctgagtacatgtacagctacttccagacactcgaagatagcgattcatataaacgccaggctgccccagagattatatggaaactcgggagcgaaatcctgttttaccacccaaaaagtaacatggaaagttttaatacatttgctaatcggatgaaaaacatcggcgtaatgaattacctgaaaatttctctgcaacacgccctgtatctcctgcatcatggtatgctcaaggacgcgaagaggaacctgagtgaagccgagacttggcgccatggagaaaatacgagttctagagagatcctcatcaacctgattcaagcctacaagggtttgctgcagtactacacctggtctgagaagaagatggaattgtccaagcttgacaaggatgactacgcctacaacgccgtggcccaagacgtcttcaatcattcttggaagacatcagccaatatcagcgctctcattaagatccccggtgtgtgggacccctttgtaaagtcctatgtggagatgctggaattttacggcgatcgagatggcgcacaggaagtccttaccaattacgcttatgatgaaaagtttccctctaaccccaatgcacacatctacctgtacaatttcctgaagcgccagaaggcacccagaagtaaacttatctccgtactcaaaatcctctatcagatagtcccctcacataagcttatgttggagtttcacactctgctgagaaaatccgagaaagaagagcatcgtaagctcgggctagaagtgctattcggcgtactggatttcgctgggtgcacaaagaatatcacagcctggaagtatcttgccaagtacctgaaaaatatcctgatgggaaaccatttggcatgggtgcaggaggaatggaactcccggaaaaactggtggcccggatttcatttctcatacttttgggccaagtccgattggaaagaggataccgcactggcctgcgagaaagcctttgtggccggacttctgctgggcaaaggatgcagatatttccgatacattctcaaacaagaccaccagatccttggaaagaagatcaaaaggatgaaaaggtctgtcaaaaagtactccatcgttaatccccgattatag

SEQ ID NO: 243484 - DNA, 1353 bp, synthetic construct
  misc_feature 1..1353: note = Description of Artificial Sequence: Synthetic coding sequence
  source 1..1353: mol_type = other DNA
atgtcagacttctcggaggaactgaaagggccagtaacagacgatgaggaagtagaaacctccgtgctctcaggcgcaggaatgcacttcccttggctacagacatacgtggaaacagtggccattggagggaaacgcagaaaggatttcgcccagactacatcggcttgccttagttttatacaggaggcactgttaaagcatcaatggcagcaggccgctgagtacatgtactcttatttccaaacgcttgaggactccgactcctataagcggcaggccgcacccgagatcatttggaaactcgggtctgaaatactgttctaccatcccaagtctaacatggaatcgtttaacacttttgccaaccgaatgaaaaacataggagtgatgaattatcttaagatctccctccagcatgcactgtatctcctgcaccatggcatgctgaaagacgcgaagaggaacttatctgaagcggagacctggcgccatggcgagaataccagttcacgtgaaatccttatcaaccttatccaagcttataagggcctgctgcaatactatacatggagcgaaaaaaaaatggaactgagcaaactggataaggacgactacgcctacaatgcagtcgcgcaggacgtcttcaaccacagctggaaaactagcgcaaatatctcagccctcattaaaattccaggagtgtgggatccgttcgtgaagtcctatgtggagatgctggagttctatggtgaccgggacggtgcccaagaagtccttactaactatgcgtatgatgagaaatttccatctaatccgaacgcccacatctacctctataactttctgaaacgccagaaggcgccacggagcaaactgattagcgttctgaaaatcctgtaccagatcgtgccgagtcataagctaatgctggagttccacactctccttaggaagagcgagaaagaagagcacaggaagttgggtcttgaagtgctttttggcgttctagacttcgccggatgtacaaagaacatcacggcctggaaatacctcgccaagtatctgaagaacatcctcatggggaaccatctcgcctgggttcaggaagagtggaacagcaggaagaattggtggccgggattccacttttcctacttttgggccaagtcagactggaaggaggacaccgcactggcctgtgagaaagctttcgtcgctggcctgctcctaggtaagggatgtcgctacttcaggtacatccttaaacaggatcatcagatcttaggtaagaagattaaacggatgaaacgaagcgtcaaaaagtacagcatcgtcaatcctagactatag

SEQ ID NO: 243485 - DNA, 1011 bp, synthetic construct
  misc_feature 1..1011: note = Description of Artificial Sequence: Synthetic coding sequence
  source 1..1011: mol_type = other DNA
atggagtcattcaatacatttgccaaccgtatgaagaatatcggcgttatgaattacctcaagatatcattgcagcacgctctgtacctcctccaccatgggatgttaaaagatgcaaagagaaatttgtctgaagccgagacttggaggcacggggagaatacttcgtctcgagagattctcatcaatctgatccaagcatacaagggcttactgcagtactacacttggtcagagaagaagatggagctctcgaagctggataaggacgactacgcctataatgccgtagcccaagatgtgtttaatcatagctggaagacaagcgccaatatctctgcactgatcaagatcccgggagtttgggatccatttgttaagtcttatgttgaaatgcttgagttttacggtgatagagacggtgctcaggaagttctcactaactacgcctacgatgagaagtttccttccaatcctaacgcccacatttatctgtacaatttcctgaagcgccagaaggccccaagatcaaaactgatatctgtcctgaagatactctatcagattgtgccgagccacaagctgatgctggagtttcacacattgcttagaaaaagcgagaaggaggaacatcgtaaacttggactggaagtcctgtttggcgtgctggatttcgccggatgcactaaaaacatcactgcatggaaatatcttgctaagtacctcaagaatatcctaatgggaaatcacctggcctgggtgcaggaagagtggaactctcggaaaaattggtggcctgggttccacttcagctatttctgggccaaaagtgactggaaggaggacacagctctggcctgcgagaaggcctttgtagcaggcctcctcctaggcaaagggtgtcgctatttccgctatattctgaagcaggatcaccagatactcggaaagaaaatcaaacgaatgaagagatcggtcaagaagtactccatcgtgaaccctaggctttag

SEQ ID NO: 243486 - DNA, 1011 bp, synthetic construct
  misc_feature 1..1011: note = Description of Artificial Sequence: Synthetic coding sequence
  source 1..1011: mol_type = other DNA
atggagtccttcaacacattcgctaacaggatgaagaatattggggtgatgaactatttgaaaatttctctccagcatgccctgtacctgcttcatcatggaatgctcaaggacgcaaagcgcaacctgtccgaagcggaaacctggagacacggcgagaatactagttctcgcgagatcctaattaacctgatacaggcttacaaaggactcctccaatattacacctggtctgagaaaaaaatggagctctccaagttagataaagacgactacgcatacaacgctgtggctcaagacgtgttcaaccactcctggaaaacttctgccaacataagcgccctaattaaaattccgggagtctgggacccattcgttaaatcttatgtggaaatgctcgaattttatggggatcgggacggcgcacaggaggtccttactaattacgcatatgatgagaaatttccctccaacccaaacgcccatatctatctctataatttcctaaaaagacagaaagcccctcgtagtaagctcattagcgtgcttaagatcttgtatcagattgtcccctcacacaaactaatgttggaatttcataccttactgcgcaaatctgagaaagaggaacaccgaaagctcggtctggaagtactgttcggcgtgcttgacttcgcgggatgtaccaagaacattacggcgtggaagtaccttgccaagtacctgaaaaacatcttgatgggaaaccatctagcatgggtgcaagaggaatggaattccaggaaaaactggtggccaggctttcacttctcttacttttgggccaaaagcgattggaaggaagacactgcgctggcatgcgaaaaagcctttgtggccggactcctgctcggcaagggatgtcgctacttcaggtatatcttgaagcaggaccaccagatcctgggaaaaaagatcaaaagaatgaaacggagtgttaaaaagtacagtattgttaatccgcgtttgtag

SEQ ID NO: 243487 - DNA, 861 bp, synthetic construct
  misc_feature 1..861: note = Description of Artificial Sequence: Synthetic coding sequence
  source 1..861: mol_type = other DNA
atgtctgatttctctgaagagctgaaaggcccagtcactgacgacgaggaggtggagacttcggtgctgtctggcgctggaatgcactttccatggctgcagacctacgttgaaacagtcgctataggcggtaagaggcgaaaggatttcgctcagacgaccagcgcatgcttgagtttcatccaggaagccctactgaaacatcagtggcaacaggcagctgagtatatgtattcttattttcaaacgctggaggactccgatagttacaaacgacaggcagccccagaaatttctctacaacatgctctctaccttctgcaccacggcatgctcaaagacgccaaaagaaatcttagcgaagctgagacgtggcggcacggcgaaaatacaagctcccgagagattctgatcaatttaatacaggcctacaagggcttgctccaatattacacatggagtgagaagaaaatggagctctccaagttggataaagacgactatgcctacaacgctgtcgcacaagacgtgttcaatcactcttggaaaaccagtgccaatatcagtgccctgattaaaataccgggagtgtgggaccctttcgtgaagagttatgtcgagatgttggaattttacggagaccgtgacggagcacaggaggtgctgaccaactatgcttacgatgaaaaattcccctcaaatcccaatgcacacatatatctgtacaatttcctgaaacggcagaaagccccaagatccaagctgatttccgttttgaaaatcctgtaccagatcgttccatcccacaaactgatgctcgagttccatactctcctgcgaaagagtgaaaaggaagaatag

SEQ ID NO: 243488 - DNA, 849 bp, synthetic construct
  misc_feature 1..849: note = Description of Artificial Sequence: Synthetic coding sequence
  source 1..849: mol_type = other DNA
atgagtgacttcagcgaggagctcaagggccctgtgaccgatgacgaggaagtcgagaccagcgtattaagcggggctggcatgcacttcccctggctgcagacctatgtcgaaacagtggccatcgggggtaagagaagaaaagattttgctcaaaccacatctgcctgcttgtcttttatacaggaggccctacttaagcatcaatggcagcaggccgcagagtatatgtattcttattttcaaacgttggaggactcagactcatacaaacgacaggctgcccctgagatcagcctacagcacgccttgtatcttcttcatcatggaatgctgaaagatgccaagcgcaacctgtcagaggccgagacgtggaggcacggtgagaacacctccagccgagagatattgattaacttaatccaagcatataaaggcctgttgcaatactacacatggtcggagaaaaaaatggaactgtctaaattggacaaggatgattacgcttacaatgctgttgcccaggatgtttttaaccattcttggaaaacatccgcgaacattagcgcccttattaaaatccccggagtgtgggaccccttcgtgaagagctatgttgagatgctcgagttctatggcgatagggacggggctcaggaagttttaaccaactatgcatacgacgagaaattccccagtaaccctaacgctcatatttatttatataactttcttaagcgacagaaagcccctcgcagtaagcttatcagcgtgctcaagattctctaccagattgtacctagtcataagctcatgctcgaattccatacactgctacgcaagagctag

SEQ ID NO: 243489 - DNA, 936 bp, synthetic construct
  misc_feature 1..936: note = Description of Artificial Sequence: Synthetic coding sequence
  source 1..936: mol_type = other DNA
atgtccgatttctctgaagagcttaaaggtcctgtcacagatgacgaagaggttgaaactagcgtgttgtccggggctggcatgcactttccctggctgcagacgtacgtggaaaccgtggcaataggtggtaagcgccgaaaagatttcgcccagacgacctctgcgtgcttatcattcatccaggaagctcttctcaaacatcagtggcagcaggctgcggaatatatgtacagctattttcagacgcttgaagactccgactcgtataaacgccaagccgcacctgagatcatatggaagctgggatccgagatcttgttctatcaccccaagagcaacatggagtcttttaatactttcgcaaatcggatgaagaatatcggggtgatgaactatcttaaaatttcgctgcagcatgctctgtatctgctgcaccacggaatgctgaaggacgcgaaaagaaatctttccgaagccgagacatggcggcatggcgagaatacatcctctcgcgaaatccttattaaccttattcaagcttataaaggattgcttcagtactatacatggagcgagaagaagatggaactgagtaagctggacaaagacgattatgcctacaatgctgtagcacaggatgtgttcaatcattcctggaagacatctgctaatattagcgcactcattaagattcccggagtctgggaccccttcgtcaagtcttatgtagagatgcttgaattttatggtgacagggacggtgcacaggaagtcctcacaaactacgcctacgatgagaagttcccatccaacccaaacgcacacatttacctatataactttctgaagagacagaaggcaccacgaagcaaactgatctctgttctcaagcaccttcaaaaaatctctatcatgtattccacattaaggtag

SEQ ID NO: 243490 - DNA, 2328 bp, synthetic construct
  misc_feature 1..2328: note = Description of Artificial Sequence: Synthetic coding sequence
  source 1..2328: mol_type = other DNA
atgctgcccccactgatcgacccctgggatcccggactgaccgcacgggatctgctgtttagaggcggatgccgttaccgaaagcgccctagagtggttctggatgtgacggagcaaatctctcggttcctgctagaccacggtgacgtcgcgttcgcccctctcggaaagctcatgcttgaaaattttaagctagagggggctggctccaggacaaaaaagaaaaccgtggtgtctgtaaaaaagttgctgcaggatctcggaggacaccaaccatgggggtgcccttgggcatacctgagtaatagacaaaggagatttagcatcttggggggacctattctgggtacatctgtggcctcacacctcgccgagcttctgcacgaagagctcgttctgcggtgggagcagctgttactcgacgaagcatgcacgggcggtgccttagcttgggttcccggtagaaccccccagttcgggcagctagtgtatccagctggaggtgcccaggaccgcctgcactttcaggaagtcgtcctgacacccggagataacccacaatttctcggtaaacccggaagaatccagttacaaggtcccgtcagacaggtagtaacatgcactgtccagggagagactcttctggctgtacgaagtgactaccactgtgccgtatggaaattcgggaagcagtggcagcctactctactgcaagcaatgcaggttgagaaaggtgctacaggaatttctctgagtccccatcttcccggtgaacttgccatctgctcccggtctggcgcagtttgcctgtggtcacctgaagacggactgcggcaaatttatcgcgaccccgaaaccttggtcttccgtgacagctcatcatggcgctgggccgattttaccgctcatccacgcgtcctcaccgtaggcgaccgtaccggtgtcaaaatgttagacacgcagggccctccgggatgtggactgcttttgtttcggcttggcgcagaagcctcttgccagaaaggtgagcgagtgctcctgacacagtatttaggacattcttccccgaagtgcctcccaccgacacttcacctggtgtgcacacagttcagtttgtatctggtcgacgagcgactgcctctggtgccaatgctaaaatggaaccacgggttgccctccccgttactcctagctcgtctgctacctccgccaaggccctcttgcgtgcagcctctcctgttggggggacaagggggtcaattacagctgctccacctggcagagggggcatcagtaccccgattggctggacctccgcagtctctacctagcaggatcgatagtctgccggcttttccccttctcgagcccaagattcagtggagactgcaggagcgattaaaggcacccaccattggcctggcggcagtggtgcccccattgcctagcgcacccacccccggtcttgttctctttcagctctctgcagcaggagacgttttctatcagcagctgcgaccccaagtggatagctcattacgacgcgatgcaggccctccgggtgacacccaacccgattgccacgcacctaccgcaagttggacttcccaggataccgccggttgttctcagtggctgaaggccttgcttaaggtgccgctcgcacccccagtgtggaccgcccctaccttcacgcataggcagatgttgggctctaccgagcttcgccgagaggaggaagagggacagcgcctcggcgtgcttcggaaagccatggcacgcggacaattactcctgcagagggatctggggtcactcccagcagcagagccaccacccgctcccgagagcgggctggaagacaagctgagtgagcgtttgggcgaagcttgggccggtcgcggagccgcttggtgggaacgacaacagggcagaacctctgaacctggacggcagacacggagaccaaagagacggactcagctgtcctcatcatttagtctgagcggacatgtggatccatctgaggacacttcttcccctcactccccagaatggccacctgcggacgccctcccgctgccccctaccaccccaccgtctcaggagttaacccctgacgcttgtgcacagggggtgcctagtgagcaaaggcagatgctgagagactacatggcaaaactgcctccccaaagggatacaccaggctgtgcaaccacaccaccacacagccaggcttcatccgtgcgggctactcggtcacagcagcatacacctgtcctgagctcaagtcagcctctcaggaagaagcccagaatgggcttctag

SEQ ID NO: 243491 - DNA, 2610 bp, synthetic construct
  misc_feature 1..2610: note = Description of Artificial Sequence: Synthetic coding sequence
  source 1..2610: mol_type = other DNA
atggatttcccctcatccctgcgacccgctctgttcttgaccggccctctgggcctgtccgatgttcctgacctgagcttcatgtgtagctggagagacgcactgacactaccagaggcccagcctcaaaattccgagaatggcgctcttcatgttacaaaggacctgctgtgggagcctgctaccccaggccctctgccaatgctacccccattgatagatccatgggatccgggactgacagcaagggacctgttattcaggggaggctgcaggtatagaaaacggccaagagtcgtgctcgatgtcactgagcagatttcccgtttcctgctggaccatggggacgtggcctttgcacccttaggcaaacttatgctcgagaattttaaattggaaggagcagggtcgaggactaagaagaaaacagtggttagtgtcaagaaattactgcaggacctgggaggccaccaaccctgggggtgtccatgggcgtatctgagtaaccgccaacggaggttcagcatcctggggggacccattctcggcacctccgtcgcttcccatctggcggagctgctgcacgaagagttggtgctgcgctgggaacaactgttgctcgatgaagcctgcaccgggggagcactggcctgggtcccgggtcgcaccccgcagtttgggcagctggtttaccctgcgggaggagcccaggaccgcctccactttcaggaggtggtcttgactcctggtgataacccacagtttctgggaaaacctgggagaattcagctgcaggggccagtgcgccaggtcgtgacttgcaccgttcagggggagtcaaaagctcttatctatacttttcttccccactggctgacttgctatttaaccccaggaccgtttcacccctcctccgcgctgttggcagtaaggagtgactatcattgtgccgtgtggaaatttggcaaacaatggcaacccacacttttacaggcaatgcaggtcgaaaaaggagcaaccggcatttctttgtcccctcatttaccaggggaactggccatttgctcaagatctggagccgtgtgcctctggagccctgaagacgggttgcgtcagatctaccgcgaccctgaaacactggtcttccgagactcttcctcttggcgctgggcggattttactgcgcaccctagagtccttactgtcggtgatagaaccggtgtcaagatgctcgacacacaggggccaccaggatgcgggttgctgctcttcaggcttggcgctgaggctagctgccaaaaaggcgagagggtcctgctaacccagtaccttggccattcttcaccgaagtgccttccacccactttacacctggtctgcacacagttttctctttatctggtggatgagagactcccactggtccccatgctaaagtggaaccatggcctgccgtcaccactgttgttggccaggctcttacctcctcctcgaccttcctgcgtgcagcctctgctgctggggggacaggggggtcagctgcaactcctgcatttagccggtgaaggggcttcagtcccacgactagctggacctcctcagagcttgccaagtagaattgacagccttccagctttcccccttcttgaacccaaaatccagtggagactacaggaacggctgaaagccccaactattggtttggcagccgtggtgccacctctgccaagcgcaccaacccccggtttggtgctctttcagctgagtgccgctggcgatgtgttctaccagcagctgcgcccacaggtggacagcagccttagaagggacgccggaccaccaggtgacacccagccagattgtcatgcccctaccgcttcctggactagccaggatacagccggttgttctcagtggcttaaagccttgctgaaagttccactggcgcctccagtctggactgccccaaccttcacgcatcggcagatgttggggtccacagaactccgccgagaggaggaggagggccagaggctgggagtcctcagaaaagccatggcacgaggtcaactcctgctacagagggacttgggatctctacccgctgctgaaccgcctcctgccccagagtccggtttggaggataagctgtctgagcgactcggtgaggcgtgggccggtcgtggcgcagcctggtgggagaggcagcagggcagaacctctgagcccggtaggcagacccgaaggcccaaaagacgtacacagctgtcctcttctttcagcctgtcaggacatgtggacccctcagaagatacgtcaagcccacacagtcccgaatggcccccagcggacgcactgcccttaccgccaacgacacctccctcgcaggagctgaccccagacgcctgcgcccagggcgtgccctccgagcagcgccaaatgctaagggactacatggctaaacttccaccccagagggacacaccgggatgcgccaccaccccgcctcactcacaggcctcgtcagtgagggcaacaaggtcacagcaacatactccagtcctgagcagctcccagccactgcggaagaaacccagaatgggattctag

SEQ ID NO: 243492 - DNA, 1047 bp, synthetic construct
  misc_feature 1..1047: note = Description of Artificial Sequence: Synthetic coding sequence
  source 1..1047: mol_type = other DNA
atggatttcccctcgagcttgcggcctgccctgttcctcacgggacccctcggccttagcgacgtgcctgacttatccttcatgtgtagctggcgagacgcactgaccctcccagaagctcagcctcagaattctgagaacggtgccctgcacgtcaccaaggatctgctctgggaacctgctaccccgggacccttgcccatgctcccccctcttattgatccctgggaccctgggctgacagcgagagatctgctatttagaggaggctgcaggtatcgcaagaggccacgcgtagttcttgatgtgaccgagcaaatcagccgctttctgctggatcacggggatgtcgccttcgcccctctcgggaaactcatgcttgaaaatttcaaactagagggcgctggatcacggactaaaaagaaaacagtcgtgtccgttaagaagctgctgcaagaccttggaggtcaccagccctgggggtgtccatgggcttacctgagtaatcgccaacggagattttctattttgggtggccctatactcggtacatcggtggcctcccatctagcagaacttctgcacgaggagcttgttctccggtgggagcagttactcctggacgaagcctgcaccggcggagctctggcttgggtgcctgggagaaccccacagtttggccaacttgtgtatcctgcgggaggtgctcaggataggctgcacttccaggaagtggtgctaacccccggagacaatccacagttcctgggcaaacccggaagaatccaattgcagggaccagtgaggcaggtggtgacttgtacagttcagggcgaaactttgctggctgtcagatctgactaccattgcgccgtttggaagtttggaaaacagtggcagccaaccctgctccaagcgatgcaggtggagaaaggggcaaccgggatcagtctctctccccatctgcccggtgaattggctatctgtagtagatccggggcagtgtgcctgtggagtcctgaggatgggtaccgccgttttctgtag

SEQ ID NO: 243493 - DNA, 2331 bp, synthetic construct
  misc_feature 1..2331: note = Description of Artificial Sequence: Synthetic coding sequence
  source 1..2331: mol_type = other DNA
atgctgccacctctgatcgatccctgggatcccggtctgactgccagggatctgctcttccggggtggatgtcgttaccggaaacgtcctagggttgtcctggacgtgacagagcagatttcacgttttctactcgatcatggcgacgtggctttcgccccactgggtaaactgatgctcgagaatttcaagttagagggggcaggctctcggaccaaaaagaaaacggttgtttcggtaaaaaagcttcttcaggacctgggcggacaccagccctggggctgtccatgggcctacctctccaacagacagcggagattttcaatactggggggaccaatcctgggcacaagcgtggcctctcatttggccgagctgctgcacgaggagttggtgctcagatgggaacagctacttctcgacgaagcctgcaccggaggtgcccttgcctgggtgccagggaggacgccgcagttcggacagctggtttacccagctggtggggcacaggatcgcttgcattttcaagaagtcgttctcacacctggggataacccccagttcctgggaaaacccggtcggatacagttacaaggacctgttcgacaagtggtgacctgtactgttcagggcgagacgctactcgccgtaagaagtgactaccattgcgccgtgtggaagtttggcaagcaatggcaacctaccctgctgcaggctatgcaggttgaaaaaggggctactggcatttcgctgtctccccatctgcctggagagctggcaatctgcagtaggtctggggcagtgtgcctctggtccccggaagacggattgcgccagatctatcgggacccagaaaccttggtatttagggacagcagctcttggaggtgggcggacttcacagctcaccctagagtgctgactgtcggcgatcggactggcgtgaagatgcttgatacccagggacctcctggctgcggcctcctgctctttcgcctcggagctgaagcgtcgtgccagaaaggtgagagagtcctgttgacccagtacttgggacacagttcccccaaatgtctgcccccaacactgcatctggtctgcacacaattttcgctatatttggtggacgagaggctccccctagtgccaatgttgaaatggaatcatggcctaccctcacctcttttgctcgccagactgttaccaccaccccgaccctcgtgtgtccaacccctgttgctcggagggcagggcggacagctccagcttctgcacctggctggtgagggagcaagtgtgccacgcctagcaggccctcctcagagtctgccttctcgcatcgactctctgccagcattccctctgctggaacctaagatccagtggcgcttgcaagagcgtcttaaggccccaactatcgggcttgctgcagtggtgcccccactgccctcagcccctacaccgggtcttgtccttttccagcttagtgccgctggagacgtgttctatcaacagcttcgcccacaggtagactctagcctaagacgggatgccggtccccctggagacacacagccggactgtcacgccccaacagccagctggaccagtcaggatacagctggctgtagtcagtggctgaaggcattattgaaggtccccttagcccctcccgtgtggaccgcccctacctttacgcaccggcagatgctcggttcaaccgaactgagacgcgaggaagaggagggtcagcgcctgggcgttcttaggaaagccatggctcgaggtcaactcttgctgcagagagatcttggcagccttcctgcagccgagccaccgccagcacccgaatctggactggaagacaagttatccgaaagactaggtgaagcgtgggccggaaggggcgcagcctggtgggaaaggcagcaggggaggacttccgaaccagggagacagacacgaaggccaaagcgcagaacacagctctcaagtagcttttcactgtctggtcacgtggatccaagtgaggacacctctagcccgcatagtccagaatggccacccgcagacgcccttcccttacctccgactacgcccccatctcaggagttgacaccagatgcgtgtgcccaaggcgtaccttctgaacagaggcagatgcttagggactatatggctaagctgccaccacagagggacacccctgggtgcgcgaccactccccctcactcgcaggcttcaagtgtacgcgctacgcggtcccaacagcacactccagtgttgtctagcagccagccgttgaggaaaaaacctagaatgggattttag

SEQ ID NO: 243494 - DNA, 1179 bp, synthetic construct
  misc_feature 1..1179: note = Description of Artificial Sequence: Synthetic coding sequence
  source 1..1179: mol_type = other DNA
atgctgaagtggaaccacggcttaccttcacctctgctactggcgcgtttgctgcccccaccgagaccaagttgtgtgcagccactattgttaggaggccagggcggacaacttcagctgttacatctggccgagggcgcatcagttcctcgcctggcgggtccacctcagtcacttccaagtaggattgattcactgcctgcattccctttgctcgagccaaaaatccagtggcggttgcaggagcggctcaaagcacccacaattggactggccgctgtggttcccccactccctagcgcacctacgcctggacttgttttgtttcagctcagtgccgctggagatgtcttctatcagcagctgcggccacaggttgattcttccctccgcagggacgccggtcctcccggagacacgcaacctgattgtcacgcccctacagcctcttggacatcccaggatacagccggatgctcccaatggttgaaggccctcctgaaggtgccgttggccccaccggtgtggaccgctcccacattcacccatagacagatgctgggttctacggagcttcgcagagaggaggaggagggccagaggttaggggtgttgaggaaggcaatggccagagggcaactgctcctccagagggatcttggctctctacccgcagccgaacctccaccggcacccgaatctgggctcgaggacaaactgagcgagagactgggcgaggcttgggcaggacggggtgccgcttggtgggaaagacagcagggcaggactagcgagcccggacggcaaactagaaggcctaaaagacgaacccagctgtcatccagctttagcctttccggtcatgtggatccttccgaggatactagcagcccccatagccctgagtggccgccagctgatgccctgcccctgccaccaaccacccccccttctcaagagctcactcctgatgcctgcgcacaaggcgtgccaagtgaacagaggcagatgcttcgggattacatggctaaattgcctcctcaacgagatacgcctggctgcgccaccacgccgcctcactctcaggcttcttcagtaagagccacgagatcgcagcagcataccccagtactatcatcctctcagccactacgtaagaaaccacgtatgggtttctag

SEQ ID NO: 243495 - DNA, 837 bp, synthetic construct
  misc_feature 1..837: note = Description of Artificial Sequence: Synthetic coding sequence
  source 1..837: mol_type = other DNA
atggacaagtccgggattgacagcctggaccacgtgactagcgacgccgtggaattggctaatcgttccgataatagcagcgattcttccctgtttaaaacccagtgcattccatactccccaaagggcgagaaaagaaaccccattcgcaaattcgtccgaactcccgagagtgtccacgcatctgactcaagttctgacagcagtttcgagcctatacctctgactatcaaagcaatattcgagagattcaagaatcgtaaaaagcgatataaaaaaaaaaagaagaggagatatcagcccacaggtcgcccaagggggagacctgaagggcgtcggaacccaatttacagcctaattgataagaagaaacaattccgctccagggggtctgggtttcccttccttgagagcgagaacgagaagaacgcaccgtggaggaagatcctcacatttgaacaggccgtggccagggggtttttcaattacatcgagaaattgaaatatgaacatcacctcaaggagtcactgaaacaaatgaacgtgggagaggatctggagaacgaggactttgactctcgtcggtataaattcctcgacgatgatggttcaatctctcctatagaagagagcacagcggaggatgaggacgcaactcacttggaggacaatgaatgcgatatcaaactcgctggggattcctttatcgttagcagtgagtttcctgttagattgtccgtatacctggaagaggaggatatcaccgaagaagctgcactgtctaagaaaagagcaacaaaagctaaaaacaccgggcagcggggactcaagatgtag

SEQ ID NO: 243496 - DNA, 837 bp, synthetic construct
  misc_feature 1..837: note = Description of Artificial Sequence: Synthetic coding sequence
  source 1..837: mol_type = other DNA
atggataaatctgggatcgatagcctggatcatgtgacaagcgatgctgttgaattggccaataggtctgataatagcagcgacagttctctattcaagactcagtgtatcccgtacagcccgaagggcgagaaaagaaaccccatccggaagtttgttcgcacacctgaatccgtgcacgctagcgatagcagctcagactcctccttcgaacctattccactcaccatcaaagccatcttcgaacggtttaaaaaccgtaagaaaaggtataaaaagaagaagaagaggcggtatcagcctactggcagaccgagaggtagacctgaagggcgaagaaatcctatatattcactcattgataagaagaaacagttcagatctagaggttctggatttccttttctagagagtgaaaacgagaagaatgccccatggcgaaagatcttgacgtttgaacaagcggtagcccgtgggttcttcaactatatagaaaagctgaagtacgaacaccacttgaaggagtctctgaaacagatgaatgtgggtgaggatctggagaacgaagactttgactcaagacggtacaagtttttggacgacgacggaagtataagtcctatcgaagagagcaccgccgaagatgaggacgctacacaccttgaggacaacgagtgtgacataaaactggccggagatagctttattgtgtcctctgagttccccgtccggctttcagtttacctcgaggaggaggatataaccgaggaggccgctctgtccaaaaagcgcgcaacaaaagccaaaaacaccggtcagcgaggcctgaagatgtag

SEQ ID NO: 243497 - DNA, 837 bp, synthetic construct
  misc_feature 1..837: note = Description of Artificial Sequence: Synthetic coding sequence
  source 1..837: mol_type = other DNA
atggacaagagcgggatagatagtctggaccacgtaacatcagacgctgtagagctcgctaaccgatccgataactcttcagactctagcctcttcaagacccaatgtatcccttattctccgaaaggggagaaacgcaacccaatccgaaaatttgtgcgcacgcccgaatctgttcacgcatctgattccagctccgattcctcctttgaaccaattccattaacgatcaaagccattttcgaaaggttcaagaaccggaagaagcggtataagaaaaagaagaaaagacgctatcaacctacagggaggccacgcggtagaccggagggtcgacgtaaccctatctactcccttatcgacaaaaagaagcaattcaggtcccggggaagcgggttcccatttcttgaatctgagaatgaaaaaaacgccccttggaggaagatattgacttttgaacaggccgttgcgcgtggtttttttaactacattgaaaagctcaaatacgagcaccatcttaaggagtccctgaaacagatgaacgttggggaagatctggagaacgaggatttcgacagccgaagatacaagttcttggacgacgacggtagtataagtcctatcgaagaatctacagccgaggatgaggatgcaacacatctcgaggataacgagtgcgatattaagctggcaggcgattccttcatcgtatctagcgagtttcctgtccggctctctgtttacctcgaggaggaggatatcactgaggaagcggcattaagcaagaaaagagctacaaaggccaagaataccggtcaaagaggcctgaagatgtag

SEQ ID NO: 243498 - DNA, 27 bp, synthetic construct
  misc_feature 1..27: note = Description of Artificial Sequence: Synthetic coding sequence
  source 1..27: mol_type = other DNA
atggacaaatccggaatcgattcctag

SEQ ID NO: 243499 - DNA, 3030 bp, synthetic construct
  misc_feature 1..3030: note = Description of Artificial Sequence: Synthetic coding sequence
  source 1..3030: mol_type = other DNA
atgagctggtttaatgccagccagctcagctcattcgcaaagcaggcactaagccaggcccagaaatccatcgatagagttcttgatatccaggaggaggagccatccatctgggccgagaccatcccctacggtgagcccggaatctctagccccgtgtctggaggttgggatacatcaacctgggggttgaaatctaacactgaaccacagtctcccccaattgcctcacctaaagccattacaaaacccgtgcgtcgtactgtcgtagacgaatccgagaactttttcagtgctttcttgagccccaccgtctccctgaaggtgagcgagagcgttatcgatgtaaagaccactatggaatctatatcaaacacatctactcaaagtttgaccgcggagacaaaggatatagctctcgaaccaaaagagcagaaacacgaagacagacagtccaacacaccaagtcccccagtaagcacattttcaagcggaacatcgacaacaagtgatatagaagtgcttgatcacgagtccgttattagtgagtcctccgccagctctcgccaggagactacagattctaagtcttccctccatctcatgcaaacctcatttcagcttttaagcgcctccgcctgtccagagtacaaccggctggacgatttccagaaactgacggaaagctgctgttccagcgacgctttcgagcgcatagattccttttctgtacaaagcctcgattcgagaagtgtgtccgagatcaacagcgacgatgaattgtccggtaaagggtatgcgctcgtgccaatcatcgtgaacagtagcacaccgaagagtaagaccgtggaaagcgccgaagggaagtctgaggaggtgaacgaaactcttgtcatccctacggaagaagctgaaatggaagagtcaggaaggtcagccactccagtgaactgtgaacagcccgacatactggtgagcagcacccccattaatgaaggacaaacagttcttgataaggtggcagagcagtgtgagcccgctgagtctcaacccgaggccctttctgaaaaggaggatgtctgtaaagtgactctaaccgtcgaatttctgaatgaaaaattagagaagcgggaagctcagttgttatccctttccaaagagaaagcattactcgaagaggctttcgataatctaaaagacgaaatgttcagagtgaaagaggaatcttcaagcatcagcagtttgaaggacgaattcacacagcgcattgccgaggcagagaagaaggtacagcttgcatgtaaggaaagggacgcagcaaagaaggaaatcaaaaacattaaggaagaattggctacccgtctgaactcatcagagactgccgacctgctgaaagaaaaggacgaacaaattagaggcttaatggaggaaggagagaaactgtcaaagcagcagctgcataattcaaatatcatcaagaaattgcgggctaaggacaaggaaaacgaaaacatggtggccaaattgaataagaaggttaaggaattggaggaagaattgcagcatctgaagcaggtgctggatggcaaagaggaggtcgaaaagcaacacagagagaatattaaaaagctgaactctatggtagaacggcaggagaaggacctgggacgattgcaagttgacatggatgagcttgaagaaaagaatcgatccattcaggccgcactcgactcagcatacaaagagcttactgatcttcacaaggccaacgctgccaaagacagcgaggcacaggaagcagcactcagccgggagatgaaggcaaaagaggaattgtccgccgcactggagaaggcccaagaagaggctcggcagcagcaggaaacactggccatccaggtcggagacctgcgcttggccctgcaacggaccgaacaggcggcagcccgaaaggaggattatctccggcacgaaattggcgaattacagcagcgactgcaggaagcggagaaccgaaaccaagaactgagccagtctgtctctagcactaccaggcccctgctccggcagattgaaaatctgcaggccactctggggagccagacgagctcttgggaaaaactggagaaaaatttgtcagataggctgggtgagtcccagactctattggctgctgctgtggagcgcgaacgcgctgcaacagaggagctcctcgcgaataaaatccagatgtccagtatggaaagccagaactccctcctgaggcaggagaacagcagattccaagcccagctcgagtctgaaaagaatcgcctctgcaaactggaggacgagaataatcgctatcaagtggaactggagaacctgaaggatgagtatgtgagaacactggaggaaactcggaaggagaaaacactgctaaactcacagctggagatggaaagaatgaaggtggagcaggaacggaagaaagccatcttcactcaggaaacgatcaaagaaaaagagcggaaaccattctctgttagttctactccaacaatgtctagatctagctcgatcagtggggtggatatggctggactgcaaacctcatttttgtctcaggacgaatcccatgatcatagctttgggcctatgcctatctccgctaacggcagcaacctctacgacgccgtgcggatgggggctggctcgagtatcatcgaaaatctccaaagtcagttaaaactgcgcgaaggtgagatcacccacttgcagctggagattggaaacctcgaaaagactcggtcaataatggccgaggagctggtgaaactcacgaaccagaacgatgaactcgaagagaaagtgaaagagattcctaagttacggacccagttgagagatctagatcagagatataacacgatcctacagatgtatggagagaaggcggaggaggctgaagaactgcgactagatttggaggatgtgaagaacatgtacaagacccagatcgacgagctcctgcggcagagtctctcatag

SEQ ID NO: 243500 - DNA, 3282 bp, synthetic construct
  misc_feature 1..3282: note = Description of Artificial Sequence: Synthetic coding sequence
  source 1..3282: mol_type = other DNA
atgagctggttcaatgcttcccaacttagcagtttcgccaaacaggccctgagccaggcccaaaagtccattgacagggtcctggacatccaggaggaggagccttccatctgggccgagactatcccatatggcgagcccggaataagttctcctgtctctggcggttgggacacctccacttgggggctgaaatccaacacagagccccagtccccccctattgctagccccaaggcaataacgaagccagtgcgaagaacggtggttgacgagtccgagaattttttcagcgcttttttatcacccaccgatgttcaaactatccagaaatccccagtggtcagcaaacctccagcaaagtcacagagacctgaggaggaggtgaaaagtagtttgcatgagtctttgcatattggccaaagtcgcaccccagagaccacagaatcccaggtgaaagattcctctctgtgcgtgtcaggcgagaccctggctgctggcacatcctctcccaaaaccgagggcaagcatgaggagacggtgaataaagagagcgacatgaaggttcctacagtgtcccttaaagtcagcgagagcgtgattgatgtcaaaaccaccatggagtccatctcaaatacatccacccaatctctcaccgctgagacaaaggacattgccttggaacctaaagagcaaaagcatgaggatagacaatccaatactccctcacctccggtatctacttttagcagtggtacctcaactacatctgatatagaggtgctcgaccacgagtccgtaatttccgaaagcagtgctagctcccgccaagagacgactgattctaagtcatcacttcacctcatgcaaactagtttccaactcttatcggcttctgcgtgtccggaatacaatcgcctcgatgatttccaaaaactgactgagagttgttgttccagcgatgcattcgaacgtattgattccttttctgtacaaagcctggattcaagatccgtgtctgagatcaattctgacgacgaactgagcggtaagggatacgctcttgtccctattatcgtaaattctagtactcccaagagtaaaaccgtggaatcagcggaaggtaagtccgaggaggttaatgaaacactagtgatccctacagaggaagcagaaatggaagagagtggcaggtctgctacgcctgtcaattgcgaacagccagacattctggtgagcagcacaccaataaacgaaggccagacagtcctagataaggttgctgaacagtgtgaacccgcagaatcccagcccgaagccctgtcagagaaagaggatgtctgtaaaaccgtagaatttctcaatgagaaattggagaaacgagaagcccagctgttgagcctgtccaaagagaaagcccttctcgaggaagcatttgacaatctcaaagatgagatgttccgcgttaaggaggaaagtagttcgatcagttcattaaaggatgaattcacccagcggatcgcagaagcagagaaaaaggtgcagctggcatgtaaggagagagacgccgctaaaaaggaaattaaaaatataaaggaggagctcgcgaccagactcaactcctctgaaacagccgacctcctcaaagagaaggatgagcagatcaggggcctgatggaggagggcgagaaactctccaagcagcagctgcataattccaatattatcaaaaaactgagagcaaaggacaaagagaatgaaaacatggtggcgaaactgaacaagaaggttaaagaactagaagaagaactccagcatcttaaacaggtacttgacgggaaggaggaggtggaaaagcagcacagggaaaatatcaaaaaattgaatagcatggttgagaggcaagaaaaggacctcggcagactgcaagtggacatggatgaactggaggagaagaaccgcagcattcaagcagcattggactccgcctataaggagctgaccgatttgcataaagctaacgccgctaaagattcagaggcccaggaggcagccttaagccgggagatgaaagctaaagaggagctgtctgccgcactggaaaaagcgcaggaagaagcaagacagcagcaggaaacactcgccatccaggttggcgacctgaggctggccttacagcgaactgaacaggcagccgctaggaaagaagactaccttcgacacgagataggggagttgcagcagagattgcaggaggctgaaaatcgcaaccaggaattatctcaatcagtctccagtaccacccgccctctcttgcgccagatcgaaaacctacaggccacgctcgggtcgcagacttcctcctgggagaagctggaaaagaacctgagtgaccgacttggtgagtctcagacccttttagcagccgcagttgagcgagaaagagccgctacagaagagcttctggctaacaagatacagatgtcttccatggagagccaaaatagtctgttaagacaagagaacagcagattccaggctcagcttgaaagcgagaaaaatcgactatgtaagctggaggatgagaacaacagataccaagttgagttggaaaatctgaaagacgaatacgtaagaacactagaagagactaggaaggagaaaaccttactgaatagtcaactggagatggagcggatgaaggtggagcaggaacgaaagaaagccatctttacccaggagaccattaaagaaaaagagagaaaaccattcagcgtctcatctactcctacgatgtctaggagctcaagtatctcaggcgtggatatggccggacttcagacgtcctttctgtcccaggacgagtcccacgaccactcctttggacctatgcccatcagtgccaatgggagcaatctgtacgatgccgtcagaatgggcgcaggttccagtattatagaaaaccttcagtcacagctcaaactgcgagagggcgaaattacccacctccagctggagattggaaacctggagaagactagatccatcatggccgaagaactggttaagctgacaaatcagaatgatgaactggaagagaaggtgaaagagatccctaaacttaggacgcagcttcgagaccttgatcagcggtacaacaccattctccaaatgtacggcgaaaaagctgaggaagcagaagaattacgtcttgacttggaagacgtgaaaaatatgtataaaactcagatagacgagctgttgcgccaaagtctttcatag

SEQ ID NO: 243501 - DNA, 1602 bp, synthetic construct
  misc_feature 1..1602: note = Description of Artificial Sequence: Synthetic coding sequence
  source 1..1602: mol_type = other DNA
atgagctggttcaacgcgtctcagttgtcatctttcgcaaagcaggctttatcacaagcccagaaatcaatcgatcgggtcttagacatccaggaggaggaacctagcatatgggccgaaaccataccctatggggagcctggaatcagtagcccagtgtcagggggatgggacacaagtacatggggactgaaaagcaatacagagccccagtcccccccaatcgcctcaccgaaggcaatcaccaaacccgttcggcgaaccgtcgtggacgaatcagagaattttttctctgccttcctttcccctacggatgtgcagacaatccagaagagtcctgtggtctcaaagccgccagccaaatcacaacgtccagaggaggaggtgaaaagctccctgcatgaatctctgcatatcggacagtcacgtacaccagagaccactgaatcacaggttaaagattctagcctctgtgtctccggggaaacacttgccgctggcacctccagcccgaaaacagaagggaagcatgaggagacggtcaataaagagtcagacatgaaggtgcctactgttagcctgaaggttagcgagagtgtcatcgatgttaagacaactatggagtcaattagcaacacctctactcagagcctcactgctgagaccaaggatattgcgctcgagcctaaggagcagaaacacgaagaccggcaatctaacacaccttcaccacccgtcagtaccttcagttccggcacatcaactacctcagacattgaggtgctggatcacgagtctgtgatcagcgagtccagcgcttcttcccgccaggagactacggactcaaagtcttcacttcacttgatgcagacttcattccagttattgagcgcttccgcttgtcccgagtataaccgactcgatgacttccagaaactcaccgaatcttgctgtagctccgacgcctttgagcgcatagactcattctcagtgcaaagcttggattctaggtccgtcagcgagataaatagtgacgacgagctgtctggcaaaggctacgcactggtgcctataatcgtgaacagcagcacccccaagagcaagactgtcgagagtgctgagggtaagtcagaagaggtgaacgaaaccctggtgatccctaccgaagaggctgaaatggaggaaagtggacggtccgcaacccccgtgaactgcgagcagccggacatcctcgtgtcctctacccccattaacgagggacagaccgtattggacaaggtggccgaacagtgtgagccagccgagagccagcctgaggctctttctgagaaggaagacgtgtgtaagactgtggaattcctaaatgaaaagcttgaaaaaagggaagcacagctgctttccctgtcaaaagagaaggctttgctggaagaagcattcgacaacctcaaggacgagatgttcagggttaaagaggaatccagctccatctcttctcttaaggatgagttcacccagcgcatcgccgaggctgaaaaaaaggtccaactagcctgcaaggagcgggacgccgctaaaaaggaggtgaagagaaaaaagaggtag

SEQ ID NO: 243502 - DNA, 3291 bp, synthetic construct
  misc_feature 1..3291: note = Description of Artificial Sequence: Synthetic coding sequence
  source 1..3291: mol_type = other DNA
atgtcctggttcaacgcgagtcagttgtcctctttcgccaagcaggccctgtcccaggcccagaagtctatcgatagggttctcgacattcaggaggaggaacctagtatttgggcagaaactattccgtatggcgagccaggcatctccagccccgtcagtgggggatgggatacatctacatggggtctgaaaagcaatacagagccacagtctccacccatcgctagtccaaaagctatcaccaaacctgttcggagaaccgttgtggacgagagcgagaactttttctccgcgttcttaagcccaacagatgttcaaaccatccagaaaagccctgtagtatccaagccaccagcgaagagccagaggcccgaagaagaagttaagtctagcctgcacgaatctcttcacatcggacagagccgcacacctgagactactgagtctcaggtaaaagattcctctctctgcgtgtccggagaaactttggcagctggcacatccagccctaagaccgagggcaagcacgaagaaactgttaacaaggaaagcgatatgaaagtaccaaccgtgtctctaaaagtgagcgagtcagtaatcgatgtgaaaacaacaatggaaagcatcagtaatacaagtacgcaatcactgactgccgaaaccaaggacatagctttggagcctaaagaacagaagcatgaagataggcaaagtaacacgccatcacctcccgtgtctacattcagttctggcacttccacaacatcagatatcgaggtgctggatcacgagtctgtgatctcagaaagctccgcatcaagcagacaggaaaccaccgacagtaagagttccctccacctaatgcagacatcctttcagctgctctccgccagtgcatgccccgagtacaaccggctggatgattttcaaaagctgacggaaagctgctgttcgtctgatgcatttgagaggatagatagcttttctgtgcagtcacttgacagccgcagcgtgtccgagatcaacagtgacgatgaactcagcggaaaggggtacgcgttagtgccaattattgtgaactcgtctaccccaaagtctaaaactgtcgagtctgctgaaggcaagtccgaggaggtgaatgagaccttagtgattcccacggaggaagccgagatggaggagtccggtaggtcagccacaccagtaaactgcgagcagccagacatactggtgtcctcaaccccgatcaacgaaggccagactgtattagacaaagtggcagaacaatgcgagcctgcagagtcacagcctgaggcgttatccgagaaagaagacgtctgcaaagttactctaaccgtagagttcctgaacgagaaactcgagaagagagaggctcagctcctcagcctgtcgaaggagaaggcgctactggaggaggctttcgacaacctcaaggatgagatgttcagagtgaaggaagagtcgtcatctatttcttcgctcaaagacgaatttacacagagaatcgctgaggcagagaagaaggtgcagcttgcttgcaaggaacgcgacgccgctaagaaggagattaagaacatcaaagaagagctggctactcgactcaactcttccgaaacagcggatctgctcaaagagaaggatgaacagatacgcggattgatggaggagggcgaaaaactctccaaacagcaactgcacaacagcaatattatcaagaagctgagagccaaagataaagaaaatgaaaacatggtcgcaaagctgaataagaaggtgaaggaattagaggaggaattgcaacatctcaagcaggtcctggatggaaaagaggaagtagagaaacagcatcgcgaaaacattaagaagctcaactccatggtggagagacaagaaaaggatcttggaagactgcaggtggatatggatgaactagaggagaaaaaccgcagcatacaggcggcactggattccgcatataaggaactgaccgacctgcacaaggctaatgcagctaaagattccgaggctcaagaagccgctctatctcgggaaatgaaggccaaggaggaattgagtgctgcgttggaaaaggctcaggaggaggccagacaacaacaagaaacgctcgccatccaggtgggagatctaagattggccctgcagcgaactgagcaggccgcagctcggaaagaggactacctgcggcatgaaatcggcgaactccagcaaagactccaggaagctgagaacagaaatcaggagctgtcacaaagcgtgtcgtccacaacgaggcccctgctgaggcagattgaaaatttacaggccaccctcggttcccagacatccagctgggagaagctggaaaaaaacctgagcgataggctgggtgaatcacagacgctacttgccgcagccgtcgagcgagagcgggctgccaccgaagaacttctggccaacaaaatccaaatgtctagtatggaatcccagaatagcctgttgcgtcaggaaaacagcaggtttcaggcccagttagagagcgagaagaatcgactgtgcaagttggaggacgagaacaatcgatatcaggtggagttggagaatttgaaagatgagtatgttcggaccttggaggaaacacgaaaggagaagacactgctgaattcgcagctggaaatggaacgaatgaaggtagaacaggagcgtaaaaaggcaattttcacacaggagacaattaaagagaaggagcggaaaccgttctcggtctccagtaccccaaccatgagcagaagctccagtatttccggcgtggacatggccggtctgcagaccagtttcctgagccaagacgagtcccatgatcactcttttggcccaatgcctatttcggccaatggcagtaacttgtacgacgccgtccgcatgggtgccggaagctccattatcgagaacctccaatctcagttgaagctgagggaaggcgaaattacccacttgcagctcgaaattggtaacctggaaaaaacacgaagcattatggccgaggaactcgtgaagctcacaaaccagaatgacgagttagaggagaaggtgaaagaaattccaaagcttaggacacagctgagggacttggatcagaggtataacaccatcttgcagatgtatggcgaaaaagccgaagaggcagaagagctgcggttggacttggaagatgtaaagaacatgtacaagactcagattgacgagctcctgcggcagtcccttagctag

SEQ ID NO: 243503 - DNA, 4950 bp, synthetic construct
  misc_feature 1..4950: note = Description of Artificial Sequence: Synthetic coding sequence
  source 1..4950: mol_type = other DNA
atggagtccgtggaaaaagactggggttgggggttgtggcgaaacctgcgctgcctaggccacgcgcaccagggaaaatgctgtactgaaggtggcatctcgtccactaccaaaacatccagcgaaaacggctcttgctgcttcgagaaggcggcacgaaaagaccatgtgtgcaggtttatcgggtgcggaaggaacgacaggttcaactacgttgtcatgcaattacagggccgtaatctggcggatttgcgaaggtcccagagccgaggtactttcaccatttccaccactcttaggctgggtcgacaaattctggagtctatcgaaagcattcatagcgtgggcttcctgcaccgagatattaaaccttctaattttgccatgggtcgcttcccaagcacatgtcggaaatgctatatgctcgacttcggactggccagacagttcactaactcctgtggagatgtgcgccctcccagagctgtagctggcttcaggggaactgtgcgatacgctagtatcaatgcccataggaatcgggagatgggcagacacgatgacctgtggtcccttttctatatgttagtggaatttgtggtcggacagctgccttggaggaagatcaaagacaaagaacaagtgggcagcatcaaggaacgttatgaccaccgcctgatgttgaaacatctgcctcctgaattcagcatctttcttgaccacattagctctttagattattttaccaaacctgactaccagatgagcatccgcgtgacccgaaagagctacaaagtgagtacatctgggccacaagccttcaacagtttgtcgtatacctctggtccgggagcatgtatatcgtcatccagcttttctcgtatggggtcctccagtttccggggaggactcggtgctggctacggcggtgcaagtggcggaattacaacaatcactgtgaaccagagcctcctgtctccactcaatttggaggtggaccccaatatacaagctgtcagaacccaggaagaaaagcaaattaaaaccctgaacaacaaattcttctccttcattgataaagtgagattcctggaacagcagaataagatgctcgaaacgaagtggtctctagtgcagcagcagaagatggctcgatctaacatggacaacatgtttgagagctacattaataacctgaaatggcagctggagactctggggcaggaaaagctgaaactcgaagccgagctggggaacatgcacggtctggtggaggactttcgtaataaatacgaggtggagatcagcaaatgcacagagatggagaatgagtttgtcctgatcaaagagtacgtggatgaagcttatatgaacaagatggaactggagtcttctttgaaggaactcacagccaagatttcctttttgcggcagctctacgaagaggagattgggtcttgctctcctcggtctagaatacatttatggtgctgttcgtggacaacagcagcctcttggacctggactgcttccagcctgcgatcacggcctgaggggtttcccggaggctgtcacgccgacactgaacagagaggagagctcgcaattaaggacgccaatgctaagttgtcggagcttgaggcggcactacaactggctagccaggacatggctcggcagctcagggagtaccaagagttgatgaacgtgaagcttgctctcgacattaaaattgcaacttatcgaaagctgctggaaggcgaagaatcttggcttgagtccggaatgcagaatatgtcaattcacatgaagacaacctcatcatacgctgggggacagagtctagcttacggaggtttgacatcgccaggcctgagttacggtctgggctcttcctttggttctgggatgggaagcagctctttcagccatactagctcaagtcgcgctgtggtgatgaaaaagattgagaccagagatggcaagctagtatcagagtctagtaacgttttaccaaatctgaggatcacagctacgctgctgacatcggtgttcgacaatagtatcaagacatttggagtcattgagtctgacccttttgattgggaaaagaccggcaacgatggctcacttaccacaacaaccacttccactacaccccaattgcatacaagattgactcccgcagcaatcggcatagctaacgcgactcctattccgggagatctcctcagggagaatacagatgaggttttcccagatgagcaactatcagatggtgaaaatgggattcccgtcggagttagtcccgacaaactacctggttccctaggacatcctcgacctcaggaaaaggacgtctgggaggagatggatgccaataaaaacaaaatcaagttgggaatctgtaaagcagccacggaggaggaaaactcgcacggacaggcgaatggactgttgaacgctccaagcttgggcagtcccatccgtgtgaggagcgagattactcagcctgaccgtgatattccgttggtgagaaaattgcgctccatccattccttcgagcttgagaagcgtttgacgctagagccaaagcccgacactgacaagttccttgaaacctgcctggaaaagatgcaaaaggacacctctgccggtaaagagagtattctgccagccctgctccataagccttgcgtgcctgcagtctcacgcaccgaccacatttggcattacgacgaggaatacctgcctgacgctagcaagcccgcaagtgctaatacacccgagcaagctgacgggggaggttcaaatggtttcatcgcagtaaacctcagttcatgcaaacaggaaattgacagcaaagaatgggtgattgtcgataaagaacaagaccttcaggactttagaacgaatgaagccgtaggccacaagaccacaggatcaccgtcagatgaggagcctgaagtacttcaggtgttagaggcatctcctcaggatgaaaaactgcaactgggaccttgggctgagaatgatcatctgaagaaggagacttctggtgtcgtgctggctctaagtgcggaaggtccacccacggcggctagtgagcagtacacagaccggttggaactgcagcccggtgcggcttcccagttcattgcagcaactcctacttcgctgatggaggcccaggctgaggggcctctgacagcgataacaatacccagaccatccgtcgctagcacacagtccacctccggcagttttcactgcgggcaacagccagagaaaaaggatctgcagcctatggagccaacagtggaactatacagtccaagggaaaacttcagcggcttggtagtcacagagggcgaacccccttctggtggatcaaggaccgacttgggactgcagatcgaccacattggacatgatatgttgcctaatatcagggagagcaacaaatctcaagatctggggccaaaagaactacccgaccacaaccgcctcgttgtgagagagtttgaaaacctccccggtgagacagaggaaaagtctattctgctcgagagcgacaacgaagacgagaagctgtcacgaggacaacactgtatcgagatctcaagtctcccgggagatctcgttatcgtagagaaggatcatagcgccacaacagaacctctggatgtcactaaaacacagactttttctgtcgtcccaaatcaagataagaataacgaaattatgaagcttctgaccgtgggaacctctgaaatatctagccgggacattgatcctcatgtcgagggccaaattggccaggttgcggaaatgcagaaaaacaagatcagcaaagatgatgacattatgtccgaggacctgcctgggcatcagggtgacctgtccaccttcttacaccaggagggcaaacgagaaaagataacacccaggaacggggaattattccattgtgttagcgaaaacgagcatggcgctcctacacgcaaggacatggtcagatctagttttgtaacccgacactcccggatccccgtattggcacaggaaatcgatagtacactggaaagcagtagtcctgttagcgccaaagaaaaactcttgcagaaaaaggcctaccaacctgacttggtcaagctgctagtggaaaagaggcaattcaagtccttccttggcgacttgagtagcgcttccgacaagttactagaagaaaagttggccactgtgccagctcccttctgtgaagaggaagtgctgactccgttcagcagactcaccgtggatagtcacttgtcaaggtccgctgaggactcctttctttccccaattatttcacaaagccggaaaagcaagattccacggcctgtaagttgggtgaacacagaccaggtgaactcgtcaacctcctcacagtttttccctaggccccctcccggtaagccacctaccaggcccggagtagaagcccgactgcgccgatacaaggttctgggtagcagcaattcagattctgacctctttagccgactcgcccagatcttacagaatgggagccagaaaccacggagtactactcaatgcaagagccctggatcaccacacaaccccaaaaccccccctaagtcacctgtggtgcctagacgctcaccgagcgcttcccctagaagctcatcacttcccagaacgagctcttcgagcccttccagagccggacgccctcaccacgaccagaggagttccagccctcatctgggaagaagtaaatctcccccttcccatagcggctcttcttcctcccgacggtcatgtcagcaggagcattgcaaaccaagcaaaaacggcctcaagggcagtgggtccttgcaccatcactccgcaagcactaagacgcctcaagggaaaagcaagcctgccagcaaactgagccggtag

SEQ ID NO: 243504 - DNA, 3735 bp, synthetic construct
  misc_feature 1..3735: note = Description of Artificial Sequence: Synthetic coding sequence
  source 1..3735: mol_type = other DNA
atgtccggcggtggggagcagctggatatcctgtctgttggtattctcgtcaaggagcggtggaaagtcctccgaaagatcgggggtggaggcttcggcgaaatttatgacgccttagacatgctcacacgagagaatgtggccctcaaggtagaaagcgcgcagcaacccaagcaggttttgaaaatggaggttgccgtcctgaagaagctccagggcaaagatcacgtctgtcgatttattggctgcggcagaaacgaccggttcaactacgtggtcatgcaactgcagggccgtaacctggccgacttgaggagatcacaatcacggggaacctttaccatcagcactactctgaggcttgggagacagattctggagagcattgagagtatccactccgtgggctttctgcaccgcgatatcaagccctcgaacttcgcaatgggccgatttccaagtacttgtcggaagtgctatatgctggactttgggctcgcccgacagtttactaactcttgcggggatgtgcgcccaccgagggcagtggcgggattccggggaactgtgcgctacgcgagtataaacgcccacagaaatcgcgagatgggcagacatgacgatctgtggagtctcttttatatgctggtggaatttgtggtcggacaattgccatggcgcaaaatcaaggacaaagagcaggtgggatctatcaaagagcgctacgaccatagactgatgcttaaacatctgcccccagagttttccatctttctggaccacattagcagtctggactactttacaaagcctgactaccaactcttgactagcgtgttcgacaatagtattaagacatttggagtgatcgaatccgatccattcgactgggagaagacaggcaacgatggatcactcacaaccaccacaactagtaccactccccagctccacaccaggttaacacccgcagccatcggaattgctaacgccactccgataccaggagatctgctgagagaaaacaccgatgaggttttcccagacgaacagctgagtgacggagaaaacggcatcccggtcggtgtatccccagacaaactccctggcagcctaggtcaccctcgaccacaagagaaagacgtgtgggaggagatggatgcaaacaaaaacaaaattaagcttggcatctgcaaggcagccactgaggaggaaaacagccacgggcaggcaaatgggttattgaatgcgccttcactcggctctccaatacgcgttcggagcgagattacgcagccggatagggacattcctttggtgcgtaaactccggtccattcatagcttcgaacttgaaaaaaggttgacattggagcccaagccagatacggacaagtttctggaaacctgtctagaaaaaatgcaaaaagatacttccgcaggaaaggagtcaattctccccgctctgctccataaaccgtgcgtgcccgctgttagtcgaacagatcatatctggcactacgatgaggagtacctcccagatgctagtaagccagcatctgccaatactcctgagcaggccgacggcggaggatccaatggtttcatcgcggttaacctgtccagctgcaagcaagagattgattctaaggaatgggttatcgttgataaggagcaggacttgcaggactttcggaccaatgaggcagttgggcataaaacaacaggtagcccttccgatgaagagcccgaagtcttgcaggtgctggaagccagtccccaggatgaaaagcttcagctgggcccatgggcagaaaacgatcacctcaaaaaagaaacaagtggggtagtgttagcactgagcgccgaggggccaccgactgccgcaagcgaacaatataccgataggctggaattacaacccggagcggctagccaatttattgctgccacgcctacatctctgatggaggctcaagccgagggcccattgacagccattactataccacgacccagcgtagcctccacccagtcaacgagcggatccttccattgtgggcagcagccagagaaaaaagacctgcagccaatggaacccaccgtcgagttgtattcccccagagagaattttagcggtttggtggtcactgagggcgaacctccatcagggggttcacgcaccgacttgggcctgcaaatcgaccacataggccatgacatgttgcccaacatccgtgagtccaacaagtcgcaggatttaggcccaaaagaactgccggatcataacagactggtggtccgcgagtttgaaaacctgcccggagaaacagaggaaaagtcgatcctgttggaatctgacaacgaggatgaaaaactgtcgagagggcagcactgtattgagataagttcgctaccgggagacctagtcatcgttgaaaaagatcactcagctactaccgaacctctggatgtaacaaagacgcagactttttctgtcgtacccaaccaagacaagaacaatgagatcatgaagctgctgacagtcggcactagcgagatatcgtcgagagacattgatccacacgtcgaggggcagattggacaagtggcagaaatgcagaaaaataaaattagcaaagatgacgatatcatgtctgaggacctgccgggacaccagggagacctgagcacattcctgcaccaggagggcaaacgggagaaaatcacccccaggaatggcgagctgtttcattgtgtgtcagagaatgagcacggtgcacctacacgcaaagacatggtgagaagctcatttgtcacccgacactctcgcatccctgtgctcgcacaggaaatcgactctacccttgagagtagtagtcccgtgtctgctaaggagaagttactccagaaaaaggcctatcagcctgatttggtgaaactacttgtggaaaaacggcaatttaaaagttttctgggcgatctgagttctgcatctgacaagctgcttgaagagaagctggccaccgttcctgcgcctttctgcgaagaggaagtgttgacccccttctcaagacttaccgtggattcccatctgtccaggtctgccgaagactcgttcttgagccccattatatcacaatcacgcaagtcaaagattccaaggccagtcagttgggtgaatacagatcaagtgaactcttctacatcgtcacagttcttcccacggcctcctcctggaaaaccacccacacggcctggtgtggaagcaaggctgcgcagatacaaggtgctcggatcatccaattctgatagcgacctgttcagtcgcttggctcagatcctacagaacggatcccagaaaccgagatccaccacacaatgcaaaagcccaggaagtccacacaatccaaagacacctcctaagtcccctgtcgtccctagacggtcaccatctgcttcaccacggtccagttccctgccccgaacttcgtcatcctctccatctagggccggaaggccccatcatgatcagcggagctcatcacctcacctcgggcgtagcaagagtcccccaagccactccggctcatccagctcccgccgttcttgtcagcaggagcactgcaagccctcaaaaaacgggctgaagggctcagggtctttacaccaccattctgcatccacaaaaacacctcaagggaagtctaagcccgcaagtaaactgagcagatag

SEQ ID NO: 243505 - DNA, 3525 bp, synthetic construct
  misc_feature 1..3525: note = Description of Artificial Sequence: Synthetic coding sequence
  source 1..3525: mol_type = other DNA
gagccaggtaaggatcacgtttgtcgtttcattgggtgtggcaggaatgacaggttcaattacgtcgtgatgcagttacagggtcggaacctggctgatctcagacggtcacagtcccgaggaacattcaccatttccacaaccctgagactgggaagacaaattcttgaatctatagaatccatccactccgtcggcttcctccacagggatatcaaacctagcaattttgctatgggtagatttccctccacatgcagaaagtgctacatgctggacttcggactggccagacagtttactaactcttgtggcgacgtccgcccaccacgggcagtggcagggttcagagggactgtgcgttatgccagtattaatgcccatagaaaccgggagatggggagacacgatgacctctggagcctattctacatgctcgttgagttcgtcgttgggcagttgccttggaggaaaattaaggataaagaacaggtaggcagcattaaggaaagatacgaccatcgacttatgctgaagcatcttcctcctgagttttccatctttttggatcatatttctagcctggactatttcacaaaacctgactatcagctcctgaccagcgtttttgacaacagcatcaaaacctttggcgtcatcgagagcgatccatttgactgggagaaaacaggcaacgacgggagccttaccaccacaactaccagcacaactccgcagcttcatacccggttgacaccagcagctatcggaattgctaacgccaccccgattcccggagatctactgagagagaacacagatgaagtgttcccagacgagcagctgagtgacggagagaatggtatcccagtcggcgtctccccagataagttacctgggtccttaggccaccctagaccacaggagaaggacgtgtgggaggaaatggacgccaataaaaacaaaatcaagctggggatttgcaaggcagctaccgaggaagagaactctcatggccaggccaacggcctgctgaacgcgccatccctgggatcccccattagggtgaggtccgaaataactcagcctgaccgcgatattccgctggttcgcaagttgcggtcaatccacagtttcgaactggaaaaaagattgactctggagccaaaacctgacactgataagttcctggagacctgtctggagaaaatgcagaaagacaccagcgcaggcaaagaaagtatcctaccagctctcctccacaaaccttgtgtgcccgctgtgtcccgcaccgaccacatttggcattacgatgaagaatatctgcccgacgccagcaaacctgctagtgccaacaccccagagcaggctgatggaggagggagcaatgggtttattgctgtgaatctgtcttcatgtaaacaggagatcgattcgaaagaatgggttattgtggataaagagcaggatctgcaggactttcgaaccaatgaggctgtaggacacaagacaacgggtagcccctcggacgaggagccagaggttctccaggttctggaggcgtcacctcaggacgagaaattacagttgggcccatgggcggagaatgatcacctgaagaaggaaactagcggggtggtactggccctgtctgctgagggacctcccaccgccgcatcggagcagtacacagaccgcttagaactgcagcccggagcggcttcgcagtttatcgccgcaacgccgacctccctgatggaggcccaggctgaagggcctttaaccgccataactattcccagaccctccgtcgctagcacccagtctacatccgggagcttccattgtggacagcagcccgaaaaaaaggatttacagcctatggaaccaaccgtagagctgtattcacctcgcgagaatttttcagggttggtggtcacagagggcgagccaccctcaggcggatcaaggacagacctcggacttcaaattgatcacatcggccacgacatgctcccgaacataagggaatcaaacaagtcccaggacctggggccaaaagaactccccgatcacaacaggctggtagtgagggagtttgaaaacttgccgggagaaacagaggaaaagtcaattctgctggaaagtgataacgaggacgagaaactctctcggggacaacattgcatcgaaataagcagcctaccgggtgatttagtcatcgtggagaaggaccattctgctacaaccgaaccccttgatgtaactaaaactcaaaccttttccgtggtgccgaaccaggataagaataacgagatcatgaaactgttaaccgtcggaaccagcgagatttccagcagagacatcgacccacatgtcgagggacagattggccaggtggcagaaatgcagaagaacaagatctctaaagacgatgatattatgtccgaagacttgccgggtcaccagggcgacctgtcaaccttcctccaccaggagggcaagagagaaaagatcacgcctagaaacggtgagttatttcattgcgtaagtgaaaacgagcatggggctcctacacggaaggatatggtcagatcttccttcgttacccggcatagcagaattcctgttttggctcaggagatcgactccactctggaaagctcaagccctgttagcgcaaaggagaaattactgcagaaaaaggcttaccagccagacttagtgaagctgcttgtggagaaacgtcagtttaagagcttcttgggggatctgtcaagtgcctctgacaagcttctggaggagaagttggcaaccgtgcccgctcctttttgcgaggaggaggtcctgacaccgttctcccgtttaaccgttgactcccatctgtcacggtcggctgaagactcttttctatccccaatcataagccagagcaggaagtccaagattccaaggcctgtcagttgggtgaataccgatcaagttaattctagtacctccagtcagttctttcctcgacctccgccaggaaagcctcctacccgccctggcgttgaagcccgactgcggaggtacaaggtactgggaagctccaatagcgattcggatctgttttcgaggctggcccagattctccaaaatggaagtcagaagcccagatctaccacccagtgtaagtccccaggttcgcctcataacccaaaaactccccctaagtccccagtcgttcctcgtcggtccccctcagcttcacctagaagctctagcctgccaaggaccagttccagtagcccttctagagccggaagaccccaccatgaccaacgctctagcagcccccacctgggcaggtctaaaagccctccgtcacacagcggaagctcctcgtcccgtaggagctgtcagcaggaacattgtaaaccaagtaagaacgggctgaagggatccgggagtctgcaccaccactcagcatccaccaagacccctcagggcaagtccaaaccagcttcaaaactgagccgctag

SEQ ID NO: 243506 - DNA, 2244 bp, synthetic construct
  misc_feature 1..2244: note = Description of Artificial Sequence: Synthetic coding sequence
  source 1..2244: mol_type = other DNA
atgacctcgtttcaggaagtaccactgcagacctccaactttgctcatgtaatcttccagaatgttgctaagtcgtatcttcccaatgcgcacctggaatgccattataccttgaccccatacattcacccacatcccaaggattgggtgggcatttttaaggtgggttggtctaccgccagggactattatacctttttgtggagccctatgcctgagcattacgtggaagggagcacagtgaactgcgtactggcgttccagggttattacctgccgaacgacgacggcgagttctaccagttctgttatgtcactcacaagggtgagatccgtggcgcttcaaccccctttcaattccgcgcaagctctccagtggaagagctcctgaccatggaagatgagggcaattccgacatgctggttgtgacaactaaggccggactgttggaattaaagatcgagaagacaatgaaggagaaggaagaactactgaagctcatcgccgtgctggagaaggagacagcccagcttagagaacaggtcggacggatggagcgggagctcaaccacgagaaggagaggtgtgatcagctgcaagcagagcaaaagggccttaccgaggtcacacagtccctgaaaatggaaaacgaggagtttaagaagagattcagcgacgctacttctaaggcccaccagctggaggaagatatcgtgtcagtcacacataaggcgatcgaaaaagaaaccgagctcgactctcttaaagataaattgaagaaggcgcagcacgaacgagagcagctcgaatgccagctcaaaaccgaaaaagacgagaaggagttatacaaggtgcacctgaaaaacaccgagattgaaaataccaagctaatgtcagaggtgcagacactaaagaatctggatgggaacaaagaaagcgttattactcactttaaggaagaaataggtagactgcagctgtgcttggcggagaaggagaacctccaaaggacattcctgctgaccacatcttctaaggaggacacttgtttcctgaaagagcagcttcgtaaagcggaagaacaggtgcaggcgaccagacaggaggtggtttttttggcaaaagagcttagcgacgccgtgaatgtaagagaccggactatggcggatctccacacagcacgcctggagaacgagaaggtaaaaaagcagctcgccgacgccgtcgctgaactgaagttgaatgctatgaaaaaagaccaagacaaaaccgatacactggagcatgagcttaggcgtgaggtggaggacctcaagctccgcttacagatggctgcagatcactacaaggaaaagtttaaagagtgccagcgcctgcaaaaacagataaataaactaagcgaccagagcgctaacaacaataacgtgttcactaagaagactggtaaccagcagaaggtgaatgacgcaagcgtcaatacggatcccgctacgagcgcttccaccgttgacgtcaagccaagcccttccgcggctgaagctgattttgatatcgtgactaaggggcaagtctgcgagatgaccaaagaaattgctgacaagaccgagaagtataacaaatgcaaacagttgctccaggacgagaaggctaagtgcaataaatatgccgatgagctggcaaagatggagctcaagtggaaagagcaggtgaaaatagcagagaacgtaaaactggagctagcagaggtgcaggacaattataaggaattgaagcgaagtcttgaaaacccggctgagcggaaaatggaagacggcgcagatggcgctttctaccctgatgaaatccagcgtcctccggtgcgcgttcctagctggggattggaggacaatgttgtatgttctcaacccgcaaggaattttagtcggcctgatggactcgaagattcagaagattccaaggaggacgaaaatgtgccaactgctcccgatccccctagccagcatctgcgaggtcacggtacaggcttctgctttgacagcagctttgacgtgcacaaaaagtgccctttgtgcgaactgatgtttccccctaactatgatcagtcaaaattcgaggagcacgtcgagagccattggaaagtttgtccaatgtgttcagagcaatttcctccagattacgatcagcaggtatttgagaggcacgtccagacccattttgaccaaaacgtgctgaactttgattag

SEQ ID NO: 243507 - DNA, 2370 bp, synthetic construct
  misc_feature 1..2370: note = Description of Artificial Sequence: Synthetic coding sequence
  source 1..2370: mol_type = other DNA
atgacttcattccaggaagttcccttacaaacgagtaatttcgctcacgtgatctttcagaacgtggctaaatcatacctgcctaacgcccatctggagtgccattatacgctgacaccttacatccacccccaccctaaggactgggtgggaatatttaaagtggggtggtccactgccagagattactacacgtttctttggagtcccatgcctgaacactatgtggaggggtccaccgtgaattgcgtactggccttccaaggctactacttgcccaacgatgacggtgaattctaccaattttgctatgtgacgcacaaaggcgagataagaggagcttctacccccttccagttccgagctagttcccctgtcgaggagctgctgaccatggaggacgaggggaacagtgacatgctggtggtgacaacaaaggccggactcctcgagttaaaaatagaaaagaccatgaaagagaaggaggagttactgaaactcattgctgtactggagaaagagaccgcccaactgcgggaacaggttggccgaatggaaagggagctgaaccatgaaaaagagcgttgtgaccagctgcaggcagaacagaagggtcttactgaggtgacccagtctctgaaaatggaaaatgaggagttcaagaagcggttcagtgacgccacctctaaggcccaccagctggaagaagatatcgtgtcagtgacccacaaagccatcgagaaggagaccgagctcgatagcctgaaggacaagctgaaaaaagcccagcacgaacgagagcaactcgagtgtcaactgaaaacagagaaggatgagaaagaactttacaaggtgcatttaaagaacacagaaatcgagaacacgaagctcatgtccgaagtacagaccctcaagaacctggatgggaataaggagtccgtgatcacgcactttaaggaggagatcggcagactccagttgtgcctggctgaaaaggagaatctacagagaacttttctcctcacgaccagttccaaggaagacacctgcttcctgaaggagcaattgagaaaggcagaagagcaggtgcaagctactaggcaggaagtggttttcctggctaaggaactttccgatgccgtgaatgtgcgggaccggactatggccgacctacatacagctcggctggagaacgaaaaggtgaaaaagcagctggccgatgcagtggccgagctgaagcttaatgctatgaagaaagatcaggacaagactgacacactggaacacgaattgcgcagagaagttgaggatctaaaactccgactgcagatggcagccgatcattataaagaaaaatttaaggaatgtcagagactgcagaaacagattaacaaattgtcagatcaaagcgcgaataacaataacgtttttacaaagaaaacaggtaaccagcagaaggttaacgatgcaagcgtgaacacagatcccgctacttccgcgtcaaccgttgatgtcaagccctcgccctccgcggctgaagccgatttcgacatcgtgactaaggggcaagtgtgcgagatgaccaaggagatcgccgataagacagaaaagtataacaaatgtaaacaactcctccaagatgaaaaggccaagtgcaataagtatgctgatgagttagcaaagatggaactgaagtggaaggagcaagttaagatcgctgaaaatgtcaaactcgaacttgctgaagttcaagacaactacaaggaactgaagcgttcgctggagaatccagcggagagaaagatggaaggtcagaattcgcagtccccgcagtgctttaaaacatgcagcgaacagaatgggtatgtgctgaccctttccaacgcccagcctgtgctgcagtatggaaatccctacgcctcacaggagacaagggatggagcggacggggcattttaccccgatgagattcagagacctcctgtccgagtgccttcatgggggcttgaggataacgtggtctgcagccagcctgccagaaacttctcgagacctgatgggctagaagacagtgaggattccaaggaagatgagaacgttcccactgcacccgatcctccctcccagcacctgcggggacacggcacaggcttttgctttgattccagtttcgatgtccataaaaaatgtcccctatgtgaattgatgttcccgccaaactacgatcaatccaaattcgaagagcacgtagagagccactggaaggtttgcccaatgtgcagtgagcaatttcctcccgactacgaccagcaggtatttgagagacacgtccaaactcacttcgaccagaatgtgctcaacttcgattag

SEQ ID NO: 243508 - DNA, 417 bp, synthetic construct
  misc_feature 1..417: note = Description of Artificial Sequence: Synthetic coding sequence
  source 1..417: mol_type = other DNA
atgactagctttcaagaagtgcccctgcagacttcgaacttcgcacatgtgattttccaaaatgtggccaaaagttatttgcccaatgctcacctagagtgtcattatactctgacaccatacatccacccccacccgaaggattgggtcgggatttttaaggtggggtggtccactgcaagggattattatacctttctgtggagtcccatgcctgagcattacgtggagggatcaaccgtcaactgtgtgttggccttccagggatattatctgcccaatgacgacggagaattctatcagttttgttacgtgacacataagggagaaataagaggggcttcaacccccttccagttcagagcaagtagccctgtagaggaacttctgactatggaggacgaaggaaactcttag

SEQ ID NO: 243509 - DNA, 297 bp, synthetic construct
  misc_feature 1..297: note = Description of Artificial Sequence: Synthetic coding sequence
  source 1..297: mol_type = other DNA
atgaccagtttccaagaggtcccgcttcaaactagtaatttcgcacacgtgattttccagaatgtggccaagtcttatttacctaatgcccacttggagtgccattataccttgaccccatacatccacccacacccaaaagattgggtcgggatcttcaaggtaggttggtccacggccagggattattacacctttttgtggagtccaatgcccgaacattacgtcgaggggtcgacagttaattgcgtgcttgcattccagggttattatcttcccaacgacgacggagagtag

SEQ ID NO: 243510 - DNA, 1773 bp, synthetic construct
  misc_feature 1..1773: note = Description of Artificial Sequence: Synthetic coding sequence
  source 1..1773: mol_type = other DNA
atgaaggagaaagaggaactacttaagctgatcgccgtgctggaaaaagagaccgcgcagctgcgtgagcaagtggggaggatggaacgggagctgaatcatgaaaaggagagatgcgaccaattacaggctgaacagaaggggctgactgaagtaacccagagcctcaagatggaaaatgaagagtttaagaagaggtttagcgacgcaacatcgaaggctcatcaactagaggaggatattgtgagcgttacacataaggcaatcgaaaaggaaactgagctggactctctgaaggataaactcaaaaaggcccagcacgaacgcgagcagcttgaatgccaactcaagaccgaaaaggacgaaaaagaattgtacaaggtgcatttgaagaacaccgagattgagaacacgaaactcatgagtgaagtgcagactctcaagaatctggacggcaacaaggagtcagtgattactcacttcaaagaagagattgggaggctgcagctgtgtttagccgaaaaggagaatttgcagcggactttcttgctgactacctcatcaaaagaagatacctgtttcctgaaggaacagctgcgaaaagccgaggaacaggtgcaggccacacgtcaggaggtagtcttcttggccaaagagttgtctgatgccgtgaacgtacgagatagaaccatggcagatctgcatacggctcggctagaaaatgagaaggtgaaaaaacaactcgcagatgcggtggccgaattaaagctcaatgctatgaagaaagatcaagacaagacagataccctagagcatgaactgagacgggaagttgaggatctcaagctacggctccagatggccgctgatcattacaaggagaaatttaaggagtgccagagactgcagaaacaaatcaataagttgtctgatcaatctgcgaacaacaataatgtgttcacaaagaaaaccggcaatcagcagaaagttaacgatgcttccgtcaataccgatcccgcaaccagcgcttccacagtggatgttaagccctcgccgtcggccgcagaggctgatttcgacattgtgactaagggccaggtctgcgagatgacgaaagagatcgcggacaaaacggaaaagtacaataaatgtaaacagctacttcaggatgaaaaggccaaatgcaataaatacgccgacgaactcgcgaaaatggagttaaaatggaaggagcaggtgaagatcgcagagaacgtcaagctggaattggctgaagttcaggacaactataaggagctgaaaaggtccctcgaaaaccccgcagagcgcaaaatggaggacggagccgatggagcattttacccggacgagatccaacggccacctgtgagggttcctagttggggccttgaagacaacgtcgtgtgctcgcagcccgctcggaatttctctaggccagatgggctggaggattcagaggatagtaaggaagacgaaaatgtgccaacagctcctgaccccccttctcaacatctgaggggccatggaaccggattctgtttcgacagttcctttgatgttcacaaaaagtgcccactgtgtgagctgatgttcccaccaaattatgaccaatccaaattcgaagagcatgtcgagtcacattggaaggtgtgccctatgtgcagtgaacaattccccccagattacgatcaacaggtttttgaaagacacgtgcagactcattttgaccagaatgttctgaactttgactag

SEQ ID NO: 243511 - DNA, 2244 bp, synthetic construct
  misc_feature 1..2244: note = Description of Artificial Sequence: Synthetic coding sequence
  source 1..2244: mol_type = other DNA
atgaccagcttccaggaagttcccttgcagacgagcaattttgcccatgtgattttccagaacgtggccaagtcctatctgcccaacgctcacctggagtgccactacaccctgactccttatattcatcctcaccctaaggattgggtgggaatttttaaagtgggctggtcgaccgccagagactattatacttttctctggtccccgatgcccgaacactatgtagaggggtcaactgtcaattgtgtgctggcattccagggttactacctacccaacgatgacggcgaattctaccaattctgttacgtcactcacaaaggagagatcaggggggcttccaccccattccagttcagagcatcttcacccgtagaggaattactgactatggaagatgagggtaatagtgacatgttggtggttacaactaaagccggattgctggaactcaaaatcgagaagaccatgaaggagaaggaggagcttctgaagttgatcgccgttctcgagaaggagactgcccagctccgcgaacaggttggtaggatggagagagagctcaaccacgaaaaagagcggtgcgatcagctgcaggctgagcagaaagggctgacagaggtgactcaatcactcaagatggagaatgaggaattcaagaaacgcttctctgatgctacttctaaggcccaccagctggaggaagatatagtctcagttacccacaaagctatcgagaaggaaaccgagcttgattcgctcaaggataagttaaagaaagcccagcacgaacgcgagcagcttgaatgccaactgaaaaccgagaaggacgagaaggagctgtataaagttcacctgaaaaataccgagatcgagaacactaaactgatgtccgaagttcaaacccttaagaatctagatgggaacaaagagtcagtgatcactcactttaaggaggagattggccgtctccagctgtgtttagccgagaaggaaaatttacagcggacgttcctcctcaccacctctagcaaagaagacacgtgttttctgaaggagcaactgcggaaggctgaggagcaagtccaagcaacacggcaggaggtggtgttcctggctaaggagctgagtgacgccgtgaacgtgcgtgatcgcactatggcagatctgcatactgcgaggctcgagaatgagaaagtgaagaaacaactggccgatgctgttgcagagctgaaactgaacgccatgaagaaagatcaggataagaccgatacactcgagcacgagctgcgaagagaagttgaggatttgaaactgaggttgcagatggcagccgaccactacaaggaaaaatttaaggagtgtcaacgcttgcaaaagcagatcaacaaactgtctgaccagtcagctaacaacaataatgtttttacaaagaaaaccggaaaccagcagaaggtcaatgacgcttcagtgaataccgatccagctacctccgcctccaccgttgatgtcaaaccatctccatcagccgcagaagcagacttcgatatcgttacaaaaggccaggtctgtgagatgacgaaggaaatcgccgataagaccgagaagtataacaagtgcaagcagctgttgcaggatgaaaaagctaagtgtaataaatacgctgacgaactggctaagatggagctgaagtggaaagaacaggtgaagattgctgagaatgtcaaacttgaactggccgaagtgcaggacaactataaggagctaaaaagaagcttagagaaccccgcagagcgcaaaatggaggacggagcagacggcgctttctacccagacgagatccagagacctcctgttagagtcccttcttggggcctggaggacaacgtcgtgtgctcacaacctgctcggaattttagccggccagacggattggaagatagtgaagattccaaggaagacgagaatgtccccaccgctccggatcccccttcacagcatctgagggggcatggaaccgggttctgttttgactcgtcattcgacgttcacaagaaatgtcccttatgtgagcttatgtttccacccaattacgatcagtctaaatttgaggagcacgtcgagtctcactggaaagtgtgcccaatgtgtagcgagcagttcccacctgattatgatcagcaggtgttcgaacgccatgtgcagacccactttgaccaaaatgtcctgaactttgattag

SEQ ID NO: 243512 - DNA, 3480 bp, synthetic construct
  misc_feature 1..3480: note = Description of Artificial Sequence: Synthetic coding sequence
  source 1..3480: mol_type = other DNA
atggagcccatcacttttacagctcggaaacacctcctgtcaaatgaagtgagtgtggatttcggcctgcaactggttgggagcttgcctgtccattctttgactaccatgcccatgctcccctgggtagtcgccgaggtgcgtcgactgtctcgacaatccacacggaaggaaccggtgacgaagcaggtccgcttgtgcgtgagtccgagtggacttagatgcgaacccgagcccggacgcagtcagcagtgggacccgctaatctactcttccatttttgaatgtaaaccccaaagggtacacaaactcatccacaactcacatgatccatcatactttgcctgcttaattaaggaggatgctgtgcataggcaatctatatgttatgtgtttaaggccgatgaccagacgaaagtgccagaaattatatcgagcatacggcaggccggaaagattgcccgacaggaggagctgcattgcccatccgagttcgacgataccttcagcaagaaattcgaggtcctgttttgtgggagggttaccgtggctcacaagaaggcgccaccggcacttatcgatgaatgcatagagaagttcaatcacgtgagcgggtctcgtggttcagaaagcccccgacctaacccacctcatgcagctcctacaggctctcaagagccggtgcgtcgacccatgcggaaatcattctcgcaaccagggttgcgctcgttagcctttagaaaggaactccaggacggtggcttgcgctcctccggattctttagcagcttcgaagaatcggatatcgaaaaccatctgataagcggacacaacatagtgcagccgaccgacatagaagagaataggacgatgctgttcaccatagggcagagtgaggtgtacttgataagcccagatacaaaaaagatcgccttagaaaagaactttaaggaaatttccttctgttctcagggtatacgccacgtggaccactttggattcatctgcagagagtcttcaggtggtggtggcttccatttcgtgtgctatgtttttcagtgcaccaatgaagcactggtggacgagatcatgatgacgttaaagcaggcatttactgtcgcagcggtccagcagaccgcaaaggctccggcacagctctgcgaaggatgtcctctgcagtctctgcacaagctgtgcgagagaattgagggaatgaactcttccaagaccaagctggagctccagaaacacctaacaacccttactaaccaggagcaggcaacgattttcgaggaggttcagaagctgcggccaagaaacgagcaacgcgagaacgagcttattattagcttcttgagatgtctgtacgaggaaaagcaaaaagagcatatccatataggcgagatgaagcagactagtcagatggctgcagaaaacatcggctctgaactgcccccttcggccaccagatttcggctggacatgctgaaaaataaggctaagagaagtttgaccgagtccctggagtcaatattgagtcgaggtaacaaggctaggggcctgcaagagcactctatttcagtggaccttgacagtagcctaagttccactcttagcaatacctcaaaggagcccagcgtgtgcgaaaaagaggcactccctatatcagagtcctctttcaagcttctggggtcctccgaggacctctcttccgactccgaatcccatctgccggaggaaccagccccattgagccctcagcaggcctttcgccgtagggctaacacattgtcacactttcctattgaatgtcaggaacctccccagcccgctagaggttcaccaggggtttctcagcgtaaactgatgagataccactctgtgtctacagagacaccccatgaaaggaatgtggacccttcccctgtgggggaatccaagcataggcccggtcagtcaagcgccccagctccgcctcccagactgaacccctcggcctcatctccaaatttcttcaagtacttgaagcataacagttccggggagcagagcggcaacgccgttcctaagagcatctcttatcggaatgccctacggaaaaaacttcacagttcttcttctgtccctaactttctgaagttcctggcaccggtcgacgaaaataacacttcggactttatgaacaccaagcgagacttcgagtcgaaagccaatcatctgggcgatagcggtggcaccccagtgaagaccaggcgacactcctggcgccagcaaatcttcctgcgagtcgccacacctcagaaagcatgcgactcatctagccggtatgaggattacagcgagttaggagagctacctcctcgaagcccgctggaaccagtgtgtgaagacgggcctttcggccctccgccagaagagaagaaacggaccagcagggagttgcgcgagttgtggcagaaagccatcctccaacagatcttacttttacgcatggaaaaggagaaccagaaactgcaagcttccgaaaatgacttgctgaacaaaagacttaagctcgattacgaagaaattactccgtgcctgaaggaagttactactgtatgggaaaaaatgctaagcacgcccggtagatctaagatcaagttcgacatggaaaagatgcattccgcggtcggccaaggggtgcccagacatcatcgtggagagatttggaagtttctcgctgagcagtttcacctaaagcaccagtttccttctaagcagcaacccaaggacgtgccttacaaggaactacttaagcagctcacttcccagcagcacgctattctgatagatcttggccgaacctttccaacacacccttacttttcagcgcagctaggcgcaggacagctttccctctataacattcttaaggcttactcattgctggatcaggaagttgggtattgccaggggttgtccttcgtagccggtatattactcctccacatgagtgaggaagaggcgtttaaaatgcttaagtttctcatgttcgacatgggactaagaaaacagtatagacctgacatgatcatcctccaaatggaaaagacaattaaccaggtttttgaaatggatattgccaagcagttacaagcctacgaggtggaatatcacgtcttgcaggaggagttgattgatagtagtcctttgtcggacaatcaaaggatggataaattggaaaaaaccaacagtagtcttcgcaaacagaacttagatctgctggaacaactgcaggttgccaatgggcgtatccaaagcttggaggcaactattgagaagcttctttcgagtgagtcaaagttaaagcaggctatgttgacactggaactcgaacggagcgctctgctccagacagtggaggaactgaggaggcgatcagccgagccatccgatcgtgagccagagtgcactcagccagagcccacaggggactag

SEQ ID NO: 243513 - DNA, 3507 bp, synthetic construct
  misc_feature 1..3507: note = Description of Artificial Sequence: Synthetic coding sequence
  source 1..3507: mol_type = other DNA
atggagccgataacgtttactgctaggaagcatctgctctcaaacgaggtcagcgtcgacttcggattacagctcgttggtagcttaccagttcactctctaacaacgatgccaatgctcccctgggttgtggcagaggtgcgccgactgagccgacaaagtacccgcaaggagcccgtcactaagcaggttaggctttgtgtttcgccttctggcctgcggtgtgagccagagcccggaagaagtcagcaatgggatccactcatttactcaagtatatttgaatgcaagccccaacgtgttcataagcttatccacaatagccacgatcctagctacttcgcctgccttatcaaggaagacgcagtacacagacagtcaatatgctacgttttcaaagcggacgaccagaccaaagttcccgagatcatcagcagcatccgtcaggctggcaagatcgctcgccaagaagaactgcactgtcccagcgagttcgacgatacgttctcaaagaagtttgaggtccttttctgtgggagggtgacagtggcacacaaaaaggctccgccagccttaatcgacgaatgcatagaaaaatttaaccacgtaagcggctccagagggtccgagtcgcctcggccaaaccctccacacgccgctcccaccggcagtcaggaaccggtcaggaggcctatgcggaaatcattttcccagccaggcctccgaagcctggcgtttcgcaaggaactacaggacggtggcctgagatcaagcggttttttctcctcattcgaggagagcgatatcgagaatcacctgatctccgggcacaacatagtgcaacccactgatatcgaagaaaataggaccatgttatttactatcggccagagcgaggtttacctgatttcccccgatacaaaaaaaatcgcgttagagaagaactttaaagagatatcattctgctctcagggcattagacatgtcgatcactttggttttatatgtcgggaaagcagcgggggaggcggatttcactttgtgtgctacgtcttccagtgcactaacgaagccctggtcgacgaaattatgatgaccttaaagcaggcttttaccgtcgctgccgttcagcaaaccgccaaagctccagcccaattgtgtgaagggtgtccactacagtccctgcataaattatgtgagcgcatagagggaatgaatagtagcaaaacaaagcttgaactgcagaagcatctcaccacccttaccaaccaggaacaggctaccattttcgaagaagtccagaaactcaggccccgaaatgagcagcgggagaatgagctgatcatttcttttctacgatgtctatatgaggaaaaacagaaagagcatatccatattggggagatgaaacagacttcacagatggccgctgaaaatattggatctgaactccccccatccgccacccggttccgcttggacatgctaaagaataaggcaaaaaggtccctaaccgagtctctggagagtatccttagcaggggtaacaaagccagagggctgcaggagcacagcatttctgttgatcttgatagtagtctttcgtcaacactcagcaatacttccaaggagccctccgtctgtgagaaggaagccctgcctatcagcgagagttcctttaagcttcttgggtcaagcgaggacctctcttctgatagcgagtcgcacctaccagaggagccagcccctctcagccctcaacaggcgttccggagacgcgctaataccctgtcgcacttccctatcgagtgtcaggagccaccgcaacccgctcgcggttccccaggcgtctcccagcgcaaattaatgcggtaccacagcgtgtccaccgagacgccacatgaaaggaaagactttgagtcaaaggcgaatcacctgggcgattcgggcggaacgcctgtgaaaacaaggcgacacagctggagacagcaaatatttctacgggtggccactccacagaaagcatgtgattccagctcacggtacgaggattattctgaactgggggaactaccccctcgcagtccgttggaacctgtttgcgaggacggaccctttggccctccacccgaggaaaagaaaaggactagtcgtgagttgagggaactgtggcagaaggcaatcctgcagcagatactgttgctgcgcatggaaaaagagaaccagaagctccaagcttcagagaatgatttgctcaataagcgcctgaagctcgactacgaagagatcacaccttgcctgaaggaggttacgaccgtctgggagaagatgctgtcaactccgggaaggagtaagattaagtttgacatggaaaagatgcacagcgcagttggccagggggttcctcggcatcacagaggggaaatttggaaattcttagcagaacagtttcacctgaagcaccagttcccttctaagcagcaaccaaaggacgtgccctataaggagctccttaagcaactcacctcccagcagcacgctatcttaatcgacctcggtaggactttccctacccatccatatttttccgcacagcttggtgccggacagttgtctctgtataatatcctcaaggcttatagtcttcttgaccaggaggttggctactgccagggcttgtccttcgtcgccggtatattgctgttacatatgtccgaagaggaggccttcaagatgttaaagttcctcatgtttgatatggggcttaggaaacaatatcggcctgacatgattatactgcagatccagatgtaccaattatcccgtctcctgcacgactatcatcgggatctgtataatcatctggaagagcacgagatcgggcctagtctttacgccgctccttggtttctaaccatgttcgcctcccagtttcctctgggattcgtggcacgcgtgttcgatatgatttttctgcaaggcacagaggtgatcttcaaagtcgccctttccctgctggggagccacaagcccctcattctgcagcacgaaaaccttgagactattgtagacttcataaaatcaaccctccctaatttggggctggtgcaaatggagaagacgatcaatcaagtgtttgaaatggatattgctaagcaactacaagcctacgaagtggaatatcatgtgctccaggaggaactgattgattccagccctttaagcgacaaccagcgcatggataagctcgagaagacaaactcctcactcagaaaacagaatctggatctcctggaacagctacaagttgcaaacggccgtatccagtcgctcgaggccaccatagagaagctgctcagctccgagtccaagctcaaacaggcaatgctcaccctggagctcgaaagatccgccctcctgcagactgtggaggagctgcggagacggagcgccgaaccgagcgatcgagagcccgagtgcacgcagcccgagcccacgggcgactag

SEQ ID NO: 243514 - DNA, 1299 bp, synthetic construct
  misc_feature 1..1299: note = Description of Artificial Sequence: Synthetic coding sequence
  source 1..1299: mol_type = other DNA
atggaaaaggaaaaccagaagcttcaagcttccgagaatgacctcctgaataagcggttgaagctggactatgaggagattaccccatgcttgaaagaagtcacaactgtttgggagaaaatgttatcaacgcctgggcgttctaagatcaaatttgatatggagaagatgcactcagcagtggggcagggagtacctcggcatcacaggggggagatttggaagttcctggctgagcagttccaccttaagcatcagttccctagtaaacagcaaccaaaggatgtcccatataaggaactactgaaacagttgacgagccagcaacacgccattttgattgacttgggccgtaccttcccgacccacccatatttctctgcacaactcggcgcaggccagctgtctctgtacaatattctgaaagcctattccctgttggaccaggaggtaggctactgtcagggtctgtcatttgttgcagggatcctcttgttgcatatgtcagaggaggaggcttttaaaatgcttaagttcctcatgttcgacatgggcttgcgaaaacagtaccggccagacatgatcatcctccagattcaaatgtaccagttgtctcggctgctccatgactatcatcgcgacttatataatcatctggaggagcacgagataggacccagcctttatgccgcaccctggtttctcacaatgtttgcttcccagttccccctcggcttcgtggccagagtctttgatatgatttttctccagggcaccgaggtgattttcaaggttgcactgagcctgctaggatcacacaagcccctgattctgcagcatgagaaccttgagaccatcgtggattttattaagtctactttgccgaacctgggactggttcaaatggagaaaaccatcaaccaggtttttgaaatggatattgctaagcagcttcaagcatacgaagtggagtaccatgtgctccaggaagagctgattgattcctctcctctgagcgacaatcaaagaatggacaagctggagaagaccaacagctccctgcgaaagcagaacctggacctcttggaacagctccaggtggccaatggcagaatccagtctcttgaagctaccatcgagaagctcttgtcctctgagagcaagctgaagcaggcaatgctcaccctggagttggagagatccgctctcctgcagacggtggaagaactgcgcagaaggagcgccgagcctagtgaccgcgagccagagtgcacacagcccgagcccaccggcgattag

SEQ ID NO: 243515 - DNA, 933 bp, synthetic construct
  misc_feature 1..933: note = Description of Artificial Sequence: Synthetic coding sequence
  source 1..933: mol_type = other DNA
atggcccaagctcttggggaggatctggtgcagcccccagaactccaggatgacagctcaagtctgggctccgactccgagctgtcaggcccaggtccttacagacaggcagaccggtatggttttattggagggtcctctgctgagccagggcctggccatcctccagcggatctcattaggcagagggaaatgaagtgggtcgagatgacctctcactgggagaagactatgagcagacgttacaaaaaagtgaaaatgcaatgccgcaagggaatcccatccgccctccgggctcggtgttggcctctcctgtgcggtgcgcacgtttgccagaagaactcccctggcacatatcaagaattggcagaggcccctggggaccctcagtggatggagacgatcggacgggatctccataggcagttccctctgcacgagatgttcgtgtcaccccagggacacggaaggggatcctgtagatgcagtagaccaaccccctgcatcgaccgcagccgagccaccgcacgcccacggggaccctggcttttgtgctgctcctgtacttgtccacagagacgacccagtggagcctggtgcaggtctgttaggtcgaccagcctgggtactaccgggccaacatggtgccaatccacagtgccctgcggggctgataccggagcccctggagccggacactgtagagctgcccgaggcctcccctggcccccaggcgacacaggatcaccttctagccaccctcctagagccgcagccggagggggtctccacgttaccggcgctcagcggggagctgtgagagcgggaccagctgctggggatcaaggccctgcaggacctgccgcaaggttcagagccggaacaccagcaccggctacaggccctcctagaaggggcccatcccatctgtag

SEQ ID NO: 243516 - DNA, 1662 bp, synthetic construct
  misc_feature 1..1662: note = Description of Artificial Sequence: Synthetic coding sequence
  source 1..1662: mol_type = other DNA
atggattctcctggctacaactgtttcgtggacaaggacaagatggacgcagccattcaggacctcggccctaaagaattatcctgtacagagctgcaggagctgaaacagctggcaagacaaggatactgggcccagagccatgcccttcggggtaaggtctaccaaaggcttatccgcgatatcccttgtcgtacggtgacgcccgatgcgtctgtctacagtgacattgtcggcaagattgtgggaaaacattcatcctcgtgtctacctctccccgaatttgtcgataatacacaggtccccagctattgcctgaatgcaaggggagagggggcagtccggaagatcctcctgtgtctggctaatcagttcccggacatttcgttttgcccagcgctgccagcggttgtagccctgctgttgcactacagcattgacgaagcggagtgcttcgagaaggcatgtagaatcctagcctgtaatgatcccggaaggcggctcatcgaccaatctttcctggccttcgagtcctcctgtatgacctttggagatctggtgaacaaatattgtcaggctgcccataaacttatggtcgctgtttcggaggacgttctgcaggtatacgccgactggcaacgttggctttttggagaactgcccctttgttacttcgctcgggtgttcgatgtgttcttggtcgagggctacaaggtgctttatagggtagccctggccatccttaagtttttccataaggtacgcgctggacagcctctggaatcggactccgtaaagcaggacatcagaacttttgtgagggacatcgcaaaaaccgtgtccccagaaaagctgctggagaaagcattcgccattcgccttttctccagaaaagaaatacagctgcttcaaatggccaatgagaaggccctgaagcaaaaaggaatcacggtgaagcaaaaacggcaatttgtccatctcgcagtccacgccgaaaacttccggtctgaaatcgtctctgtgcgcgaaatgcgtgatatctggtcatgggtgccggaaagatttgctttgtgccagcccctgctgctgttttcttccctccagcatgggtactccttagcacggttttattttcagtgtgaggggcatgagcccaccttgctgctcattaaaaccacccagaaggaggtgtgtggcgcttacctgtcaacagactggagtgaacggaataaatttggcggtaagctgggcttttttggcactggggaatgctttgtgtttcgtctccagcccgaggtacagcgctacgaatgggtggttatcaaacaccctgagctgacaaaaccgccacccctgatggcagctgagcctactgccccactctcccattctgccagttccgatccggctgacagactgagtccattcttggctgcccgacattttaatttaccttccaagacggaaagcatgtttatggccggaggatcagactgcctgatcgtgggtgggggtgggggacaggctctgtatattgatggcgatttgaatcgtggccgtacatcacactgcgacacctttaacaatcagccgctgtgtagcgagaattttcttatagcagccgttgaagcctgggggttccaggatcccgacacacaatag

SEQ ID NO: 243517 - DNA, 759 bp, synthetic construct
  misc_feature 1..759: note = Description of Artificial Sequence: Synthetic coding sequence
  source 1..759: mol_type = other DNA
atgggagtgctgctgactcagaggaccctgctttccctggtgctggctttgctgtttccttcgatggcctccatggccgctatcggatcctgttcaaaggagtaccgtgttctgttgggtcagctgcagaagcagacagacctgatgcaagacacgtctcgtctgttggatccctatatccgcattcagggattagatgttcccaaactgagagagcactgtcgcgaacgacccggagcctttccaagcgaagagacactgaggggccttgggcgaagggggtttttgcaaacactcaatgccaccctcgggtgtgtgttacatcggctggccgatttggagcagcgcttgccaaaggcacaagacttggagaggtctggcctgaatattgaggatctggagaagcttcagatggccagacccaatatcctgggacttagaaacaatatctactgtatggcacaactgctggataacagcgatacggccgagccaacaaaagccggacgtggtgcctcccagcctcctacacctactcctgccagcgacgcctttcagcggaaattagagggctgtcggttcctgcacggctaccacaggttcatgcatagcgtggggcgagtgttctctaagtggggggagtctcccaaccgtagtcggaggcatagtccccaccaggctctgagaaagggcgtacggagaactcgtccatccaggaaggggaagcgactaatgacacgaggtcagctacctagatag

SEQ ID NO: 243518 - DNA, 1263 bp, synthetic construct
  misc_feature 1..1263: note = Description of Artificial Sequence: Synthetic coding sequence
  source 1..1263: mol_type = other DNA
atgttgaacaattgggacaagtggatggctaaaaagcacaagaaaatccgactccgttgtcagaagggtattccaccgtccttgcgcggtcgagcctggcagtacctttccggtggaaaggtcaaactgcaacagaacccaggtaagtttgatgagctagacatgagtcctggggatcctaagtggctggacgttatcgaaagggatttacacagacagtttccattccacgaaatgtttgtctctcggggaggtcacgggcaacaggatctgttccgggtgctcaaagcttataccctgtaccgccctgaggagggctactgccaggcacaagcgccaatcgcggctgtgctcctcatgcacatgcccgctgaacaggccttttggtgtcttgttcagatctgcgaaaagtacctccctggctactactccgagaagctcgaggccattcagctggacggagaaatcctattctcgctgttacaaaaggtgtctcccgtggctcataaacatctgtccagacagaagatagatcccttgctttatatgacagagtggtttatgtgcgccttctcgcggaccctgccgtggtctagcgtactgagggtttgggatatgttcttttgtgagggagttaagattatcttccgcgtcggcctcgtactgttaaagcatgctcttggttcgcctgagaaagtgaaagcctgccagggacaatatgaaacaatagagagattaagatctctctcccctaagataatgcaggaagccttcctcgttcaagaagtcgtggaattgcctgttacggaacgccagattgaacgagaacacttgatccagttgagacggtggcaagagactcgtggggagctccagtgtagatcacctccacggcttcatggagccaaggccatacttgatgctgaacctggcccacgtcccgctctccagccatctccgagcatccgactacccttagatgccccactccccggatcaaaggctaaaccgaaaccccctaagcaggcccagaaggaacagcgaaagcagatgaagggtcgtggtcagctcgaaaagcccccagctccgaatcaagcgatggtcgtggcggcagccggtgatgcttgcccccctcaacatgtgcctccaaaagacagtgcccctaaggacagcgcccctcaggacctggctcctcaggtgagcgcgcatcaccggagtcaggaatccttgacttctcaggagtctgaggacacatacctgtag

SEQ ID NO: 243519 - DNA, 1548 bp, synthetic construct
  misc_feature 1..1548: note = Description of Artificial Sequence: Synthetic coding sequence
  source 1..1548: mol_type = other DNA
atggccaagtccaacggcgagaatggacctcgggcacccgcagccggagagtcgctgagtgggacgagggaaagcttagcccaggggccagacgctgccaccacagatgagctttccagtctaggaagcgatagcgaagctaacggatttgctgagcgcagaatcgacaaatttggattcattgtgggctcgcagggagcagagggtgcaccatgcccactgctccatcggctcgaagaagtccctctcgaagtcctccgacagcgagagagcaagtggctggatatgttaaacaactgggacaagtggatggccaagaaacataagaagataaggttaaggtgccagaagggcatcccgccttcactccgagggagagcatggcagtacctctcagggggaaaggttaaactccagcaaaatcctggaaagttcgacgagcttgacatgagccctggtgatccaaagtggttagacgtgatcgaacgggatttgcaccggcagtttccgttccacgagatgttcgtgtctcggggtgggcacggacagcaggatctcttccgcgttctgaaggcttacactctttatcggcctgaagaggggtactgccaagcccaggccccaatagctgctgtgctgctgatgcatatgccagccgaacaggctttttggtgccttgttcagatttgtgagaaatatcttcccggttactatagcgagaagctggaggctattcaacttgatggtgagatactgttctcgctgcttcagaaggtctcacctgtcgcacacaaacacctgtctcggcagaagatcgatcccttgttgtatatgacggagtggttcatgtgcgccttcagccgcacccttccctggagttctgtcctgcgcgtttgggacatgtttttctgcgaaggcgtgaagataattttccgggtcggcttggttctgctgaagcacgcactgggaagtccagaaaaggtaaaggcatgtcagggacagtacgaaacgattgagcggctgcgaagcctttccccgaaaatcatgcaagaagcgttcttagtgcaagaggtggtcgaactgcctgttactgaacggcagatcgaacgggagcatctgattcaactccgaaggtggcaggagactcgaggagaacttcagtgccgatcgccccctcgactgcatggcgctaaggccattctggatgcagagccaggaccacgcccagcccttcaaccttcaccttccattcgtttacctcttgacgcccctctgcctggcagtaaggccaagcccaagcctcctaagcaggcacagaaagaacaacgaaagcagatgaaaggcagagggcaattagagaagccaccggcacccaaccaggcgatggtggttgcagccgctggagacgcatgtccacctcagcatgtcccccctaaggatagtgcgcctaaggattcagcaccgcaagacctggcaccacaggtcagcgcgcatcaccggagccaagagagcctgacctcccaggagtccgaagacacgtatctgtag

SEQ ID NO: 243520 - DNA, 2427 bp, synthetic construct
  misc_feature 1..2427: note = Description of Artificial Sequence: Synthetic coding sequence
  source 1..2427: mol_type = other DNA
atggaaacaggcactgctcccctcgtcgctccccctcgtaggcacggagcacccgcagccccatccccccctcccagggggtccagggcaggcccagtagtggtcgtcgcccctggacctcccgtgaccacagccacgtcagccccagttaccctcgtagcacccggagaagcacgaccagcttgggtccctgggagtgccgaaaccagcgcgcctgccccagctcctgctcctgcccctgccccagcagtcactggttcaacggtggttgtgctgactctggaagctagccctgaggctcccaagccccaactaccatcggggcctgagtcccccgagcctgccgctgttgctggggttgagaccagccgcgctctcgccgcaggggcagactcccccaaaactgaggaagcccgaccatcccccgcacccggtcccggaactcctacaggcactcctaccaggactccttcccggacggcaccaggagccctgaccgctaaaccaccattagcccctaaaccaggcaccacagtggcctctggagtgacagcaaggagtgcgtctggccaagtgaccggaggtcacggggcagccgcagccacatctgcaagtgcaggacaggcccctgaagatcctagcggacctggaaccggccctagcggaacttgcgaagcccctgtggccgtggtcaccgtgacaccggctccggagcctgcagagaattcccaagatttgggctcaaccagctccctcgggccagggatcagtggccctcggggacaggcgccagacacattgtcttacctggattccgttagtttgatgagcgggaccctggaatcccttgccgacgacgtaagctcaatgggtagtgatagcgagataaatgggttggctttacgcaagactgataagtatgggttcctgggtggctcacaatactccggaagcctggagtctagcattcccgttgatgtggccaggcagcgcgagctgaagtggctggatatgttttctaactgggacaagtggctaagcagacgatttcagaaagtgaagttgcggtgtcgtaaagggatccccagctccttgagggctaaggcctggcagtatctgtccaatagtaaagaactgctcgaacagaaccctggcaagttcgaagagctcgaacgggctcctggggacccaaaatggttggacgtaatcgagaaagacctacatagacagttcccttttcacgaaatgtttgcagctcggggaggtcacgggcaacaggatctttacaggatcctgaaggcttatacaatttacaggcctgatgagggctactgccaggcccaagctcctgtggctgccgtgctgttaatgcacatgcctgcagaacaggccttctggtgcctcgttcagatttgtgacaagtatctgcctggctattactctgccggactggaggccattcaactggatggggagatattcttcgcactgcttcgtagagctagcccactggcgcaccgccatctgaggaggcaacgcatagaccctgtcctgtacatgaccgagtggtttatgtgtatcttcgccagaacactgccctgggcttccgtcctgcgcgtgtgggacatgtttttttgcgaaggcgtgaaaataattttccgggtggccctcgttctcctgaggcatacattaggatccgtggagaagttacggtcctgtcaggggatgtatgagaccatggaacaactcaggaacttgccacaacagtgtatgcaggaagatttcttggtacacgaggtcactaatttaccggtgaccgaggctttgatagagagagagaatgctgctcagttgaaaaagtggcgcgagacccgcggagaactccagtataggccctcaagacgacttcatgggtcgcgggctatccacgaggagaggcggaggcaacagcctcctttgggaccttcgagttcccttctgtcactgcccggactgaaatcaagaggcagtcgcgctgccggaggcgcaccgtcgccgcctcctcctgttcggagagcaagcgctgggcctgcacctggccctgttgtgactgctgaaggattgcacccttcattgccatccccaactggcaatagtactccactcggatcgtcgaaagagacccggaaacaggaaaaggagcggcagaagcaggaaaaagagcgccaaaagcaggagaaggagcgcgaaaaagaaaggcagaaacaggaaaaagaaagagaaaagcaagagaaagagagagagaaacaggagaaggaacgacagaaacaggagaaaaaggcccaggggcgaaaactgagcttacgaaggaaagccgacggcccacctggccctcatgacggtggagaccggccatcagccgaggctcgccaggacgcttatttttag

SEQ ID NO: 243521 - DNA, 1341 bp, synthetic construct
  misc_feature 1..1341: note = Description of Artificial Sequence: Synthetic coding sequence
  source 1..1341: mol_type = other DNA
atggcccaggccttgggggaggacctggtacagccaccagaattacaggacgactcatccagcctgggctcagatagcgaattaagtggtcctggtccctaccgtcaagccgatcggtacggcttcattgggggatccagtgccgagccaggcccagggcatccccctgcagacctgattcggcaaagggaaatgaagtgggtcgaaatgacttcgcactgggagaaaacaatgtcacggcgatataagaaggtgaagatgcagtgcaggaaaggaattccttctgccctgcgcgcacgttgctggcctttgctctgtggtgctcacgtttgtcaaaagaacagtccaggtacatatcaggaattagctgaggcacccggtgacccacagtggatggagactatcgggagagaccttcatcggcagttccctctccacgaaatgttcgtgtcaccccagggtcatggacagcaaggcttattgcaagttctgaaggcgtatacactgtacaggcccgaacagggctactgtcaagcacagggcccagttgctgcagttctcttgatgcacctgccaccagaagaggcattctggtgcctcgttcaaatatgcgaggtctacctgcccggttactatggacctcacatggaggcggtgcgtctcgacgcagaggtgtttatggccctactgagacggctgttgcctcatgtacataaacatctgcagcaggttggcgtcggccctcttctgtatttgcctgaatggtttctttgtctttttgccaggtctcttccgttccccaccgtgctgcgagtgtgggacgcatttctaagcgaaggcgcaagagtgctgttcagggtgggattaaccctggtccggctggccttaggaaccgcagagcagaggggagcatgtcccggtctcctggaaactcttggagccctaagagccattcccccagcacaacttcaagaggaagcatttatgagccaagtccacagcgttgtgctgagtgagagggatctccagcgagaaatcaaggcccaattggctcagctgcctgactccgcccctgggccaccccctaggccccaggtaagacttgctggggctcaggccattttcgaagcgcagcagctggcaggcgtcaggaggggggcaaagccggaggttccaagaattgtagtccagccccctgaagagcctagacccccaaggcgtaagccccagacccgtggtaaaacttttcatggtttgctgacaagggcgagaggacctccaatcgaggggccaccacggccacagaggggctccacatcatttctagacacacgcttttag

SEQ ID NO: 243522 - DNA, 1341 bp, synthetic construct
  misc_feature 1..1341: note = Description of Artificial Sequence: Synthetic coding sequence
  source 1..1341: mol_type = other DNA
atggcacaagccctgggggaagacctcgtgcagccccctgagctgcaagatgactcttccagcctcgggagcgattcggaacttagcggccctgggccataccgccaggccgatcgttacggttttatcgggggatcctcagctgagccgggacctggccacccacctgccgatctcatccgccaaagagagatgaaatgggtcgagatgacaagtcattgggagaagacaatgtccaggcgatataagaaggtgaaaatgcagtgtcgaaaaggcattccaagcgccctaagagcaagatgctggccactgctatgcggtgcacatgtgtgccaaaagaactcacctggcacataccaggaactcgccgaagcccctggtgacccacagtggatggaaacaattgggagagacctccatcgtcagttcccgctccatgagatgttcgtgagtccccaggggcatggccaacaagggctcctgcaggtcctgaaggcctataccctttaccggcctgagcagggttactgccaggctcagggccctgtcgcagcggttctgctgatgcatttaccgccagaggaagccttttggtgtttagtccagatttgtgaggtataccttcctggctactacggacctcatatggaggccgtgagactggatgcggaggtgtttatggcactgctacggcgattgctgccgcatgtccataaacatctgcagcaggtcggagtggggcctcttctgtacttacctgagtggtttctgtgcttgttcgccaggagcctcccctttcctacagtcctgagagtgtgggatgcctttctcagcgagggggctcgggtgctgtttcgggtcgggctgacgttggtgcggctagcactaggaaccgccgaacagagaggtgcctgtccaggcctcctagagaccctgggcgctctgcgtgccattccccctgcccagctacaggaagaagccttcatgtcccaggtacactctgtcgtcctcagcgagagggaccttcagcgtgagatcaaggcccagcttgcccagctgcctgattcagcgcctggtcccccaccacggccacaagttcggctggcaggcgctcaggcgatctttgaagcccagcagctagctggggtgagacgcggagctaagccagaagttcctaggatagtggtgcaaccacctgaagagcctaggcctcctcggagaaagccccagaccaggggaaaaactttccacggcctgctcacccgcgcacggggacctcctatcgagggcccaccgaggcctcaaaggggttcaacatcttttctggatacaagattttag

SEQ ID NO: 243523 - DNA, 2049 bp, synthetic construct
  misc_feature 1..2049: note = Description of Artificial Sequence: Synthetic coding sequence
  source 1..2049: mol_type = other DNA
atgtgcccgggtctatacccatactcatccctgctcgagtatggcaggtctatgattatctatgagcaggagggggtgtacattcattcttcttgtggcaagaccaatgatcaggatggcctcatcagcggaatccttagagtgctcgaaaaagatgccgaagtcattgtggactggagacccctcgatgatgccctggacagctcctcaattctgtacgctcgaaaggactctagttctgtcgtggaatggacacaggcgcctaaggaacgagggcataggggaagcgaacacttaaatagctatgaagcggaatgggacatggttaacacagttagctttaagagaaagccccacacaaacggagacgctccttctcatagaaacggtaaatccaagtggtccttcctgtttagcctgacagacctgaagtctatcaagcaaaataaggaaggaatgggctggtcttacctggttttctgccttaaggacgacgtagttctgccggctctgcatttccaccagggagacagcaagcttctgatagagtcactcgaaaaatacgtcgtcctttgcgaatcacctcaggacaagcgaacactgttagtgaactgtcaaaataagagtctaagtcagtcttttgagaacctcctggatgaaccagcttacggattgatccaaaagattaagaaggatccatacacggcaacgatgatagggttttcgaaggtgactaattacatcttcgactccctccggggtagcgacccttctacccaccagcgtcccccatccgagatggccgactttctgagcgacgccatcccgggactgaaaatcaatcagcaggaggagcccggattcgaggtcattactagaattgacctgggcgagcgaccggtcgtgcagcgcagggaacccgtctcccttgaagaatggacgaagaacattgatagtgaaggcaggatcttgaatgtggacaatatgaagcagatgatatttcgcggaggcttatcgcatgcgttgagaaaacaggcatggaaatttcttctggggtacttcccatgggacagcacgaaggaggagaggacccaactccaaaaacagaagacggacgagtattttcgaatgaaactgcagtggaagagcatttctcaggaacaggaaaaacggaattcaaggctccgcgattatagatccctgatagaaaaggatgtcaaccgcactgatcgaacaaacaagttttatgaaggacaagacaacccgggtctgatcctgctccacgacattctgatgacttattgtatgtatgattttgatctcggctacgtccaaggtatgagcgacctactaagccccctgctatatgtgatggagaacgaggtggacgccttctggtgttttgcatcttatatggatcagatgcatcagaacttcgaggagcagatgcaaggcatgaagacccagttaatacagctgtctacactgctccggctgttagattccggattttgctcttatctagagtcccaggactctggttacctatacttctgctttcggtggctcctgatacggtttaagagggagttctctttcttagatattctccgcctttgggaggtcatgtggacagagttgccatgtaccaattttcacttgctgctctgttgcgcgatcttggagtccgaaaaacaacaaataatggagaagcattatgggttcaatgagatactgaaacacattaacgaactctccatgaagatcgacgtcgaggacattctgtgcaaagcagaagcaatttccctccagatggtgaagtgcaaagagctgccccaggctgtctgcgagatactgggccttcagggctcggaggttactacacctgacagcgacgttggcgaggacgagaatgttgttatgacaccatgccccacctccgcctttcaatccaatgccctgcccactcttagcgcatctggtgcgagaaatgacagccccacccagatccccgtttcctcggatgtttgtaggctcaccccagcctag

SEQ ID NO: 243524 - DNA, 1338 bp, synthetic construct
  misc_feature 1..1338: note = Description of Artificial Sequence: Synthetic coding sequence
  source 1..1338: mol_type = other DNA
atgatcggcttctctaaagtgacaaattatatctttgacagtctccgcggatctgaccccagtactcatcagcgcccaccatcagaaatggcggacttcctgtcggacgcgattcccggtctgaaaattaaccagcaggaggagcctggttttgaggtcataaccagaatcgacttaggtgagagacccgtcgtgcaacgacgggaaccagtctcactggaggagtggacaaaaaacatcgactcagaagggaggattctcaacgtggacaacatgaaacagatgatatttaggggcggtctctctcacgccctgcggaagcaggcctggaaatttctattgggctatttcccatgggactctactaaggaggagcgcacccaattgcaaaagcaaaaaactgacgaatatttccgcatgaagctacagtggaagagtatcagtcaggagcaggagaaacgaaactcccggcttagagattatcggtctctaatagaaaaagacgttaaccgcacagaccggaccaataaattttacgaggggcaggataatcctggactgatcctcctgcacgatatcctgatgacatactgcatgtacgacttcgacctggggtatgtccaggggatgagtgatctgctcagcccattactctatgttatggagaatgaagtggatgccttttggtgctttgcctcttatatggatcagatgcaccagaactttgaggaacagatgcaaggcatgaagacccagctgattcagttgagcacactgctccggctgctcgattctggcttttgcagctatctagagtctcaagatagtggttacctctacttttgttttagatggttgcttatcagattcaaacgtgagttcagctttctggacatactcaggctctgggaagtaatgtggacggagctgccctgtaccaatttccacctcctcctttgttgcgcaattttggagtcagagaaacagcagatcatggaaaagcactatgggttcaatgaaatcctgaaacacatcaacgagctctcaatgaaaatagatgtcgaggacattttgtgtaaagcggaagcgattagcctacagatggtgaagtgcaaggaactccctcaagccgtgtgtgagatcttagggctccaaggctcggaggtgactactcctgactccgatgtgggcgaggatgagaacgtggtcatgacaccctgtcctaccagcgctttccaatccaacgcgctgccaaccctgagcgcatccggggctaggaacgacagtcccacgcagatccctgtatcctccgatgtgtgtaggctgaccccagcttag

SEQ ID NO: 243525 - DNA, 2025 bp, synthetic construct
  misc_feature 1..2025: note = Description of Artificial Sequence: Synthetic coding sequence
  source 1..2025: mol_type = other DNA
atggccgctgcaggcgttgtgtccggcaagatcatttacgagcaagagggggtctacatccattcctcttgcgggaaaactaacgatcaagatggcctaattagcgggatactgcgagtgctggagaaagacgcagaagtgattgtggactggcgaccattggatgatgccttggattcctcatcaatcctttatgctcggaaggattcttcttcagtggtagagtggacccaagcccctaaggaaagaggccaccgagggagtgaacacctgaattcctatgaagctgagtgggacatggtgaacaccgtgtcatttaagcgtaaacctcacaccaatggagacgcaccgagtcacagaaacggcaaaagtaaatggagcttcttgttctcactgaccgacctcaaaagcatcaagcagaataaagagggcatggggtggtcctatctagtattttgtttaaaagatgacgtagtgttgccggctctgcattttcaccagggtgacagcaagcttttgatcgagtccctcgaaaaatatgtggtattatgcgagagcccccaggataagcgcaccctcttggtgaattgccaaaataagtcactgagtcaaagctttgagaacctgctggacgagccagcgtatggtttgatccaaaagattaagaaagacccatacacagccactatgattggcttttccaaggttaccaattatatcttcgactcacttagagggtctgacccaagcacacatcagagaccccctagcgaaatggccgatttcttgagtgacgcaattcctgggttgaaaatcaatcagcaagaggaacctggattcgaagtgattacccgaattgatctgggggagcgccctgtcgtgcagcgcagagagccggtcagcctggaggagtggaccaaaaatatcgactctgaaggacgaattctcaacgttgataacatgaagcaaatgatatttagaggcggactgtcccacgcactccgaaagcaagcctggaagtttcttctgggatactttccttgggactcaaccaaggaggagcgaactcaactccagaaacagaagacagatgaatacttcagaatgaagctgcagtggaagagcatatctcaggaacaggagaagcgcaacagccgactcagggattatagaagtctcattgagaaagacgtgaacagaacagaccgcactaacaaattctacgagggacaggacaaccccggacttattctgctgcatgatatccttatgacttattgcatgtatgacttcgacctggggtacgtacagggtatgtccgacttattatctcctttgctctatgtcatggagaatgaagtggacgctttctggtgtttcgccagctacatggatcagatgcatcagaatttcgaagaacagatgcaggggatgaagacccagttgatccaactcagcacacttctgagattgctggactctggcttctgctcctacctagaaagccaggactcaggatacctgtacttctgtttccggtggttgcttatcagattcaagcgcgagttttcttttctggacattttgcggctgtgggaggtcatgtggacagagctgccttgcaccaatttccacttactcctctgttgtgcgatcctggagtccgaaaagcagcagatcatggagaagcattatggattcaatgagatcctgaaacacatcaatgagctgtcaatgaaaattgatgtggaagatatattgtgtaaggcagaggcgattagtctgcaaatggtaaaatgcaaggagctgccgcaagcggtctgtgaaatcctgggactgcaagggagtgaagtcaccactcccgactcagatgtgggtgaagatgagaatgtcgtgatgactccatgtccaaccagtgcttttcagtccaacgctctccccaccttatctgcctcaggtgccaggaacgactccccaacacaaattccagtgagtagcgacgtatgccgccttacgcctgcttag

SEQ ID NO: 243526 - DNA, 2076 bp, synthetic construct
  misc_feature 1..2076: note = Description of Artificial Sequence: Synthetic coding sequence
  source 1..2076: mol_type = other DNA
atggccgctgcaggtgtggtcagtggcaaaatcatctacgagcaggaaggagtatacatacactcatcatgtggaaaaacaaatgaccaggatggtttaatcagcggaatcctaagagtgctcgaaaaggacgccgaagtgatcgtcgactggaggccacttgatgacgccctggattctagttccattttatacgccagaaaggacagctccagtgttgtagagtggacccaggctcctaaggaacgagggcatcgtggctccgaacatctgaatagctacgaggccgaatgggacatggtcaatactgtttcgttcaagcgaaagccccatacaaacggagacgcccctagtcacaggaatgggaaatccaaatggagctttttattttcactgactgatctcaagagtatcaagcaaaacaaagaggggatggggtggtcttatttggtcttttgcctcaaggacgacgttgtcttgcccgcactgcatttccatcagggagattcaaaactgctcatcgagtctttagaaaaatacgtggtactgtgtgagtcccctcaggacaaacgaactctcctagtgaactgccagaacaagagtctgtcccagtccttcgaaaacttactggacgagccggcttacggactgattcaggcaggcctcttggatcgaaggaagctgctctgggctatacaccactggaaaaagattaagaaggatccttatactgcaacaatgatcggattttccaaggtgacaaactacattttcgatagcctgcgcggttcagatccttcaacacaccagagaccacctagcgagatggctgacttcttatctgacgccatacccggactaaaaatcaaccagcaggaggaacctgggttcgaagtaataacacggatagatttgggcgagaggccagtcgtccaacgacgtgaaccggtgagtcttgaggagtggaccaagaacatcgattcagaaggtcggatcctcaacgtggacaatatgaaacagatgatcttccgcggtgggctgtctcatgccctgcgcaagcaggcctggaagtttcttctcgggtatttcccatgggactctacaaaagaagagaggacccagttgcagaaacagaagaccgatgaatacttccggatgaaacttcaatggaaaagcatctcacaggagcaggagaaaagaaactcaaggctgcgggactacaggtctttgatcgagaaagatgtgaatcgtaccgatcggacaaacaagttctatgagggtcaggacaaccccggacttattttgttacacgacatcttaatgacctattgtatgtacgactttgacttgggatatgttcagggcatgagcgatttactgtcacctctgctctacgtgatggaaaacgaggtcgacgctttctggtgcttcgcttcctatatggaccagatgcaccaaaatttcgaggagcagatgcaaggaatgaagactcagctgatccagctgagtaccctgttacgcctgcttgatagcggcttctgctcctatctggagagccaggacagcggctatctatatttctgtttccgctggctcctgatacgctttaaacgcgaattctcattcctcgacatccttcgcctgtgggaggttatgtggacggagctgccatgcacaaattttcatctcctgctctgttgtgctatccttgagagtgagaaacagcaaattatggaaaaacactacggcttcaatgaaattcttaagcatatcaacgaattaagcatgaaaatcgatgttgaggacattttgtgcaaagctgaggctattagtctgcaaatggttaagtgcaaagagctcccccaggccgtgtgtgagattctgggtctccaggggagtgaggtgaccacacccgattctgatgtcggcgaagatgagaatgttgttatgacaccctgccctacgagtgccttccagagtaacgctctgccgaccctgtcagcttccggcgctcgcaatgactcaccaactcagattcctgtgagttctgacgtgtgtcgtttgaccccggcttag

SEQ ID NO: 243527 - DNA, 2133 bp, synthetic construct
  misc_feature 1..2133: note = Description of Artificial Sequence: Synthetic coding sequence
  source 1..2133: mol_type = other DNA
atgcacaacatacggggtaataagcaggctcagggcaccggccacgagcctcccggagaggactccccccagagcggcgaaccacagcgcgaagagcagccgctcgcatctgatgcaagtacccccggaagagagcccgaggattcccctaaacctgcccctaaaccttccctgacaatcagctttgctcagaaagctaaaaggcagaacaacaccttccccttcttttcagagggcataacgcgcaaccgcacagcccaggagaaggttgccgcactggaacagcaagttctaatgcttacaaaggagctcaagagtcagaaggagctcgttaaaattctgcataaggcactggaagccgctcagcaggagaagagggcttcgtccgcgtatcttgcagcagccgaagacaaggaccgtttggagctggtgcggcacaaagtgcggcagatagccgagctggggagaagggtggaggcccttgaacaggaacgggagtcgctggctcatactgcgagcttgagagagcagcaggtccaggaactgcaacagcatgtccaactgttgatggacaaaaatcatgcaaagcaacaggttatatgcaagcttagtgagaaggtcacacaggattttacacatccgcctgatcaatcaccactgagacccgatgctgctaacagggatttcctctcccaacaaggcaaaatcgagcacttaaaggatgacatggaagcctaccgaacacagaattgcttcctgaactcagagatccaccaggtgaccaagatttggcggaaggtggccgagaaggagaaagccttattgaccaagtgcgcgtacctacaagctaggaactgccaggtggaatccaagtaccttgctggcctcaggcgcctacaagaggcactgggagacgaggcatctgagtgttccgaactgctccggcagctcgtacaagaagctctgcagtgggaggcgggtgaagcgagttctgacagcattgagttgtcgccaatcagcaagtatgatgagtacggttttctgacagttcccgattatgaggtcgaagatcttaagctgctggccaagattcaggcgttggagtctagaagtcaccacctcctggggttggaagcggttgatcgtcctctgagggagaggtgggcggctctcggcgacctggtcccttcagcagaattaaaacagcttctgagggctggagtgccacgtgaacataggcctcgtgtgtggcgatggttggtgcacctcagagtgcagcaccttcacacgccaggctgttatcaagagctactatcaaggggccaggcacgcgaacatcccgcagccagacaaattgagcttgacttaaataggacatttcccaataataagcacttcacttgcccgacaagtagcttccctgacaagctacgtcgcgttttattggccttttcctggcagaatccaacaatcgggtactgccaagggctgaacaggctggctgcaattgctttactcgtgctggaggaggaagagtcggcattttggtgcctggtggccattgtggagaccatcatgccggctgactattattgcaacactctcacggcatcccaggttgaccagcgagttttacaggacttactgtctgagaagttgcccagacttatggctcatttaggccagcaccatgtggacttgtcactggtgacatttaactggttcttagtcgtattcgctgactctcttatcagcaacatcctgctgcgtgtgtgggatgccttcttgtacgaaggaaccaaggtggtattcaggtacgccctcgcgatttttaaatataatgagaaggagatcctgcgcctacagaacggactcgagatttaccaatatctaagattcttcaccaagactatctcaaattcgcggaaactgatgaatatcgcattcaacgatatgaacccttttcgcatgaagcagctgcgccaactgcgtatggtacatcgcgaacggctggaagccgaactgagagagttggaacagcttaaagcagagtacctagaacgtcgggcatcccggaggcgagctgtttccgagggatgtgcctcggaagacgaagtcgaaggcgaagcgtag

SEQ ID NO: 243528 - DNA, 1407 bp, synthetic construct
  misc_feature 1..1407: note = Description of Artificial Sequence: Synthetic coding sequence
  source 1..1407: mol_type = other DNA
atggaggcttacagaacgcaaaattgttttctgaacagcgagatacaccaggtcaccaaaatttggcggaaggttgccgagaaggaaaaggctctgctgacgaaatgcgcctacctccaagccaggaattgccaggtggaatcgaagtatctcgccggtctgagaaggcttcaggaagcactgggggatgaggcatcagagtgtagtgagctgctgagacagctagtgcaggaagccttacagtgggaggcaggcgaggcaagcagcgactctatcgagttgtcgcctatctctaagtacgatgaatacggttttcttacggtaccggactacgaagtcgaagacctaaagctattggccaaaatacaggcactggagtcgcgcagtcaccacttgcttggactcgaggccgtggacagaccgctccgtgagagatgggccgcactgggggacctcgtgccttccgcagaactgaagcagcttctgcgagccggagtgcccagggagcataggcctcgagtctggcgatggctagtgcacctgagagtgcaacacttgcatacgccagggtgctatcaggagctgttgtcccgcggacaggctcgagagcatccagcggctagacagattgaactggacctgaaccgaactttcccaaataataagcactttacatgccccaccagctcttttccagataagctgagacgggtgcttctggcattttcttggcaaaaccccaccatcgggtactgtcagggactcaatagactcgcagccatcgcactgctggtcctggaagaagaggaaagcgcattctggtgcttggtggccatcgtggaaacaataatgcccgctgattactattgcaacactctgacggcgtctcaggtcgaccagagggtcctgcaagacctgctgtcggaaaaattgcctaggcttatggcccatctcgggcaacaccacgtggacctgtcactggtaacttttaattggttcttggtcgtgttcgctgactccctgatctcaaacatcctactgagggtctgggatgcattcctctacgagggcacgaaggttgtcttcagatatgccttggccattttcaaatataatgaaaaagaaattctgcgactgcagaacggattagagatttatcagtacctcagattttttactaaaaccatttctaattcacggaaactgatgaacatagcctttaatgacatgaacccctttagaatgaagcagctgaggcagctgcggatggtgcaccgggaacgcctggaggccgaactccgcgagctggaacagctcaaagcagaatacctcgaaaggagagctagccgacgtagagccgtttccgaggggtgcgcatccgaagatgaggtggaaggggaagcatag

SEQ ID NO: 243529 - DNA, 2583 bp, synthetic construct
  misc_feature 1..2583: note = Description of Artificial Sequence: Synthetic coding sequence
  source 1..2583: mol_type = other DNA
atggaaggagctggagaaaacgccccagaaagctcttcttcagctcccggatctgaagagagcgccagagatcctcaggtccctccacccgaggaggagtccggagattgcgcaagatcacttgaagccgtcccaaagaaactttgcgggtacctttctaagttcgggggaaaaggccctattagaggctggaagtcgcgctggttcttttatgacgaaagaaaatgtcagctatattactcaagaactgcccaggacgcgaacccactggattccattgaccttagcagcgccgtgtttgattgtaaagcagatgcagaggaaggaatttttgagatcaagactcctagccgcgtgattaccctgaaggccgcaacgaaacaggctatgctttactggctgcagcagcttcaaatgaagcgatgggaattccataactcccctcctgctcccccagctactccagatgccgcactcgccggtaatggacccgtcctgcatctagagctgggacaggaggaagccgagctggaagaatttctttgccccgtgaagacgccaccaggcctcgtcggggtcgccgcagctctgcagcctttcccggcactccagaatatatcccttaaacatctgggaaccgagatccaaaatactatgcacaacatcaggggtaacaagcaggcacaaggaactggccacgagccgcctggagaggacagcccacagagcggggagccgcagcgagaagagcagcccctggcctctgacgcaagtaccccgggacgcgagcccgaggactctccaaagcctgccccaaaaccatctctgactatttcttttgcccagaaagctaagagacagaataacacatttccattcttcagcgagggtattacccggaacaggacagcacaggagaaggttgccgctctggagcagcaggtgcttatgctgactaaggaactgaaatctcagaaagaactggtgaaaatacttcacaaggcccttgaggccgcacagcaagaaaaacgggcaagcagtgcatacctggcagctgcggaggataaggatagactggagctggttcggcataaggtgagacagatagctgaattaggacggagagtcgaggcacttgagcaagagcgggagagccttgcccacaccgcaagtctgcgcgagcagcaggtgcaggaactgcagcagcatgttcagttgttaatggacaaaaatcacgccaaacagcaggtcatctgcaaactgagcgagaaagttacacaggactttacccacccgcctgaccagagccccctgcgccctgacgccgctaaccgggacttcctgtctcagcagggtaagatcgagcaccttaaggacgacatggaggcctatcgtacacaaaactgttttttgaacagcgagatccaccaggtgacaaagatctggagaaaagtcgccgagaaagagaaggcgcttttgactaagtgcgcttatctgcaggctcggaactgtcaggtggagagcaagtatcttgctggtttgcgtcgacttcaagaggcactgggcgacgaagcttccgaatgctctgagttgctgcgtcagttagtacaagaagccctgcagtgggaagcgggagaggcctccagcgattccattgagctgtctcccatctcgaagtacgacgagtacggatttctgacagtccctgactatgaggtggaggatctgaaactgctggcgaagatccaggccctggagtcccggtcccaccatctgcttggattggaggctgtggaccgtccgcttcgagaaagatgggcagccctcggagatctggtgccatccgctgaactgaagcagctgctgagggctggcgttcctagggaacaccggcctcgcgtgtggaggtggctggttcacctgagggttcagcatctgcacacaccgggttgttaccaggagctgctctcccgcggtcaggcccgagagcatcctgctgccaggcagatcgaactggacctgaatagaaccttccccaataacaagcactttacctgtccaacttcaagctttccagataagctgcgcagggttctactcgccttcagctggcagaatccaaccattggctactgtcaggggctgaatcgtctggccgctatagccctgctggttctggaggaggaagagtctgctttttggtgccttgttgcgatcgttgaaacgattatgcccgcagattactattgcaatacccttacagccagccaggttgatcagagggtactgcaagatttactttctgagaaattaccccgactcatggctcacctcggccagcaccatgtcgatctgtctctcgttactttcaattggttcctcgtggtgtttgcagattccttgatctccaatatactgctgcgagtctgggatgcgtttctgtatgaggggactaaggtcgtgtttcggtatgccctcgcaatcttcaagtataatgaaaaagaaatcctaaggctccagaacgggttggagatctatcagtatttgcgtttttttacaaagacgatcagtaattctagatag

SEQ ID NO: 243530 - DNA, 2754 bp, synthetic construct
  misc_feature 1..2754: note = Description of Artificial Sequence: Synthetic coding sequence
  source 1..2754: mol_type = other DNA
atggaaggagctggcgaaaacgccccagagtccagctctagcgccccaggctcagaggagtctgcccgtgacccccaggtccctccacctgaggaagaatctggagactgcgcaagaagtcttgaagccgtgcccaaaaaattatgtgggtacctgtccaagtttgggggtaagggacccattcgcggatggaagtcacggtggtttttctatgacgaacgcaagtgccagttgtattactccagaaccgcacaagatgctaaccccttggattcaatcgacttgtctagtgcagtttttgattgcaaagctgacgccgaagaagggattttcgagattaaaacccctagtcgtgtgatcacactaaaggcagccacaaagcaggcaatgctgtattggcttcaacagctccaaatgaagcggtgggagtttcataactctccacccgcacctccagccactcccgatgctgctctggcagggaatggtccagttctccatcttgagctgggccaggaggaggccgagctggaggagtttctgtgcccagtgaaaacccccccagggctggtgggcgtggctgcggctctgcaacccttccccgcacttcagaatattagcctgaagcatctgggaaccgagattcagaataccatgcataacatccggggaaacaaacaggcacagggcactggacacgagccccctggagaagactctcctcagtccggagaaccacagcgggaagaacagccgcttgcgtccgatgcctcaacccctggcagggaacctgaagactcgccaaagccagcacccaagccaagcttaactatctcgtttgctcagaaagccaaaagacaaaacaataccttcccgttcttcagcgaggggattacacgcaaccggacagctcaggaaaaggtagccgctttggagcaacaggtgctgatgttgaccaaggagctcaagtctcagaaggaactggtgaagatcctgcacaaggccttagaggccgctcagcaggagaaacgggcatctagcgcctacctggccgctgctgaggacaaagataggctggagttggttaggcacaaagtgagacagatcgctgagctcggtcggcgagtagaagccctggagcaagagagagagagcctggctcacaccgcctccttaagggagcaacaggtacaggagctgcagcagcacgtccagcttctaatggacaaaaaccacgctaaacaacaggtgatctgcaagttgtcggagaaagtcactcaggacttcacccaccctccagaccagtccccactcagacctgacgctgctaaccgcgactttctatcccagcagggaaagatcgagcatcttaaggatgacatggaggcgtatcgcacccaaaactgctttctcaattctgagattcatcaagtcacaaaaatctggcggaaggtggccgaaaaggagaaagcgctcctaacgaagtgtgcttacctgcaggcccgtaactgtcaggtggagtctaagtacctagctggcttgcggaggctgcaggaggctctaggggacgaggcaagtgaatgctctgagctactgagacagctcgtgcaggaggcgctgcagtgggaagctggggaagcgtcatcagattcaatcgagttgagccctatcagcaaatatgatgaatatggatttttgactgtgcccgactacgaagtggaagacctcaaacttttggctaaaatacaggcactggagagccgctcccatcatctactggggctggaagccgtcgatcggcctctgagggagcgttgggctgccttaggggatcttgtgccatctgccgagctgaaacagcttctgagagccggtgttcccagggaacatcgacccagagtctggcgctggctggttcacctcagagtgcagcaccttcacacccccggatgttatcaggaattactgtccagggggcaggctcgtgaacatccagcagccaggcagatcgagctcgacctcaatcgaacatttcccaataacaagcattttacctgtccgacaagttccttccctgataaacttcggagagtgcttctagctttcagctggcaaaaccccactattggatactgtcagggcctaaaccggctcgccgctattgcactactcgtccttgaggaggaggagtccgccttttggtgtctggtggccattgtggaaacaatcatgccggcagactattattgtaacacgttgactgcatcacaggttgaccagcgggtcctgcaggacctccttagcgaaaaacttccacgcctcatggcccacctggggcagcatcacgtagacctgagtcttgttacattcaattggtttcttgttgtattcgcagattcgctcatttctaacatactcttaagggtttgggacgccttcctgtacgaaggcactaagtataacgaaaaggagattctccgcttgcagaacgggcttgagatttaccagtacctgagattcttcactaagactatcagcaacagtcggaagctgatgaacatcgcatttaacgacatgaacccttttcgtatgaaacagctacgacagctcagaatggttcacagggaacggctcgaggcagagttaagagagcttgaacaactgaaagcagagtacctggagcggagggcaagccgcaggagagcagtctcggagggatgtgctagcgaagatgaggtcgaaggcgaggcatag

SEQ ID NO: 243531 - DNA, 1287 bp, synthetic construct
  misc_feature 1..1287: note = Description of Artificial Sequence: Synthetic coding sequence
  source 1..1287: mol_type = other DNA
atgccttcaggatgctacgtccctcggagcgagccaaggctcctgccagctcccccacccgctggtgcaagagtgggcgcactcagaagcgctcaaggcgatggccctacctccggccattgggatggcggagcagagaaggccgattttaatgcaaagcgcaagaaaaaagtggcggaaattcatcaggccttaaatagcgaccctaccgatgtcgcggcactgcgcaggatggccatttctgaaggcggattactgaccgatgaaattaggaggaaggtatggccaaagctcctcaatgtcaatgctaacgatcccccacctatttctggcaaaaacctacggcagatgtccaaggattaccagcaggtcctcctcgatgtccggaggtctctacgcaggtttcctcccggaatgcccgaagagcagcgcgaaggcctgcaggaggaacttattgacattatactcctgattctcgaaagaaacccccagctgcattattaccagggatatcacgatatcgtggttaccttcctgctggtcgtaggggagaggctggccaccagcctggtggaaaagctttccacccaccaccttcgggatttcatggatccaacaatggacaacacaaaacacattctcaactatttgatgcccattatcgaccaggtgaaccctgaacttcacgatttcatgcagtccgctgaagtgggcacaatctttgccctgtcttggctcataacgtggttcggacacgtgctaagcgattttcgccatgttgtgcggttgtacgatttttttctggcatgccaccccttaatgcctatctatttcgctgcagtcattgtactctatagggaacaggaggtgctggattgtgactgcgacatggcatcagttcaccatctacttagccagattcctcaggaccttccatacgagacactgataagcagagccggagaccttttcgtgcagttccctcccagtgagctggcccgagaggccgctgcacaacaacaggcagagcggacggcagcgtccacctttaaagacttcgaactggcctcggcccagcagcggcctgacatggtcctgaggcaaagatttagagggttattgcgtcctgaggacaggaccaaggatgtgctgaccaagcccaggaccaatagattcgttaaacttgcagttatgggcctgacagtcgccctgggtgctgccgcactcgccgtagtgaaatccgctctcgaatgggcaccgaagttccagctccagctatttccttag

SEQ ID NO: 243532 - DNA, 1212 bp, synthetic construct
  misc_feature 1..1212: note = Description of Artificial Sequence: Synthetic coding sequence
  source 1..1212: mol_type = other DNA
atggctctgagatcagcgcagggagacgggccaacttctggccactgggacggaggagctgaaaaggcggactttaacgccaagaggaagaaaaaagtcgccgagattcaccaagctctgaactctgacccaactgacgtcgcagctctacggagaatggcgatcagcgagggaggactgctgaccgatgagatccggagaaaagtgtggcccaaactactgaacgttaatgcgaacgatccccctcctattagcgggaagaatctgcggcagatgtccaaagactaccagcaagtattgttagacgttagaaggagcctgaggcggtttcctcccggaatgcctgaggagcagcgtgaaggcctacaggaggaactgatcgatattattctgcttatcctcgaacgcaacccccagttgcactactaccagggttaccacgacatagtcgtgactttcttgctggtagtcggagagagattggccaccagcctcgttgagaaacttagcactcaccaccttcgagatttcatggatcccaccatggacaacacaaagcatatcctcaactacttgatgcctatcatagatcaagtcaacccagagctccacgattttatgcagtccgccgaggtggggactattttcgccctgtcctggcttattacatggttcgggcacgtcctgagcgacttccggcatgtcgttaggctttatgacttttttctggcctgccaccccctcatgcctatctattttgctgccgtcattgttctctatcgagagcaggaagtgctggattgcgattgtgacatggctagtgtacaccacctgctgagccagattcctcaggatttgccgtacgagactttgatctctagagcaggtgatctcttcgtccagttccctccttcagagctggcaagggaagccgctgcacagcagcaggccgagaggacagctgctagcacctttaaggatttcgaactggcctccgcacagcagagaccagatatggttctacgccaaagattccgagggctgctcaggcccgaagatcggaccaaagacgtactgactaagcctagaaccaacaggttcgttaagctcgctgtgatgggacttactgtggccctcggtgctgcggctctggctgtggtcaaatcagcgctggagtgggctcctaaattccaattacagctgttcccctag

SEQ ID NO: 243533 - DNA, 1212 bp, synthetic construct
  misc_feature 1..1212: note = Description of Artificial Sequence: Synthetic coding sequence
  source 1..1212: mol_type = other DNA
atggctctacgctcagctcagggtgatggccctacttccggtcactgggatggcggagctgaaaaagccgatttcaacgcgaagcggaaaaagaaggtggcagaaatacaccaggctctgaactcagaccccacagatgtggctgccctcaggcgcatggcaatatctgaaggcggactcttaaccgatgaaattcggaggaaggtgtggccgaagctactcaacgtcaacgccaacgatcccccacccatcagtggaaagaatctgaggcaaatgagtaaagactaccaacaggtgcttctggacgtccgtcggagcctcaggcgctttcccccaggcatgcccgaggagcagcgggaaggcttacaagaggaacttatcgacattatacttcttatcttggagcgcaacccgcagctgcactactatcagggataccacgacatcgtggtaactttcctgctggtggtcggggagaggctggccacatctctggtggagaagctgtctacccaccacttgcgggatttcatggaccccactatggacaacactaagcacatcctcaattacctgatgcctatcatcgaccaggtgaatcccgagctgcacgattttatgcagagtgccgaggtcggaacgatattcgcgttgtcctggctgattacgtggttcggtcacgtgctgtctgatttccgacatgtggttagattatacgacttctttctcgcctgccaccccctcatgcctatatatttcgcagcagttattgtactctaccgggaacaggaagtgttggattgcgattgcgatatggcctccgtgcaccacctgcttagtcagatcccgcaggacctgccttatgaaactctaattagccgcgctggagacctttttgtccagttcccccctagcgaacttgcacgcgaagctgctgcacagcagcaggcagagcggaccgccgcatctaccttcaaggactttgagctggcttccgctcaacaacggcctgacatggtgctgcgccagcgctttcgcggtctgctgaggccggaagatcggacgaaagatgttctgaccaaacccagaacaaatcgattcgtcaagctcgcagtaatgggtctaactgtcgccctgggggcagctgccctagcggtcgtgaagtccgcactggaatgggcccctaagttccaactgcagctgttcccctag

SEQ ID NO: 243534 - DNA, 1662 bp, synthetic construct
  misc_feature 1..1662: note = Description of Artificial Sequence: Synthetic coding sequence
  source 1..1662: mol_type = other DNA
atggattctcccggttacaattgcttcgtggacaaggataagatggacgccgctatccaggacctaggaccgaaggagctgtcttgtaccgaactgcaggagctaaagcagctggctagacagggctactgggcacaatctcacgccttacgcggaaaagtctaccagcggctcattagagatattccttgtcgcacagtgactccggatgccagcgtgtactctgatatcgtcggtaaaatcgttggcaaacattcttcatcatgcctgcctttgccggagttcgtggataatacccaggtgccctcttactgtttaaacgcccgaggggaaggagcagtgcggaaaatccttctctgcctcgccaaccagtttcccgacatttcgttctgtcccgcactgcctgccgtggtggctctgctgcttcattactccattgacgaagccgaatgttttgagaaggcctgccgtatactggcctgtaatgaccccggacggaggctgatagaccagagcttcttggctttcgaatcctcctgtatgacctttggtgatctcgtgaacaagtactgccaggccgcacacaaactgatggtggcagtgtccgaagatgtgctccaggtctatgcagactggcagcgctggctgtttggagaattgccactgtgctacttcgcgcgagtgtttgatgtttttttagtggagggatataaggtgttgtatcgggtcgctctggccatcctgaagttcttccataaagtgagagctggccagcctttagagtcggacagtgtgaagcaggatattagaacctttgtgagggatatcgccaaaactgtctcaccggaaaagctgctagaaaaggctttcgccattcgccttttcagcagaaaggagatccagttgctccagatggcgaacgagaaagctcttaaacagaagggcatcaccgttaagcagaagcggcagtttgttcatcttgcggtgcacgccgaaaatttcagatcagagattgtgagcgtacgtgaaatgagagatatttggtcttgggtcccagaacgattcgcactgtgtcagcccttactgctgttttccagcttacaacacggatattccctggccagattctactttcagtgtgagggacatgagcctactttgctccttatcaagaccacacaaaaagaagtctgcggagcttatctgagtacagactggagcgagcgcaataaatttgggggtaagctggggttctttggaaccggtgagtgttttgtgtttcggcttcagcctgaggtacagagatacgagtgggttgtgatcaagcaccccgagcttaccaagccgcctcccctgatggccgctgagccgaccgcacctttgtctcacagtgcctctagcgacccagccgatcggctgtcgccttttttagcagccaggcatttcaaccttcctagcaaaactgagtcaatgtttatggcgggaggatccgattgcctcatcgtgggcggaggcggaggacaagccttatacatcgatggagatctgaaccgaggccgtacttcccattgcgacacattcaacaatcaaccgttgtgttctgagaatttcctgattgccgctgtggaagcttggggttttcaagatccagatacgcagtag

SEQ ID NO: 243535 - DNA, 1680 bp, synthetic construct
  misc_feature 1..1680: note = Description of Artificial Sequence: Synthetic coding sequence
  source 1..1680: mol_type = other DNA
atggatagtccgggatacaactgcttcgtcgataaagataagatggacgccgctatccaggaccttgggcctaaggagctctcatgtactgaattacaggagctcaagcaattggctcgccaaggatattgggcacaatcacacgcccttcggggaaaggtgtatcagagactgatccgagacatcccttgtagaacagtaactcccgacgcttccgtctacagcgatatagtcgggaagattgttggcaagcactcatcttcctgtttacccctaccagagttcgtggataacacacaggtgccttcttattgtctcaatgcaagaggggaaggtgctgtgaggaagatattgctttgtttggccaatcagtttcctgatataagtttttgtccagctctgcccgctgtggtggctctcctcctgcactatagcatcgatgaggccgaatgtttcgagaaagcatgccggattttggcctgtaacgaccccggaagacgactgatcgaccagagcttccttgcttttgagtcatcctgcatgacctttggcgacctggtgaacaaatactgccaggcagcacataagctgatggtcgctgtaagcgaggatgttttgcaggtgtatgcagactggcagagatggttgtttggtgaactccctttatgctattttgccagggtgtttgacgtgtttcttgtcgagggctacaaagtcctgtatagagtggcgctcgcaattttgaaattcttccacaaagtgagggctggacagcccttggagtctgacagcgtcaagcaagatatccgtacttttgtccgggacatcgctaaaaccgtctccccggaaaaactgctggagaaggcattcgcaatcaggctgttctccagaaaggaaattcagctgttacagatggccaacgagaaggcgctgaaacagaaaggcatcacagtgaaacagaaatcagtgtcgttatcgaaacgccagttcgtgcatctggcggtccatgcggaaaactttcgttccgagattgtaagcgtccgggagatgagggacatctggtcctgggtcccagagcgctttgcgctatgccagccattgttgctcttcagctccctgcagcacgggtactccctggcccgattttatttccagtgtgaggggcatgagccaacccttctcctgatcaagactactcagaaggaggtgtgtggagcatacctctcaaccgactggtccgagcggaataagttcggaggcaagctggggttcttcggcaccggcgaatgcttcgtcttccgattacagccagaggtccaacgctacgaatgggtcgtcattaagcaccccgaactcactaagccccctcctctgatggcagcggaacccactgctcctctctctcacagtgcgtcgagcgaccccgctgataggctgagcccgttcctcgcggctagacacttcaacttaccatccaagactgaatcaatgttcatggctggaggaagtgactgccttattgtcggtggaggcggtggccaggccctctacattgacggggatctgaaccggggtaggacaagccactgcgatacatttaacaaccagcccctttgctctgaaaactttctcattgccgcagtggaggcatggggattccaggatcctgacacacagtag

SEQ ID NO: 243536 - DNA, 2067 bp, synthetic construct
  misc_feature 1..2067: note = Description of Artificial Sequence: Synthetic coding sequence
  source 1..2067: mol_type = other DNA
atggctacggcctctggcgcatcagatttgagcgggagcggcgctcctcctcctggcgtgggtgctcaggcagccgcagctgctgaggaggaggagcgagaggtcgtcagagttcgcgttaagaagtgcgaatcttttcttcctcctgagttcaggtctttcgcagtcgacccacagataacctcccttgacgtcctgcagcacattctcatcagggcattcgacctgtccggcaaaaagaattttgggatctcatatcttggacgggacagactgggccaggaggtgtatctgtctctcctaagcgattgggatctgtccacagcatttgccaccgccagtaagccatacttacagttaagggtggacatccgcccatctgaagactctcccctactggaggactgggatatcatcagccccaaggatgttattggaagtgatgtgcttctggcagagaaacggtcctctctcaccaccgccgcattgccgttcactcaatcaatcttaacccaggtaggcaggacgctaagcaaggtgcagcaggtgctgtcatggtcctacggggaagacgttaagccattcaagccccctctctctgacgcggaatttcacacttatttgaatcacgaaggtcagcttagcagacctgaagagctcaggttgcggatctaccacgggggagtcgaacccagcttgcggaaagtggtgtggaggtatcttctgaatgtttatccggatgggctgaccggaagggagaggatggattacatgaagagaaagtcccgcgagtacgaacagttaaagagtgaatgggcacagcgcgctaacccggaagatctggaatttatcagatcaaccgtgctaaaagatgtcctccggaccgacagagcccacccgtattatgctgggcctgaagacgggccacacctacgcgctctgcacgacctcctgactacatacgccgtgacccatccgcaagtcagctactgtcaagggatgtcagacctcgccagccctattttggcagtcatggaccatgaagggcatgcattcgtatgcttttgcggcattatgaagaggctggcagccaacttccacccagacggcagggccatggccacaaagttcgcccacctaaaacttctattgagacacgcagatcctgatttctaccagtatttgcaggaagctggagccgacgacctgttcttttgttacagatggctccttctggaactgaaaagagagttcgccttcgatgatgcattgcggatgttggaagttacatggtcttccctcccgcctgatcccccagagcatgaggtggagcttgttgggccaccctcacaggtggccgatgccggatttggcggtcatcgaggatggccagtacgccagcgccatatgctgcggcctgccggaggcggaggatccacatttgaagacgctgttgaccatctcgcaactgctagtcagggaccagggggtggaggaagattattgagacaggcctccttggatgggctgcagcagctgcgcgataatatggggtccaggcgggacccgttagtccaacttccccaccccgcagcactgataagctcgaagtcgctgtcagaaccactgcttaattccccagatcctctcctcagtagcttcagccaccccgatagtccttcttcatcgagcccgccaagcacccaagaagcttcaccaaccggggatatggcagtgggttcccctctcatgcaagaggttggcagccctaaagatccaggaaagtccttacccccagtgccaccgatgggcctcccaccaccgcaggagttcggcaggggcaatccgtttatgctgttcctctgtctcgccatcctgctggagcaccgtgatcatatcatgcggaatggactcgactataacgaactggcgatgcatttcgatcgacttgttagaaaacatcatctgggcagagtgctgcgtcgagccagagctctgtttgcagattacttacagtctgaagtgtgggattctgaggaaggagccgaagcaactgctgcctcatag

SEQ ID NO: 243537 - DNA, 693 bp, synthetic construct
  misc_feature 1..693: note = Description of Artificial Sequence: Synthetic coding sequence
  source 1..693: mol_type = other DNA
atggccacagcctctggagcctccgatttgagtggctcaggcgctccccctcccggagtgggcgctcaggcagcagctgctgctgaagaggaagagagagaggtggtgagagttagagtgaaacatggggacggcgcacctggtggcctcccccacgtcttttctccccaaaagtgcgaatcctttttacccccagaattcagatcttttgcagtcgacccccagatcacaagcttggacgtgttgcagcacatcttgatcagagcatttgatctgtccggcaaaaaaaactttggtatctcttacctgggcagggatcgcctgggccaggaggtctatctaagcctactaagcgattgggacttgtctactgctttcgccaccgccagcaaaccttacctgcaactcagagtggacatccggccttctgaagatagccccctcctcgaagattgggatatcattagtccgaaggacgtgatcggctccgatgtgttactggcagagaaacgctcgtcccttaccaccgctgccttgccattcacccagagcattctgacccaagtcggacgcaccctgtcaaaggttcagcaagttctcagttggtcctatggcgaggatgtaaagccctttaaacctcctttgtccgacgcggaatttcatacgtacctcaaccacgagggtcagctctag

SEQ ID NO: 243538 - DNA, 303 bp, synthetic construct
  misc_feature 1..303: note = Description of Artificial Sequence: Synthetic coding sequence
  source 1..303: mol_type = other DNA
atggcgactgcttccggggctagcgatctctctggttccggagctccccctcctggagtcggtgctcaggccgctgccgctgccgaggaagaggagcgcgaggttgtccgcgtgagggtgaaaaaatgcgagtcctttctcccacctgagttccgttcatttgcagtcgacccgcagattacctccctagatgtgctacagcacatcctcatccgtgcgttcgacctctctgggccaatcgcacgcaggttgggccacaatcagccccagcgctgccactggctgcggagggtagcagggtag

SEQ ID NO: 243539 - DNA, 1305 bp, synthetic construct
  misc_feature 1..1305: note = Description of Artificial Sequence: Synthetic coding sequence
  source 1..1305: mol_type = other DNA
atggactatatgaaacgcaaatcacgcgaatatgagcagctaaaatcggagtgggcacagcgcgctaatcccgaagacctggaatttatccgcagtactgtgctgaaagacgttttgcggactgaccgcgctcatccatattacgccggacctgaagatgggcctcatctgagagcactgcacgatctgctaactacctatgccgtgactcacccacaggtgtcctattgtcagggtatgagcgatttggcatctccaatcctagcggtcatggaccacgagggccatgcattcgtctgcttttgtggaatcatgaaaaggctggctgcaaattttcatcctgatgggagggcaatggcgaccaagttcgcccatctgaagctactgttgcgccatgcagatcctgacttttatcagtaccttcaggaagcaggcgctgatgacctgtttttctgctataggtggctgttgctcgaactgaagcgcgaattcgctttcgacgatgccctcagaatgctggaagtgacctggtccagcttgccacccgacccacccgaacacgaggttgagctcgtgggccctccgagtcaagttgccgacgccggtttcggtggtcacaggggctggccagtgcgacagagacatatgttacgccctgcaggcggtggcggaagtaccttcgaggacgcagtagaccacctggctactgcaagccaggggcctgggggaggcggacgcttgttaaggcaagcatccctggacggcttgcagcagctgagagacaacatgggctctcgaagggatcccctagtacaattgccacatcccgctgcattaatcagctctaagtctctgtctgaacctctcctgaactcacccgacccccttctatcctctttttcccacccagattccccgtccagcagctctccccctagcacacaggaggcaagcccaaccggtgacatggccgtgggaagcccgctgatgcaagaagtggggagtcctaaggatcctggcaaaagtctgcctcccgtccccccaatgggcctgccaccccctcaggagttcggtcggggaaatccatttatgctgttcctgtgtttggcaattcttttagagcatagagaccacattatgagaaacggcttggactataacgaactggccatgcattttgacaggctggtacgaaagcaccacctgggacgggtcttgcggcgagccagggccctattcgcagattatttgcagagtgaggtctgggattccgaagagggcgcagaagccactgccgcatcctag

SEQ ID NO: 243540 - DNA, 876 bp, synthetic construct
  misc_feature 1..876: note = Description of Artificial Sequence: Synthetic coding sequence
  source 1..876: mol_type = other DNA
atggatgtcgtggaggtggcgggaagctggtgggcccaggaaagggaggatatcataatgaagtatgagaagggtcatcgcgctggactgcctgaggacaaagggcctaagccattccggagctataataataacgtggaccacttgggcatcgtgcacgaaaccgaactgccacctctgaccgcacgtgaggcgaaacagatcagacgggagatctcccgcaaatctaagtgggtcgacatgctgggggactgggagaagtataaaagctcccgcaagctgatcgaccgcgcatataaaggaatgcctatgaatataaggggacccatgtggtccgttctcctgaacattgaggaaatgaaactgaaaaatccaggcaggtaccagatcatgaaggaaaaaggcaagcgctcaagcgaacatatccagcgtatagaccgggacgtgagtggcaccctcaggaaacacatatttttcagggatcgctatgggacaaaacaacgagaactgctgcacatcctgttagcttacgaggagtataacccggaagtgggatattgtagggatctatcacacatcgccgcattgttcctgctgtatttacccgaagaggatgctttctgggctttagtccaattattggcaagcgaacgccacagcttgcagggtttccattcccccaacggcggtaccgtgcaggggttgcaggaccagcaggagcatgtagtcgctacttcccagccaaagactatggggcatcaatccgcgtcccggaggcgaccaggggtggccagaggccatgttttcgctactggttctctgatccccggtcccggaatgcggaccctctgttcaagcatcctcggcccactatag

SEQ ID NO: 243541 - DNA, 1650 bp, synthetic construct
  misc_feature 1..1650: note = Description of Artificial Sequence: Synthetic coding sequence
  source 1..1650: mol_type = other DNA
atggatgtggttgaggtcgcgggtagttggtgggcccaggagcgggaggacatcatcatgaagtacgagaagggccaccgagcagggttgcctgaagataaaggcccaaaaccttttcgctcttataacaacaatgtcgaccatctcggtatagtgcatgagacagagctgcctccattgactgccagggaagccaaacagatccgacgtgaaatctccagaaagagcaaatgggttgacatgctcggcgactgggaaaaatataagtctagccggaaactgattgaccgggcttacaagggtatgcctatgaatattaggggccctatgtggagcgtgctcctgaacattgaagagatgaagctgaagaacccaggccgttatcagattatgaaggagaaagggaaaaggagctcggagcacatccagcgcatcgacagagatgtgtctggaacgctgaggaagcacatcttctttcgagacagatacggtacgaagcagagggagcttctccatattctcctagcatacgaggagtataatccggaggtggggtactgtcgcgacctgtcgcatatcgcagccctattcttgctatacctcccggaagaggatgccttctgggccctagtgcagctgttagccagtgagcggcactcattgcagggatttcatagtcctaacgggggaaccgttcaggggttacaggatcagcaggagcacgtggtcgccacctcgcaacctaagactatgggccatcaggataagaaggacttatgtggccagtgtagccccttgggctgtttgattaggattctcatcgatggcatctccctgggactgactctgcgcctgtgggacgtgtacctggtggaaggggagcaggcgcttatgccgattacacgaattgcttttaaggtgcagcagaagaggctcacaaagacttctaggtgtgggccttgggcgagattctgcaatcggtttgtggatacttgggctcgggatgaagacaccgtcctcaaacacctgcgcgcatcaatgaaaaagctgactcggaagcaaggggatctgccccctcctgcaaagccggaacaaggcagttccgcgagtaggccagtgcccgcttcccgcggaggtaagacgttatgtaaaggcgacaggcaggctcctccaggaccacctgcgagattcccccgtcctatttggtccgcctctccaccaagagcgcctaggtcttccactccgtgtccaggtggagccgttagagaggacacgtatccagtgggaacccagggtgtgccatctcctgctctggcccaagggggaccacaaggctcttggcgttttttacagtggaactcaatgccaaggcttcctaccgatctcgacgtggaagggccttggtttaggcactacgatttcagacagtcctgttgggtccgcgctatcagccaagaggaccagttggccccatgctggcaggccgaacaccctgcagaaagagttagatctgccttcgccgcacccagtacagacagcgaccagggcactcctttccgggctcgggacgagcagccttgtgctccaacctcggggccttgtctgtgcgggcttcaccttgaatccagccagtttcccccaggcttttag

SEQ ID NO: 243542 - DNA, 900 bp, synthetic construct
  misc_feature 1..900: note = Description of Artificial Sequence: Synthetic coding sequence
  source 1..900: mol_type = other DNA
atgggccatcaagacaagaaagatctttgcggccaatgttcgcccctcggctgcctcatccgtatactgatcgacgggatctccctgggcctcactctcagattgtgggatgtgtacttagtggagggggagcaggccctgatgccgatcacaaggattgcgtttaaggtgcagcagaagcggttgactaaaacttcacgctgtggtccgtgggcccgtttctgcaatagattcgtcgacacctgggccagagatgaagatacagttctgaaacatctgcgggcttccatgaaaaaattgaccagaaagcagggtgacctgcccccacctgcgaaacccgagcagggctcgagcgcctcacggcctgtgcccgcatctcgtggtggcaagaccctgtgcaagggtgaccggcaggcccctcccggacctccagctcgatttccgcgacccatctggtccgcatcaccccctcgggctccacgctcttccactccctgtcccggaggcgctgtccgagaagacacttaccccgtaggtacacagggtgtcccttcccctgctttagcccaggggggaccgcagggatcctggcggttccttcagtggaattcgatgcccaggctgccaacagacttggatgtagaaggcccatggttcaggcattatgattttcggcagtcttgttgggttagagcgatcagtcaggaggaccagctcgctccctgctggcaggcggagcaccccgctgagcgggtccggagcgccttcgccgctccatcaactgacagtgaccaggggacacccttcagggcacgcgacgaacagccctgtgcaccaaccagcgggccttgcttgtgcgggctccacctggagagttcacaatttccgcctgggttctag

SEQ ID NO: 243543 - DNA, 1584 bp, synthetic construct
  misc_feature 1..1584: note = Description of Artificial Sequence: Synthetic coding sequence
  source 1..1584: mol_type = other DNA
atggatgtagtcgaggtcgccggatcatggtgggctcaggagcgcgaagatatcattatgaagtacgagaagggtcaccgggcagggctgcctgaagacaaaggaccaaaaccttttaggagttataacaacaacgtggatcacctgggcattgttcatgagactgagctcccacctctgaccgcacgcgaagccaagcagattagacgagaaatttcaagaaagagcaaatgggtcgatatgctgggcgactgggaaaagtataagagtagtcgcaaactcatcgatagggcatacaaggggatgcccatgaatatccgtgggcctatgtggagcgtgctgttgaatatcgaggagatgaaattgaagaacccaggtaggtatcaaattatgaaggaaaagggcaagcgtagctctgagcacatccagcggatcgatcgtgacgtaagcgggacactgcgcaaacacattttcttccgtgatcggtacgggactaaacagcgcgaacttctgcacattctgctagcatatgaggagtataatcctgaagtggggtactgtcgagaccttagtcacatagccgcactctttctgctgtatctgcccgaggaggatgcgttctgggcactcgtgcaattgctagcctcagagaggcactctctccagggtttccacagccccaacgggggaacagtgcaggggctgcaggatcagcaggagcacgtagtggcaacatcccagccaaagacgatggggcatcaaatctctctcggcctcaccctccgcttatgggacgtttacctggtcgaaggtgagcaggccctgatgcccataacaaggattgcctttaaggtgcagcagaagcgcttaactaagacctcgcgatgcggaccctgggccagattttgcaaccgcttcgtcgatacttgggcccgtgacgaagacaccgtgttgaaacatctaagagcctctatgaagaaactaactcggaagcagggggatctgccacctccagccaaacccgagcaaggaagcagcgctagtaggcccgtcccggcatccaggggaggcaaaaccttgtgtaaaggggatcgccaggcccctcccggacctcctgcccgttttcccagaccaatctggagcgcatctccccctagagccccaagaagcagcacaccttgccccggaggcgctgttagagaagacacgtacccagttgggacccaaggggttccttctcctgccctggcccagggaggtccccaggggtcctggcgcttcctgcaatggaattcaatgcccaggctaccaaccgatctagacgtagagggcccttggttccgccattatgacttccgtcagtcttgttgggttagagctatatctcaggaagaccagctggccccttgctggcaagccgagcatcccgcagagagggtgcggagcgccttcgccgcaccaagtacagacagtgatcagggcacaccttttagagcccgagacgaacagccgtgtgcacctacttctggaccatgcctctgtggcttgcacctggaatccagccaatttccacctggcttctag

SEQ ID NO: 243544 - DNA, 1650 bp, synthetic construct
  misc_feature 1..1650: note = Description of Artificial Sequence: Synthetic coding sequence
  source 1..1650: mol_type = other DNA
atggacgtggtggaagtcgccggttcgtggtgggcacaggagagagaagatattataatgaaatacgagaaaggccatcgagctgggcttcctgaggacaagggaccaaagccatttagatcctacaacaataacgtcgatcatctagggatagtgcatgagactgaacttcccccactgactgcaagagaagctaagcaaatccgtagagagatcagccggaagtctaagtgggttgacatgctgggggactgggagaaatataagtctagccgcaagctgattgatagggcctacaaagggatgcctatgaacatcaggggcccaatgtggagcgttctcctgaatatagaggaaatgaaattaaaaaatcccggaagataccagattatgaaggaaaaaggcaagaggagtagtgagcacattcaaagaatcgatagagacgtatctggcaccctccgtaagcacatcttcttcagagacaggtacggaacaaagcagcgcgagcttctgcatattctgcttgcttatgaggaatacaaccctgaggtgggctactgtagggacctgtcccatatcgctgccctattcctactgtacctgcctgaagaggacgccttctgggccctggtgcaactcctggcgtccgagcgccattccctgcaggggttccactcacctaatggaggtaccgtccaagggctccaggatcagcaggaacacgtcgtggctacgagccagcctaaaacaatgggccaccaggataagaaagatctttgtggccagtgcagccccctcggatgcctcataaggatcctgattgatgggatctccctgggactgacactcagactttgggacgtttacctagtcgagggagagcaggcactgatgccaattaccagaattgccttcaaggtccagcagaagcgactgaccaaaaccagccggtgtgggccatgggcgagattttgcaataggttcgtggatacctgggctcgagacgaggatactgtactgaaacacctgagagcatccatgaaaaaactcaccagaaaacagggtgatcttcccccacccgctaagcccgagcagggctccagcgccagtcggcctgtgcctgcctcaagaggaggaaagactttgtgtaagggagacaggcaggcccctcctggcccacccgcaaggttccccaggccgatttggagcgccagccctcctagagctcccagatcttccaccccctgccccggaggagcagtgcgcgaagatacttatccggtgggaacacaaggcgtccctagtccagccctcgctcaggggggtccacagggctcttggagatttctgcaatggaactctatgccgcgtctgccaacagacttggatgtggaaggtccctggtttagacattacgacttccgccagtcctgttgggtccgggctatcagccaggaggatcagctggccccttgttggcaggccgagcatcctgccgaaagggttcgcagcgccttcgccgctccctcaaccgattccgaccagggaacaccctttagagctagagatgagcagccatgtgcccctacatcgggcccttgcctgtgcgggctgcatctggaatctagccagttcccacctggattctag

SEQ ID NO: 243545 - DNA, 1584 bp, synthetic construct
  misc_feature 1..1584: note = Description of Artificial Sequence: Synthetic coding sequence
  source 1..1584: mol_type = other DNA
atggacgtggtggaggtagccggttcatggtgggcccaggagcgcgaagacataatcatgaagtacgagaaaggccacagggctggactcccggaggataaagggccaaagccgttcaggtcttacaataataacgtagatcacctcggcatcgtgcacgagacagaattgcctcccctaacagcgagggaggccaagcagattcggagagagatttcgaggaaatctaagtgggtcgacatgctgggtgactgggaaaagtataagagttctagaaaattgatcgaccgcgcttacaaaggcatgcccatgaatatcaggggcccaatgtggagtgttctgctcaacattgaggagatgaagttgaagaacccaggtcggtatcagatcatgaaagagaaaggcaagagaagtagcgaacacattcagagaattgatcgtgacattagtggcactctgcggaaacatatgtttttcagggacaggtatggaaccaagcagcgtgaactactgcacatcctccttgcttacgaagagtacaatcctgaagtgggttattgtcgtgatctgtcacatatcgccgcactctttctgctgtactttccggaggaagatgccttttgggccctagttcaattgctggcttcggaacgacacagcctgcagggattccattcacctaacggcggaacagtacagggcctgcaggatcagcaggagcacgtcgtggctacttcacagagtaagacaatggggcaccagatcagcctgggcctgaccctccgactctgggacgtgtatttagtagaaggggagcaggctttgatgcctataacgagaattgcctttaaggttcagcaaaagcgcctcaccaagacgtcaaggtgcgggccatgggctagattctgtaataggttcgtggacacttgggccagggacgaggacactgtgctgaaacatctgcgagcaagcatgaagaaactgacaagaaagcagggggacctcccccctccagccaaaccagagcaggggagcagcgcctcccgtcccgtgcctgcttctcgcggtggcaagactctctgcaaaggtgatagacaggccccacctggcccacctgcccgtttcccgcgaccaatctggagtgcaagtcctccgagagccccacggtcatctacaccatgcccaggaggtgccgtgcgagaggacacataccccgtcggtacccagggcgtgccaagcccagccctggctcaaggtggaccccagggtagttggcggttcctccagtggaatagcatgcctaggttgccaactgatctcgacgtggagggaccctggttccgacattacgactttcggcagtcttgctgggtccgggctatcagccaagaagaccagttggctccctgctggcaggccgaacatcccgctgagcgtgtgagatcagctttcgcggctccaagtacagattccgatcagggcacaccatttagagcccgtgacgaacagcagtacgctccgaccagtggaccttgtctgtgtggtctgcatctcgaatccagtcagtttccccctggattttag

SEQ ID NO: 243546 - DNA, 1650 bp, synthetic construct
  misc_feature 1..1650: note = Description of Artificial Sequence: Synthetic coding sequence
  source 1..1650: mol_type = other DNA
atggacgtcgtggaggtagctggctcatggtgggcccaggagagggaggacatcatcatgaagtatgagaaaggccaccgtgctggccttccagaagacaagggtccgaagcctttccgtagttacaataataatgtagaccacctggggatcgtacatgagactgaactcccccctctcacagcgagggaggcgaagcaaattaggcgggaaatctcgcggaaatccaagtgggttgatatgctgggagactgggagaaatacaagagtagccggaagttgattgaccgggcttacaaagggatgccaatgaacatcaggggtcctatgtggtctgtgcttttgaacatcgaggagatgaagctcaagaatcctggcagatatcagattatgaaagagaagggcaaaaggagttcagagcacatccagcgcattgatcgggacatctccggaacgctcaggaagcacatgttctttcgggatcggtatgggaccaaacagagggagctgctgcatatcctactggcctacgaggagtacaatccagaagtcggctattgtcgggacctgtcccatatcgcggctctgttcctcctctatttcccagaggaagatgctttttgggctttggtacagctgcttgcgtccgaaagacactcactccaaggcttccatagtcccaacggcggaaccgtacagggcctgcaggatcagcaagagcacgtggtcgctacaagccaaagcaaaaccatgggacaccaggataaaaaggacctgtgtgggcaatgttctcccctgggctgcctgattaggattctgatcgacggaattagcttgggtctgacactccgcctgtgggatgtatacctagttgagggcgagcaggctctcatgccgatcacccgcattgctttcaaggtccaacagaagagactgactaaaacttctaggtgcggcccatgggccaggttttgcaatcggttcgtagatacctgggcacgcgacgaagacacagtactcaaacacctgagggcgagtatgaaaaaattgactcggaaacaaggcgacctccctccgccagcaaaacccgaacagggctccagtgcttctcgacctgtccccgcttcacgcggtggcaagacactatgcaagggtgatcggcaagcacctcccggacctcccgctagattccccagaccaatttggagcgcttctccgcctcgtgccccaagatcatcgacgccgtgccccggtggcgcagtcagggaggacacttatcccgtaggaactcagggcgttccttcccccgcactcgcccagggagggccacaggggagttggagattcctgcagtggaatagcatgccccgactcccgaccgacctggatgtggagggcccatggttccgccattacgattttaggcagagctgctgggtacgcgcaatctctcaggaagatcagctggcaccatgctggcaggctgaacatcctgcagagagggtgcgctcagcttttgcggcacccagcaccgattcagaccagggcactccattcagggccagggatgagcagcagtatgcgcctacctcaggaccttgtctgtgtgggctccatctagagtcttctcaatttcccccagggttttag

SEQ ID NO: 243547 - DNA, 1650 bp, synthetic construct
  misc_feature 1..1650: note = Description of Artificial Sequence: Synthetic coding sequence
  source 1..1650: mol_type = other DNA
atggatgtggtcgaggtggccggatcctggtgggcccaggaacgggaggatatcataatgaaatatgagaaaggccatagagcgggactgccggaagacaagggacctaaacccttcaggtcatataacaataacgtggatcatctgggcatcgtgcacgagacggagctccctcccctcacggcccgtgaagctaagcagatccgcagagaaataagtcgcaagtccaagtgggttgacatgctgggggactgggagaaatacaaatccagtcggaagctaattgaccgggcttacaagggaatgccgatgaatatcagaggcccaatgtggagtgtgctcctgaatatcgaggaaatgaaactgaagaatcctggcaggtatcagatcatgaaggaaaaaggtaaaagatcttctgaacacattcagcgcattgatagggatatttctggtaccctgcgtaagcatatgtttttccgggatcgttacgggacgaaacaacgtgagctcctgcatattctgttagcatacgaggaatacaaccctgaagtcggatactgcagagacctgagccatatcgccgctctctttctactctacttcccagaagaagacgcattctgggccctggttcaactgctggccagcgaacggcattccctgcaggggtttcactctcccaatggaggcactgtgcagggccttcaagatcagcaagagcatgtcgtagcaacatcccagtctaagaccatgggacaccaagacaaaaaagatctgtgtggacagtgcagcccactggggtgccttattcgaattttaattgacggtataagccttgggctgacactccggctgtgggatgtgtatctggtagagggcgagcaagcactgatgccaatcacgcggatagcctttaaagtgcaacagaagcggctaacgaagacctcccggtgtggaccatgggcacggttctgcaaccggtttgtggacacctgggcccgagatgaagatacagtgcttaagcatttgcgcgcttccatgaaaaaactgacaaggaaacagggcgacttgcctccccctgccaaacccgagcaagggagttccgcaagtcgtccagtgcccgcttcccgcggaggaaagacactttgtaagggagaccgacaggcgccaccaggtcctcctgctcgtttccccagacccatttggagtgcgtctccccctcgcgctcccagaagctctactccttgtcccggaggagctgtgcgagaggacacctaccccgttggcacccagggcgtccctagccccgctctggcccaagggggaccacaaggctcctggagatttctccaatggaattctatgcctcggctgccaaccgatctggacgtggagggtccgtggttcagacattatgattttcggcagagttgttgggttcgcgcaatttctcaagaagaccagctcgcaccatgttggcaggccgagcacccagctgagcgagtgcgcagtgcattcgccgctccatccacagatagtgaccagggcactcctttcagagcacgagacgagcagcaatatgcccctacctcaggaccttgcctgtgtgggctccatcttgaaagttcccaatttccgcctgggttttag

SEQ ID NO: 243548 - DNA, 1650 bp, synthetic construct
  misc_feature 1..1650: note = Description of Artificial Sequence: Synthetic coding sequence
  source 1..1650: mol_type = other DNA
atggacgtggtcgaggtagctgggtcctggtgggcgcaggaacgcgaggacatcattatgaagtacgaaaaaggacaccgagctggcctccccgaagacaagggtcctaagcccttccgctcatacaacaacaacgtggaccaccttggtatcgtgcatgagaccgaactgcctcccctgaccgcgagggaggccaagcaaatccgcagggaaatttctcgtaagtcaaagtgggtggatatgctcggtgactgggaaaaatataagtcgtcccgaaagcttatagatagggcatacaagggaatgcctatgaatatccgaggacccatgtggtcagtgttactcaacatagaggagatgaagctgaagaatccgggacgttaccaaataatgaaggaaaaggggaagcgctccagtgagcatatccaaaggatcgacagagacatatccggtaccctgcgcaaacacatgttctttcgcgacaggtacggtactaagcagcgggaacttttgcatatactgctcgcctacgaagagtataatcccgaggtgggttattgtcgcgatctgagccatatcgcggctctgtttctgctgtaccttcccgaggaggatgctttttgggcactggtgcaactcctagcaagtgagcgccactcccttcagggatttcactcgcctaacgggggaaccgttcagggcctccaggaccagcaggaacatgttgtggcaactagccaatcgaagaccatgggccaccaagacaagaaagatctgtgcggccagtgcagcccgctcggctgtttgattagaattctgatagatgggatttcactggggttgactctgaggctttgggatgtctacctggtggaaggcgagcaggcactgatgccaattactaggatcgcgtttaaggtgcagcagaaacgactgactaaaactagccgctgtggaccatgggcccgtttctgtaaccgcttcgtggatacgtgggccagggatgaggacaccgtccttaagcatctcagggctagcatgaagaaattaacacgcaaacaaggcgacctaccccctcccgcaaaaccggagcagggttcctcggccagccgtcccgtcccagcttcacggggaggcaagacgctatgcaagggggaccgacaggctccccctggtccacccgcatggttccctcggccaatatggtctgccagcccccctagagctcccaggtccagtaccccctgtccagggggtgctgtgagggaagacacctacccagtaggaacccagggggttccaagcccagccttagcccagggcggacctcaggggagctggagatttttgcagtggaacagtatgccaagactgcctacggatctggatgtcgagggcccttggtttcggcattatgacttccgccagtcctgttgggtgcgggctatctcccaggaggatcagctcgccccttgctggcaggctgagcaccctgctgagcgcgttcgcagcgccttcgccgctccttccactgattctgaccaggggactccattcagggctcgtgacgagcagcagtgcgcgccaacgagcggaccctgcctctgtgggctccacctggagtctagccagttccctccaggcttttag

SEQ ID NO: 243549 - DNA, 1584 bp, synthetic construct
  misc_feature 1..1584: note = Description of Artificial Sequence: Synthetic coding sequence
  source 1..1584: mol_type = other DNA
atggatgtcgttgaggtcgccggaagttggtgggcccaggagcgcgaggatatcattatgaagtacgagaagggtcacagagccggtctgccggaggataagggaccaaagccctttagatcctacaataacaatgtggaccacctgggtatcgttcatgagaccgagcttcctccccttacagccagagaggccaagcagattagaagagaaatctccaggaagagtaagtgggttgacatgctgggcgattgggagaagtataaaagctctaggaaacttatagaccgcgcatataagggaatgcccatgaacattcgagggcctatgtggtcagtgctgttaaatatagaggaaatgaaactgaaaaacccagggaggtatcagatcatgaaggagaaaggaaaaagatcttcagagcacattcagcggatcgaccgggatatttctgggaccctcaggaagcatatgttttttagggaccggtatggcacaaaacagagagaactgctacatattctgctggcttacgaggaatataatcctgaggttggatattgccgcgacctgagccatatcgccgctctgttcctgctctaccttccagaagaggacgctttttgggccctcgttcagctactggcatcagagaggcactccttacaggggttccacagccctaatggagggactgtgcagggcctgcaggaccagcaggagcatgtggtggccacctcgcaaagtaagactatggggcatcaaatatctctcgggctgaccctaaggttatgggacgtttacttagttgagggcgagcaggccttaatgcctatcacccggattgcattcaaggtgcagcagaaacggttgaccaagacatcgagatgtggaccctgggctcgcttttgcaacaggttcgttgatacctgggctagagacgaggatacagtcctgaagcatctgagagcgtctatgaagaaactcaccaggaaacagggtgatctcccgcctccggcaaagcctgagcagggtagctcagcaagtcggccagtccccgcatcaagaggagggaaaacactgtgcaaaggagatcggcaagccccacctgggcctcctgcctggtttcctaggcctatctggagcgcatcgcccccacgggctccacgcagctctactccttgccccggaggcgctgtacgagaagacacttatccggttggaacacagggtgtcccctccccagcactggcccagggaggcccacagggctcctggcgttttttgcagtggaacagtatgccacggcttccaacggatctggacgttgagggtccgtggttccggcactatgactttaggcagagctgttgggtaagagcgatctctcaggaggaccagcttgcaccttgctggcaagcagaacatccagccgagagggtgcggtcagcttttgcagccccatccaccgatagcgatcaggggactccatttagagcaagggacgagcagcagtgcgcccctacgtccggtccgtgcctgtgcggcctgcacctggagtctagccaattccctcctgggttttag

SEQ ID NO: 243550 - DNA, 1650 bp, synthetic construct
  misc_feature 1..1650: note = Description of Artificial Sequence: Synthetic coding sequence
  source 1..1650: mol_type = other DNA
atggacgttgtcgaggttgctggctcctggtgggctcaggagagggaggacattataatgaaatacgagaagggtcacagggccggtttaccagaggataagggccctaagcctttcaggtcttacaataataacgtggatcaccttggcatagtgcatgagactgagttgcctcccttgactgcacgagaagccaagcagatccggagagaaataagccgcaagtccaaatgggttgatatgctgggcgactgggaaaagtataagagctcccggaagcttatcgacagggcctataaaggcatgcccatgaatatcaggggcccaatgtggagcgttctgctcaatatcgaggaaatgaagctgaagaaccctggcagatatcagatcatgaaggagaaaggtaaacgcagttctgaacacatccaacggatagatcgcgacatttctggaaccctccggaaacatatgttcttccgcgatcgatacggcacgaagcagcgtgagctgttgcacattttgctcgcctacgaggaatacaaccctgaggtggggtactgccgtgacctttcgcacatcgccgctctgtttctgctctacctgcccgaagaagacgcgttctgggccctggtccagctgctggcttcggagagacactctcttcaggggtttcactcaccgaatggcggaacggtacaagggctacaagatcagcaggagcacgttgtcgccacaagtcagtctaagaccatggggcaccaggacaagaaggatctttgtggacagtgctcaccccttggctgcttgattcgaatactgattgacgggatcagtttaggtctaaccctccgattatgggacgtgtacctggtggagggagaacaggctttaatgcctatcacccgaattgcctttaaggtgcagcagaaacgtttgacaaagacatcccgctgtgggccatgggctcggttctgtaacagattcgtggatacttgggcacgtgatgaggatactgtcctcaagcatctgcgggcttccatgaaaaagttgactaggaagcagggagacctgcccccacccgcaaaacccgaacagggttcatccgcctcccggcctgtgcccgcttctagaggaggaaaaaccctctgcaagggagaccgtcaggctcccccaggccctcccgcttggtttccacgcccaatttggtcagctagcccaccccgagcgcctcggtcctcaacgccctgtccaggcggagcggtccgggaggatacctatcctgttgggacccagggcgtacccagtccagctctggcccaaggtggacctcaagggtcctggcgtttcctccaatggaactccatgcctagactgcctaccgatctcgatgttgaaggtccctggtttaggcactacgacttcagacagtcttgttgggtaagagccattagccaggaggaccagttggcgccatgctggcaggctgaacacccagccgagcgggtccggagcgctttcgccgctccctctacagatagtgaccagggcaccccttttagagcacgggatgaacaacagtgtgcacccactagcggcccttgtctctgcggcctccacctggaaagctcccaatttccgccaggcttctag

SEQ ID NO: 243551 - DNA, 1650 bp, synthetic construct
  misc_feature 1..1650: note = Description of Artificial Sequence: Synthetic coding sequence
  source 1..1650: mol_type = other DNA
atggacgtggtcgaagtcgccggtagctggtgggcccaggaacgcgaggatatcattatgaaatacgaaaaaggccaccgggctggcctgccggaggataaagggccaaaacctttccggtcttacaataacaacgtggaccacctgggtatcgtacatgagactgaactgccgcctttgacagcgcgtgaggcaaaacagattcgcagggaaatctccagaaagtctaagtgggtcgacatgctgggagactgggagaagtacaaatcatcccggaagctgattgaccgggcatacaaggggatgcccatgaatattagagggcctatgtggtccgtactgctgaacacggaggaaatgaaactcaagaacccaggcagatatcagattatgaaagagaagggaaaacgttcctctgaacacatacagcgcatcgaccgggatgtgtcaggtaccctccgaaaacacatttttttcagagatcggtacgggactaagcagcgggagctgttgcacattcttcttgcctacgaagaatacaatccagaggtgggctactgtcgtgatctgtcacacattgctgccctatttctcctgtaccttcccgaggaggatgcattttgggccctggtgcaactattggcttcagagcggcattcactgcaggggtttcattctcccaatgggggaaccgtacaaggtctacaagatcagcaggagcacgtggtggccacctctcagccaaaaactatgggacatcaggataaaaaggacctttgtggccagtgtagccctctcggatgcctcattcggattctaatcgatggtatcagcctgggactaaccctgcggttatgggatgtgtatctcgtcgagggtgagcaggctcttatgcctatcacacgcatcgcctttaaggtgcagcagaagcgcttgaccaagacttctcgatgcggaccttgggcacgtttctgtaacagattcgtagacacctgggctcgggatgaggacaccgtgttaaaacacctgcgggcatctatgaagaaactcaccagaaagcagggagacttgcctcctccagccaagccagagcagggatcctcagcttccagaccagtgcccgcttctcggggaggcaagactctctgcaaaggcgaccggcaggcccctccgggacctcccgctagatttcccagacccatctggtctgctagtccccctagggcaccacggagcagtaccccatgccctggaggggctgttcgcgaagacacttatcctgtgggcacacagggcgtgccaagtccagcgctggctcaggggggaccacaagggtcctggaggttcctgcagtggaacagcatgcctcggctgcccaccgatctcgatgtcgaggggccttggttcaggcactacgattttcgtcagagctgttgggtaagagccattagccaagaagatcaactcgcgccatgctggcaggcagagcatccagccgagagagtgcggtcagcattcgcagcacccagcaccgattcagatcaagggacaccatttcgggctagagatgagcaaccctgtgcacccacaagtgggccatgcctatgcggcctacatctcgagtcttctcagtttccaccgggtttctag

SEQ ID NO: 243552 - DNA, 876 bp, synthetic construct
  misc_feature 1..876: note = Description of Artificial Sequence: Synthetic coding sequence
  source 1..876: mol_type = other DNA
atggacgtggtggaagtggccggaagctggtgggcgcaggaaagagaggatataattatgaagtatgaaaaggggcaccgggcaggcctgcccgaggataagggcccaaaacccttccgatcatataacaacaacgtagatcatcttggcattgtccatgaaaccgagctaccaccgctaacagcgagagaagctaagcagatccggagagagatctctcgcaagtcaaagtgggtcgacatgttaggtgactgggagaagtacaaatcaagcaggaaactgattgaccgcgcttacaaggggatgcctatgaatattaggggacccatgtggtcagtgctgcttaacaccgaggagatgaagctgaaaaacccaggcaggtaccagattatgaaggagaaaggcaagcggtctagtgaacatatccaaagaatcgaccgcgacgtgagcggaactctccgcaagcacatattcttccgtgatcgatatggcacgaaacagagagagctcctgcatattctcctcgcctatgaggagtataacccagaggtaggatattgcagggatctttcccatatcgccgcactgtttctcttgtatctgccagaagaggatgcattctgggctctcgtgcagttactcgcttccgaaaggcactccctgcaggggtttcattcccctaacggagggactgttcagggactgcaggatcagcaggaacacgtggttgccacaagtcagcccaagacgatgggccatcagtctgcaagcagaagacggcctggtgttgcaagagggcacgtgtttgccaccgggtctctgatccccggacccggaatgcgaacattgtgtagcagcattttgggccctctctag

SEQ ID NO: 243553 - DNA, 900 bp, synthetic construct
  misc_feature 1..900: note = Description of Artificial Sequence: Synthetic coding sequence
  source 1..900: mol_type = other DNA
atgggacatcaggacaagaaggatttgtgtgggcagtgcagccccctcggctgccttatcaggatcctcatcgacggtatttcactgggattaactctgaggctttgggatgtgtacctggtggagggggaacaagccttaatgccaattacacgtatcgccttcaaggttcagcagaagcgcctgacaaagacttcccgctgtggaccctgggcgagattttgtaatcggtttgtcgacacatgggctcgggacgaggatacggtgctgaagcaccttcgcgcttcgatgaaaaaactgacccgcaagcagggagacctcccgccacctgcgaaacctgagcagggatcatcggcatcgcgacccgtacctgccagccgcggaggcaagactctctgcaagggtgatcgacaagctccacccggaccaccggcaagattccctagacccatctggtccgcaagcccacctcgggcaccaaggtctagcacgccgtgccctggtggcgctgtccgagaggatacctaccccgtgggcacccagggtgttccttcccctgccctggcccagggcggaccacaaggcagttggaggttcctccagtggaatagcatgcccaggttacccaccgacttggatgtagaagggccttggtttaggcactatgattttaggcagtcgtgctgggtgcgcgcaatcagccaggaggatcagttggctccttgctggcaggctgaacaccctgccgaacgcgtgaggtccgctttcgcagcgcctagtaccgacagcgatcaaggaactcccttcagggcaagagatgagcaaccctgcgctcctacctcagggccttgcctgtgcggcctgcatctagaatctagccagttcccaccgggattctag

SEQ ID NO: 243554 - DNA, 1410 bp, synthetic construct
  misc_feature 1..1410: note = Description of Artificial Sequence: Synthetic coding sequence
  source 1..1410: mol_type = other DNA
atgcttggggattgggaaaagtacaagtcatcgagaaagctcattgacagagcgtataagggaatgccgatgaacattagagggcctatgtggtctgtcctgctgaatacagaggagatgaaacttaagaatccagggagatatcagataatgaaggagaaagggaagagatcatccgaacacattcaaaggattgatagggatgtgagtggtaccctgcggaagcacatctttttccgggatcgctacggaaccaagcagagggaacttctccatattctgctagcttacgaagaatataaccctgaagtgggatattgcagagacctgagtcacatcgcggctctgttcctgttgtatctgcctgaagaggacgccttctgggctctggttcagctgttagctagtgagaggcattcactgcaaggatttcacagccccaacggcggtaccgtgcaggggcttcaggaccaacaggagcacgttgttgccacttctcaacccaagaccatgggccatcaagataaaaaagacttatgtggccagtgctctccactgggatgcctaatccgtatattaattgatggtatatctctgggcttgaccttgagactgtgggacgtgtacctcgtcgagggcgaacaagcattgatgccaatcacccgcatcgcattcaaggtccaacaaaagcggctgaccaaaaccagcagatgcggtccgtgggccaggttctgcaatcggttcgtggacacgtgggctcgggacgaggacaccgtcttgaagcaccttcgggcatctatgaagaagctgactaggaagcagggggatctgcccccacccgcaaagccagaacaggggagctcagcttctcgcccagtgcctgcatcccgcggtggtaaaacactgtgtaaaggcgaccgacaggccccaccaggcccacccgcaaggtttccccgtcctatttggtctgcgtccccgccaagagcccctcggtcctctactccatgcccaggcggagccgttcgcgaggacacgtaccccgtaggaacacaaggtgtgccttccccagccctggcacaaggcggtccgcagggctcctggcgattcttacagtggaacagcatgccccgacttcccactgacttggacgtggaaggaccttggtttaggcactatgatttcagacagagctgctgggtccgagccattagccaggaagatcaacttgcaccatgttggcaggctgaacatcccgctgagcgggtaagatccgcctttgcagctccctcaacagactcagatcaggggactccatttagagcccgagatgagcagccatgtgcaccaaccagcgggccatgtctgtgtgggctccacctagagtcgtctcagtttcctcccggattctag

SEQ ID NO: 243555 - DNA, 1650 bp, synthetic construct
  misc_feature 1..1650: note = Description of Artificial Sequence: Synthetic coding sequence
  source 1..1650: mol_type = other DNA
atggacgtagtggaagtggccggttcctggtgggcccaggagcgcgaagatattatcatgaagtatgagaaagggcatcgtgccggtcttcccgaagataaggggcctaaaccgtttagaagctataacaacaacgtggatcaccttgggatcgtgcatgaaaccgagctaccacccctgacagctagggaggccaaacagattcggagagagatctcacgcaagtcaaaatgggtggacatgctgggggattgggaaaaatacaaaagcagtcgcaagctaatcgatcgagcatacaagggaatgcctatgaatatacgtgggcctatgtggtctgtgttgctgaacatcgaggaaatgaagcttaagaatcctgggaggtaccagattatgaaggaaaaaggcaaacgctcttcagagcatatccagagaatcgaccgtgacatcagtggtacactccgtaagcacatgtttttccgggacaggtacggaactaaacagcgcgaactgctccacatactactagcttacgaggaatacaatcccgaggtgggttattgtagagacttatcccacatcgccgctctcttcctgctgtacctgcccgaagaagacgctttctgggccctggttcagctcctggccagcgaacggcattcactgcagggatttcactccccaaatggtggaacagtgcaaggccttcaggaccagcaggagcacgtcgtcgctacttcacagcctaaaaccatgggccaccaggacaagaaagacctctgcggtcagtgtagcccccttggttgccttatccggatcctcattgacggcatctccctcggcctgaccctgcggctctgggacgtttacctcgtggagggtgagcaggcgctgatgcccatcaccagaatagcatttaaggtccaacagaagcgtttgacgaagacctctagatgcgggccatgggccagattttgcaaccgttttgtggatacttgggctcgcgacgaagacaccgtcttgaaacatttgagggctagcatgaagaagcttacaagaaagcagggcgacctgcctcctccggctaaacccgaacaaggatccagcgccagccggccagttcccgcaagtcgtggtgggaaaacactctgtaaaggcgaccgtcaagcccctccaggacccccagccaggtttcccaggccaatttggagcgcctccccgccacgggctccccgatcctcgaccccgtgtcctgggggagcggtgagggaggacacctaccctgtcggcactcagggcgtaccctcacctgctctcgcccagggtggccctcagggatcatggcgattcttgcaatggaatagtatgcccaggttacccaccgatttagatgtagaagggccttggttccggcactacgactttcgccagagctgttgggtgagggcaatttcccaggaagaccaactcgcaccctgctggcaggcagagcaccctgcggaaagagttaggagcgcattcgccgcaccttccaccgatagtgaccagggaaccccctttcgcgctagggacgaacagcagtgcgcacccacgtccggcccatgcttgtgcggattgcacctcgagtcttcccagttccccccagggttttag

SEQ ID NO: 243556 - DNA, 1650 bp, synthetic construct
  misc_feature 1..1650: note = Description of Artificial Sequence: Synthetic coding sequence
  source 1..1650: mol_type = other DNA
atggatgtggttgaggttgcgggttcatggtgggcacaagaacgggaagacattataatgaagtatgagaaaggtcatagagctgggctgccagaagataaaggccctaaacctttcagaagctataataataacgtggaccacctggggatcgtccacgagacagagttaccccctctaacagctcgggaagcgaagcaaatcagacgcgaaatcagtcgcaaatctaagtgggttgacatgctgggagactgggaaaagtataagagctcccggaaactgatagacagggcctacaaaggcatgcccatgaacatccgaggccctatgtggtcagtgctgttaaacattgaggagatgaaactcaaaaacccaggccgttatcagatcatgaaggaaaagggtaagaggtctagtgaacacatccagaggattgatagagatatatccgggacattacgaaaacacatgttttttcgggatagatacggcaccaaacagagggaattgctccatatccttcttgcctatgaagaatacaatccagaggtgggctactgcagggacctcagccacattgccgctctgtttctgctctatcttcccgaggaagacgctttctgggcgctcgtccagctgttggcctctgagcgccacagccttcaggggtttcatagcccaaatggtggcaccgtacagggtctccaggatcaacaagagcatgtcgtcgcaacatcgcagcctaagactatgggacaccaagataaaaaggacctgtgcggtcagtgtagtcccctgggctgtttaatcaggattctgattgacgggatatccttaggactcactctgaggctatgggatgtatatttagtggagggcgaacaggcactgatgccgatcactcgaatcgccttcaaggtgcagcagaagcgactgacaaaaactagtcgttgtgggccttgggccaggttctgcaatagattcgtggatacatgggcaagagacgaggataccgtgctgaagcaccttcgcgcttccatgaaaaagcttacccggaagcagggagatttgccccctcctgccaaacccgagcaaggcagctccgcttcacggcctgtgcccgctagtaggggtgggaaaaccttgtgcaaaggggatcgtcaggctccaccaggcccacctgccaggttccccaggccaatatggtctgcgtcgccacccagggcgccacgcagctcaaccccgtgccccggaggtgccgtgagggaagacacctatcccgtcggaacccaaggggtaccctcccccgcacttgcacagggcggaccccagggatcctggcgatttttgcaatggaactctatgccacggctcccgaccgacctggatgtggaagggccatggtttcgccactacgatttccggcagtcatgttgggtgcgtgcgataagccaagaggaccagctggctccctgctggcaggccgagcaccccgcagaacgcgtgcggagcgcctttgcagccccaagcaccgacagcgatcagggcacaccatttagggccagagacgagcagcagtgtgccccaaccagcgggccttgtttgtgcgggttacaccttgaaagttcccagttccctcccggtttctag

SEQ ID NO: 243557 - DNA, 1584 bp, synthetic construct
  misc_feature 1..1584: note = Description of Artificial Sequence: Synthetic coding sequence
  source 1..1584: mol_type = other DNA
atggatgttgttgaagtcgcaggttcctggtgggcccaggagagggaagacataattatgaagtatgagaagggacaccgcgctggactccccgaagacaagggcccaaaaccctttagatcctacaataacaacgtggaccatctcggaatagtgcacgagaccgagctgccccctctgaccgccagagaagccaagcagatccgaagagagatttcccggaaatctaaatgggttgatatgctgggcgactgggagaagtacaaatcatccaggaagttgatcgacagggcatataaaggtatgcctatgaatattagagggccaatgtggagcgtgttgttgaatatagaggaaatgaaactcaaaaacccgggacgttatcaaatcatgaaagaaaaaggcaagagatcaagcgagcatatacagcgcatcgaccgcgatatctcagggactctgcgtaaacatatgtttttccgggaccggtatggcaccaagcaaagagagcttttacatattctactggcctatgaggaatacaatcctgaggtcggctactgtcgggacctgtcgcacatcgccgctctctttcttctctaccttccggaggaggatgctttttgggcacttgtccagttgttagcctcagaaagacattccctccaggggttccatagcccaaacggcggaaccgtgcagggcttacaggatcagcaggagcatgtggtggcaacttctcaacccaagaccatgggccaccagatcagcttagggctgaccctccggctgtgggatgtgtatctggttgaaggggaacaagctctgatgccaatcactcgaatagctttcaaggtgcagcagaagcggctgaccaagacatccagatgcggcccatgggcacgcttctgtaatcgatttgtggacacctgggctagagatgaagacactgttcttaagcacctgcgggcatcgatgaaaaagctcacccggaaacagggagatttacccccaccagctaaacctgaacaaggtagttctgcaagcagacctgtacctgcgtcacgcggaggtaaaactttgtgcaagggcgatcggcaggctcccccaggtccccctgccagattccccaggcccatctggtccgctagtccccctagggccccaaggagttctacaccttgccctggaggagcggttagggaggatacttacccagtgggaacacagggagtgccatctcccgcacttgctcagggcggtccacaaggatcatggcggtttctgcaatggaatagcatgcctcgcctgcccaccgacctcgatgtggaaggaccatggtttcggcactatgactttcgtcagtcatgttgggtgcgggctatcagccaagaagatcagctcgcaccctgttggcaggcggagcacccagctgaaagggtcaggagcgccttcgccgcaccctccaccgacagtgaccagggaacaccatttcgggcaagggatgagcagcagtgcgccccaacttccggcccatgtctgtgcggactgcatcttgagtctagccagtttccccctggcttctag

SEQ ID NO: 243558 - DNA, 1584 bp, synthetic construct
  misc_feature 1..1584: note = Description of Artificial Sequence: Synthetic coding sequence
  source 1..1584: mol_type = other DNA
atggatgttgttgaagttgccggttcatggtgggcacaggaaagagaagacattatcatgaagtatgagaagggccacagagccggtctgcctgaggacaagggccctaagcctttccgctcctataataataatgtcgaccatctcgggatagtccacgaaacagagctcccacccctcaccgctcgtgaggccaagcagatccgacgcgagatttcacgcaaatcgaaatgggtggacatgctgggggattgggagaaatataaaagtagccgcaaacttattgacagagcatataagggtatgcctatgaacatcaggggacccatgtggagcgttctgctgaatatagaggagatgaagctgaagaacccaggaaggtatcagattatgaaagaaaagggtaagcgctcgtctgaacatatccagcggattgatagggacatttcaggcacccttcgaaaacacatgttcttccgagacagatatggcaccaagcagcgggagcttctgcatatcttgctggcttacgaggagtacaaccccgaagtcggctactgtcgcgatttatcccacatcgctgcgctctttctgttgtatctcccagaagaagatgccttctgggcactggtccaattgctggcctcagaaaggcactccttacagggctttcattccccaaacggcggtactgtccagggcctccaggaccaacaggagcatgtggttgccacctcacagccaaagaccatgggtcaccagatctctctgggtttgaccctccgcctgtgggacgtgtatctggtcgagggcgaacaggcattgatgcccatcaccagaatcgccttcaaagtgcaacaaaaacgcttgactaagacctctcgttgcgggccatgggcaagattctgtaaccgatttgtggatacttgggctagagatgaagacactgttctgaaacatctgcgagcctcaatgaaaaagttaacgagaaaacagggcgacctgccaccgcctgcaaaacccgagcaagggtcatcggccagtcgccctgtgcccgcttcgagagggggtaaaactctgtgcaaaggggataggcaggcccctccaggaccccctgccaggtttcccagacctatatggtctgcttctccccctcgcgctccacgcagcagcactccctgtccaggcggtgcagtccgggaagatacctaccccgtaggcacccaaggtgtgcctagcccagctttggctcagggtggccctcaaggatcctggcggtttctccagtggaacagcatgccacgcctccccactgacctggacgtcgagggcccatggttcaggcactacgatttcagacaaagttgctgggttcgagccatcagccaggaagaccaactggccccatgctggcaggctgaacatcctgccgaaagggtacggtccgcatttgccgcaccaagtaccgatagtgatcagggcacgccttttcgtgcccgtgacgaacagcagtgcgccccaaccagtggtccatgcttatgtggtctgcacctagaaagtagccaatttcctccagggttttag

SEQ ID NO: 243559 - DNA, 1410 bp, synthetic construct
  misc_feature 1..1410: note = Description of Artificial Sequence: Synthetic coding sequence
  source 1..1410: mol_type = other DNA
atgctcggggattgggagaagtacaaaagcagtaggaagcttattgatagggcttacaaaggtatgccgatgaacattcgcggacctatgtggtctgtcctcctgaatatagaggagatgaagctcaaaaatccaggcaggtatcaaattatgaaggagaagggaaagaggtcatccgagcacatacagaggatcgatcgcgacatctcagggactttgcgcaaacacatgttctttagagacaggtacggtacaaaacagagagagctgctgcatatcctgttggcatacgaagagtataatcctgaggtgggatattgccgggacctgtcacatattgccgcactgttcctgttgtatctacccgaagaggacgccttctgggcactggttcaactgttagccagcgaaaggcacagcctccagggcttccattctcccaatggtgggacagtgcaggggctccaggaccagcaggagcacgtggtggcgacttctcagccaaagaccatgggtcatcaggacaagaaagacctgtgcggccagtgctcgcctctgggatgcctgattcgcattctgattgatggcattagcctgggcctgacgttgcgtctgtgggatgtgtatctggtcgagggcgaacaggccctaatgcctatcacccggatcgcctttaaagttcaacagaagaggctgacaaagactagccggtgcggaccctgggccaggttctgtaacaggttcgtcgacacatgggctcgagatgaagataccgtgctgaagcatctgagggcgagcatgaagaaactaacaagaaaacagggggacctgccccctcccgcaaagcctgagcaggggtcttccgcatcgcggcctgttccggcaagccgcggtggaaagaccctgtgcaagggcgataggcaggctccaccagggccacccgctcgatttccaaggccgatttggagcgcatcccctccccgagcgccacgatcatccacaccttgcccaggcggagccgtccgcgaggatacttacccagttgggactcaaggcgttcctagcccagctctcgctcagggtggaccacagggtagctggaggtttctgcagtggaactcaatgcccaggttgccaacagatcttgatgtggaggggccttggtttcgacattatgactttagacagagctgctgggtcagggctatttcccaggaggatcaactggcaccatgttggcaggccgagcacccggcagaaagagtaaggtctgccttcgctgctccatctacggactccgaccagggcacgccattcagagcacgtgacgagcaacagtgcgccccaacctcagggccttgcctctgcgggctgcacctggagagcagccagttccccccagggttttag

SEQ ID NO: 243560 - DNA, 1410 bp, synthetic construct
  misc_feature 1..1410: note = Description of Artificial Sequence: Synthetic coding sequence
  source 1..1410: mol_type = other DNA
atgttgggagattgggaaaaatataagtcgagtcgaaaactgatagaccgggcatataagggcatgccgatgaatattcgcggacctatgtggtcagtgctgttaaatatcgaggagatgaagttgaagaatcccggacgctaccaaatcatgaaagagaaggggaagcggtcctccgagcacatccagcggatagatagagacatcagtggaaccttgcggaaacatatgttctttcgagacaggtacgggaccaagcaacgggaactgctgcacatcctgctcgcatatgaagagtataatcctgaggttgggtactgcagagatcttagtcatatcgcagcactgtttttgctgtaccttccagaggaggatgcgttctgggctctcgtacagctgctcgcatcagaaagacatagccttcaggggtttcattctcccaatgggggaaccgtgcagggcttacaagaccagcaggagcatgtggtggctaccagccaacctaaaaccatgggacatcaagataagaaggacctctgtggacagtgttcccctctgggctgtctcatccgcattcttatagatggcattagcctcggcctcaccctacgactgtgggacgtgtacctggtagaaggggagcaggcgctaatgccaatcaccagaatagcctttaaggtacaacagaaacggctgactaaaacctcacggtgtggaccctgggctagattctgcaacagatttgtggacacatgggctagagacgaggataccgttctgaaacacttgcgggcttccatgaaaaaacttactcggaagcagggcgatctccctcccccagccaaacccgagcagggctctagcgcatcacgccctgtccctgctagtcgcggtgggaagacactgtgtaagggcgaccgacaggcccctccaggcccaccagcctggtttcccaggccaatctggtctgccagccccccacgagcccctaggagcagcaccccttgcccaggtggtgctgtgcgtgaggacacttatcccgtagggacacagggagtcccctcaccggcactggcccaggggggtccccagggcagctggcgatttctccagtggaattccatgcccaggttacctaccgatctggatgtggaaggtccgtggttccgccactacgatttccgccagtcatgctgggtgcgcgcaatctcgcaggaggaccagctggctccctgctggcaagccgagcaccccgcagaaagggtgcgctctgccttcgccgcacctagcaccgatagcgatcagggaacgccattccgcgcacgggacgaacagcaatgtgccccaacatccggtccatgtctatgcgggttgcatcttgagagtagccagtttcctcctggcttttag

SEQ ID NO: 243561 - DNA, 1650 bp, synthetic construct
  misc_feature 1..1650: note = Description of Artificial Sequence: Synthetic coding sequence
  source 1..1650: mol_type = other DNA
atggatgttgtagaagtggccggttcatggtgggcgcaggagcgtgaggacatcattatgaaatacgaaaagggacatcaggcagggctgcctgaagacaaggggcctaaacccttcaggtcctacaacaataacgtggaccacctgggaatcgtgcacgagacagagttacctcctttaactgccagagaggcgaagcagattcgcagggagattagccgtaagagcaagtgggtggatatgcttggggactgggagaagtacaagtcgtcgcgtaagcttatagaccgcgcttacaagggtatgcccatgaatattaggggacctatgtggtccgtgctgttgaacattgaagaaatgaagctgaagaatcccggtcgctatcagattatgaaggaaaaaggaaagagaagttccgaacacatccagcggattgatagggacattagtggcactcttcggaagcatatgttcttcagagatagatacggtacgaagcagagagaacttctgcatatattgctggcctacgaagaatacaaccctgaggtggggtattgcagagatctctcccacatcgctgctctcttcctcctgtaccttccggaggaagatgccttttgggcactggtccagcttctggcatcagagcggcactcacttcagggttttcattcccctaacggtggaacagtccaggggttacaggatcaacaggaacacgtcgttgctacaagccagcctaagactatggggcatcaggacaagaaggacctctgtgggcagtgcagtccactgggctgtctgattaggatcctcattgacggaatttcactgggtctcactctaaggctgtgggacgtgtacttggtagagggggagcaagctctcatgcccatcacccgaattgcgttcaaggtccagcagaagaggctgacaaagactagccggtgcggaccctgggcacgcttctgcaatcggtttgtggatacctgggccagagatgaagatacggtccttaagcatctgagagctagtatgaagaaacttacgcgcaagcaaggggatctgccccctcctgcgaaaccggaacaggggtcttccgccagtagacctgtgcccgcatcacgcggagggaagacattgtgtaagggagacagacaggctccaccgggaccaccggcaaggttcccgcgaccaatctggtctgcctcgccgcctagagcaccacgttctagtactccatgccctgggggtgcagttcgtgaagatacttaccccgttggtacgcagggtgtcccttcaccggctctcgcacaggggggtccacaagggtcatggagattcctgcagtggaatagcatgccacgcctgccaacagatttggacgtcgagggaccttggtttcgccactatgactttcgccaaagctgctgggtgagggccatatcccaggaagatcagttagcgccttgttggcaggcagagcatcccgctgagagagttcggtctgcttttgccgctcccagcaccgacagtgaccagggaaccccttttagagcacgggacgagcagcaatgcgcacctactagcggaccctgcctatgcggccttcacctagaatccagtcagttccctcctggattctag

SEQ ID NO: 243562 - DNA, 1410 bp, synthetic construct
  misc_feature 1..1410: note = Description of Artificial Sequence: Synthetic coding sequence
  source 1..1410: mol_type = other DNA
atgcttggagactgggaaaaatataaatcctcccgtaagttgattgaccgggcttacaaggggatgccaatgaacataaggggtcctatgtggagcgtgctactcaacattgaagagatgaagctgaagaatcccggtagataccaaataatgaaggaaaagggaaagcgtagcagtgaacatatccagcgaatagatagagacataagtggaacactgcggaagcacatgttctttcgagacagatacggtacgaagcagcgggaactattgcacattttgcttgcctacgaggagtacaacccagaggtggggtactgcagggacctctctcacatcgcagcactgttcctgttgtacctgccagaagaagacgctttctgggccctggtgcagttgctggctagcgaaagacacagtcttcaaggtttccatagcccaaacgggggaactgtgcagggtttacaggatcagcaggaacacgtcgtggctacctcccagccaaaaaccatggggcaccaggataagaaagatctgtgcggccagtgttcacccctggggtgtctcatacgcatcttaattgatggtatctctttgggcctgacactgaggctgtgggatgtttacttggttgagggggagcaggccctgatgcccattactaggattgcttttaaggtacagcaaaagcgactgacaaagacaagccggtgcggaccatgggccagattttgcaaccggtttgtagacacctgggccagggatgaagatactgtgctgaaacacctccgggcttcaatgaaaaaactgactaggaagcagggggacttgccaccccctgccaaacccgaacaggggtctagcgctagtaggcccgttcctgcctcacggggaggcaagaccttatgtaagggggatcgacaagccccacccggtcccccagcatggttcccacgtccaatctggtcagcctcccccccaagagccccacgtagcagcactccctgccctggcggagctgtgagggaagatacttacccagtgggaacccagggggtgccctctccagctcttgcccagggcggacctcagggctcttggaggttcctccagtggaattcaatgccacgcctgccaaccgacttggacgtcgagggcccttggttccgccattatgatttccgccagtcctgctgggtcagagcgatcagccaggaagatcagctggccccttgctggcaagccgagcaccctgcagagcgggtgcgatcagcttttgccgcaccgtcaactgacagtgatcagggcacgccatttcgcgctcgggacgagcagcagtgcgccccaacatcaggaccttgcctgtgcggtcttcacctggagtctagccagtttccccctggcttctag

SEQ ID NO: 243563 - DNA, 3708 bp, synthetic construct
  misc_feature 1..3708: note = Description of Artificial Sequence: Synthetic coding sequence
  source 1..3708: mol_type = other DNA
atggaacctccgagctgtatccaggatgagcctttcccccacccgcttgaaccagaacccggagtgtctgctcaacccggtccaggtaagccttcagacaaacgctttaggctctggtatgtcggcggatcatgcctggatcatcggaccaccctccccatgttaccttggcttatggctgagatcagaaggcgttctcagaagcctgaggcaggcggatgtggcgcacctgctgcaagagaggtgattttggtgctgtcagcaccatttctgcgctgcgtgcctgctcctggggctggcgcatcagggggaacaagccccagcgctacacagccaaatcccgctgtgttcatctttgagcataaagcccaacacatctcacggttcatccacaattctcacgacttgacctattttgcatacctgattaaggcccagccggatgatcccgagagccagatggcctgccacgtgtttcgcgctaccgatcccagtcaggtccccgacgtgatttcatccattagacagctatcaaaagccgcaatgaaggaggacgcgaagccctctaaggacaacgaagacgccttttacaactcccagaagttcgaagtgctgtactgtggaaaagttaccgttacccataaaaaagccccatcgtctttgatagacgattgcatggagaagttctccctgcacgagcagcagagactcaaaatacaaggggagcagaggggccctgaccccggtgaggatctggcggatcttgaagtggttgtgccaggaagccccggtgattgtctccccgaggaggccgatggcactgacactcacctagggctgcccgcaggggcttcacagcctgctttgacgtcctcaagagtttgttttcctgagcgaatcctggaagacagcggcttcgacgagcagcaagagttccggagtagatgttctagtgttacaggggtccagaggagagtccacgaggggagccagaaatcacagcctaggagacgccacgcctcggcccctagtcatgtccagccgtcagactcagagaagaaccggacaatgttgttccaggtcggacgatttgagattaacctgatctctcccgatacaaagagtgtggttctcgagaaaaattttaaggacatttcctcctgctcacagggcattaaacacgttgaccacttcgggtttatttgccgggagagccctgagcctgggctgagtcagtacatttgttacgttttccagtgtgcgagcgaaagccttgttgacgaagtcatgctcactttaaagcaggctttctccacggcagctgctctgcagtccgccaaaacacagataaaactgtgcgaagcttgccctatgcactctctacacaagctgtgcgagagaattgaaggattgtatccaccacgcgctaaattggtcattcagcggcacctctcttccctcaccgacaacgagcaagcagatattttcgaacgtgttcagaaaatgaaacccgtgagtgaccaggaggaaaacgagctggtgatcttacacttaaggcagctctgcgaagctaagcaaaagacgcacgtacacattggcgaagggccaagcaccatctccaatagcactatccccgagaatgcgacctcatcgggcagattcaaactggacatcctcaagaataaggccaaacgctctctcacttcctccctggagaacatcttttcaagaggcgcaaataggatgagggggaggttagggagtgtcgactccttcgagcgttcgaacagtctcgctagcgagaaggactatagcccgggagactctccgccaggcaccccaccagcttcacccccatcatcagcatggcaaaccttccccgaggaagacagcgattccccacagtttagacggagagcccacaccttctcccatcccccatctagtaccaaaaggaaactcaacctacaagacgggcgagcccagggagtgcgctctccacttcttaggcagagttcctccgagcaatgctctgacggggaaggaagaaaacgaaccagcagtacttgttccaacgaaagtctttcagttggtgggacatccgtgacgccacgtcggatttcctggcggcagagaatctttctacgcgtggcgtcaccaatgaacaaaagtccctctgccatgcagcagcaagacggtctggacaggaatgaattgctcccactgtccccactctccccgaccatggaggaggaacctttggttgtgtttctgagtggcgaggatgatcccgaaaagatcgaagaacgaaagaagagtaaagagctccgctccctgtggcggaaggccattcaccagcagatcctcttgttgcgcatggagaaagagaaccaaaagctggaggccagccgcgacgagttgcagtcacggaaggtcaagctcgactacgaagaggtgggcgcttgccagaaggaggtcctcatcacatgggataaaaagctgctcaattgtagggccaaaatccgatgtgacatggaggatatccatacccttcttaaagaaggagttcccaaaagccgcagaggcgaaatttggcagttcctggctctgcaatatcgactaaggcatcgcctgccaaacaaacagcagcctccggacatatcttataaggaactcctaaagcagctgactgcgcagcagcatgccatcctcgtggatctgggcaggaccttccccactcatccttactttagcgtgcagctagggcctggccaattgtctttattcaacctactcaaggcctattctctccttgacaaagaagttggatactgccaaggaatcagttttgtcgcaggcgtgcttctgctgcacatgtctgaggaacaggcctttgaaatgctcaagttccttatgtatgacctggggttcagaaaacagtataggccagacatgatgagcctccagattcaaatgtaccaactctccaggctgctgcacgactatcaccgcgacctgtacaatcacctggaggagaacgagattagtccatccctatatgctgccccatggtttctgaccttgtttgcatcccaattttcactcggatttgtggctcgtgttttcgatattatcttcctacagggtaccgaggttattttcaaagtggctctcagccttctcagcagtcaggagaccctgattatggaatgtgaatcctttgaaaacatagttgagtttctaaagaatactctccctgatatgaatacgtccgagatggagaaaatcatcacacaggtgttcgaaatggacatctcaaagcaattgcatgcatatgaggtggagtaccacgtgctgcaggatgaattgcaagagtctagctacagctgtgaagattccgagactctggagaagctggagagagccaattcccagctgaaaagacagaatatggatctgctagagaagctgcaagtcgcccacactaaaattcaggctctggaatcgaatctggagaatctgttaaccagggaaactaaaatgaaaagtttaatcagaaccctcgaacaggagaaaatggcctatcaaaaaactgtcgagcaactaagaaaactgctgcccgctgacgcactcgtgaattgtgatcttctcctgcgtgacctgaactgtaaccccaacaacaaggctaagattggcaacaaaccctag

SEQ ID NO: 243564 - DNA, 3897 bp, synthetic construct
  misc_feature 1..3897: note = Description of Artificial Sequence: Synthetic coding sequence
  source 1..3897: mol_type = other DNA
atggagccgccttcctgcatccaggatgaaccattcccccacccgctcgagcctgagcctggagtaagcgcacagcctggacccggaaaaccttcagacaaaagatttcgcctatggtatgtaggcggaagctgcctcgaccatcgcaccacactgcctatgctgccatggcttatggctgagattaggaggaggtcccagaagcccgaagctggaggctgtggtgctcccgcagccagagaggtgattttagttctgtccgctccattcctgaggtgtgtccccgcaccaggagcaggggcatcagggggtacaagtccaagcgcgacacagcctaaccccgctgtgttcatattcgagcacaaggcgcaacacatttcccgcttcatccataacagccacgaccttacttattttgcctacttgattaaagcacaacctgacgaccccgaatctcaaatggcttgccacgtgtttcgagccaccgatcccagccaagtccccgacgtgatatcttctattcgtcaactgtctaaagcagccatgaaggaagacgccaaacccagcaaagacaatgaggacgcattctacaattcccagaaatttgaagttctgtattgtggcaaggtgaccgtgactcacaagaaagcccctagttccctaatagacgactgcatggagaagttctcactgcacgagcagcagcgcctgaagattcagggagaacagcgtgggcctgatccaggggaagaccttgccgatctggaagtcgtggtgccgggttcgcccggtgactgtttaccagaggaggccgatggtacggacactcatcttgggctgcccgcaggagcgagtcagcctgcactgaccagcagcagagtgtgtttccccgagagaattctggaagatagcgggttcgacgagcagcaggagttcagatcacgatgctcttctgtgaccggtgtgcaacgcagagtccatgaaggtagccagaagtctcagccaaggaggagacatgctagcgctcctagccatgtccagcctagcgattcagagaagaaccggaccatgctatttcaagtcggcagatttgagattaatctgatctctcccgacaccaaaagtgtcgtcctggagaaaaactttaaagatatcagctcatgctcacaggggattaaacacgtagaccatttcggtttcatatgccgcgagtctccagagccaggcctctctcaatacatctgttatgtctttcagtgtgcttccgaatccctcgtggacgaggtgatgttgactctcaagcaggctttctctaccgctgctgctctgcaatccgccaagacccagattaagctctgcgaggcctgccctatgcatagtctgcacaaattgtgcgaacgaattgaaggtctttaccctcccagggccaagctggtcattcagagacacttgagttctcttaccgataatgaacaagcggacattttcgagagggttcagaagatgaagcccgttagtgaccaagaggaaaatgagctggttattctgcacttacgccaactgtgtgaggccaaacagaagactcatgttcacataggggaaggcccaagcaccatcagtaatagtactatccctgagaacgccacgtcgagcgggcgtttcaaactggacattctgaagaacaaggcaaagaggtccttgacgagcagtctggaaaatatctttagcagaggagcaaaccgcatgcgtggacgtttaggttccgttgacagtttcgaacgctctaattctctggctagtgagaaggattattcgcccggtgacagtccaccgggaactcctcctgcctctccacctagctccgcttggcagacattccctgaggaagacagcgacagtcctcagttccgacggagagcccatacttttagtcatcctccatcgtccaccaaacgtaaactgaacctgcaggatggtcgtgcacagggagtccggtctcccctgctgagacagtccagctcagaacaatgctcaaacctctcctctgtgcgacgaatgtataaggaatctaatagcagttcctcactgccctccttgcacacatcgtttagcgccccttccttcaccgcacctagcttccttaagtcattttaccagaactccggcaggctctcaccacagtatgagaatgaaatccgacaagacaccgcctccgagtccagcgatggcgagggcaggaagaggacttccagcacgtgctcaaacgagtcactgtccgttggaggcaccagcgttactcccaggcgaatctcatggaggcagcgcatcttcctgagggttgctagtccaatgaataagtcaccatctgcaatgcagcagcaagatggcctggatcgcaacgaacttctgcccttaagccctctgagccccacgatggaagaggaaccactggtggtttttctgtcaggcgaggacgaccctgagaagatcgaggaacgcaagaagtctaaagaactgcgtagtctatggcgaaaagctatccaccaacaaattcttctcctacgcatggaaaaggagaatcagaaacttgaggccagcagggacgagctccagtccaggaaagtgaagctggactacgaagaagttggagcttgccagaaggaggtcctgatcacatgggataagaagctgctgaattgtagggccaagattcgttgcgatatggaggatatccacacattactgaaggaaggagtgcctaagtcgcgcagaggagaaatatggcagtttctggcgctgcagtacaggttgcggcatcgactccccaacaaacagcagcctcccgacatcagctataaagaactcctgaagcagctcaccgctcagcagcacgccatcctggtcgatttgggaaggaccttcccaactcacccttacttctccgttcaacttggaccaggccagctcagcctgtttaatctgctgaaggcctattctctgctcgataaagaggtcgggtactgtcaggggattagctttgttgccggtgtcctacttctccacatgtcggaagagcaggcgttcgagatgcttaagtttctgatgtacgatctgggattccgcaagcagtatcgccctgacatgatgagtctgcagattcagatgtaccagctgtcccgcttgctgcatgattaccacagagacctgtacaaccatttagaggagaatgaaataagcccatcactgtacgctgcaccttggttcctgactttatttgcctctcagttcagtttgggcttcgtggcacgcgtttttgatattatttttctgcaggggacggaggtcatatttaaggtcgccctctccctcttgagttcccaggagaccctgattatggaatgcgagagcttcgagaacatcgtggaattcctgaagaataccttgcccgacatgaacacctccgaaatggaaaagattattacgcaggtttttgagatggacatctccaagcagctgcacgcctatgaggtggaatatcacgttctacaggatgagctgcaagagtcctcctacagctgtgaggacagcgaaactctggagaaattggagagagccaactcccagctgaagaggcagaatatggacttgctcgaaaaacttcaggtcgcccacactaagattcaggccctggaatccaacctggaaaacctcttaacaagagaaacaaaaatgaagtcattgatcaggactctggaacaagagaagatggcctatcaaaaaacggtggagcagctgagaaagttactacccgctgacgcactggtgaactgtgatctattgttacgggacttaaactgcaatcccaacaacaaggcaaagatcggtaataaaccatag

SEQ ID NO: 243565 - DNA, 849 bp, synthetic construct
  misc_feature 1..849: note = Description of Artificial Sequence: Synthetic coding sequence
  source 1..849: mol_type = other DNA
gacaacgagcaggcagatatattcgagcgggtccagaaaatgaagccagttagtgaccaagaggagaacgaactggtgatactacacctgcgccagttatgcgaggctaagcagaaaactcacgtccatataggcgaaggtccttctactataagcaactctactattcctgagaacgctaccagcagcggcaggttcaagctggatatcttaaagaataaggcgaagcgttctctaacatcctccttggaaaacatattttcccggggagccaaccgtatgcgcggaagactcgggtctgtcgatagcttcgaaagatccaacagcctcgccagtgaaaaagactattctcctggagatagcccgcctggtactccgccagcgtctcctccctcgtctgcctggcaaacctttcctgaggaagacagcgactcacctcaatttaggagaagagcccacacattttcccaccctccgtccagcaccaagcgtaagttaaaccttcaggatgggagagcccagggtgtccggagcccacttctacgccagtcatcatctgagcagtgtagcgacggggagggacggaaaaggacatcttcaacatgtagcaacgaaagccttagcgtcggcggaacatcagtgacgccaagaaggatctcgtggagacagcggatattcctgagagtggcctcaccgatgaacaaatccccttcggctatgcagcagcaggatggcctcgaccgcaatgaattactgcctctatctcctctctcacctacgatggaggaggagcccctggtcgtgttcctgtctggagaagacgaccccgaaaaaatcgaggagcgttag

SEQ ID NO: 243566 - DNA, 1389 bp, synthetic construct
  misc_feature 1..1389: note = Description of Artificial Sequence: Synthetic coding sequence
  source 1..1389: mol_type = other DNA
atgaacaaaagtccttcggctatgcagcagcaggacggccttgatcgcaacgaattattacctctcagtcctctgagcccaactatggaagaggaaccactcgtggtgttcctgagtggagaggatgatcctgagaagatagaggagcggaagaagtccaaggagctgaggtcactgtggcgcaaggccattcaccagcagatattgctcctgagaatggaaaaggagaaccagaaactggaaggcgtacccaaatctaggcgcggtgagatctggcagttccttgctctgcagtacaggcttagacacaggctcccaaacaagcagcagccaccagatattagctacaaggaactgctgaagcaacttacggcccaacagcatgctatcctggtggacctgggcagaacatttcccacacacccctacttctcagtacaactcggacctggccagctctcactgtttaatttgcttaaagcctacagtctgctggacaaagaagtcggctactgtcaggggatctctttcgtggctggagtgctcctcctgcacatgagcgaagagcaggcctttgagatgctcaaattcctgatgtacgatctggggttcaggaagcagtataggccagacatgatgtccctccaaatccaaatgtaccagctctctcgcctgctccacgactaccaccgggacctgtataatcatcttgaagagaacgagatctccccctcactatacgctgctccttggttcctgacgttattcgcatcccagttcagccttggcttcgtggcgagagttttcgatattatttttctacaggggactgaggtgatttttaaggtcgctctctcgctgctttccagccaggagacactgattatggagtgtgagtccttcgaaaacatcgtcgagtttcttaagaacacgctccccgacatgaataccagcgaaatggagaagattatcacgcaggtttttgagatggacatcagcaaacagttgcatgcatatgaagtggaataccacgtgttacaggacgagttgcaagagtcttcatattcatgtgaagatagtgaaacgctggaaaagttagaacgtgctaactctcagctaaaacggcaaaacatggacctgctcgaaaagcttcaagtcgcacacactaagatccaggctcttgaatccaatcttgaaaacctgctcaccagggaaacaaaaatgaagtcgctgatcaggaccctcgaacaagagaaaatggcttatcagaaaactgttgagcagcttaggaagttattgccagctgatgcgctggtgaattgcgatctcttgcttagagacctgaattgcaatcccaataataaggcgaagattggcaataaaccttag

SEQ ID NO: 243567 - DNA, 3873 bp, synthetic construct
  misc_feature 1..3873: note = Description of Artificial Sequence: Synthetic coding sequence
  source 1..3873: mol_type = other DNA
atggagccgccaagttgtatccaggacgaacccttcccccaccccctggagcccgagcccggagtgtccgcacagcccggacctggaaagccttccgacaaacggtttagattatggtacgtcggcggttcttgcctggaccaccgcacaacactgccaatgttgccctggctgatggccgagattcgccgacgatcacaaaagcccgaagccggtgggtgtggcgcaccagctgcgcgagaggtcatactcgttctgagcgcccctttcttgcgatgcgtaccagcccctggggctggcgcaagcgggggtaccagccctagtgccacccaaccaaacccagctgtttttatctttgaacacaaggcacaacacattagtagattcatacacaattctcacgatctgacttacttcgcttacctgataaaagctcagcctgacgacccagagtcacagatggcctgtcatgtgtttagggccactgacccctcccaggtgccggacgtcataagttcaattaggcagctcagcaaagctgcaatgaaggaggatgccaagccatctaaggacaacgaggacgcattctacaactcacagaagttcgaggtgctgtactgtgggaaagtcactgtgacccataaaaaagcaccatcaagtttgattgacgattgcatggaaaaattctccctgcatgagcaacagcgcctcaaaatacaaggggaacaaagagggccagatcccggagaggatctcgctgacttagaggtggtggtgccagggagtcctggagactgcctccctgaggaagctgatggaacagacacgcacctggggctccctgcaggtgcctcgcaacccgcattaacaagtagccgagtctgttttcccgagagaatactggaagacagtggatttgatgagcagcaagaattcaggagtaggtgtagctccgttactggggtccagaggcgggtgcatgagggctctcagaagagtcagccaagaaggagacacgcctccgccccttcacatgtgcaaccaagcgactccgagaaaaatcggaccatgctgtttcaggtgggcagattcgaaataaatttaattagtccagatacaaagtctgtggttctcgagaaaaactttaaagacatctccagctgtagtcagggcatcaagcatgttgaccacttcgggtttatctgtcgggagtcaccggagccaggcttgtcccagtacatctgttacgtgtttcagtgtgcctcagaatctctggttgacgaagtcatgctcaccttgaagcaggcattctcgacagcagccgcactccagagcgctaagacgcaaatcaaattgtgcgaggcttgccccatgcattccctgcataagctgtgtgaacggatagaggggctgtatcctccgcgtgcaaaactagttattcagagacatttatcttctctgacagacaatgaacaggctgacatcttcgaacgcgtccagaagatgaaaccggtatcagaccaggaggaaaatgagctggttattctgcacctcagacaactttgcgaggctaagcagaagacccacgtacatattggagaaggcccttcaactatttctaactcgactattccagagaatgctacctcttcagggcgttttaagcttgatattctaaaaaacaaggcaaagaggtctctcacctcctctcttgagaatatattctcgcggggagctaaccgcatgagaggacgcctggggagcgtcgacagctttgaaaggtctaatagtcttgcgagcgagaaagactattctccaggcgactcaccccctggaacaccccctgcctcccccccaagctctgcctggcaaactttccctgaagaggacagcgattcaccacagttccgcagacgcgcacataccttcagccacccaccctcatcaacgaagaggaaactgaaccttcaggatgggagagcccagggggtccggtctcccttgctccggcagagctcttcagagcaatgttccaatttgtcgagtgtgagacggatgtacaaagagtctaacagctcatcaagcttgccctcactacatacaagcttttccgctcctagttttacagccccatctttcttgaagagcttttaccagaactccggacgcctttccccacaatacgagaatgagatcagcgatggcgaaggacggaagcggacatcctctacctgttccaacgagtcgctttccgtggggggaacatcagtcacgccacgcagaatatcttggagacagcgcattttccttcgagtggcctctcctatgaataagtctccctccgccatgcagcaacaagacgggctcgatcgaaatgaactgctgccactaagcccactgtcgccaaccatggaagaagagcccctagtagtcttcttgtcaggggaagatgatcccgaaaaaatcgaggaaagaaaaaagtctaaggagctgcgcagcttgtggcgtaaagctatccatcagcagatcctcttgctgcggatggagaaagagaatcagaagcttgaagccagccgcgatgaactgcaaagcagaaaagtaaaactagattatgaggaagtaggcgcttgtcagaaagaggtactcatcacttgggacaagaaactgctcaattgccgggcaaagatcaggtgcgacatggaagacatacataccctgctgaaagagggcgtaccaaagtcacggcgaggcgaaatctggcagttcttagctctgcagtaccgcttaagacacagacttcccaacaaacaacaaccccctgatatcagttacaaggagctgctgaagcaattaacagctcagcagcatgccatcctggtggatctcggcagaaccttcccgactcacccctacttttccgtgcagctcgggcctgggcagctatccctgtttaacctgctaaaggcttactctctgttggataaagaagttgggtattgtcagggcattagtttcgttgcaggggtgctactcctgcatatgtcagaagagcaagcattcgaaatgctgaagtttcttatgtatgacctcggcttccggaagcaatacagaccagacatgatgtctctgcagatacagatgtaccagctttcgaggcttcttcacgattaccaccgagacctgtacaaccatctggaggagaatgaaattagtccttccctctacgcagccccatggttcctgaccctcttcgcctcgcagttctcgttgggctttgtggcccgtgtgttcgatatcatatttctacaggggacagaagtgatctttaaggtggcccttagtctgctctcttcacaggaaacacttatcatggaatgcgaatcctttgaaaatatcgtcgagttcctgaagaataccctgccagatatgaacacctctgagatggagaaaattatcactcaggtctttgaaatggacatctccaagcagcttcacgcctacgaggtagagtaccacgtcctgcaagacgagcttcaagagtccagctactcttgcgaggattctgaaaccctggaaaaattggagcgtgctaattcgcagctgaaacggcagaacatggatttgctcgaaaagctccaggtggctcacacgaaaatacaggctctcgagagtaacctggaaaacctcttgacacgggaaactaaaatgaaatcactaattagaacattggaacaggagaagatggcatatcagaaaacagtcgagcagctgaggaaattgcttcccgctgacgcccttgttaactgcgatctgctgctgagggacctgaattgcaacccaaacaacaaagctaagatcggaaacaaaccatag

SEQ ID NO: 243568 - DNA, 1197 bp, synthetic construct
  misc_feature 1..1197: note = Description of Artificial Sequence: Synthetic coding sequence
  source 1..1197: mol_type = other DNA
atgcatttttccacggtgaccagggacatggaagcctttacggccagctcactttccagcttgggcgcagcagggggttttcctggtgccgcaagccctggagcagacccctacggacctcgcgagccaccaccaccaccccctcgatacgacccttgtgccgctgcggctccaggggcaccaggaccaccaccaccacctcatgcctacccatttgcacccgctgctggcgctgcgaccagcgccgcagccgagcctgagggacccggtgcctcttgtgctgctgcagcaaaggcccctgtgaagaaaaacgcaaaggtagctggagtatcagtccagctggagatgaaggcactgtgggatgagttcaatcagcttggcactgagatgatcgtgactaaagcaggacggaggatgtttccaaccttccaggtaaaactcttcggaatggacccaatggccgattacatgctactaatggacttcgtacccgtggacgataaacggtataggtatgcctttcattcatctagttggctggtggccggtaaagctgatccagctactcctgggcgtgtgcactaccaccctgactccccagctaaaggggcacagtggatgaagcagatcgtgtccttcgataagttgaaactgaccaacaacttacttgatgataacggccacattattcttaattcaatgcacaggtatcagccacgtttccacgtggtgtatgtggaccctaggaaggattctgaaaagtatgcggaagagaatttcaagacctttgtgtttgaagagacaagatttaccgccgtgactgcttatcaaaatcaccgtattactcagctgaagatcgcatcaaacccctttgccaaaggcttccgcgattgtgaccccgaggactggcctcggaatcaccggcctggggctctgccattgatgtctgccttcgcgcgttctcggaatcccgtggcttcaccaacccagccttccggcacagagaagggagggcacgtcctgaaagacaaagaggtcaaagcagagacctcgagaaacactcctgagcgagaagtggagctcctcagagacgccggaggctgcgtcaacttgggactcccctgccccgctgaatgtcagccatttaacactcagggcctagtcgccggtaggaccgccggagataggctgtgctag

SEQ ID NO: 243569 - DNA, 1488 bp, synthetic construct
  misc_feature 1..1488: note = Description of Artificial Sequence: Synthetic coding sequence
  source 1..1488: mol_type = other DNA
atgcacttttccaccgtaacccgcgatatggaggctttcactgccagtagcttatcaagccttggagctgccggtggctttcccggtgcagcttcccccggtgcagacccctacggacctcgcgaaccgcctccccctccccctagatatgacccttgcgcagctgccgcaccgggtgctcctggcccaccccctcctccacacgcctatcctttcgctccagctgcaggcgctgcgaccagcgcggctgcagagccagaaggccctggggcatcctgcgctgcggcagcaaaggcacccgtaaagaaaaacgcaaaggttgccggtgtttcggtgcagttagagatgaaggctctgtgggacgagttcaatcagctgggcacagaaatgatcgtgaccaaagctgggaggagaatgttcccgacttttcaggttaaactttttggcatggatccaatggcggattacatgctgctgatggatttcgtccccgtcgacgataagaggtatagatacgcattccattcaagcagttggctcgtggcgggaaaggccgacccagccactcctggacgagtccactatcatccagactcccccgctaagggtgcacagtggatgaagcaaatcgtgagcttcgacaagcttaaactgacaaacaacctcctggacgacaacggacacatcattctgaacagcatgcatagatatcagccccgattccatgtcgtttatgtggatcctaggaaggattcagaaaaatacgctgaggagaatttcaaaacatttgtgttcgaggagacgaggttcaccgccgtgacagcctaccagaatcaccgcatcactcagctcaaaatcgcgtctaacccatttgccaagggatttagggactgtgaccctgaggactggcctagaaaccatagaccaggcgctttacccctaatgtctgcattcgctagaagccgcaatccagtcgccagtccgacccaaccaagtgggacagagaaggatgccgctgaggcacgacgcgaattccaacgtgatgcgggtggtcctgctgtcctgggggaccccgcacatccgccacagctgctggccagagtcttatccccctcactccctggggctggcggagctggtggcctggtgccgctccctggggctcctgggggacgaccttcaccccctaacccagagctgcgcttggaggccccaggtgctagcgagcccttgcaccatcatccatataaataccccgcagcggcttatgaccattatctgggtgctaaatccagacctgcaccctatccattacccggtcttaggggacatggctatcatccacatgctcacccccatcaccaccaccaccccgtctctcctgcggctgccgctgctgccgcagccgctgctgccgctgccgcagccaatatgtactcttcagcaggggctgctccacctggttcttacgactactgcccacggtag

SEQ ID NO: 243570 - DNA, 1119 bp, synthetic construct
  misc_feature 1..1119: note = Description of Artificial Sequence: Synthetic coding sequence
  source 1..1119: mol_type = other DNA
atgcatttcagtacagtcacaagagacatggaggcattcaccgcttcaagcctgtcctctttgggcgcagcaggaggctttcccggagctgcttccccaggcgctgacccctatgggccacgagagcccccaccacctcccccacgatacgatccatgcgccgcagcagctccaggcgctccaggacctcccccacctcctcacgcgtatccctttgcacccgcagccggagcagctacctcagccgctgccgagcccgaaggacctggcgcttcttgcgccgctgccgcaaaagcgcctgttaaaaaaaacgctaaagtggccggagtctcagtgcagttggagatgaaagccttatgggacgaattcaaccagttaggaacagagatgattgtcactaaagccggaagacggatgttcccaacatttcaggtgaagctattcgggatggatcctatggccgattacatgctgttgatggatttcgttcctgtggatgacaagcgatacagatacgcgttccactcctcttcctggttggtggctggcaaggcagatcctgcaactcctggacgtgtccactaccatccagacagccctgcgaagggtgctcagtggatgaaacaaatcgtcagtttcgacaagctgaagctgacaaataatttgcttgatgataatggccacataatcctaaattctatgcatagataccagccgagattccatgtcgtgtacgttgacccacgcaaggattctgagaagtacgcagaggaaaacttcaagacattcgtgtttgaagagaccagatttaccgccgttactgcttaccagaatcatagaataacccagcttaagatcgcgtccaatccctttgcaaaggggttccgggactgtgacccggaggattggccacggaaccacagaccgggagccctgcctctgatgtccgcttttgccaggtccaggaaccctgttgcctcgcccactcagccaagtggcaccgaaaagggcctggtaaccgagggaagcggactacagccaggactgctcgacgttcttctgaagcccccatccaagaaatccgaaagcctgcgtccaccgcactgcaaggatacatag

SEQ ID NO: 243571 - DNA, 1158 bp, synthetic construct
  misc_feature 1..1158: note = Description of Artificial Sequence: Synthetic coding sequence
  source 1..1158: mol_type = other DNA
atggcggcattcttatccgccggacttggaatcctcgcccctagcgagacatatcctctccccactaccagttccggttgggagccgcgactgggctctcccttcccaagcggtccttgcacctcaagcaccggtgctcaggctgtggccgaacccactggccaaggaccaaagaatccccgtgtttcaagagtaaccgtgcaactcgagatgaagcccctgtgggaagagttcaatcagctgggaactgaaatgattgttaccaaagccggacgaaggatgtttccgccatttcaagtgaaaatcctgggaatggactcactggccgattacgcacttttaatggacttcatcccattggacgacaagcgatacaggtatgcatttcactcaagcgcctggctggttgccggtaaagccgaccccgctactcccggtagggtgcactttcaccctgatagccctgcaaagggggcacaatggatgagacagattgtgagtttcgataagctgaaattgaccaacaacctcctggacgacaacggccacattatccttaacagtatgcatcggtatcagccacggtttcacgttgtgtttgtcgaccccagaaaagactctgagcgatatgcccaggagaattttaaatccttcatattcaccgagacccagtttaccgcggtaactgcataccaaaaccatcgcatcacccagcttaaaatagcctccaatccatttgccaaagggttcagagaatccgacctggacagctggcccgtcgcgcctaggcctctgctgagtgtccccgctcgatcacactcctccttgtcaccctgtgtgttaaagggagccaccgatagagagaaggacccaaacaaagcctcggccagtacctcgaagacacccgcttggctccaccaccagctacttccacctccagaagtgctcctggccccagctacttatcggcctgtcacctaccagtcgctgtacagcggcgctccaagtcacctgggaatcccccgaacacgcccagctccctatccgttgccaaacattcgagccgaccgggaccagggagggctgccattaccagcaggcctgggcttgttaagcccaacagtggtttgcttaggaccaggacaagactcacagtag

SEQ ID NO: 243572 - DNA, 2454 bp, synthetic construct
  misc_feature 1..2454: note = Description of Artificial Sequence: Synthetic coding sequence
  source 1..2454: mol_type = other DNA
atgatggacgggcctcggtccgatgttggccgatggggcggaaacccactgcagcccccaaccactcctagccctgagcctgagcccgagcccgatggccgaagtaggagaggtggcggtcgttccttctgggcgagatgctgcggttgctgctcttgcaggaacgcagctgatgatgactggggcccagagccctccgatagccgtggtaggggctcaagctccggcactcgtagaccaggcagtcgaggctctgactcccggaggcctgtgtcaaggggaagcggggtgaatgcggcaggtgacggcacaatcagggaggggatgcttgtcgtaaacggagttgacctactgtcatcaaggtccgaccagaatagaagggaacaccacacggatgaatacgaatatgatgagctcatcgtacgtagaggacagccctttcatatgctactattactttcacgtacctacgaaagttccgacagaattaccctcgagctgcttatcggaaacaaccctgaggtcggaaagggcacccacgtaattatcccggtggggaaaggtggctcggggggttggaaagcacaggttgtgaaggcctctggccagaacctgaatttaagggtccacacaagtcctaatgccataatcggaaagttccagtttactgtgcggacacaatctgacgccggtgagtttcagctgccattcgaccctcgcaacgaaatctatatactcttcaatccttggtgcccagaagacattgtgtacgtagaccacgaggactggcgccaggaatatgtgcttaacgagagcggtagaatctactacggcaccgaggcccaaatcggcgagcgcacctggaattacggccagttcgaccacggagtgttggacgcttgcctgtacatcttagaccgaagaggcatgccatatggtgggcgaggggatccggttaacgttagcagagtaatcagcgcaatggtcaactcattagatgataacggagtgctcataggaaattggagtggcgactacagcagagggaccaatccctcagcttgggtcgggtccgtcgaaattctcttgtcttatttgagaactggctacagcgtgccatacggtcagtgctgggtcttcgctggagtcacaacaaccgtcctgcggtgcctcgggcttgctactcgaacagtgacaaacttcaatagtgcccacgatactgatactagcctgactatggacatatactttgacgagaacatgaagccattggagcacctgaatcacgatagtgtttggaacttccatgtctggaacgactgttggatgaagaggcctgacctgccctccggttttgatgggtggcaggtcgttgacgccaccccccaggagacttcttcggggatcttctgctgcgggccttgtagcgtggagtctatcaaaaatggtttagtgtacatgaagtatgacaccccctttatatttgcagaggtgaacagcgataaggtgtattggcagcgtcaggatgacgggtcatttaagatagtctatgtggaggagaaagctatcggcacactgatcgtcactaaggccatttcctctaacatgagggaggatatcacatatttgtataagcatcccgaaggcagcgatgccgaacgaaaagccgtggaaactgcggcagcacacggttctaagccgaacgtgtatgctaatcgagggagtgcagaggacgtcgctatgcaagtggaggcccaggacgccgtaatgggtcaagatctcatggtgtccgtgatgctcattaaccactcttcttccaggaggaccgtgaaactccatctgtacctgagtgtaaccttttataccggggtatcgggtaccatttttaaggaaaccaagaaggaagttgagctggcacctggggcttccgacagggtaacaatgccagtggcttataaagaatatcgacctcacctggttgatcaaggggcaatgctgctaaacgtgagtgggcacgttaaggagagtggccaagtgctggccaagcagcacacatttcgattgcgaactcctgatctatctctaactttgctgggtgcagccgtcgttgggcaagagtgcgaggttcagattgtgtttaaaaaccccctgcctgtgacactaactaacgtggtatttcgactcgaaggttccggactacaacgacccaaaattctgaacgttggtgacattgggggtaatgagactgtgacgttacgacagagcttcgtgccagtccggcctggacctcgccagctaattgcctcactcgattcacctcaactgagtcaggtgcatggagttatacaggtggatgttgcccctgcccctggagatgggggatttttttctgacgccggaggggacagccacctcggagagacaattccaatggcctctaggggtggagcatag

SEQ ID NO: 243573 - DNA, 1200 bp, synthetic construct
  misc_feature 1..1200: note = Description of Artificial Sequence: Synthetic coding sequence
  source 1..1200: mol_type = other DNA
atgcataaataccagccacgggtgcatgtaatccggaaggatttttcctctgacctttctccgactaagccagtgccagtgggagatggtgtcaaaaccttcaattttccggagacagtttttaccaccgttaccgcataccagaatcaacagatcacccggctgaagattgacaggaatcccttcgccaaagggtttcgtgatagtggaagaaataggaccgggctggaagctattatggaaacatacgccttctggaggcctcctgttcgaacccttactttcgaagacttcactactatgcagaaacagcaggcatctaagaaaaccagtcagggctataccgtcaatcagcactcatccgagaccgacgctatcgagttatacgagcgtagagtctggctaatggaaaggcggggttctaccggcacgtcacccactaccagtagcaccggcacaccatcccctagtgcttcgagccacttgctaagtccctcctgttcccctcccacttttcaccttgcacccaacacctttaatgtgggatgtcgagaaagtcagctgtgtaacctcaacctgtctgactaccctccatgcgcacgctccaatatggccgcactgcagtcgtacccaggtttaagcgatagcggatataaccggctgcaatcaggcactacctccgcgacccagccttctgagactttcatgcctcaaagaacacccagtctgatttccgggattcccaccccccctagtctcccaggaaactcgaaaatggaagcctacggtggacagttgggatctttccctacaagtcagtttcaatacgtgatgcaggccggtaacgccgcatcctcctcttctagtccacatatgttcgggggatctcacatgcaacagagtagctataacgccttctcattgcacaatccttataatctttacgggtacaacttccctacttctccacgattggccgcttcaccagaaaagttaagtgcttcccagtctactttattatgctcaagcccttcaaacggggcttttggggagcgacagtatcttccatccggtatggagcattcaatgcacatgatcagtccctcaccgaataatcagcaggcaacaaacacatgtgacggcaggcagtatggggcagtcccagggtctagcagtcagatgtctgtgcacatggtttag

SEQ ID NO: 243574 - DNA, 1809 bp, synthetic construct
  misc_feature 1..1809: note = Description of Artificial Sequence: Synthetic coding sequence
  source 1..1809: mol_type = other DNA
atgagcgagaggagacgctccgccgtcgctctgagctccagagcgcacgccttctcagtcgaagcactgattggcagcaacaagaaaaggaaactaagggattgggaggaaaaggggctggacctgtctatggaggccctgagtccagctggacccctaggcgacaccgaggatgccgctgcccacggattagagccccaccctgatagcgaacagtctacaggttctgatagcgaagtcttgaccgagcgtaccagctgcagcttttcgactcacaccgatctggcctctggtgcggctggcccagtcccagcagccatgtccagcatggaggaaattcaggtcgagcttcaatgcgcagacctgtggaagagatttcacgatattggaacagaaatgattatcacgaaagccggtcggaggatgtttcccgcaatgcgggtcaaaattaccggcttggaccctcatcagcagtactatattgccatggatatcgtacctgtggacaacaagagatatagatacgtttatcatagtagcaagtggatggtggcgggaaatgccgatagccctgttcctccgagggtatacattcacccagatagtctggcttctggagacacatggatgcgccaggttgtttcctttgacaagcttaagttgaccaacaatgaactcgatgatcagggccacattatcctgcattccatgcacaaataccagcccagagtacatgtgattagaaaggatttttccagcgatttgtcaccgaccaaaccagtgcccgtcggagatggggtaaagactttcaactttcccgaaaccgtgttcactactgtcacggcctatcagaatcagcagatcacacgcctaaagatagatcggaatccttttgccaaggggttcagggacagtggtcggaatagaactggccttgaagcaatcatggagacctatgctttttggaggccccctgtgagaacactgacctttgaggattttacgacaatgcagaaacagcaaggcggatctaccggaacttcacctaccaccagttccaccggaactccttcccccagtgcttcctcccatctgctcagcccatcatgtagcccccctacattccacctagctcctaatacctttaacgtggggtgtcgggagagtcagctgtgcaatttgaatttgtctgattaccccccttgcgcccgatctaatatggcggctttgcaatcgtatcctgggttgtccgattccggatataatcggctgcaatccggaacgacaagcgctactcaaccctcagagaccttcatgccacagagaactccttcccttatctccgggatcccaacgcctccaagtttgcctggcaattcaaagatggaagcttatgggggacagttgggatcatttccgacatcccagttccagtacgtcatgcaagccggtaatgcagcttcgtccagctcttcgccgcacatgtttggcggttctcatatgcagcagtcatcttataatgcgttcagtctgcacaacccatataatctgtatgggtataatttcccgaccagtcctagactggcagcctcaccagaaaagctgagcgctagccaatccacactcttgtgttcatctccgtccaatggtgcctttggggagaggcagtacctcccaagtggtatggaacactccatgcacatgattagcccatctccgaataaccagcaggctactaatacatgtgacggtagacagtatggggcagtgcccggatccagtagccagatgagcgtccatatggtctag

SEQ ID NO: 243575 - DNA, 762 bp, synthetic construct
  misc_feature 1..762: note = Description of Artificial Sequence: Synthetic coding sequence
  source 1..762: mol_type = other DNA
cgagttcgtaccggactggaggccatcatggaaacctacgcattttggcggccacccgttagaacactgacattcgaggatttcaccacaatgcagaagcaacaggcatcaaagaagactagccagggatacacagttaatcaacactcctccgagaccgacgcgatagagctttacgaacgacgagtgtggttgatggagaggaggggttccacaggcacaagccccacaacaagctcaaccggaacaccctcaccgagcgcttctagccacttactgagtccatcatgtagccctcctacctttcaccttgcaccgaatacctttaacgtcggatgcagggaaagtcagctgtgcaatctgaacctgtcagattaccccccatgtgcacgctcaaacatggccgctctgcagtcataccctggcctctctgactcagggtataacaggttacagtcaggcacaactagcgctacccaacccagcgagacctttatgccgcagcgcaccccaagtctgatcagcgggatccctacaccacctagcctgcctactgctcggtggaagcccactgtggcctcctggggaccattccctttgccatcctttagcatgagttgccgccaggccatgctccctcctgctccccaccaccacacttgctcaggggcagccacgtgttcccgggcaccaacaatgccaagcccttttaccaccttaacaacctgtatggacactattagccctcttcccctgggctag

SEQ ID NO: 243576 - DNA, 993 bp, synthetic construct
  misc_feature 1..993: note = Description of Artificial Sequence: Synthetic coding sequence
  source 1..993: mol_type = other DNA
ggcagaaatcggacgggcctggaggcaattatggaaacgtatgccttctggcgcccaccagtgcggactctgacttttgaagatttcaccacgatgcagaagcaacaagccagcaagaagacgtcccaggggtacaccgtgaaccagcattcttccgaaaccgatgcaattgaattgtatgaacgacgggtgtggctcatggagcggaggggttccactggcacatctcctactacgagctccaccggcactccttctccaagcgcatccagccacctcttgtccccttcttgttcccccccaactttccacttagccccaaatacgttcaacgtcgggtgtagagaatctcaattgtgtaacctgaatctgtccgactatcccccttgcgccaggtctaacatggcggctttacagtcataccccggactcagtgactccgggtataatcgcctccaatccgggactacctctgccactcagcctagcgagactttcatgcctcagcgcactcccagtcttattagtgggatcccaactccaccaagcctccctggtaatagcaaaatggaagcatacggtggccagttaggcagttttcctacttcccaattccagtatgttatgcaggctggtaacgctgcctcctcttcttcttcccctcacatgttcgggggatctcacatgcaacagtcgagctacaatgctttctcactgcacaacccgtacaatctgtatgggtacaactttcccacgagccctcgtctggcagcaagtcctgagaagctgtcagcaagtcaatccactttgttgtgcagttccccgtcaaatggcgcatttggggagcgacaatacttgcccagcgggatggagcactcaatgcacatgatatccccatcacctaataaccaacaagcaacaaacacttgcgacggtcggcaatatggagccgtcccgggatcttcctctcagatgagcgtgcacatggtgtag

SEQ ID NO: 243577 - DNA, 1347 bp, synthetic construct
  misc_feature 1..1347: note = Description of Artificial Sequence: Synthetic coding sequence
  source 1..1347: mol_type = other DNA
atggctatgagtgaattagggacccgcaaacccagcgatgggaccgtaagccatcttcttaatgtggtggagtcagaactgcaggccggtcgggagaaaggcgatccaaccgaaaaacaacttcagatcattctggaggacgcacctctgtggcagaggttcaaagaagtcacaaacgaaatgattgttacgaaaaacggcagacggatgtttcccgtgctgaagatctccgtgacaggcctggatcctaacgccatgtattcgctactgctcgattttgtcccaaccgatagtcacagatggaagtacgtgaacggtgagtgggtcccagccggtaaacctgaagtgagctctcattcctgtgtgtatatacaccctgactcacctaattttggcgcacattggatgaaagctcccattagctttagcaaagtgaaactgacgaataaactaaatgggggagggcagattatgttgaactccctccacaagtacgagcctcaggtacatattgtgcgcgtgggctctgcccatagaatggtgactaattgcagcttcccagaaacccagtttattgccgtaacggcttaccagaatgaggaaatcactgcactgaagataaagtacaacccgttcgctaaagcttttctcgatgcaaaagaacggaatcacctgagagatgtgcctgaggcaattagcgagtcacagcatgtgacttactctcacctgggcggatggattttttcaaaccccgacggagtgtgtactgcgggaaactccaactatcaatacgccgctccgctgcccctgcccgctcctcatacccatcatggttgcgaacactattccggcctgcgtggacacagacaagcgccatacccatctgcatacatgcatcggaatcattcaccttctgttaacctcatcgaatcatccagtaacaatctccaggttttctccggaccagatagttggacgagcctttccagcacccctcatgcttctatcctgtccgtaccccacactaacggacctatcaacccaggaccatccccgtacccgtgcttatggaccatctccaacggggcagggggacccagtgggcctggacctgaagtccacgcaagtacccccggagcttttctgctgggtaaccccgcagttactagtccaccctccgtattgtccacccaggctccaaccagcgccggagtggaggtgttgggggagccatctctgaccagtattgccgtgtctacgtggaccgcagtggcctctcatccattcgcaggttggggaggccctggtgccggtggtcatcactctccctcctcactcgacggatag

SEQ ID NO: 243578 - DNA, 978 bp, synthetic construct
  misc_feature 1..978: note = Description of Artificial Sequence: Synthetic coding sequence
  source 1..978: mol_type = other DNA
atgatcgtcaccaaaaatggcaggagaatgttccccgtgctgaagatatctgtgactggcctagaccctaatgccatgtactccctgctgctagactttgtccccactgacagccatcgctggaaatacgttaatggtgaatgggttccagcaggaaagccggaagtgagttcccactcatgtgtgtacatccaccctgactcccctaacttcggcgcacactggatgaaggccccaatatcttttagcaaggtcaagctgaccaataaattgaacggcggtggacagattatgctgaattcactgcacaagtatgagccacaggtgcacatagttcgcgtgggctctgcgcataggatggttactaattgtagcttccctgagacacaatttatcgccgtgacagcatatcagaatgaggaaatcaccgccctgaagattaagtataatccattcgcaaaggcttttcttgacgctaaagagcgcaatcacttacgggacgtgcccgaagcgatcagcgagagtcagcacgtaacttacagtcacctgaatctcatcgagagttcctctaataatctccaggttttttcaggcccagactcgtggacgtcactgtcatctactccacatgcttccattctgtcggttccgcacactaacggacccatcaacccgggacccagcccatatccctgtctctggaccatatctaatggcgctggcggaccatctggcccaggacccgaagtgcatgctagtactcctggggcatttctcctgggcaatcctgccgtcacctccccaccatctgtgttatctacccaggctccaacgagtgcaggagtcgaggtgttgggagagccatctctgacttctatagccgtgagcacctggaccgctgtcgcctcccacccttttgccggatggggtggacctggagccggagggcatcactctccaagcagtctggacggctag

SEQ ID NO: 243579 - DNA, 957 bp, synthetic construct
  misc_feature 1..957: note = Description of Artificial Sequence: Synthetic coding sequence
  source 1..957: mol_type = other DNA
tgaaggatgttccctgtgcttaagatcagcgtgaccggactcgaccccaatgccatgtactcactcttgctcgatttcgttcccacggatagccacaggtggaaatatgtgaatggcgagtgggtccctgctggcaaaccagaagtgtcctctcattcctgcgtctacatccatcccgactcacccaactttggcgctcactggatgaaggcacctatcagcttcagtaaagttaagttgacaaacaaacttaacggagggggtcaaataatgctgaatagcctgcacaagtatgagccacaggtacacattgtgagagtggggagtgctcataggatggtcacaaattgctctttccccgagactcagtttatcgctgtaacagcctatcagaatgaggaaataaccgcactcaagatcaagtataatccttttgctaaagcgttccttgacgccaaagagcggaaccacctgcgggacgttccggaggctatcagcgaatctcagcatgtcacttacagccatctgaacttaatagagagttcttcgaataaccttcaagtgttctccggccctgacagctggacgtcattgagttcaactccccacgcaagcattcttagcgtgccccatacaaacgggccaattaaccccggaccctccccctatccttgtctgtggacgatcagcaacggtgccggagggccatccggtcctggaccagaggtccatgcttctactcctggagcttttctgctcgggaatccagccgtcacctctcccccatcggtgttaagcacgcaagccccaacgtctgcaggagtcgaggtgctgggggagccatcactgacctctattgctgtctctacatggacagctgttgcctctcacccctttgccggatggggcggtccgggtgccggtggacatcattctcctagttccctggacggatag

SEQ ID NO: 243580 - DNA, 846 bp, synthetic construct
  misc_feature 1..846: note = Description of Artificial Sequence: Synthetic coding sequence
  source 1..846: mol_type = other DNA
taaaaagaacgagagctcaattggttctacagacgtcagcgggttctgttcgcccacgtgtaccctacattcaccaacacaagctgcctgtgtaaatgcaagatcactgcactaaagattaagtacaatcctttcgccaaggcgttcctcgacgctaaggagagaaatcacttgagagatgtgccagaagcaattagcgaatcccagcacgtgacttacagccacctggggggttggatattcagtaaccctgacggggtgtgtacagccggtaatagcaactatcagtacgccgctcccctacccctgcctgctccccacacccaccacgggtgtgaacattattctggcctgagggggcacaggcaagctccatatccctcagcttacatgcacagaaatcacagcccatctgtcaacctgattgagagctcctctaacaatctacaggttttttccggacccgatagctggacatccctatccagcacaccccacgctagtatcctgtccgtgccccatactaacggtcccataaacccaggcccatccccttatccctgcttgtggacaattagcaatggagcaggcggtccaagcgggccaggacctgaagtgcacgctagtactcccggagcctttttgctggggaatccggcagtgacttccccccctagtgtcctcagcacacaggctccgacatcagccggagtagaggtgctaggagagcccagtctgacctctatcgctgtgtctacctggaccgctgtggcctcacacccctttgccggatggggaggtccaggagcgggagggcaccacagtccatccagtctggacgggtag

SEQ ID NO: 243581 - DNA, 1344 bp, synthetic construct
  misc_feature 1..1344: note = Description of Artificial Sequence: Synthetic coding sequence
  source 1..1344: mol_type = other DNA
atggaattcacagcatcacctaagccccaactgtcctcgagggctaacgctttctctattgccgcactaatgtcaagtggcggatcaaaagagaaggaagcgaccgaaaacactataaagccacttgagcaattcgtggaaaagtcaagctgtgcccagccactcggcgagttgactagcctggatgcacacggagagttcggaggaggctccggcagtagtccctctagctctagcctatgtaccgagcctttgataccaactacccccatcatcccctctgaggaaatggcaaaaatagcttgttcattagaaacaaaggagctttgggacaagtttcatgagctcggaaccgagatgatcataaccaagagcggacgtcgcatgttccccacgattcgcgtgtctttctcaggggtcgacccagaagcgaaatacatcgtgctgatggacatcgtgcccgtggataataagcgctaccggtacgcctatcataggtctagttggctggtagccggaaaggcagacccaccgctcccggcacggttatatgttcacccagattcccccttcaccggagaacagctgcttaagcaaatggtgtcttttgaaaaggtcaagctgactaataatgaactggatcaacatggccatattattctgaacagcatgcataagtaccagcctagagtgcacatcataaaaaaaaaggatcacactgcttccctcctgaaccttaaatcagaagagttccggacattcatctttcccgaaaccgtgttcacagctgtcacagcatatcagaaccaactgataaccaagctgaaaatcgatagtaacccatttgcaaaaggcttccgggattcttcaagactgacagacattgagcgcgagagcgtggagtccctcattcagaagcatagctacgctcgcagcccaataaggacttacgggggagaggaggacgtgctcggagatgagtcccaaacgactcctaaccgcggttccgcttttaccacaagtgacaacctctctctctcctcatgggtgtcgtcgtcatccagttttccaggctttcagcatccacagtccctgacagctctgggcactagtacagcctccatcgcgactcccatcccgcaccctatccagggctccctgccaccatattccagactggggatgcccctgactccaagtgcaatcgccagcagcatgcagggcagcggaccaacgtttccctcttttcacatgcccagataccatcattactttcagcagggcccttatgctgccattcaggggctgcggcattcatccgcagtgatgacaccattcgtatag

SEQ ID NO: 243582 - DNA, 1608 bp, synthetic construct
  misc_feature 1..1608: note = Description of Artificial Sequence: Synthetic coding sequence
  source 1..1608: mol_type = other DNA
atggggatagtggaaccaggttgtggggatatgctgaccggaaccgagcctatgcccggatcagatgagggccgtgcgccaggggctgatccccagcatagatacttttacccagagcctggggcacaggatgccgacgaaaggagaggaggaggtagcctaggatcgccctatcccggaggcgctctggtacccgctcccccatcgagattcctcggagcatacgcgtatcctcccagaccacaggctgctggttttcctggtgccggagaaagctttcccccaccagcagatgccgagggttaccaacccggagaaggctatgctgcacccgacccccgagccggactgtatccgggtccaagagaagattacgccttgccagccggtctggaggtgtctggcaaactgcgagtggccttgaataatcatctgctctggtccaagtttaatcagcatcagacagagatgattatcaccaaacaaggtagaaggatgttccccttcctgtctttcaccgtagctggactggaacccacaagtcattatcggatgttcgtggatgttgtgctcgtggatcagcaccactggcgataccagtccggtaaatgggtgcagtgcgggaaggctgaaggctccatgcctggcaacaggctgtacgtgcacccagacagtcccaacacaggcgcacactggatgagacaagaagttagtttcgggaagttgaagctgacaaacaacaaaggagcttcaaacaatgtgacccagatgattgtcctacaatcgctgcacaaataccaaccacggcttcatatagtagaggtcaatgacggcgagcctgaggccgcttgcaacgccagtaacacccatattttcacttttcaggagactcagtttattgccgttacagcgtatcaaaatgctgaaataactcagttaaagatcgataataatccatttgccaaggggttcagggagaacttcgaatccatgtacacctcagttgacacgagtattccatccccacctggtcctaattgtcagttcctgggcggagatcactactctcccctgttaccgaatcagtatccagtgccctcgagattttacccagacttgccaggccaggctaaggatgtcgtcccacaagcctattggctgggcgctccaagggaccatagttacgaggccgaattcagggccgtgtctatgaaacctgctttcttgcccagcgcgccaggccctacgatgtcctattacaggggacaggaggtgctcgctcctggggctggttggccagtggcaccacagtatcctccgaagatggggcctgcgagctggtttcgaccgatgaggacgctgcctatggaaccagggccagggggaagtgaaggcagaggcccagaagatcaggggcctcctttggtatggacagaaattgcacctatccggcctgagagctctgacagcggcctgggagagggtgactcgaagagaagaagggtcagcccctacccctcaagcggcgattcttctagccccgcaggtgcgccatcaccattcgacaaggaggccgaagggcagttctataactattttccaaattag

SEQ ID NO: 243583 - DNA, 1203 bp, synthetic construct
  misc_feature 1..1203: note = Description of Artificial Sequence: Synthetic coding sequence
  source 1..1203: mol_type = other DNA
atgttcccttctgtccgcgtgaaggttaaaggtctggacccagggaaacagtatcacgttgccatcgatgtagtacctgtggactccaagcgatatcgctacgtgtaccactctagtcagtggatggtggcaggtaacacggaccacctctgtataatccctcgcttctacgtgcatcccgactccccatgttcaggtgagacctggatgcggcagattattagcttcgatcgcatgaaactaacgaacaatgaaatggatgacaagggtcatattatccttcagagtatgcacaaatataagcccagggtgcacgtcatcgagcagggatcttcagtggacttgtcgcagatccagtccctgcccaccgaaggggtgaaaacattttcttttaaagaaaccgaattcacaaccgtcacggcttaccaaaatcagcagattaccaagctgaagatcgaacgtaacccttttgcaaagggcttccgcgacacgggaaggaacaggggggtactggatggtctgctggaaacatacccatggcggccatcattcacgttggacttcaagacctttggtgctgacacccagtctgggtctagtggatcttctcctgtgaccagcagtgggggagcaccaagccccctgaatagcctcctttcaccactgtgctttagtccaatgtttcatctgccgacgtctagtcttggcatgccatgcccagaggcctacctgccaaacgtgaacctacctctttgctataagatatgtccgacaaatttttggcaacagcaacccctggtgttgcctgcgcctgagcggctggctagtagtaattcgtctcagagtctcgctcctctgatgatggaagtgccgatgctgtcttcattaggcgtgaccaatagtaaaagtgggtcgtccgaagacagctcggaccagtacttgcaagccccaaactctaccaaccagatgctgtacgggcttcaaagccccggtaacatcttcctccccaactctataacccctgaggccctgagttgctctttccacccttcatacgacttttaccgatacaacttcagcatgccgtcccggctcatctctggtagcaatcatctgaaggtcaatgacgactcccaggtaagcttcggtgaaggtaagtgcaaccacgtgcattggtatcctgcaattaatcattacctttag

SEQ ID NO: 243584 - DNA, 1563 bp, synthetic construct
  misc_feature 1..1563: note = Description of Artificial Sequence: Synthetic coding sequence
  source 1..1563: mol_type = other DNA
atggccctatcatcacgcgctcgagcattcagcgtggaagccctagtaggaagaccaagtaaacgaaagctccaggatcccatacaagcagagcagcccgagctgcgagagaagaagggaggagaagaggaggaagagcgtcgcagctcagccgcaggaaaaagtgagcctctagaaaaacagccaaaaacagagccttccactagtgcctccagcggatgtggaagtgactcaggctacggaaacagctccgaatccctggaggaaaaagacatacagatggagcttcagggcagcgaactttggaaacgctttcatgatattggaaccgagatgatcatcacaaaggcgggtaggaggatgttcccttccgtacgtgtgaaagtcaaggggttggacccgggtaagcagtatcacgtggctatcgacgtggttccagtagattccaaacgttacaggtatgtgtatcactctagccagtggatggtggccggaaataccgatcacctctgtatcatcccccgattttacgtgcaccctgattctccttgttctggcgagacctggatgcggcaaatcataagcttcgataggatgaaactgactaacaatgaaatggatgacaagggccatattatcctccagtcgatgcataagtataaaccacgcgtccacgtcatcgagcaaggcagttccgtggaccttagtcagatccagtccctgcctacagagggagtgaagaccttctccttcaaagaaaccgaattcacaacagtgaccgcataccagaatcaacagattacaaagcttaagatcgagaggaacccattcgcaaagggcttcagagacactgggcgtaatcgaggtgtgcttgacggcttattggaaacttacccatggcgacccagtttcacactggactttaaaacattcggagctgacacacagtcgggatcctcaggctcctctccagtaacgtcttcggggggtgcccctagtcccctgaactcattgctctctcccctctgcttttcccccatgttccatttacccactagctcgctgggcatgccttgtccggaggcataccttcccaacgtcaacctgccactatgctataaaatatgcccaacaaatttttggcagcagcagccgctagtactgccagctccagagcggctggcttcatctaacagctcacagtccctcgcaccactaatgatggaggtccctatgctttcaagcctgggggtcaccaacagcaaaagtggctccagcgaggacagttccgaccagtatctgcaggcgcctaactccaccaatcagatgctttacggactgcaaagccccggaaacatcttcctgcctaattcaattactcccgaggccctaagctgcagcttccacccttcttacgatttctaccgctacaacttctccatgccgtccaggctcatctctggctctaaccatctgaaggtcaacgacgacagccaggtttccttcggggagggaaaatgcaaccacgtgcactggtatccagctataaaccattacctgtag

SEQ ID NO: 243585 - DNA, 1563 bp, synthetic construct
  misc_feature 1..1563: note = Description of Artificial Sequence: Synthetic coding sequence
  source 1..1563: mol_type = other DNA
atggctctgtcatctcgggcacgcgctttcagtgttgaggcactagtgggacggccatccaagagaaagctccaggatcccattcaagccgagcagccagagctacgcgagaagaaaggtggcgaagaggaggaagagcggaggtcatccgccgctggcaaaagcgagcccttagagaagcagcctaagactgaacctagtacttcagcttcgtccgggtgcggaagcgactctggatacggtaattcgagtgagagcctggaagagaaggatatccagatggagctgcagggctctgaattgtggaaaaggtttcatgacatcgggacggagatgatcattactaaagccggacgcaggatgttccctagtgtaagagttaaagtcaagggcctcgatcccggtaagcagtatcacgtggcaatcgacgtggtccctgtggactccaaacggtaccggtatgtctaccactccagtcagtggatggtggcaggaaacacagatcacctgtgtataatccccagattctatgtgcacccagatagtccttgtagtggagaaacttggatgagacaaattatttccttcgacagaatgaagcttactaataacgagatggacgataaaggacatattatcttgcagtctatgcacaagtacaagccccgtgttcacgtcatagagcagggcagttcggtggatttgtctcagattcagtcactgccaactgaaggtgtgaagactttcagctttaaagagacagaatttactaccgtgaccgcataccagaaccagcaaatcaccaagttgaagatcgaaaggaatccatttgcaaaggggtttcgtgacactgggagaaatcgcggagtccttgatggccttctggaaacctacccttggcgtccgagcttcactctagacttcaaaaccttcggtgccgacacacagtccggttcatccggctcctcacctgtgacaagcagtggcggagctccgagtcccttgaacagcctcctgagtcctctttgtttcagcccaatgtttcacctgcctaccagcagcctgggtatgccctgcccagaggcgtacctccctaatgttaaccttccattgtgctataagatctgcccaacaaatttttggcagcagcagccccttgttctgcccgctcctgagcggcttgcaagttccaacagcagccagtccctggccccactgatgatggaagttcctatgctgagctcgctgggtgtgaccaattcaaagtctggcagcagtgaggactccagcgaccaatatctccaagcccctaattccacaaatcagatgctctatggattgcagtcccctgggaacatctttttgcccaattccattacccctgaggcactgtcttgttcttttcatccctcgtatgatttctatagatacaacttctcaatgccatccaggctcatctccgggtccaatcatctgaaggtcaatgatgattcccaagtaagcttcggagaaggcaaatgcaaccacgtccactggtaccccgcaataaatcattacctgtag

SEQ ID NO: 243586 - DNA, 1203 bp, synthetic construct
  misc_feature 1..1203: note = Description of Artificial Sequence: Synthetic coding sequence
  source 1..1203: mol_type = other DNA
atgttcccctctgtaagggtgaaagtgaaaggacttgatcccggaaaacagtaccacgtggctatcgatgtcgttcccgtggattctaaacgctataggtatgtgtatcacagcagtcagtggatggtcgccggaaatactgatcatctatgtattattccaaggttctatgtacatcctgactcaccatgtagcggcgaaacctggatgaggcagatcatttccttcgacaggatgaaactcaccaataacgagatggacgacaaaggccacattatcctgcagtcaatgcacaaatacaaaccaagagtgcatgtgattgagcagggttctagcgtggacctgtcccagatacagtctctccctactgagggcgtcaagacatttagcttcaaggagaccgagttcactaccgtgaccgcctatcagaaccaacagatcactaagctgaaaatagaacgaaatcccttcgcaaaggggtttcgggacacaggtcggaaccggggtgtactggatgggttgctcgaaacctatccgtggcgtcctagctttaccttggactttaaaacctttggagcagatacccaaagcggctcttccggaagttcaccagtcacctccagcgggggagcaccaagtccgctgaactccctgctgtcaccactctgctttagccccatgtttcatctccccacgtcgtctctgggcatgccttgtcccgaggcctacttgcccaatgtgaacctacctctttgctataaaatttgtccaactaatttttggcaacagcagcctctcgtcctgccagccccagaaaggctggccagttcaaacagttcgcagtctctggcccctctcatgatggaggtacccatgctgtcctccctgggcgtcactaacagtaaaagcggcagctccgaggactctagtgaccagtacctgcaagctcccaactcaaccaatcaaatgttgtacggtttgcagtcccctgggaatatctttctgcctaattcgattacaccagaggccctcagctgttcattccacccctcttatgacttttaccgttacaatttcagcatgccttcccggctgataagtggaagcaatcacctaaaggtcaacgacgactctcaagtgagcttcggggaggggaagtgcaatcacgtgcactggtacccagctataaaccactatctgtag

SEQ ID NO: 243587 - DNA, 2232 bp, synthetic construct
  misc_feature 1..2232: note = Description of Artificial Sequence: Synthetic coding sequence
  source 1..2232: mol_type = other DNA
atgagtctgagcatgagagaccctgtgatccctggcacctccatggcctatcatccctttctccctcaccgggctccagacttcgccatgagcgccgtgctcggccatcagccacccttttttccggctctgactttgccgcctaacggagccgcagctctgtcgctccccggtgctctggctaaacccattatggatcagttagtgggggctgccgaaactggaatcccctttagtagccttggaccacaggcccacctgcgccctctaaaaacaatggagcctgaagaggaagttgaggatgacccgaaggtgcacctcgaagctaaggaactgtgggaccaattccataaaagggggaccgagatggtgatcaccaaaagcgggaggaggatgttccctcctttcaaggtgagatgcagtggcctagataagaaagccaaatacatccttctaatggatattatcgccgcagacgattgccgttataagttccataattctagatggatggtggcaggcaaggccgaccccgaaatgcccaaacgaatgtatatccatcctgactcccccgctactggcgagcagtggatgtccaaggtcgtgacctttcacaaactcaagctgaccaacaatatatcggacaagcacggattcacgctcgccttcccctccgaccatgccacttggcagggtaactactcatttggcacgcagactattctgaacagtatgcacaagtatcagccgaggttccacatcgtcagggcaaatgacattttgaagctaccatactcaacctttaggacgtatctattccccgaaactgaatttatcgccgtgacagcctatcagaacgataagatcacccagctcaaaatcgacaacaaccctttcgccaaagggtttcgcgataccggaaacggccgacgggagaaaaggaagcaacttacactccagagtatgcgcgtgttcgatgaaagacataagaaggaaaacggtacctctgacgagagtagttccgagcaggcggctttcaattgcttcgcccaagctagttcccccgcagcaagtacggtgggaacgtcaaatctgaaggacctgtgcccgagtgagggcgaaagtgacgccgaggcagagtccaaggaagaacacggaccagaagcttgcgatgccgcaaagatttccactacgacatcggaagagccttgcagagataaaggcagcccagctgtgaaggcccacctgttcgcagctgaaaggccgcgagacagcggccgactggataaagcgagtccggacagtagacatagccccgcaaccattagtagcagcaccaggggcctgggagccgaagaaaggaggtcccccgtgcgggagggcaccgcaccagccaaggtggaagaggccagagctctgcccggaaaggaggcctttgccccactaactgtccagactgatgccgcagctgctcacctggcccaaggccctctgcctggtctcgggtttgccccaggtctggctggtcagcagttcttcaatggccacccactctttctgcacccctcccagttcgccatgggtggagctttcagctccatggctgctgccggaatgggacccctgctcgcaactgtgagcggggcaagcaccggagtgtcaggtcttgattctaccgctatggcctcggctgcggcagcccagggcctatctggggcatccgcagccacgttgccgttccatttgcagcaacatgtgttggcctctcagggactcgctatgagccctttcggcagtctcttcccctacccttacacatacatggcggctgccgcagccgctagttccgctgctgcctcttcatctgtgcacaggcatccatttctgaatctcaataccatgcgcccacgcctgaggtactccccttacagtatccccgtgccagtccccgatggtagtagtctgttgaccaccgctctcccttctatggcagcggcagctggacccctggacggaaaggtggcggcattagctgcgtctccagcttctgtggccgtggactctggtagtgaactgaactcaagatcttcaactctgtcgtcaagctcgatgagcctttcacctaagctctgtgccgagaaggaggctgctaccagtgagctgcaaagcattcagagactggtctccggcctggaggcaaaaccagataggagtcgaagcgcctccccatag

SEQ ID NO: 243588 - DNA, 2172 bp, synthetic construct
  misc_feature 1..2172: note = Description of Artificial Sequence: Synthetic coding sequence
  source 1..2172: mol_type = other DNA
atgagccttagtatgcgcgaccctgtaatccctgggacatcaatggcctaccacccctttctcccgcatcgagctcctgatttcgccatgtcagccgtgctgggacaccagccgccattctttcccgctctgaccctgcctcccaacggagctgcggcactttcactaccgggagccctggccaagcctatcatggatcagctggtgggcgctgctgaaactgggatccccttctcttctctcggacctcaagcccacctccggccactcaaaaccatggaacctgaggaagaggtcgaggatgaccccaaagtgcacctggaggccaaggaactgtgggaccagtttcataaaaggggaacggagatggtgattaccaagtctgggagacgtatgttccctccatttaaggtccgctgctcaggcctcgacaaaaaggcgaagtacatcctcctgatggacattatcgcagccgatgattgtcgctataaattccataacagcagatggatggtcgcaggcaaggccgatccagaaatgcccaagcgcatgtacatccatcctgacagtccagccactggcgaacagtggatgagcaaagttgtcacatttcacaagctcaagctcaccaacaatatctccgacaaacacggcttcaccatcttgaattctatgcataaatatcagcccagatttcatattgtcagagcaaatgacatcttaaagttaccttattctacatttaggacatatctgtttcccgaaaccgaatttatcgccgtgacagcctatcagaatgataaaatcacacagctcaaaatagataataatccttttgccaagggttttagggatacgggcaacggccgtcgggagaagcgcaagcaactgaccctgcagtcaatgagggtgttcgatgagaggcataagaaggaaaacggcacgagcgatgagtcttcaagcgaacaggctgccttcaattgtttcgcccaggcaagttcacctgccgcatccacggtggggacatcgaacctgaaagacttgtgtcccagcgaaggggagagtgacgcagaggctgaatccaaggaggaacacgggcctgaagcttgtgacgccgctaaaatctctactacgacatcagaggaaccctgtagagacaagggctcaccagcggtaaaggcacacctgttcgcagctgagcgtccaagagatagcgggcgtctggacaaagcatcgcctgactctcgtcattcacccgctaccatcagttcgtccacccgaggcctgggcgctgaggagaggcgttctccagttcgcgagggtaccgctcctgctaaagttgaggaagccagagccctgcccggaaaagaagcgtttgctccactaaccgtccagactgatgccgcagccgcacacctggcacaggggcctttgccgggtctcggcttcgctcccggactcgcaggccagcagttttttaatggacatccgttattcttgcaccctagtcaatttgcgatgggcggagccttcagcagcatggccgctgcaggcatggggcctctgctggccacggtgtctggagcatccactggggtctctgggctggactccaccgccatggctagtgcagcggcagcacagggcctatccggagcaagtgcggcaactttaccattccacctgcagcagcatgtccttgcttcacagggcctggctatgtccccttttggtagccttttcccttacccatacacatacatggctgcggctgcagcagcctcaagcgcagctgccagctccagcgtccatagacatcctttcctcaatcttaacacaatgaggcccagactgcgatacagcccctactccataccagttccggttcctgacggttcgtcactcttgactacagcgctgccttcgatggcagcagccgcagggcctttggatggaaaagtagcagccttggctgcttcccccgctagtgttgccgtcgactcagggagtgagctcaacagccgaagcagcacactgagttctagctcgatgagtctttctccgaagctttgtgccgagaaggaggcggcaaccagcgagttgcagagcatccaaaggctggtttcaggcctggaggctaaaccagaccggtctcggagcgcttccccatag

SEQ ID NO: 243589 - DNA, 1803 bp, synthetic construct
  misc_feature 1..1803: note = Description of Artificial Sequence: Synthetic coding sequence
  source 1..1803: mol_type = other DNA
atgtccctgtcaatgcgtgaccccgtcatccccggaacctccatggcgtatcacccgtttcttccccacagagctcctgactttgcaatgagtgctgtcctgggtcatcagccacccttctttcccgctctgacactgcctcccaatggcgctgccgctctctcattaccaggcgctcttgcaaagcctattatggatcagttggtcggtgcagccgagaccggcatccctttttccagtttggggcctcaggcccacttgcgcccattgaagaccatggaacccgaggaggaggttgaggatgatccaaaagtgcacttggaggccaaggaactctgggatcaattccacaaaaggggcaccgaaatggtgataaccaaatccggacgaagaatgttcccccctttcaaagtgagatgtagtggtttggacaagaaggcaaagtatattctgctgatggacattatagcggcagacgactgtcgatataagttccacaacagccgctggatggtggcaggtaaggcagaccccgaaatgcctaagcgaatgtacatccatcccgattctccagccactggagaacagtggatgagtaaggttgtcacctttcacaagctgaaactgacaaacaatatttctgataagcatggattcaccctggcttttcctagtgaccatgctacttggcaaggaaattacagctttggaacacagactatattgaacagcatgcataaatatcagccgagatttcacattgtcagggccaacgacatactgaagctcccgtactcaacatttaggacataccttttcccagagaccgaatttatcgccgtgacagcttatcaaaacgacaagattacccagctgaagatcgataacaatcctttcgccaaaggctttcgcgataccggcaatggccgacgggagaagagaaagcagctcacccttcagagcatgcgggtgttcgatgaaaggcataaaaaggagaatggtacctctgatgagagctctagcgagcaggctgcattcaactgttttgcccaggcaagctctccagccgcttccacagtaggcacttcaaacctgaaggatctctgtccttccgagggcgaatccgatgcagaggcggaaagtaaagaggaacacggcccagaggcctgtgacgccgcaaagatttctaccacaacgagcgaagagccatgccgcgacaaaggtagtccagcagtgaaggctcatctctttgccgctgagcggcctcgtgactcaggaaggcttgacaaggccagtcccgactcaaggcacagccctgctacaatatccagttctaccagggggctaggcgcagaagagagacgatcaccagttcgtgagggcacagcacccgctaaggtggaagaggcacgagccctccccggaaaggaggccttcgctcccctgactgtgcagacagacgccgcagctgccgcagcctcaagtagcgtccacaggcatccattcttgaatctcaatacgatgaggcccagactgcgctattcaccgtactcaatcccagtgcccgtgcccgatggaagttctctgctgactaccgcactggccgcaagcccggcttccgtcgccgttgacagcgggtcagaactgaatagcaggtcttcaacactctcttcctcttctatgagcttgagcccgaagctttgtgcagagaaggaagctgctacctctgaactccagtctatccagcgactagttagtggtctggaagccaaaccagacaggtcacggagtgccagcccatag

SEQ ID NO: 243590 - DNA, 1638 bp, synthetic construct
  misc_feature 1..1638: note = Description of Artificial Sequence: Synthetic coding sequence
  source 1..1638: mol_type = other DNA
atgctgcaggacaaagggctgtccgagagcgaagaggcttttcgcgctcccggaccagcactcggcgaggcctctgcggctaatgcacccgaacccgcattagctgcgccaggcctgagcggtgccgcactggggagtccaccaggccctggcgctgacgtggtggcagcagccgcagcagagcagaccattgaaaatataaaagtgggtctgcatgaaaaggagctgtggaagaaatttcacgaagcagggacggagatgatcatcacaaaggccggacgccgtatgtttccttcctataaggttaaagttaccggcatgaatccaaagactaaatatattttgctcatagacatcgtgcccgctgacgatcataggtataaattctgcgataacaagtggatggtggcaggcaaagcagaacccgcaatgcctggccgactctacgtgcaccccgattctcccgctacaggagctcattggatgagacaactagttagtttccaaaagctgaagctgaccaacaaccatctggacccgtttggtcacattatcctgaacagtatgcacaagtaccagccacgcctgcacattgtcaaggcagacgaaaacaacgcattcggatctaaaaacactgcattctgtacacatgttttccccgagacatccttcatctccgttacatcttatcagaaccacaagattacccagctgaagattgagaacaatccattcgccaaaggattcaggggcagtgacgatagtgacctcagagttgccagactccagtctaaagaatacccagtgatctcaaagtccatcatgaggcaacgacttatatccccacagctgagcgccacccctgacgtcggccctctgctggggacccatcaagctctacaacactaccaacatgaaaatggtgctcacagtcaattggcggagcctcaagatctccctctctcaacttttccgactcagcgcgatagctcactgttttaccactgtcttaagcgcagagatggaacccgccatctcgatttgccttgtaaacggtcatacctggaggccccatccagtgttggagaggaccactacttccgctcgccgccaccctatgaccagcagatgctttcaccctcttattgcagcgaagtcactcccagagaggcctgcatgtattccggctcaggccctgagatagccggagtctctggggtggacgacctcccaccaccacctttaagctgtaatatgtggacctccgtttctccctatacttcttattcggtgcagacaatggagacagtgccttaccagccatttcccacccactttaccgccactactatgatgcccaggttgccaactctctccgcccagtctagccagccgcctggaaacgcacactttagcgtatataaccagctgagccagtctcaggtacgcgaacgtggaccttcggctagcttcccgagggaacgcggtctcccccaagggtgcgaacggaagcctccttctccccatttgaatgcagctaacgaattcctctacagccagaccttcagcctctctagagaatccagcctccagtaccatagcggaatggggaccgtcgagaattggaccgacggctag

SEQ ID NO: 243591 - DNA, 1641 bp, synthetic construct
  misc_feature 1..1641: note = Description of Artificial Sequence: Synthetic coding sequence
  source 1..1641: mol_type = other DNA
atgctccaggacaaaggactgagcgaatctgaggaggcttttagagctcccggacctgcactgggcgaagcctcagcagcgaacgctccggaacccgctctcgcggctcccggactctcaggagccgctctcggaagtcccccagggcctggggcagatgttgtagctgccgctgctgctgagcagaccattgagaacatcaaggtcggactccacgagaaggagctctggaaaaagtttcacgaagccggtactgagatgattattacgaaggctggacgacgaatgtttccctcttacaaagtgaaagtgaccggcatgaatcccaagacaaagtatatactcctgatcgatatcgtgccagccgacgaccaccggtataagttctgcgataacaaatggatggttgcagggaaggccgagcctgccatgccgggtaggctctatgtgcacccagacagtccagcaacgggggctcattggatgaggcagctcgtctccttccagaagctcaaactcaccaataatcacctagaccctttcgggcatattattctgaatagcatgcacaagtatcagccacgcctccatatcgtgaaagccgacgagaacaacgccttcggcagtaagaacaccgccttctgcactcatgtgttcccagagacgtccttcatctcggttacaagctaccagaaccataaaataacgcagctgaagatagagaataatccttttgctaagggctttcgaggctccgacgacagcgatctgcgcgtcgcgaggttgcaaagtaaggagtaccctgtaattagcaaatcaattatgagacaaagattgattagtccacagttatcagcgacccccgatgtcggcccactgcttgggacccatcaagccctgcagcactaccagcacgagaatggggcacatagccagctggccgaaccacaggacttacccctgtctactttcccaacacagagggactcgtcacttttttaccattgcctaaaaaggcgtgccgacggtactcgacacctggacttgccatgtaaaagaagttacttagaggccccttcgtcggtgggagaggatcattatttcagaagcccacctccctacgaccaacagatgctcagcccctcttactgtagtgaggtaaccccaagggaggcctgcatgtactcaggctcaggacccgaaatcgccggagtcagcggagtcgatgacttaccgcctcccccactgagctgtaatatgtggacatcagttagcccttacacctcctactctgtgcagaccatggaaacagtgccataccagcctttccctacccacttcactgcaacaacaatgatgcccaggctgcctaccctgtcagcccaaagttcccaaccgccagggaacgcccactttagtgtatataatcagctttcccaatcccaggttcgggagagaggcccaagtgcctctttcccacgcgaacgaggactcccccaagggtgtgaaagaaagcctccttccccccacctcaatgccgctaacgagtttctatatagccagaccttctccctttctagggagtcttcgttacagtatcactctggtatgggcacagtcgagaactggactgacggctag

SEQ ID NO: 243592 - DNA, 1557 bp, synthetic construct
  misc_feature 1..1557: note = Description of Artificial Sequence: Synthetic coding sequence
  source 1..1557: mol_type = other DNA
atggctgacgccgacgagggcttcggcctagcccataccccactggaacctgacgctaaggacctgccttgcgacagtaagccagagtccgcacttggggcaccgagtaagtcaccatcttccccccaggccgcatttactcagcaagggatggagggtatcaaagtttttctgcacgagcgagagctctggttgaagtttcatgaggtgggcaccgagatgattataactaaggcaggccgtaggatgtttccaagttacaaggtaaaggttaccggactgaatccaaaaaccaagtacatccttcttatggacatcgtgcccgcagacgatcatcgttacaagttcgctgataataaatggagcgttacagggaaagcggaaccagcgatgccgggacggctctatgtccatccagacagtccagccacaggcgctcattggatgaggcagttggtgtcgttccagaaactcaagttaactaataaccacttggatcccttcggtcacattatactgaattccatgcacaagtaccagccgaggctgcatattgtgaaggctgatgaaaacaatggcttcggttcaaagaatactgccttctgcacgcatgtgttccctgagacagcgtttattgctgtgacgtcttaccagaatcacaaaataacccagctgaagattgagaataatcccttcgccaaaggcttccggggtagcgatgatatggaactccaccgcatgtctcgtatgcagagcaaagagtatcctgtggtgcctcgaagtacagtgcgacagaaagtggccagcaaccacagccccttctcctcagagagtagagctctctccacatcctcaaacctgggctcgcaatatcagtgcgagaatggtgtgagtggaccctcgcaggaccttctgcccccacccaacccctaccccttgccgcaagaacactctcagatttatcactgcacaaaacgcaaagaagaagagtgtagcacaaccgaccacccctacaagaaaccatacatggagacttcacccagtgaggaggattctttctacaggtcttcatatccacagcaacagggactgggtgccagttatcggaccgagtccgcacagcgtcaagcctgcatgtatgctagctccgcccctccctccgaaccagtccctagcttggaagacatctcctgcaacacctggccttctatgcctagctactctagctgtaccgtcacaaccgtgcagccgatggacaggcttccctatcagcactttagcgcccattttacctccggacccctagtgcccagactggccggaatggcaaatcatggaagccctcagctgggagaggggatgtttcaacaccagacgagtgtggctcaccaaccagtggtgcgccagtgtgggcctcaaacaggtctccagtcccccggaaccctgcagcctcccgaattcctctatagccatggggtacccagaactctctctcctcatcagtatcactctgtgcatggcgtcggaatggtgcccgagtggtctgacaattcatag

SEQ ID NO: 243593 - DNA, 1407 bp, synthetic construct
  misc_feature 1..1407: note = Description of Artificial Sequence: Synthetic coding sequence
  source 1..1407: mol_type = other DNA
atggaagggatcaaggttttcctccatgagcgggagctatggttgaaatttcacgaagtcggcacagagatgataattactaaggcgggaaggagaatgttcccatcatataaggtgaaggtgacgggactgaatcctaagacaaagtatatcctgctgatggacatcgtgcccgcagatgaccaccggtataagtttgccgacaacaaatggagcgtgaccggcaaggccgagccggcaatgcccggaaggctgtacgtgcaccctgacagcccagctaccggcgctcattggatgaggcagcttgtcagcttccagaagctgaagctgaccaataatcatctggatccatttggccacataatactgaactcaatgcataagtatcaaccaaggcttcacattgtcaaggctgatgaaaacaacgggttcggcagcaagaacaccgccttttgtacacatgtctttcccgagacagccttcatcgcggtcaccagttaccagaaccataaaatcacacagcttaagatcgagaacaatccgttcgcaaaggggttcaggggtagcgacgatatggaattgcatcgcatgtcgaggatgcaatcgaaagaataccccgtggttccaaggtctaccgtccgtcagaaggtcgcaagcaaccacagtccgttctccagtgagtctcgggcactttcaaccagctccaatctgggctcccaataccaatgcgagaatggagtgtctggcccttcacaggatctcttgccgccacctaacccttaccccctgccccaagagcactcacagatctaccactgtacaaaacggaaagaggaagagtgctctacaactgaccacccttataagaagccttacatggaaacgtcaccttccgaagaagattctttctatcggtcatcctacccacagcaacaaggcctgggcgcaagctataggactgaaagtgcacaaagacaggcatgcatgtatgcttctagtgcccctccatcggagcctgtgccatctctggaagacattagctgcaatacttggcccagcatgccctcttattcctcatgtaccgttaccaccgtccaacctatggacaggcttccctatcaacacttttcagcccactttacgtccgggcctctagtgcccaggttagccggaatggctaaccacggctccccacaactgggcgaaggcatgttccaacatcagacctcggttgcacaccaacctgtggtcagacagtgcgggcctcagaccggattgcagtcccccggtactctgcaacccccagagtttctgtattcccacggagttcccagaacactctccccacaccagtaccattccgtacacggagttgggatggttccagagtggtccgacaactcctag

SEQ ID NO: 243594 - DNA, 1557 bp, synthetic construct
  misc_feature 1..1557: note = Description of Artificial Sequence: Synthetic coding sequence
  source 1..1557: mol_type = other DNA
atggcagatgcggatgagggcttcggactggcgcatactcccctggagcccgacgccaaagatctcccctgtgattctaaacctgagagcgcacttggagccccatcaaagtctccaagctctccccaggccgcttttactcagcagggaatggaggggattaaagttttcctacacgagagggagctatggctgaaatttcacgaagtcggcacagagatgatcattaccaaggctggtcggagaatgttcccatcatacaaagtcaaagtgaccgggttgaatcccaaaactaagtacatactcctgatggatattgtccccgctgatgatcacaggtacaagttcgcagataacaaatggtcagttaccggtaaggccgaaccagccatgcctgggaggttatacgtgcatcccgattcgcctgctacaggcgcacattggatgagacaactagtctccttccagaagctgaagctcactaataaccaccttgaccccttcggacatatcatcctcaattccatgcataagtatcagcctaggctgcatattgtgaaggctgatgaaaacaacggattcggatctaagaataccgctttttgtacccatgtctttcccgaaaccgctttcatcgctgtaacaagttatcaaaatcacaaaattacacagctgaaaattgagaacaacccctttgcaaaagggttccggggatctgatgacatggaactgcataggatgtcaagaatgcaaagcaaggaatatcctgtggttccacgctccactgtgcgacagaaggtagcatctaatcactcaccgttctcctcagaaagtcgggcactctccactagcagcaatcttgggagtcagtaccagtgtgaaaacggagtgagcggcccttcccaggatttactgcccccaccgaatccctaccctttgccccaagaacacagtcaaatctaccactgcaccaaaagaaaggaggaggagtgcagtactactgaccatccttacaagaaaccatacatggagacttcaccgtcggaagaggattccttctatagaagtagctatcctcagcagcagggacttggtgcctcatataggaccgagtctgcacagaggcaagcctgcatgtatgcatccagcgccccacccagcgagcctgttccttctctagaggatatctcatgtaatacatggccaagtatgccctcttacagtagttgtactgtaaccactgtccagcctatggacaggttgccttatcagcacttttctgctcacttcacaagtgggccacttgtccccaggctcgccggtatggccaatcatggaagcccgcagctcggagagggaatgttccagcaccagacatctgtggcccatcagccagtggttagacagtgcggaccacagacgggcctccagagccctggcacccttcaaccgccagagttcctgtactctcatggggtgccgagaactctttctccgcaccaatatcattccgttcatggggtaggcatggtaccagaatggtcagataattcatag

SEQ ID NO: 243595 - DNA, 1269 bp, synthetic construct
  misc_feature 1..1269: note = Description of Artificial Sequence: Synthetic coding sequence
  source 1..1269: mol_type = other DNA
atggacatagtaccggctgacgatcacaggtacaaattcgctgataataagtggagtgtaaccggaaaagcagaacctgcaatgcccggtcggctttacgtgcatccagactctccagcaaccggtgcgcattggatgagacagctggtttcttttcagaaactcaaactcacgaacaaccacctggacccctttggacatatcattttgaattcaatgcacaagtatcagccacgcctgcacatcgtcaaggctgacgagaacaatgggttcggttccaagaacaccgccttctgcacacatgtgttccccgagacagctttcatcgcagttacctcttaccaaaaccacaaaatcacacaattgaagattgagaacaacccatttgccaagggcttccgcggatcagatgacatggaattgcacaggatgtcccgaatgcaaagtaaagaataccctgtggtgcctaggtcgacagtgcgtcagaaggtggccagcaaccactcacccttctcttctgaatcccgggctctctcaaccagctccaacctgggctcccagtaccagtgcgagaacggcgtatcaggaccctcacaggatttgctgcctccaccaaacccataccctctgcctcaagaacactcccagatttaccactgcaccaagagaaaggaagaggagtgttctactacagatcacccgtataaaaagccctatatggagacatccccatctgaagaggacagtttttacaggtcttcttaccctcaacagcagggactgggcgcaagttaccgcacagagagtgcccaaaggcaggcctgtatgtatgctagctcagccccaccttctgagcccgtgccatctctagaggacatctcctgtaatacatggcctagcatgccgagttattcaagctgcacggttaccaccgtgcagcctatggaccggttaccttaccaacatttcagcgcccactttacaagtggaccgttagtccctcggcttgctggcatggcaaatcatgggtcaccacagctcggggagggcatgttccaacaccagacctccgtagcgcaccagcctgtagttagacagtgcggaccccaaaccggcctgctacacaatcggcatttcctcgaaaaggaacgggaaaggggggaaagagagagacgcagagagaccgtagcaaagcggacccccagaactaggttctttatctcccctaacgtacacatatgcactcagggcagatggatgctgatatag

SEQ ID NO: 243596 - DNA, 1050 bp, synthetic construct
  misc_feature 1..1050: note = Description of Artificial Sequence: Synthetic coding sequence
  source 1..1050: mol_type = other DNA
atggcggacgccgacgaaggctttggactagcccacacaccactcgagccagacgctaaggatctcccctgtgattccaagcctgagtctgctctgggcgctccctctaagtccccatcctcacctcaggccgcatttacccagcagggtatggagggcatcaaagtgttcctccacgagcgcgagctctggctgaagtttcacgaggtgggaacggagatgatcattactaaggcagggcgtagaatgttcccatcgtacaaggtgaaggtgacaggcctgaaccccaaaactaaatatatcctcttaatggatatcgtcccagccgacgatcacagatacaaattcgcagataacaaatggtccgtaacaggtaaagctgagcctgccatgccgggtcgcctgtacgtgcaccctgattctcctgctaccggtgcacattggatgcgacagctggttagtttccagaagcttaaactgaccaacaaccatttggatccattcgggcacattattctgaattctatgcataagtaccagccccgtttgcatatagtcaaagcggatgaaaacaacggatttggctctaaaaacactgcattttgcacccatgtctttcccgaaacagccttcattgccgttaccagttatcaaaatcacaaaattactcagctaaagattgagaacaacccgtttgccaaaggattccgcggttctgacgacatggagttgcacagaatgtcgaggatgcagtcaaaggaatatcccgtggtccctcggtcaaccgtgagacagaaagtggcgagtaaccattccccctttagctctgaatccagagcgttgagtactagcagcaacttaggttcccagtatcagtgcgagaacggtgtgtcaggcccatcacaagatcttcttccacctccgaacccgtatcctttgcctcaggaacactcccagatctaccattgtacaaaacgcaagggtgagtgtgaccacccatggtcaatttgctttctctcttatctgttcctaagccttggttggggatag

SEQ ID NO: 243597 - DNA, 1311 bp, synthetic construct
  misc_feature 1..1311: note = Description of Artificial Sequence: Synthetic coding sequence
  source 1..1311: mol_type = other DNA
atgtaccatccccgtgagctttatccatcactaggggctggttaccggctgggacctgctcaacctggggctgactcctccttccccccagcattggctgagggctatagataccccgaactggacacccccaagctggactgcttcctatccgggatggaggccgctcctcgaacactagcagctcacccacccttgcccctcctcccccctgcaatggggacagagccggctccatctgctccagaagctctgcacagcctccctggcgtcagcctgtccctcgagaaccgggagttatggaaagagttttcctccgtggggacagaaatgattatcacaaaggcaggccgtaggatgtttccggcttgtcgcgtgtccgtcaccgggctggaccccgaagcacgataccttttcttgttggatgttattcctgttgacggagctcggtaccgctggcagggacggcgatgggaaccttctggaaaggccgaaccaagactgcctgaccgcgtgtacattcatcccgactctcctgcgacgggagcacactggatgagacagcctgtatcttttcatcgtgttaaactaacaaactctaccctggaccctcatggccaccttattctgcattcgatgcacaagtatcagccgcgtatccacttggtgcgcgcagcgcagttatgttcccagcattggggagggatggctagtttccgatttcccgaaactacattcatatctgttaccgcctaccaaaacccacagataactcagctcaagatcgctgccaacccttttgccaaggggttcagagagaatggaaggaactgcaaaagggaaagggatgcgcgagtgaaacgaaaactgcgtggcccagagccagccgctaccgaggcctacggatccggcgatacccctggcggtccatgcgattccaccctcggcggagatattcgtgagtctgaccccgaacaagcgccagctcccggagaagcaaccgcggcaccagctccgctctgtggcggaccctctgctgaggcctatctcctgcatccagccgctttccatggggctccctcccacctacccacccgctctccgagcttcccagaagcgcctgattcaggcaggtccgccccttactctgccgcatttttagaattacctcacggcagcgggggatccgggtaccctgctgcccctccggcagttcctttcgcacctcactttctgcagggtggcccatttcccttgccctacaccgcccctggcggttaccttgacgtcgggagtaagcccatgtactag

SEQ ID NO: 243598 - DNA, 1311 bp, synthetic construct
  misc_feature 1..1311: note = Description of Artificial Sequence: Synthetic coding sequence
  source 1..1311: mol_type = other DNA
atgtaccatcctcgggagctctatccatcattaggcgcaggttataggcttgggccagcacaacctggagctgacagctcgttcccaccggcacttgctgaaggttacaggtaccccgagttagacacaccaaagctcgattgcttccttagcggcatggaggcggcaccacgaacactggccgctcacccgccattacccttgcttccacctgccatgggtacggagcccgcaccgtcagctcccgaggccctgcattcattgccaggagtgagcctctctctggagaaccgcgagctctggaaggaattctcctcagtggggactgaaatgattattacaaaggcgggacgtcgtatgtttcctgcctgtagggttagtgtgaccgggcttgatccagaggcgagatatctcttcctcttggacgtgattcccgtggacggggctaggtatcgatggcaaggcaggagatgggagccttccggcaaagctgaacccagattacctgatcgggtatacatacacccggacagccccgcaacaggggcacactggatgagacagcctgtcagtttccaccgagtgaagctgactaactcaactctggacccccatgggcatctcatccttcactccatgcacaagtatcagccaaggattcacctggtccgcgctgctcagctgtgttcccaacattggggtggtatggccagttttcgcttcccggagaccacttttatcagcgttacagcataccagaaccctcagattacccaactcaagatcgccgctaacccatttgctaaaggattccgagagaacgggcgtaactgcaaacgagagcgggatgcgcgagtgaaaagaaaattgagaggacctgagcccgctgcaaccgaggcgtacggttcgggggacactcctgggggtccatgtgatagcacgctgggaggggacatccgcgaatccgatcccgaacaggcaccagctcccggagaggccaccgccgctcccgcaccactgtgtggcggaccgtccgctgaggcctatctgctgcaccccgctgcattccatggtgccccaagccaccttccgactagaagcccgtcttttcctgaagcacccgattctggacgaagtgcaccctactccgcagcgttcctggagcttcctcacggttccggcggaagtggctaccccgcagcccctcccgcagtccccttcgctccacacttcttgcaagggggacccttcccacttccttacacagcgccaggtggctaccttgacgttggtagcaagccgatgtactag

SEQ ID NO: 243599 - DNA, 888 bp, synthetic construct
  misc_feature 1..888: note = Description of Artificial Sequence: Synthetic coding sequence
  source 1..888: mol_type = other DNA
atgtatcaccccagagagctttacccatctctaggagccggttaccgcttgggacctgcccaaccgggagcagactctagttttccgcctgccctggcagagggctaccggtaccccgagctggacacccctaagttagattgctttctgagtggaatggaggctgccccaagaacacttgccgcacatccccctctgccattactcccaccagccatgggcaccgagccggcaccttccgcacctgaggcgctgcattctcttcccggtgtgagtcttagtttggagaacagggaactatggaaggaattttctagcgtcgggaccgagatgataattacaaaggcagggagacggatgttccctgcttgtcgcgtcagcgtgaccggactcgaccccgaagctagatacctgtttctgctggacgttatacccgtggatggggcaagatataggtggcaggggagacggtgggaaccctccggcaaggccgagcccagacttcctgaccgagtgtacattcaccctgattcgcccgcaactggggcacattggatgagacagccagtgtcattccaccgcgttaaacttaccaattcaaccctggatccccacgggcatctgatcctgcactcgatgcataaataccagcccaggatacatttggttcgggctgcgcagctgtgctcccagcattggggaggcatggcaagttttcgctttccagaaacgactttcatatctgtgacggcatatcagaacccacagatcacacagcttaaaatcgcagcaaacccctttgccaagggcttccgagaaaacgggaggaactgcaaacgctgggagctttttattcacctctttatgcattccactaacgtgtattag

SEQ ID NO: 243600 - DNA, 1974 bp, synthetic construct
  misc_feature 1..1974: note = Description of Artificial Sequence: Synthetic coding sequence
  source 1..1974: mol_type = other DNA
atggaaatggaaacaacagaacccgaacctgactgcgtggtgcagcccccatcacccccagacgactttagttgccagatgagactgtcagagaaaattacacctctgaaaacgtgctttaagaagaaagatcagaagcgcctgggcacaggaactctgcggagcctgcgccctatcctgaacaccctgctcgagagcgggtcactggatggcgtgttccgctctagaaaccaatcgaccgacgaaaattccctgcatgaaccaatgatgaagaaggccatggagattaacagctcttgtcccccagctgagaataacatgtctgttctgattccggatcgtacaaatgttggagatcagatccccgaagcccacccaagcaccgaagctcctgaaagagtggtaccgatccaagaccatagctttccatcagaaactctctctgggactgtcgccgatagtactcccgctcattttcagacggatctcctccaccccgttagcagcgacgttcccacatctcctgactgcttagacaaggtcatcgactatgttccgggaatctttcaggagaacagttttactattcagtatattctagatacctctgataagctgtcaaccgagctctttcaagataaaagcgaggaggccagtctggacctcgtgtttgagctcgtgaatcaactgcagtatcatacccaccaagagaacgggattgagatctgcatggacttcctccagggaacatgtatctacggaagggactgtctcaaacatcacactgtcttaccataccattggcagatcaaaaggaccaccacgcagaagtggcagtcggttttcaacgacagccaagagcaccttgagcgcttttactgtaacccagaaaatgaccggatgcggatgaagtacggagggcaggagttctgggccgacctgaacgctatgaatgtctatgaaactacggagtttgatcaactgcggaggctgtccaccccgccaagcagcaatgtaaactcgatctatcataccgtctggaaattcttctgtcgggatcacttcggctggagggaatatcctgagtccgtgataaggctgattgaagaggccaactcgcgaggtttaaaggaagtaaggtttatgatgtggaacaatcattacatcctgcataactctttcttccgccgagaaatcaaacgcagacctctgtttcggagctgtttcatcttgctgccttatctgcagaccttggggggtgttcccacacaagcccctcctcccttagaggctacaagtagcagtcagattatttgtcccgatggtgtgacatccgctaatttctatcccgaaacatgggtgtatatgcacccttcccaggactttatacaggtccctgtaagtgcagaggacaaaagctataggattatttacaatctatttcataaaaccgtgcctgagttcaagtaccgaattttacagatactgcgcgtgcagaatcagtttctgtgggaaaaatacaagcgcaagaaggagtacatgaacaggaaaatgtttggacgagacagaataatcaatgagaggcacctgtttcacggaaccagccaggatgttgtcgatggaatctgcaaacacaacttcgaccctcgagtctgtggcaagcacgccaccatgttcgggcagggatcctactttgcaaaaaaggcaagctactcacataatttcagcaagaaaagctcaaagggtgtccactttatgttcttggccaaggtgctgacaggcaggtacacaatgggctcgcatggaatgcgcaggcccccaccggtaaaccctgggtcggtcaccagtgatctgtatgactcatgcgtcgataacttctttgagcctcagatattcgttatatttaatgacgatcaatcctacccttacttcgtgatccagtatgaggaagtgagcaacaccgtgtctatttag

SEQ ID NO: 243601 - DNA, 1974 bp, synthetic construct
  misc_feature 1..1974: note = Description of Artificial Sequence: Synthetic coding sequence
  source 1..1974: mol_type = other DNA
atggagatggaaacgaccgagcctgagcctgattgcgttgtgcagcctccaagccccccagatgatttttcatgccagatgcggctgtcagagaagattacgcctctgaaaacctgcttcaagaaaaaggaccagaagcgcctcggaactgggaccctacgatcactgaggccaattctgaacactctcctggagtctggctcactggacggtgtgtttaggtctaggaaccagagcaccgacgagaacagtctccatgagcctatgatgaagaaggctatggaaatcaatagcagctgcccaccggctgagaacaatatgagcgtgcttatcccggatcgaacaaatgtaggagatcagatcccggaagcgcacccttcgactgaggctccggagagggtggtacccatccaggatcattctttcccctcagaaactctgagcggcactgtcgcagattctacccctgcacactttcaaacagacctgcttcatccggtgagctcagacgtccctacttctcctgattgcctcgacaaagtcattgactatgtccccggaatctttcaggagaactcttttaccattcagtatattttggatacatcagacaagcttagtaccgagctttttcaagataaatctgaggaggccagtctagacctcgtttttgagttggtgaaccagttacagtaccatacccatcaagaaaacgggattgagatctgcatggactttctgcagggcacttgtatatacgggcgagactgcctgaaacaccacacagtactcccctaccactggcagataaagcggaccactactcagaagtggcagtctgtgttcaacgactcccaggaacacctggagagattctactgcaaccccgagaatgataggatgaggatgaagtacggtggccaggagttctgggccgacctgaacgcaatgaacgtttatgaaaccacagagttcgatcaactccgccgattatccacccctcctagttccaacgtgaactccatatatcacactgtgtggaagtttttctgtagagatcactttgggtggagggagtaccctgagagcgttattaggctcatcgaggaggctaactcacgcggtttgaaagaagtgaggtttatgatgtggaacaaccactatatcctgcacaattcttttttccgaagggagattaaacggaggccactgtttcgcagttgttttatcctgctgccctatctccagaccctaggaggggtgccaacccaggcacctccccctctcgaagccacatcaagcagccaaatcatctgccctgatggggtaacatctgctaatttctaccctgagacatgggtctatatgcacccgtcccaggatttcatccaggttcccgtctccgctgaggataagagttatcggatcatctataacctgttccataagacagtaccagaattcaaataccggatcctgcagatcctgcgcgtgcagaatcaattcctgtgggaaaaatataagagaaaaaaggaatacatgaaccgtaagatgttcgggagagacagaatcatcaatgagaggcacctctttcatggtacctcgcaggacgtggtcgatggcatctgcaaacacaatttcgaccctagagtatgtggcaaacatgccaccatgtttggccagggatcctactttgccaagaaagcatcctactctcacaacttttcaaagaaaagtagcaaaggcgttcactttatgtttctggcgaaggtgctgaccggaaggtacactatgggatcacacggaatgaggaggccaccgccagtcaatccaggcagcgtgacctccgatctgtacgattcatgcgtggacaattttttcgaaccccaaatatttgtaatttttaacgacgatcagtcttatccgtattttgttatccagtacgaagaggtctctaacacggtgagcatctag

SEQ ID NO: 243602 - DNA, 1521 bp, synthetic construct
  misc_feature 1..1521: note = Description of Artificial Sequence: Synthetic coding sequence
  source 1..1521: mol_type = other DNA
atggaaatggaaaccactgaacccgaacctgactgtgtcgttcagcccccatcaccacccgatgactttagctgccaaatgaggctgtcagagaaaatcacaccgttaaaaacatgtttcaaaaagaaggaccagaaaaggctgggcactggaacgcttcgaagtctgcgccctattttgaacaccttgttggaatctggctcactcgacggtgtcttccggtctcggaatcagtccacagatgaaaattcactgcacgaacctatgatgaaaaaagcgatggagatcaactcctcatgccctccagctgagaacaacatgtctgtgctaatcccagaccgcaccaatgtcggcgatcagattcctgaggcccatccgtcaactgaggctccagagagggtcgtgccaattcaggaccactccttcccatcagagaccctctcgggaactgtggctgacagtacacccgctcacttccagaccgatctgctgcacccagtgtcttccgatgtgccgacaagcccggattgcttagacaaagtcatcgattacgtgccaggaattttccaggagaattcctttaccattcagtatattcttgatacgagcgataagctgagcacagagctgttccaggacaagagcgaggaggcttctctcgatctcgtgtttgaattggtgaatcaattacagtaccatacacaccaggaaaacggaatcgaaatctgcatggacttcctgcagggcacctgcatttacggacgagattgtcttaaacaccacactgtcctcccttatcattggcagatcaagagaacaactacacagaagtggcaatccgtctttaacgacagtcaggaacacctggaacggttttattgcaatcccgagaacgatcgtatgcgcatgaagtatgggggacaggagttttgggcagatctcaatgcaatgaatgtgtacgagacgaccgagttcgaccaactgcgcagactctcaacgcccccaagcagtaatgtaaacagtatctatcacaccgtctggaagttcttttgcagggaccattttggatggagggagtacccagaatcagtcatccggctgatcgaagaagcaaactcgcgaggactgaaggaggttagatttatgatgtggaataaccattatatcctgcacaatagcttttttagacgggagatcaaacggaggcccttgttcaggtcctgtttcattctcctgccttacttgcagaccctcggcggtgttccaacccaggcacccccacccctggaggcaacatcttcctctcagataatctgtcctgatggggtgacctctgcgaatttctaccccgagacatgggtttacatgcatccctcccaggattttatacaagttccagtgtccgctgaggacaagtcctatagaattatttacaacctgtttcataagacagtcccggagtttaagtaccgtatactgcagattctccgagtccaaaatcagttcttatgggagaaatag

SEQ ID NO: 243603 - DNA, 1965 bp, synthetic construct
  misc_feature 1..1965: note = Description of Artificial Sequence: Synthetic coding sequence
  source 1..1965: mol_type = other DNA
atggagatggaaaccacggaacctgagcccgactgtgtagtgcagcccccaagtcctccggatgactttagctgtcagatgcgcctctccgaaaagataaccccgcttaagacttgttttaagaagaaagatcaaaaacggctcggaaccgggacgctgcgtagcctcagaccgattctgaatacactacttgagagcggatctcttgacggggtgttccgctccagaaaccagtcaactgatgaaaacagtttgcacgagcccatgatgaagaaggctatggaaattaactcgagctgccccccagcagaaaataatatgagtgtgctgattccagataggactaatgtgggcgaccagattcccgaggctcacccaagcaccgaggctcccgaaagagttgtacccattcaggatcacagctttccctccgagaccctgagcggaactgttgccgattcgactccagctcattttcagacggacctactacaccctgtgtcttctgacgtcccaactagcccagactgtctggacaaagtgatagactatgtgcccggaatattccaggagaattctttcaccattcagtacatcctcgatactagcgataagctgtcaaccgaactgttccaggacaaatccgaagaagctagtctcgacctggtgttcgaacttgttaaccagctgcagtaccacactcaccaggagaacgggatagagatctgcatggactttctgcaaggaacttgcatatacggccgagactgtctgaagcaccacaccgtcctaccttatcactggcagattaagcgaacgacaacccaaaagtggcagtccgtgttcaacgatagtcaagaacacttagaaagattttattgcaatccagaaaatgaccgtatgcgtatgaaatacggcggacaagagttctgggctgatctgaatgcaatgaatgtgtatgaaacaacagaatttgaccagctgagaagactctcaacacccccatcttctaatgtaaactctatctatcacaccgtctggaagtttttctgtcgagaccattttggctggcgggagtaccccgagtccgtaatcaggctaattgaggaggctaacagtagaggtctcaaagaggttcgttttatgatgtggaacaaccactacatcctccataattctttttttcggagggaaataaagaggcgccctctgtttcggagttgctttatactcctaccttatcttcaaactttgggtggtgtgcccactcaggctcctccaccactcgaagctacctcaagttcccagattatctgtcctgacggagtcactagcgctaacttttacccggagacttgggtttacatgcaccccagtcaggacttcatacaggtgcccgtgagtgcagaggataagtcctatcgtataatatacaatttatttcataagactgtgcctgagttcaagtacaggatcctacaaatcctgcgggtccagaaccaatttctttgggaaaagtacaaaaggaaaaaagaatatatgaacagaaagatgtttggacgcgatcgcatcattaatgagcgccacctctttcacggtacatcgcaggacgtggtggacgggatctgcaaacacaattttgacccacgggtatgcggaaagcacgcaaccatgtttggtcagggttcttatttcgccaaaaaagcctcttacagtcataacttcagcaagaagtctagcaagggcgttcactttatgtttttggccaaggtacttaccggacggtacacgatgggcagccatggtatgaggcggcctccaccagtcaatcctggaagcgtcaccagcgacctttatgattcatgtgtggataattttttcgagcctcagatctttgtgatcttcaacgatgaccagagctacccttactttgtcattcagtatgaggaggtgagtaatacttag

SEQ ID NO: 243604 - DNA, 1974 bp, synthetic construct
  misc_feature 1..1974: note = Description of Artificial Sequence: Synthetic coding sequence
  source 1..1974: mol_type = other DNA
atggagatggaaaccaccgagccagagccggattgtgtcgtccagccacccagcccacctgacgacttttcctgccaaatgaggttgtccgagaaaataacgccactcaagacatgtttcaaaaagaaagatcagaaaaggttggggactgggaccctgcgctccctgcgtcctatcctgaacacactgctggaatcaggatccctggacggggtgttccggagcaggaaccagtcaacagacgagaatagtctgcacgaaccaatgatgaagaaggccatggaaattaacagttcttgccctccagctgaaaataacatgagtgttctgatacctgatcgtaccaacgtgggtgaccagatccctgaggctcatcctagtactgaagctccagaaagagtcgtgccaatccaagatcactccttccccagcgaaacactgtcaggcaccgtcgccgacagtacaccggctcatttccagaccgatctgcttcaccccgtttcttccgacgtacctacatctcccgactgcttagacaaagtgattgattatgtgcccggaatttttcaagagaactcctttactatccagtacatcctggatacaagcgacaaattatccacagaactgttccaagacaaaagtgaggaagcgtctctggacttagtgttcgaactcgtaaaccagctccagtatcacacccatcaggagaatggaatcgaaatctgtatggatttcctgcagggaacttgcatttatgggcgtgactgtttaaagcaccacaccgtgcttccatatcactggcagatcaagcgcaccacaacacagaaatggcaaagtgtcttcaacgattctcaggagcatttagagcggttctactgcaaccctgagaatgatcgcatgcgtatgaaatacggcggacaggagttctgggctgatctgaatgccatgaacgtgtacgagaccacagagttcgaccaattgcgtcggctctctacacctccctctagtaacgtaaattctatttaccatacagtgtggaagttcttctgccgggaccacttcggctggcgcgagtaccctgaaagtgtgatacgcctgatagaagaagccaatagcaggggtctgaaggaggtgaggtttatgatgtggaacaatcattatatcctgcacaactctttctttcgcagagaaattaagcggagacccctgtttcgaagctgcttcatactgttaccttatttgcagaccctgggcggtgttcccacgcaggctccaccgcctctggaagcaacgtcttccagccagataatctgtcccgacggcgtaacatcggcgaatttttatccggagacttgggtgtacatgcatccttcccaggacttcatccaggttccagtgtcagccgaagataagtcttataggatcatatataacctcttccataagactgtgcccgaatttaaataccggattttgcaaatactgcgggttcaaaatcagtttctgtgggaaaaatataagagaaagaaggaatatatgaacagaaagatgttcggaagagaccgaatcatcaatgagcggcacttattccacggtacatcccaggatgtggtcgacggtatttgcaaacataacttcgatccgagagtgtgtggcaagcacgctacgatgtttggccagggctcctacttcgccaagaaggcttcatatagccacaacttctcaaaaaaatcaagcaagggggtacatttcatgttcctggctaaagtactcactggtagatatacaatgggcagccatggaatgcgcaggccgcctcccgtgaacccaggcagtgtgacaagtgacctgtatgatagctgcgtggacaacttctttgaaccacagattttcgtgatatttaacgatgaccagagttacccgtatttcgtgatccagtacgaggaggtatctaacacagtgagcatttag

SEQ ID NO: 243605 - DNA, 1974 bp, synthetic construct
  misc_feature 1..1974: note = Description of Artificial Sequence: Synthetic coding sequence
  source 1..1974: mol_type = other DNA
atggaaatggagacaaccgagcccgagcccgactgtgtagtgcagcctccaagcccccctgatgacttctcctgccagatgagactgagcgagaagatcacacctttgaagacttgctttaaaaagaaagatcagaaacgactgggcacaggaacactccgttccctcaggcccatactgaatacacttcttgagagtgggtctctggacggcgtcttcagatcccggaatcagtcaacagacgagaacagtcttcacgaacccatgatgaagaaagccatggagattaacagtagctgtccacctgccgaaaataacatgtccgtacttattcccgaccgcactaatgtaggagaccagatacctgaggcccacccctcgactgaagctccagagcgcgtagtgcccatccaggatcactcatttccctcagaaacactgagcggcacagtcgctgactcaacccccgctcattttcaaacagatctgctgcaccctgtaagcagcgacgttccaaccagtcctgattgtctcgacaaagtgatcgactatgttcccggtatatttcaagagaactccttcactattcaatatatcctggacaccagtgataagctctccacagaactattccaggacaagtccgaagaggcctccctggacctcgtgttcgaactcgtaaaccagctgcagtatcacacgcatcaggagaacggcattgagatctgtatggacttcctgcaggggacctgtatatacgggagggactgtctcaagcatcacacggtcctgccataccactggcagatcaagcgaactacaacacagaagtggcagtcggtgtttaacgattcacaggaacacctggagagattttactgcaaccctgagaacgatcggatgagaatgaaatatggcggacaggaattttgggcagacctaaatgccatgaatgtgtacgaaacaactgagttcgaccagctacgcaggctgtccacaccacctagtagcaacgtcaattctatctaccatactgtgtggaaattcttttgtcgggaccacttcggatggagagagtatcccgagtccgttatccgcctcatcgaggaagccaattctcggggtctcaaggaggtcagatttatgatgtggaacaatcattacatcctgcataactccttttttcgcagagaaatcaaacgcaggcctttgtttaggagctgtttcattttactgccttacctgcagacccttggaggagtgcccacacaggcccctcctcccctcgaagcgacgagcagctcccagatcatatgtcccgacggagtcacatctgcaaacttttacccggagacatgggtctacatgcatccgtcccaagacttcatccaagtgccagtgtccgcagaagacaaatcgtatcgaattatctataatttgtttcataaaacagtgccagaattcaaatacagaattttacaaatcctgagggtacaaaatcaattcctgtgggagaaatataaaaggaagaaggaatacatgaataggaagatgtttggacgggatagaatcattaatgaacggcatctgttccatggaaccagtcaggacgtggtggatggaatctgcaaacataatttcgacccacgggtatgtgggaaacatgcaacaatgttcggacagggatcgtattttgccaaaaaggcttcttattctcataactttagcaagaaatccagtaagggagtgcactttatgtttcttgctaaagtcctgacgggcagatatacaatgggtagccacggaatgcgcaggcctcctccagttaatcccggtagcgtcacctctgatctgtatgatagttgtgtggacaatttttttgaaccacagatattcgttatttttaatgatgaccagtcttatccctatttcgtgatccagtacgaggaggtttctaatacagttagtatctag

SEQ ID NO: 243606 - DNA, 1662 bp, synthetic construct
  misc_feature 1..1662: note = Description of Artificial Sequence: Synthetic coding sequence
  source 1..1662: mol_type = other DNA
atgggtgccttggaaatgcaagatgaagaagaccgcatcgaggccctgaaacaagtggcagacaaactccccaggcccaacctgctactgctcaaacatcttgtttacgtgctccatctgatcagcaagaatagcgaggtgaatcggatggattcatctaacctggcaatttgcatcgggccaaatatgctgacgcttgaaaacgatcagagtctgagcttcgaagcgcaaaaggatctaaataataaggttaagacccttgtggaattcctgattgataactgtttcgaaatatttggggaaaatattccggtgcattctagcattacaagtgatgatagcctcgagcacacagactccagtgacgtgagtactctgcaaaatgactcagcatacgattctaacgaccccgatgtcgaatccaactcgtcttcaggtataagctccccttctcgccagccacaggtgcccatggcgactgctgctggtcttgactcagcaggccctcaggacgcacgtgaggtgtctccggaaccaatcgtgagtacagtagccagattaaagtcatctctcgcccagcccgaccgcagatactctgaaccctccatgccatcatcccaggaatgcctggagagccgagttaccaaccagacccttacaaagtccgagggagattttccagtgcctagggtggggagccgtctggaaagtgaggaggctgaagaccccttccctgaggaggtcttccccgctgtgcaaggtaagactaaaagacccgtggacttgaaaatcaagaatctcgcccctggttctgtgctgccccgagccttagtattgaaagccttcagttctagctccctggacgcaagttcggacagttcccctgttgcatcccctagcagccctaagcgtaacttcttttctcggcaccagtctttcacaaccaaaaccgaaaaaggcaagcctagccgagagataaaaaagcattccatgtcgtttacatttgccccacacaagaaggtccttaccaagaacctcagtgccggaagcggaaagtctcaggattttactagagatcacgtcccgagaggcgtgagaaaggagtcccaattggcaggacgaattgtgcaggaaaatggctgcgagacacacaaccagacagcgcgaggattttgcctacggcctcacgctttaagtgtggacgatgtttttcagggggctgattgggagaggccaggatcacccccatcctacgaggaggccatgcagggccctgcagcacgattagtggcatctgagtctcagacagtcggatccatgacagtggggagcatgagggccagaatgctggaggcccactgtctgcttcctccgctcccccctgctcatcacgtggaggacagcagacacaggggatctaaagaacctcttcctggccacggcctgagcccattaccggagagatggaagcagtcaaggactgttcacgcttctggcgattcactcggccacgtgagtgggcctgggagacctgagttactgcctctcaggacagtctcagagagcgtacagagaaacaagcgggactgcttagtacggcgttgctcccagccagtgtttgaggccgatcagtttcaatacgccaaggaatcttacatctag

SEQ ID NO: 243607 - DNA, 801 bp, synthetic construct
  misc_feature 1..801: note = Description of Artificial Sequence: Synthetic coding sequence
  source 1..801: mol_type = other DNA
atgaaactgaggtcctcacacaacgctagtaaaactctgaacgctaacaacatggagactctgatagagtgtcaatcagagggggacattaaggaacatcctctactggcgtcttgtgaaagtgaggactccatttgccaacttatcgaggtaaaaaaaagaaagaaggtgctaagctggccatttctgatgcggagactgtcaccagcatccgatttcagcggggctctggagaccgatctaaaggcctctctgtttgaccagcccctgagtatcatttgtggggactctgatacactaccacgcccaattcaggatattcttactatcctgtgtttgaagggaccttccaccgaggggatcttccgccgagccgcaaacgaaaaagccaggaaagaactgaaggaggagttaaactctggcgacgctgtggatctcgagaggttgcctgtccatttattagccgttgtatttaaggattttctgcgcagcatccctcggaaacttctctcgtcagatctatttgaagagtggatgggtgctttggagatgcaggacgaggaggatcggatcgaagcgctcaaacaggtggccgataagctcccaaggcctaacctgttattattgaagcatctggtgtacgtgctgcacttgatcagcaaaaattccgaggtaaataggatggattcttctaatctggccatctgcattggcccaaatatgttgaccctcgagaacgaccagagcttgtcatttgaggctcagaaagacctgaataacaaggtctgttctgcctattag

SEQ ID NO: 243608 - DNA, 2196 bp, synthetic construct
  misc_feature 1..2196: note = Description of Artificial Sequence: Synthetic coding sequence
  source 1..2196: mol_type = other DNA
atgaaactcagaagttcccataacgcgtcaaaaactctcaatgcaaataatatggagactctcattgaatgtcagtctgaaggtgacatcaaagagcacccgctgttggctagttgcgaaagtgaagatagcatttgccagctgatcgaggtcaaaaagcgaaaaaaggtgctgagttggccgtttctaatgcgtaggctgagcccggctagcgacttcagcggggcactagagaccgatctcaaggcatcgttgttcgaccagcccctgagcattatttgcggggatagtgacacgctgccccgacctattcaagacattctgacaatcctttgcttgaagggcccaagtacagagggtatctttagacgcgctgccaacgaaaaagcacgcaaagaactcaaggaggagttgaatagtggcgatgccgtcgatctggaacggcttcctgtccatctattggccgttgtatttaaggacttcctacgcagcattcctcgaaaactactatcatctgatctcttcgaagagtggatgggagcactcgaaatgcaagatgaggaagacagaatcgaagccttaaagcaggtggcagataagctcccccgaccaaatttactgttactgaagcacctggtgtacgtactgcatttgattagcaagaacagcgaggtcaaccggatggactccagcaatctagccatatgtattggccctaatatgttgacactggaaaatgaccagtccctcagcttcgaagcccagaaggatctcaacaacaaagtgaaaacactggtcgaatttcttatcgacaattgctttgaaatcttcggcgagaacattcccgtgcacagcagtattacttccgatgatagcttagagcatacggatagctcggatgtgagcaccctgcagaacgactccgcctacgactccaacgaccccgatgtcgagtctaactcaagctctggcataagtagtccaagcaggcagccccaggtgcctatggccacggccgctggacttgacagcgctggaccacaggatgccagagaggtgagtccagagcccattgtttccaccgtagccagactgaagtcatccctggcccagccggatcgcagatactccgagccctcaatgccttcttctcaggagtgcctggagtccagggtcacaaaccagactctcactaaatccgaaggtgatttcccagtgcccagagtgggttcacggctcgaaagcgaggaggcagaggatcccttcccggaagaagtcttcccggcagtccagggaaagaccaagaggcctgtggatcttaagataaaaaacctggcaccaggctccgtgctgccacgcgctctggtgcttaaagcctttagttcatcctctctcgacgcgtctagcgactcttctccagtcgcatcaccctcctctcccaaaagaaattttttttcgcgacaccagagctttaccactaagaccgaaaaaggaaagccaagtagggaaataaagaaacattccatgtcatttacgttcgcaccccataagaaggtcctaacgaagaatttgtccgccggtagcggaaagtctcaggattttacccgcgatcacgtgcccaggggggtgagaaaagagtcccagctggccggaagaatagtgcaggagaatggatgcgagactcacaatcaaaccgccagggggttttgtctgcgcccacacgctctgagcgttgacgacgtgtttcagggagcggactgggagagacccggatctcctccttcatacgaggaggccatgcaaggtccagctgccagactcgtggcttctgaatctcagaccgtgggaagcatgactgtgggcagtatgagagctaggatgctggaagcccattgcctgcttcctcctctaccacccgctcatcatgttgaagattcacgtcatagggggagcaaggagcccctgcccggacacgggctgtcccccctgcccgagaggtggaagcaaagcagaacagtacatgcatctggcgactccctgggtcatgtgtctgggcctggtaggcctgaactgctgccgttgcgaacagtgtccgagtctgtacagcgaaacaaaagggattgtctggtgcgtagatgttcacagccggtattcgaggcggatcagttccaatacgcaaaagagtcctacatatag

SEQ ID NO: 243609 - DNA, 828 bp, synthetic construct
  misc_feature 1..828: note = Description of Artificial Sequence: Synthetic coding sequence
  source 1..828: mol_type = other DNA
atggccactgcggcaggactagattccgcaggcccacaggacgcacgtgaggtgtctccggagcccattgtttcaaccgtcgctagacttaaaagcagcctggcccagccagacaggagatattcggagccatctatgccctcttctcaggagtgtctggaatccagggtcaccaaccagacactcacaaagagcgagggtgatttccccgtgcccagagtgggcagccgcttggagtctgaggaggctgaggatccattccctgaggaggtgtttcccgctgtccagggtaagaccaaacgtccagtagatctcaagatcaagaatctcgccccaggctctgtcctacctcgggcactggtgttgaaagccttctcaagcagctctcttgacgcatctagtgacagcagcccagtagcgtctccatcttcgcccaagcggaacttcttctctcgccatcagtctttcaccactaaaacagaaaagggcaagccttcaagggaaatcaagaaacactcgatgtccttcacattcgcgcctcataagaaagtgctgactaagaatctgtccgccggttcaggcaagagccaagacttcactcgagaccacgtgccccgaggcgtgaggaaggagtctcagctggccggtcggatagtacaagagaacgggtgcgaaactcacaatcagacggcccgaggcttttgtctaagaccccacgcgctctctgtggacgatgtttttcagggcgctgactgggaacgacccggtagcccaccaagctatgaagaggccatgcagggcccagccgctaggccatggggcgcttag

SEQ ID NO: 243610 - DNA, 327 bp, synthetic construct
  misc_feature 1..327: note = Description of Artificial Sequence: Synthetic coding sequence
  source 1..327: mol_type = other DNA
atgacccgaaagatcttcactaacacacgtgaaagatggcggcaacaaaacgtgaactccgcctttgccaagctgaggaagctcatacctacccaccccccagacaagaagctgtccaagaacgagacgctccgtctggccatgcggtacatcaattttctggtaaaggttctcggagagcagagccttcagcagactggcgtggcagcacaaggcaatatcttggggctctttccacaggggcctcacctccccggactggaagacagaaccctgttagaaaactaccaggtcccctcccctggtccctcacaccatatcccgtag

SEQ ID NO: 243611 - DNA, 780 bp, synthetic construct
  misc_feature 1..780: note = Description of Artificial Sequence: Synthetic coding sequence
  source 1..780: mol_type = other DNA
atggcctccccacaagggggacagatcgccatcgcgatgaggctccgcaatcaattgcagagtgtttacaagatggatcccctgaggaatgaagaagaagtgagagtcaagatcaaagatctgaatgaacacattgtatgctgcctgtgtgcaggctacttcgtcgacgccaccacgataaccgagtgccttcacaccttctgtaagagctgtatagtaaagtatttgcagactagcaagtactgcccaatgtgtaacatcaaaatacacgagacccaacctctcctcaatctgaaactggacagggtgatgcaggacatcgtttacaaacttgttcccggactacaggactctgaggagaagaggatcagggaattttaccagagccggggacttgatagggtcacacagcccacgggcgaggagccagccctttcgaacctgggcctccctttctcctctttcgaccactctaaagcccactattatagatacgacgaacagctgaacctgtgtctggagcgcctgtcaagcgggaaggataaaaacaaatcagtgcttcagaataaatatgtgaggtgcagtgttcgagccgaggtgcgccatctgaggagagtcctgtgccacagactaatgctgaacccgcagcacgtccaactgttgttcgacaatgaggttcttcccgatcacatgaccatgaagcagatttggctcagtaggtggttcggaaagcccagcccactattgctgcagtacagtgttaaggagaaacgacgctag

SEQ ID NO: 243612 - DNA, 876 bp, synthetic construct
  misc_feature 1..876: note = Description of Artificial Sequence: Synthetic coding sequence
  source 1..876: mol_type = other DNA
atggaggctcccgcttccgcgcaaaccccccacccccacgaaccgatcagttttggcatcgaccagatactgaactcgcctgaccaagattccgcgccagcccctcgaggtcccgacggtgcttcttaccttggcggtcctcctggaggaaggccaggcgcaacctacccgagtttgccagctagcttcgccggactgggggcaccgttcgaagacgccggaagttactccgttaacttgagcctggcgccagctggggttatccgcgtgcccgctcatcggccactgcccggtgccgtgccgccacccctgccaagcgctctgccagcaatgcctagcgtgccgaccgtgagctcattgggtggactgaattttccgtggatggagtccagccgacggttcgtgaaagacaggttcaccgccgctgctgccttgacaccctttacggtcacgaggcggatcggacatccctatcagaatagaacccctccgaaaaggaagaaacccagaacaagcttctcgcgcgtacaaatttgtgaacttgagaagagattccatcgacagaaatatcttgcgtccgcggaacgggctgcattagccaagtctctcaagatgactgacgcccaggtgaagacctggtttcagaaccgtcgcacaaaatggagaaggcagacagctgaagagagggaagcagagaggcagcaagccagcaggcttatgttgcagctgcagcatgacgcttttcaaaaatcattaaatgactctatacagccagaccctctgtgtctccacaactccagcctgtttgctctgcagaaccttcagccatgggaggaagattcatcaaaagtgcctgctgtgacctccctggtctag

SEQ ID NO: 243613 - DNA, 312 bp, synthetic construct
  misc_feature 1..312: note = Description of Artificial Sequence: Synthetic coding sequence
  source 1..312: mol_type = other DNA
atggcagagagctggagcgggcaggctctgcaggccctcccagctaccgtccttggcgctcttggctcagaattcctgagagagtgggaggcacaagacatgagagtcactctattcaagctgctcttgctctggcttgtactgtccctgttaggaattcagttagcttggggcttctatggtaataccgttacgggcttgtaccacagaccgggtttaggtggacagaatgggagcacccctgatgggtctactcactttccctcttgggaaatggccgctaatgagcccctgaaaacgcatagggagtag

SEQ ID NO: 243614 - DNA, 387 bp, synthetic construct
  misc_feature 1..387: note = Description of Artificial Sequence: Synthetic coding sequence
  source 1..387: mol_type = other DNA
atggcatctgaggcctccgtgcgcctcggagtgcctccagggaggctctggatccaaagacccggaatttacgaggatgaggaggggaggacttgggtcactgtagtagtcagattcaacccctctcggcgagaatgggcaagggcatcacaaggctcacgttacgagccctcaatcacagtacacctgtggcagatggcagtgcatactagggaactcctctcttcgggacaaatgccgttcagtcaactgcctgctgtttggcagttgtaccccggtaggaagtatcgagccgctgattcctcattctgggaaatcgcagaccacggacagatcgactctatggaacagctcgtactgacctaccaacctgaaagaaaagactag

SEQ ID NO: 243615 - DNA, 387 bp, synthetic construct
  misc_feature 1..387: note = Description of Artificial Sequence: Synthetic coding sequence
  source 1..387: mol_type = other DNA
atggcctcagaggcgtccgtgagactgggagtccccccaggtcgactctggatccagcggccaggtatctacgaagacgaagagggcaggacctgggtgactgtcgtggtccgattcaaccctagcagacgcgagtgggctagggcttctcagggatctcgctacgaaccaagtattaccgtccacctttggcagatggctgtgcatacccgcgagctgttatcatcaggtcagatgcccttttcccaactcccagcagtttggcagttgtatcccggtagaaaataccgtgctgcggatagcagcttttgggaaatagccgaccacgggcagattgactctatggaacagctggtgctgacctatcagcccgaaaggaaagattag

SEQ ID NO: 243616 - DNA, 4776 bp, synthetic construct
  misc_feature 1..4776: note = Description of Artificial Sequence: Synthetic coding sequence
  source 1..4776: mol_type = other DNA
atgggaaatgctgaaagtcaacatgttgaacatgagttctatggcgagaaacatgcctctctggggagaaagcacacctctcgctccctgaggctaagccacaagacccggaggactagacacgcctcatccggcaaggttattcaccggaactcagaggtctccacacgttcgtcctctactccttcaattccccagtctcttgccgagaatgggctagaaccctttagccaggatggaacactggaagactttggaagccctatatgggtggatagggtcgatatgggccttcgtcctgtgagttataccgactcttctgtcacacctagtgtggactctagcattgttctgacagcagccagtgtgcaatcaatgccagatacagaggagagccggctgtacggagacgacgccacttatttagccgagggtggcagacggcaacatagctataccagcaacgggcctacgtttatggaaaccgcctcttttaagaagaagaggagtaaaagcgccgatatttggcgcgaggattctcttgaattctctttatctgatctatcccaggagcatttgacgtcgaacgaggaaatactgggctctgccgaagaaaaggattgcgaggaagccagaggaatggaaacaagagcctccccccgacaattgtcaacatgccaaagggcaaactccctaggtgacttgtatgcgcagaaaaattctggcgtcaccgccaatggcggacccggaagtaaattcgcaggatattgtcgcaatttggtgagcgacattcccaacctcgcgaaccataaaatgccccctgctgcggcagaggagacgccaccctattctaactataacaccttgccatgccgaaagagccattgcctgtcagagggcgctactaatccccaaatcagccattccaacagtatgcagggaagacgcgctaaaaccacacaagacgtgaatgctggggaaggatctgaatttgccgactcaggaatagagggagccactactgataccgatttactcagtaggagaagcaacgctactaacagcagctacagcccaacaacaggaagggcattcgtcggaagtgactcagggtcttcctctaccggcgatgcagctcgtcagggcgtgtatgaaaatttcaggcgagagcttgagatgagtactaccaattcggaatcactggaggaggcgggatctgcccactctgacgaacagtcaagtggcaccctgtcaagtcccggacaaagcgatattttactgacagcggctcagggcaccgtccgaaaggccggtgctctcgccgtgaagaactttttggttcataagaagaacaagaaggtagaatcagccacaaggaggaagtggaaacattactgggtcagtttgaagggctgcactctgttcttttatgaatccgatggcaggagcggcatcgatcacaatagtatccccaaacatgccgtctgggtcgagaacagcattgtgcaggccgtgcccgaacaccccaagaaagatttcgtattttgtttgagcaattctctcggagacgcattcttgtttcagactacgagccagacagagttagagaattggattacagccatacactctgcctgcgctaccgccgtggccagacaccatcacaaagaggacacactcaggctgctgaagtccgaaataaaaaagcttgagcagaagattgacatggatgagaagatgaaaaagatgggagagatgcaactttcatcagtcaccgatagcaagaagaaaaaaaccatcctggaccaaatcttcgtgtgggaacaaaacctagagcagtttcagatggacttatttcgattcagatgctacctggccagcctgcagggaggtgaattacccaacccaaagaggttgcttgcgtttgcatcccgacctaccaaagtcgccatgggcagattaggtatctttagcgtatcttccttccacgctttggttgccgcacgcacaggtgaaaccggagtcagacgcagaacccaggctatgtctcgctctgctagcaagcgcagaagtcgcttcagttccctctggggcctcgataccacgtccaaaaaaaagcaagggcgaccaagcattaatcaagtgttcggcgaaggcacagaagcggtgaagaagtctctcgagggcatatttgatgacatcgtcccagatggcaaaagagagaaggaggtggtcctgcccaacgtacaccaacataacccagactgtgatatctgggttcacgagtacttcacaccttcctggttttgtctccctaacaaccagcccgcactgaccgtggtcaggcccggagacaccgctcgagatacactagaactgatttgcaagacacatcaactggatcactccgctcattatttacgcctgaaatttctaattgaaaataagatgcagctatacgtgccacagcctgaagaagatatctacgagcttttatataaggagatcgagatttgtcccaaagtgacccaaagtattcatattgagaagtcagacactgctgccgacacgtacggattttccctgagttcagtcgaagaggatggtatccggaggctgtatgtgaattctgttaaggaaacgggtctggcctccaaaaaaggcctgaaggcaggggacgagatcttggagattaataacagggccgcagatgcattgaattctagtatgctgaaagactttctctctcagccttcactcggcctgctggtgaggacttatccggaattggaggagggagtcgaactcctggaaagcccacctcatagggtggacgggcctgccgatttaggagagagtcctttggccttcctcacatctaaccctggacatagcctctgctctgagcaagggagttcagccgaaacggcaccggaggaaacggagggacccgacctggaatcaagcgatgagacggatcactcgtcaaaaagcacagagcaggtggctgccttctgtcgcagccttcatgaaatgaatcccagtgaccagtcaccttccccgcaggacagcacggggccacagctcgcaaccatgcgccaactaagcgatgccgataaactcaggaaagtcatctgtgaattactggagacagaacgcacatatgttaaggacctgaattgcctgatggaacggtacctgaaacccctgcagaaggagacctttttgacccaggatgagctggatgtactgttcggaaatctgaccgaaatggtggaatttcaagttgaattcctgaaaaccctggaggacggtgtcagactggtaccggacctggagaaattagaaaaggtagaccagttcaagaaggtccttttctccctgggtggatcattcctttattacgcagaccgttttaaactttattctgccttttgtgcttctcacactaaggttcccaaagtgttagtaaaggccaagactgatactgcctttaaggctttcctggatgcccagaatcctaagcaacaacactcttcgactttggaaagctacctgatcaagcccatacagagaatcttgaagtatccgctgctgctgcgcgaactctttgctctaactgacgcggaaagtgaagaacactatcacctcgacgtggccatcaagacaatgaacaaggttgctagtcacattaatgagatgcagaaaatacacgaggagtttggggctgtctttgaccaacttatagcagaacagactggggagaaaaaggaagtcgctgaccttagtatgggagatctccttctgcataccactgtgatctggctgaaccctcccgcatcactgggcaagtggaagaaggagcccgagcttgccgcttttgtgtttaaaacagcagttgtactggtgtacaaagatggttcgaaacagaagaaaaaactggttgggtctcaccgcttaagcatctatgaggactgggacccttttcgatttcgacatatgattcctactgaagccctgcaagtgcgcgctctcgctagcgcagatgccgaggccaatgcagtatgcgaaatcgtgcacgtaaaaagtgaatccgagggcaggcctgaaagggtgttccatctatgctgctcgagtcccgagagccggaaggattttctgaaggcagtccactctattttgcgggacaaacaccgtcgccagctgctgaagacagaatccctgccttcaagccagcagtacgttcccttcggaggaaaaaggctctgtgccctcaaaggcgctaggccagcaatgagtcgggcagtaagcgctccctccaagagcctcgggaggcgacgcagaaggctggcacgtaacagattcactattgattctgatgccgtgtcagcaagtagtccagagaaggagagccaacaaccacccggaggtggagatacagataggtgggtggaggagcagttcgatttagcacaatacgaagaacaagatgatattaaggaaactgacatactgtcagatgacgacgaattctgtgagagcgtgaaaggtgcaagcgtcgaccgggacctccaggaaaggttgcaggccacgtcaatcagccagagggagaggggcaggaagacactggatagccacgcctcacgaatggctcagctgaagaaacaggcagcgttgtccggaatcaatgggggattggagtctgccagtgaggaggtaatatgggtgcgcagggaagactttgcacccagtagaaagcttaacactgagatttaa

SEQ ID NO: 243617 - DNA, 3216 bp, synthetic construct
  misc_feature 1..3216: note = Description of Artificial Sequence: Synthetic coding sequence
  source 1..3216: mol_type = other DNA
atggaaacggcctcattcaaaaagaaaagatcaaaatcggcagacatttggcgggaggactctctcgaattctcgctgagcgatctgtctcaggagcacctcacttcgaatgaggaaatcctgggctctgcagaagagaaagattgcgaagaagccagaggaatggaaacgcgggcttccccaagacagctgagcacctgccaacgggctaattccctcggcgacctttatgcacagaagaacagtggggtcacggcgaatggcggaccaggatctaaatttgccggatactgccgtaatctcgtgtcagatattccaaatctggcgaaccataaaatgcctcctgctgccgcagaagagactcccccttactcaaactacaacacattgccctgtcgaaaaagccactgtctgtctgaaggggcaacaaatccacagatctcccatagcaatagcatgcagggacggagagcaaaaactacacaggacgtcaacgccggtgaggggtccgaattcgctgattccggcatcgaaggcgctactacagacaccgatctcttaagtaggaggagcaatgcaaccaactcgtcctattctcccaccaccggaagagcattcgtcggaagtgatagcggatcttctagtacgggcgacgccgctcgccaaggtgtctacgaaaatttccgcagggagctggaaatgagtacaaccaatagcgagtccctcgaggaggcgggaagcgcacattccgacgagcaaagttctggaactctatctagccccggtcagtcggacatcctgctaacagcagcacaagggacggtgagaaaagctggtgcgcttgccgtgaagaatttccttgtgcacaaaaagaataagaaagtggaatctgccacccggaggaagtggaaacactactgggtgtccctgaagggatgcacactgtttttttacgagagcgatggaagatcgggtattgaccacaactcaatacccaaacatgcagtgtgggtcgaaaatagtatagtgcaagcagtgcccgagcacccaaagaaggactttgtgttttgcctttctaatagtttgggggacgcgttcctgtttcaaacaacatctcaaaccgagctggagaactggattacagccatccattctgcctgtgctactgccgtcgcacgccaccatcataaggaggataccctgagactgttgaagtctgagatcaaaaagttggagcaaaagatcgacatggatgaaaaaatgaagaaaatgggtgagatgcagctgtcctccgtgactgacagcaaaaagaaaaaaacaatcttggaccaaatttttgtgtgggaacagaacctggagcagtttcagatggacctgttccgttttcgatgctaccttgcttctttacaggggggagagttgcctaacccaaagcggctgctggcctttgcctcaaggcccactaaggtcgcaatgggccgtttaggaattttctctgtgtcgagctttcacgctctggttgctgccaggaccggggaaacaggcgtgagacggagaacccaggcaatgtcacgatctgcaagcaaacgacgcagtagattcagctcactgtgggggctggatacaaccagcaagaaaaagcagggccgaccatctattaatcaggtgttcggggagggaactgaagccgtgaagaaatctctagaaggtatcttcgatgatatagtgccggatggtaagagagagaaagaggttgtgctcccgaatgtgcaccagcacaaccccgactgcgatatatgggttcatgagtacttcacacctagctggttttgcttacccaacaatcagcccgcattgaccgtcgtccggccaggggatacagcgagagatacgctggagctgatttgcaaaacccatcaacttgaccattcagcacattacctgaggttgaagttcctcatcgagaacaaaatgcagctgtacgtcccacagcccgaagaagatatctatgaacttttgtacaaggagattgaaatctgtcccaaggtgacacaatcaattcatatcgaaaaaagtgacacggccgctgacacttatggatttagcctttccagtgtggaggaagatggtattaggcgcctttatgtcaatagtgtgaaagagactggattagccagcaagaagggtctcaaggctggagacgagattctcgagatcaataaccgcgcagcagatgccctgaacagctccatgctcaaagactttctgtcccagccttccctgggactcctggtcaggacctaccctgaactggaggagggtgtggagctgctggagtcacccccacacagggtcgatggacctgccgacttaggcgaatcaccattggcctttctgacctctaaccctggacactcgctgtgctctgagcagggaagctccgctgagaccgcaccagaagaaacggaaggccctgacctggaatcttcggatgagaccgatcacagttccaagtcaacggagcaagtcgcagccttctgccggagcttacacgagatgaatccttccgatcaatccccatcacctcaggactccaccggcccacagttggcaaccatgagacaactgtcagacgcagacaaacttcgaaaagtgatctgcgaactcttagagacagagcgcacatatgttaaggacctcaactgccttatggagaggtacctgaaacctctgcagaaggagacgtttctaactcaggacgaactggacgttctgtttggaaaccttaccgaaatggtggagttccaggttgagttcctaaagactctggaggacggagtaaggttagtacccgatttggaaaagcttgagaaggtggatcaattcaagaaggtgctgttttcccttggcggaagctttttatactacgctgatagatttaagctctatagcgccttctgcgcacacaagtcctcccaggggcctggcgagtcacaggatcggcatggattccaaggcatactggggtgtccagagcctgaagcagctgccttaatccatgccggtgtcgtgccacatcaggcgcacccagaggatccgcaagtccccacaagcgcccagggggcagtccgccctgaccgatgtggagagcgaggagcattgcctccagggagagggcaccaggaccatgaacagggctgtcagagccaccagtag

SEQ ID NO: 243618 - DNA, 678 bp, synthetic construct
  misc_feature 1..678: note = Description of Artificial Sequence: Synthetic coding sequence
  source 1..678: mol_type = other DNA
atgggtaacgctgaaagccagcatgttgaacacgaattttatggggagaaacatgcttctctgggcagaaagcacaccagcagatccctcagacttagtcacaaaaccaggcggacaaggcatgcgtcatctggaaaggtgatacaccgcaacagcgaagtctcaacaagaagttctagtaccccttccatcccccagagtctggcagagaacggtctggagccattcagtcaggatggaaccctcgaggactttggatcccctatttgggttgatcgggtagatatggggctgagacccgtcagctatacagacagcagcgtgacccccagtgtcgacagttccattgtgctgaccgctgcctccgtccagtcgatgcctgataccgaagaaagcaggttatacggcgatgacgccacgtacttggcggaggggggaaggcgccagcactcgtacactagcaacggcccaacgttcatggagaccgcctccttcaaaaagaagagatcgaagagcgccgacatctggcgggaggatagcctcgaatttagcttaagcgatctttcccaagagcacctaacttccaacgaggaaatccttggtagcgccgaggagaaggattgcgaagaagctagagggatggagactagagcttccccacgtcagctgagtacatag

SEQ ID NO: 243619 - DNA, 4596 bp, synthetic construct
  misc_feature 1..4596: note = Description of Artificial Sequence: Synthetic coding sequence
  source 1..4596: mol_type = other DNA
atgggcaatgcggaatcccagcacgtagagcacgaattctatggcgagaagcatgcctccctgggaaggaagcacaccagtcgctctttgcgcctgagccacaagacccggaggactagacacgcctcatccgggaaggtaattcatcggaactctgaagtttctacgcgctcctcatctacacctagtatcccccaatctctggctgagaacgggctggagcctttcagtcaggacggcaccctggaggacttcggaagtcctatctgggtggatcgcgtggacatgggactgcgaccggtatcatatactgattcttccgtgacccctagcgttgactcaagcatcgtcttgaccgccgcttccgtgcagagcatgccagatacagaggagagtagattgtacggggacgatgcaacgtacctggccgaagggggtagacgccagcatagctatacatctaacggccctacattcatggagacggcctcattcaagaagaagcggtctaaaagcgccgacatctggcgggaggatagccttgaattctctctgagcgacctgtcccaggaacaccttacctctaatgaggagatcctgggctccgctgaagagaaggattgtgaggaggcacggggtatggaaactagagcttctcctcggcagctctctacctgccagcgagcaaactcacttggggacctgtatgctcaaaagaattccggtgtcacagctaacgggggtcccggatccaagtttgcgggatattgcaggaatctcgtgtctgacatcccgaacctggccaaccataaaatgccacccgctgctgccgaagagacccctccctactccaactataacaccctaccctgccgcaagagtcattgcttgagcgagggagcgaccaatcctcagatttcccactccaactccatgcagggccgtcgcgcaaagactactcaggacgtcaacgctggtgagggctctgagttcgcagatagtggaatagaaggagccacaaccgacaccgatctgctatcccggcgatccaacgccaccaattcctcttactccccaaccactggtcgagccttcgtaggaagtgatagcggctcctcgagcactggagacgcggcacggcaaggagtctacgagaatttcaggagggagctagagatgtcaaccacaaattccgagtctcttgaggaggctggatctgcccatagtgacgaacagtcatccggcacgctgtcatcacccggacagagtgacattctgttgactgcagcacagggaacagtgaggaaagcaggagcactcgcggtgaaaaacttccttgtccacaagaaaaataaaaaagtagaatcagcgacacgaagaaaatggaaacattactgggttagtcttaaggggtgcaccctatttttctatgaatcagatggacgttctgggatagaccataattctattcccaaacatgctgtttgggtggagaactccatcgtacaagcagtacctgaacatccaaagaaggattttgtcttttgcctgtctaatagcctcggcgacgcctttctgtttcagacaacaagtcagacagaattggaaaattggattactgccatacactccgcatgcgccacggccgtggctagacatcaccacaaggaggacacgctcaggctgttaaaatcggagattaagaaactggaacagaagattgatatggacgagaaaatgaagaagatgggggaaatgcagctatcaagcgtgaccgacagcaagaaaaagaaaacgattctagaccagatttttgtttgggagcaaaacctagaacagttccagatggacctgttcagatttcgatgctacctggccagtttacaaggcggtgagttgcctaatcctaagcgcctgctggcatttgcgtccaggccaaccaaggttgccatggggagactgggtattttcagtgtttctagctttcatgcattggttgctgccagaaccggggaaaccggcgtgagacgtagaacccaggccatgtcccggtcggcaagcaaaagacgcagcaggtttagctccttatggggtctggatacgacctcaaaaaaaaaacagggcagaccttccattaaccagcgcgagaaagaggtcgtgctccccaatgtgcaccagcacaatccagactgcgacatctgggtccacgaatacttcactcctagctggttctgcctaccaaacaaccaacccgctctgacggtagttcggccaggtgatacagcgcgagacaccttggagctgatttgcaagttgtataaggagatagagatctgtccaaaagtcacacagtccattcatattgagaagtccgacacagccgcagatacctatggcttttcactctcctctgtggaagaagatgggattcgcagactttatgtcaatagcgtgaaggagaccggattggcgtccaaaaaaggtctgaaagccggtgacgaaattttggagatcaacaaccgtgctgctgacgccctgaactcctctatgttgaaggattttctgtcacaaccatctctgggcctgctggtgcggacttatcctgagctggaagagggagtggaacttctggagtcccctccccaccgggtggatgggcctgcagatcttggggaatctccactggcattcctcacttccaaccctggccacagcctgtgctccgagcagggcagtagcgcagagacagcacccgaggagaccgagggtcctgacttggagtctagcgatgagaccgatcacagctctaagtcaacagagcaggtagccgctttctgtcgctctttacatgagatgaacccctcggaccagagcccctcaccacaagattcaacgggtccccagctagcgaccatgcggcagttgagcgatgccgataaactgagaaaagtgatatgtgaattgttagaaactgagcgcacctatgtgaaagacctgaactgcctgatggagaggtacttaaaacctctgcaaaaagagaccttcctcacgcaggacgaacttgatgtgctctttggcaacctgacagagatggtggagttccaagtggagttcctgaagaccttggaggacggggtcaggcttgttcctgacttggaaaagctggagaaagtcgaccagttcaagaaagttctttttagccttggcggttctttcctatattatgccgacaggttcaagctctattcagcattctgcgcatcccacaccaaagtgcctaaagttctcgtcaaggctaagactgatacggccttcaaggcatttctcgacgcccagaatcccaaacagcagcactcgtccacactggaatcatatctgattaaacctatacagagaatcctcaaatacccactgttgctcagagagctttttgccttaacagatgctgaaagtgaagagcactaccatctggatgtggctatcaagacaatgaacaaggtggcctcgcatataaatgaaatgcagaaaatccacgaggagttcggagccgtgttcgaccagctaatcgctgagcagaccggcgagaaaaaagaggtcgccgacttgagcatgggggatttactcctgcacactaccgtgatctggctcaatccgcctgctagcctgggaaagtggaaaaaggagcccgagctggccgctttcgtgtttaaaactgcagttgtgctggtgtacaaggacggtagtaagcagaaaaaaaagctggtcggatcccaccgattatccatatatgaggattgggatccgtttcggttccgccacatgatccccaccgaagccttacaggttcgggctttggcctccgccgatgctgaggctaacgccgtatgcgaaattgtgcacgtcaagagcgagtcagaaggacggccagagcgtgtattccacctttgctgcagttctcctgagagcaggaaggactttctgaaggccgtgcactctatcctgagggataagcatcggaggcagcttctgaagaccgagagcctgcctagcagccagcagtacgtgcccttcggtgggaaaagactatgcgcccttaagggcgcaaggccagctatgagccgagctgtttccgcaccctctaagagcctgggaagaagacgcagacgcctcgctaggaataggttcacaatcgattccgacgccgtgagcgccagctctccggagaaggagtcccagcaaccacctggaggaggtgacacggatagatgggtggaggagcaatttgatctggcacaatatgaggaacaggatgatataaaagagaccgatattttgagcgacgacgatgagttctgcgaatccgtcaagggcgcatccgtcgaccgagatctgcaagaaagacttcaggcgacctccatttcgcagcgcgaaaggggaaggaaaaccctggacagtcacgcctctcggatggcacaattgaaaaagcaggccgcattgtccgggatcaatggaggcttggagtctgctagcgaagaagtaatttgggtgcgcagggaagacttcgctccatcgagaaagttgaataccgagatatag

SEQ ID NO: 243620 - DNA, 2493 bp, synthetic construct
  misc_feature 1..2493: note = Description of Artificial Sequence: Synthetic coding sequence
  source 1..2493: mol_type = other DNA
atgggcagcatgtttcggagcgaggaggtggccctggtgcagctgttcctgcccacagcagcagcttacacttgtgtttctcgactcggcgaactggggctcgttgagttcagggatttgaatgcttccgtctccgcctttcaaagacggtttgtcgttgatgtacgcaggtgcgaggagctcgaaaagaccttcaccttcctgcaggaggaggtgcgtcgggctggtctggtgcttccacccccaaaaggcaggttgccagcccctcccccaagagacctgctaaggattcaggaagaaaccgaaagactggctcaggagctccgcgatgtccggggaaaccagcaagccctgcgagcccagctccaccagctgcagctgcatgccgcagtgctacgccagggccatgagccacagttggctgcggcacacacagacggcgctagtgagaggactcctctgttgcaagccccagggggaccgcatcaagatcttcgggtgaacttcgttgccggagccgtcgagccgcacaaagcacccgctttggaaaggctgttgtggcgggcatgccggggtttcctaattgcttctttccgagagttggaacagcctctcgaacatcctgtgacaggggagccagcgacatggatgactttcttgattagctattggggggaacaaattggacagaagatccgaaagattaccgactgcttccactgccacgtctttccatttctccagcaggaagaagcccgactaggagcacttcagcagttgcagcagcaatcccaggagcttcaagaagtgttgggagaaaccgaacgatttctctcacaggtcctgggacgcgttctgcagcttttgccgccaggtcaagtccaggtccataaaatgaaggcagtatacttggcgctaaaccagtgttccgtgtcgacaacacacaaatgtttgatcgctgaagcttggtgtagtgtgcgcgacttgcctgccctgcaagaggccctcagggacagttcaatggaagaaggggtgtccgctgttgctcacagaatcccctgccgagatatgccccctactctcataaggaccaataggtttaccgcctctttccaaggaattgttgacgcgtacggggtaggccgataccaggaggtgaatccagctccctataccatcatcaccttcccttttcttttcgctgtcatgttcggcgatgtcggccacggcctgcttatgtttctgttcgcactggccatggtcttagctgagaatagaccagccgtgaaagcagcacaaaatgagatctggcagacttttttccgaggacggtacctcttgctgctgatgggattgttttcaatctacacaggcttcatctacaatgaatgcttttccagagccacgagtatcttcccatctggctggagcgtggctgccatggcaaatcagtccggatggtccgatgcattcttggctcagcacactatgctgacgctcgaccctaatgtgacgggtgtcttcctcggcccatatccttttggtattgacccaatctggtccctggcagcaaatcatctgagctttcttaattccttcaagatgaagatgtccgtgatactaggagtggttcacatggcctttggggtggtgctgggcgtgttcaaccacgttcacttcggtcaacggcaccggctgttgctggagaccttgccggagctgacctttctcctaggtctgtttggctacctagtgttcctggtgatctataaatggctttgcgtgtgggcggctagagccgcttcagccccttccattttgattcatttcataaacatgttcttgttcagtcactcacctagtaacagactgttgtatccgagacaggaagtagtacaagccaccctagtggtactcgccctcgctatggtgcctattcttctgcttggtacccccttgcacctgctgcatcggcatagaagaagactaaggcggaggccagctgataggcaagaggagaacaaggcgggtctcttggacctccctgacgcgtccgtgaatggctggtcctcggatgaggaaaaggctggcggtctggatgatgaggaagaggctgaactagtgccaagcgaggtgttgatgcatcaggccattcacactattgagttctgcctcgggtgcgtgtccaataccgcttcctacttaagattatgggcactgtcactcgcccacgcccagctcagtgaagtgctgtgggctatggtcatgcgcatcgggctcggactgggcagggaagtgggggttgccgctgtggtgctggtgccaattttcgccgctttcgcagtaatgaccgtggctattttgcttgtgatggagggcctgtctgccttcctccacgcactgcggctgcactgggtagaattccaaaacaagttttactccggcaccggatacaaattgtcacctttcaccttcgcggcaacagacgattag

SEQ ID NO: 243621 - DNA, 657 bp, synthetic construct
  misc_feature 1..657: note = Description of Artificial Sequence: Synthetic coding sequence
  source 1..657: mol_type = other DNA
atgggatccatgttcagatctgaggaggtggcccttgttcagctgttcttacccacagccgcagcatacacatgtgtgtctcggctgggcgagctggggctggtggagttcagggatctgaacgccagcgtctccgccttccagaggcggtttgtggttgacgtacggagatgcgaggagctcgagaaaaccttcacgttcttgcaagaggaggtgagacgcgctggcctggtactgccccctccgaagggccgactccctgcaccaccgccacgggatttactgcgcatccaggaggaaacggagcggctggcccaggagctgcgggatgtgcgcggaaatcaacaggcattgagagcccagctccatcagctgcagttgcatgccgcagttttgcggcagggtcacgaaccccagctcgcagccgcacatactgatggagccagcgagcgaactccacttcttcaggctccgggagggccacatcaagatttgagagtgaattttgtcgcaggcgcagttgagccgcacaaagctcctgccttggagcgcctcctttggagggcatgccgcggattcttaatcgctagtttccgcgagctggagcagcccttggagcacccggtgactggagaacccgcaacatggatgacctag

SEQ ID NO: 243622 - DNA, 186 bp, synthetic construct
  misc_feature 1..186: note = Description of Artificial Sequence: Synthetic coding sequence
  source 1..186: mol_type = other DNA
gacgacgaagaagaggccgagctggtgccaagcgaggtgttaatgcatcaagcgatccacactatcgagttctgcctgggctgcgtatcaaacactgccagttatttgaggctgtgggcattgagcctcgcgcatgccagatggaactcgcgcacttctagtacacaagccagagcaacctcatag

SEQ ID NO: 243623 - DNA, 1845 bp, synthetic construct
  misc_feature 1..1845: note = Description of Artificial Sequence: Synthetic coding sequence
  source 1..1845: mol_type = other DNA
atgacgtttctgatatcatactggggggaacagattggccagaaaatccggaaaattaccgactgcttccattgccacgtgttccctttcctgcagcaggaggaggccagactgggggcattacagcagctgcagcagcaaagtcaagaactgcaggaggttttaggtgaaacagagcgatttttgagccaggtcctcggcagagtcctacaactgttgcctcctggccaggtacaggtccacaagatgaaagctgtgtatcttgcattaaatcagtgcagcgtgtctactactcacaagtgtctgatcgcagaggcatggtgttctgttcgtgacttgccggcattgcaggaagcactacgggatagtagcatggaagaaggggtgagcgccgtcgcccacaggattccctgtcgggacatgccgcctacccttatccggactaatcgttttactgcttcgtttcagggtatcgttgatgcatacggagtgggtcggtatcaggaggtcaatccggctccgtacaccatcataaccttcccattcttgtttgctgtgatgttcggcgatgttggccacggactgctgatgtttctcttcgcccttgctatggtgctagctgagaaccggcctgccgtgaaggctgcacaaaacgagatatggcagacttttttccggggaaggtatttacttctgctgatggggctgttcagtatctataccggtttcatatataacgaatgcttctcccgcgctacatctatatttccaagcgggtggtcagtggccgcaatggcaaaccagtcgggctggagcgacgcctttctggcacagcataccatgctgaccctcgatcctaacgtgaccggcgtgtttctcgggccatacccctttgggatagaccctatctggtctctcgccgctaaccatctgtcttttcttaactctttcaagatgaagatgtccgtgatccttggggtagtgcacatggccttcggagtggtccttggtgtgttcaaccacgttcattttgggcaaagacacagacttctcctcgagactctgccggaactgacctttctgttgggcctgttcggctatcttgtgtttttggtgatttataaatggctttgtgtctgggcagccagggccgcttccgccccatctatattgattcatttcatcaacatgtttctgttttcacactcaccctctaatcgactgttgtatcccaggcaggaagtggtgcaggctactctggtggtgctggccttggccatggtccccattctgttgttggggaccccactccacctgcttcacaggcaccgccgtcgtctgcgcaggagacctgcggatcgtcaggaagaaaacaaagccggactgctggaccttcccgatgcatccgtgaatgggtggtcctctgacgaggagaaggcgggtggattagatgatgaagaggaggccgagctggtcccgagtgaggtactgatgcatcaggcgatccacaccattgaattctgcctcggctgcgtatcgaatacagcatcttacctcaggttgtgggcactgagtctggcgcatgcgcagctttccgaggtgctgtgggctatggtaatgcgcattgggctcgggctgggacgtgaagtgggagttgcggctgttgtgcttgtgccaattttcgcagcatttgccgtgatgaccgtggccattcttttggttatggagggattgtctgcctttctccacgcccttagactccattgggtcgaattccagaataaattttattcaggaactggatacaagctgtctcctttcacatttgctgcgactgacgactag

SEQ ID NO: 243624 - DNA, 357 bp, synthetic construct
  misc_feature 1..357: note = Description of Artificial Sequence: Synthetic coding sequence
  source 1..357: mol_type = other DNA
atggtcccaatcttactgctgggcacccccttgcatctgctccatagacatcgcagaaggctgaggaggagaccggctgatcgtcaggaggaaaataaagccggactgctggacctgcctgatgctagcgtgaatggttggagctcggacgaagaaaaagctgggggtctggatgatgaagaggaagccgagctcgtcccaagtgaggtgctcatgcatcaagctatacacactatcgagttttgcctcggttgtgtgtccaacacggcctcttatttacggctctgggcgctgtctttggcacatgcgcgttggaactcccgcacttcttctactcaagctagagctacttcatag

SEQ ID NO: 243625 - DNA, 1671 bp, synthetic construct
  misc_feature 1..1671: note = Description of Artificial Sequence: Synthetic coding sequence
  source 1..1671: mol_type = other DNA
atggagggcccattgtccgtgttcggagaccgcagcactggagaaacgatcaggagtcagaatgtcatggctgctgcatcaatagccaacattgtgaaaagcagccttggaccagtcggccttgacaagatgctggtggatgatatcggagacgtcacaatcaccaacgatggagccactattctgaagctacttgaggtggagcaccccgctgctaaagtcctgtgtgaactggcagaccttcaggacaaggaggtgggcgacggcacaacctctgtggtgattattgcagctgaacttctcaagaacgccgacgagttggtgaagcagaaaattcaccccacctctgtaatttctggctatcgtctggcttgcaaggaagccgtaagatatatcaacgagaacctgatcgtgaatactgatgagctcggaagagattgtctcatcaatgccgctaagaccagcatgtcaagcaaaataatcggcataaacggtgacttttttgccaacatggtggttgacgccgtgctggccattaaatataccgacatccgagggcagcccagatatcccgtgaatagtgtcaatatattgaaagctcacggtagaagtcagatggagtcaatgctgatttcaggttacgccctgaattgcgtcgtgggctcgcagggcatgcccaagcggatagtgaatgccaaaatcgcctgcctggatttcagtttgcaaaaaacaaagatgaagctcggagttcaggtggttatcactgaccccgaaaaactggatcagattcggcagcgggagtcggatatcacaaaagagcgaattcagaaaattcttgccaccggggctaacgtgattctcaccaccggtggaattgacgatatgtgccttaagtattttgtggaagccggtgcaatggctgtgcggagggtgctgaagagggacctgaagagaatagccaaagcgagtggcgctaccattctgtccaccttagccaatctggaaggagaagagacctttgaggctgccatgctaggccaggcagaggaggtcgtgcaggaacgaatctgcgacgatgaactgatcctaatcaaaaacacgaaagctaggacctcagctagtattatcctgcgcggagcgaacgacttcatgtgcgatgagatggagaggtctctgcacgatgcgctctgcgttgtgaaaagggtgctggaaagtaaatccgtggtgccaggaggcggagcggtagaagcggctttgagtatttatttagaaaactacgcgacatcgatgggatctagagagcagctcgctatcgctgagttcgccaggagccttctagtgattccaaatacactggcagtgaacgcagcccaagactccacagacctggttgctaagctgagggccttccataatgaggcccaggtcaatccagaacgcaagaacttaaaatggattggcctagacctcagtaatggaaagcctcgagataataaacaggccggagtgttcgagcccaccatagttaaggtcaagagtctgaagtttgcaactgaggcagccattaccattctgcgaatcgatgacctgatcaagctgcacccagagagtaaggacgacaagcacggcagttatgaagacgctgttcactctggcgcattgaatgactag

SEQ ID NO: 243626 - DNA, 1206 bp, synthetic construct
  misc_feature 1..1206: note = Description of Artificial Sequence: Synthetic coding sequence
  source 1..1206: mol_type = other DNA
atgagcagtaagatcatcggaataaacggagatttttttgcgaacatggtcgttgacgccgtgttagctattaaatacaccgatattcgcggacagcccaggtaccctgtgaattctgttaacatcctgaaggcccatggcagatcccagatggagtctatgctaatctcaggctacgccttaaattgcgtcgtgggcagccaggggatgcccaagcgcatcgtcaatgcgaaaatcgcctgtctggactttagcctacaaaaaaccaagatgaaactcggggtgcaagtcgtaataaccgacccagaaaagttggaccagattcggcagcgcgaaagtgacataactaaagaaagaatccagaaaattctggccacaggtgctaacgtgatcctgaccactggcggaatcgatgatatgtgtctcaaatacttcgtggaggccggtgccatggctgttcggagagtactgaaaagagacttgaaaagaatcgccaaagcctctggcgctaccatcctgtcaacccttgcaaatctagaaggggaagagacctttgaagcagccatgttaggacaggctgaagaagtcgtccaggaacgaatctgtgacgacgaactgatactgatcaaaaacaccaaggctcgaacaagcgcaagcattattctccgcggagctaacgacttcatgtgtgatgagatggaacgctcactccacgatgctttgtgtgtagtgaaaagagtcctcgagtcaaaatccgtggtgccaggcggaggggcagtcgaggctgctctgagcatttatctggaaaattatgccacttctatgggctccagagagcagttagctatcgccgaattcgcaagatccttgcttgtgatcccaaatacattagcagtcaatgctgctcaagactcaacagatttagttgcaaagctgcgggcttttcacaacgaagcccaagtcaaccccgaacgcaagaacctgaagtggatcggcctcgacctgtcaaatggaaaaccgcgagacaataaacaggccggagtcttcgagcccacaattgtcaaggtcaagtcacttaaatttgcgaccgaggccgcaattacaatcctgaggatcgatgacctgattaaactgcatcccgagtctaaggatgacaagcacgggtcatacgaggatgcggttcacagcggtgctttgaatgactag

SEQ ID NO: 243627 - DNA, 1302 bp, synthetic construct
  misc_feature 1..1302: note = Description of Artificial Sequence: Synthetic coding sequence
  source 1..1302: mol_type = other DNA
atggaagggccattaagtgtgttcggcgatcgcagcacaggcgaaacaatacgaagccagaatgtaatggcggctgcctcaatcgctaacattgtaaagtccagtctcggccctgtcggcctggataaaatgctcgtagatgacataggcgatgtcaccattactaatgatggcgctactattcttaagttgttagaggtggaacaccctgccgctaaggtgctgtgtgaactcgcggacctccaggacaaggaggtgggtgacggaacaactagcgtcgtgattatagctgccgagttgttaaagaatgctgacgagctcgtgaaacagaagattcaccccacatctgttatttcaggctaccggcttgcctgtaaggaagccgttaggtatataaatgagaatctgatcgtgaatacagatgagttgggcagagactgcttgattaacgcagccaaaacttccatgtcttccaaaatcatcggcatcaacggtgacttctttgccaatatggtcgtagatgccgttcttgccatcaaatataccgatatccgcggtcaaccgaggtatccagtcaattcggtaaatattctcaaggcccatggtagaagtcaaatggagtcaatgcttatctctggctacgcgctgaactgcgttgttggctcccagggcatgccaaaacgtattgtgaacgctaaaattgcctgcttggacttttctctccagaaaaccaaaatgaagctgggggtgcaagtggtgatcacggacccagagaagctcgaccagattagacagagagagtctgacatcaccaaggagcggatccagaagattttggcgaccggcgctaacgtgatcctgactactggtggaattgatgacatgtgtttgaagtattttgtggaggccggagctatggcggtacgacgcgtgcttaagcgggacctcaagcggattgctaaggctagcggcgctactatcctatccactttagctaatcttgagggcgaggaaacctttgaggccgcaatgctgggacaggccgaagaagtggttcaggagagaatctgcgacgacgagctgattctcatcaaaaacactaaagcaaggacgtctgcttccattatcctgcgaggggctaacgacttcatgtgcgatgaaatggagaggagcttgcatgacgctctgtgcgtggtgaagcgcgtactcgaatccaaatccgttgtccccggagggggtgcggtggaagcagctttgagtatttacttagagaactatgcgacatctatggactggtcttag

SEQ ID NO: 243628 - DNA, 648 bp, synthetic construct
  misc_feature 1..648: note = Description of Artificial Sequence: Synthetic coding sequence
  source 1..648: mol_type = other DNA
atgctggccggacagctggaggcaagggaccccaaggaaggtacccaccccgaagatccttgcccgggagcaggcgctgtcatggaaaaaaccgctgtcgccgcagaagtccttactgaagactgtaacaccggagaaatgccacctctgcagcagcagattataagactgcaccaggaactggggaggcagaaatcactttgggccgacgtgcacgggaaacttcgatctcacatagacgccttgagggaacaaaacatggagctgcgagagaaactccgtgccctgcagctgcagcgctggaaggctcggaaaaagtctgcagcctcaccacatgctgggcaggagtcccatactctagccctggagcctgctttcggcaaaattagtcctctctcagcagacgaggagacgattcccaagtacgccggtcataaaaatcagtccgctacactgctaggccaaaggtccagctccaacaattccgcccctcctaaaccaatgtcccttaaaattgagcgcatttcatcttggaagacccctccgcaggagaaccgagataagaatctgtcgcgcagacgccaagatagaagagcaacaccaactgggcgacccacaccttgcgccgagcgtagggggggagtgtag

SEQ ID NO: 243629 - DNA, 981 bp, synthetic construct
  misc_feature 1..981: note = Description of Artificial Sequence: Synthetic coding sequence
  source 1..981: mol_type = other DNA
atggagaagacgccggctgccgcagaagtaccccgtgaagactctaatgctggcgagatgcccagcttgcaacagcagatcaccagtctgcatcaggagttggggagacaacaatctctttgggctgacattcatagaaaacttcagtcacatatggacgctctgagaaagcagaacagagaactcagggaagagctccggggtctccagcgtcaacagtgggaagctggaaagaagcccgcagcctcaccacatgccggacgggaatcacacactctggccctagagcccgcattcgggaagatttctcacctcagcgctgacgaagacacgactcctaagtacgccggacgcaagagtcagtccgcgactctgttgggccagcggtggtcatctaatcaccttgcaccacccaagcccatgtccttaaagaccgaacgcattaactccggcaagactcccccacaggaggacagagagaagtcgccaccaggacggagacaagaccgctccccggcaccgaccgggaggccaaccccaggcgcagagcgaagaggcgtgagtgaagacgggaaaatcatgcacccttcctcccgcagcccacagaatagtggcggaagaaagagccctgtgcaagccagtcaagcaaccacactgcaggaacaaactgctgctgctcgcggtgcagaccggagcagctctgttctgggttcatccgaagggggattcttaagcagggtgcaggctgatgaattcgctagcagcgcacccgactccgctgaaaggcaaaatttgccagtgaacccacctagttcattggagatcgctcaggccatggacaccaagatgaaaaaggaagaggtccaggaggagaagagacatccaaagggaaaggccgatgactgccggagatcaggtttcccctctgaattccccggtgctctgcatgccgcaccatctcgacaagatatgggtccatag

SEQ ID NO: 243630 - DNA, 1326 bp, synthetic construct
  misc_feature 1..1326: note = Description of Artificial Sequence: Synthetic coding sequence
  source 1..1326: mol_type = other DNA
atggcgcctaagggcatcctcggaagctttccaaccgctatgaacctgtccctcgaggggaaggttaaggagactgtccataacgcattttgggatcacttgaaggagcagctgagcgccacaccaccagattttagctgtgctctggaactgctgaaagaaattaaagaaatcctacttagcctcttgttgcctagacaaaaccgattgcgaattgagatagaagaggcactcgacatggatcttcttaagcaggaggcagaacacggcgcattgaaggttctgtacttgagcaaatatgtcctcaatatgatggccctcctgtgcgccccagtccgcgatgaagccgtacagaaactggagaacattacagatcctgtgtggctattacgaggaatattccaggtgctcggtcgcatgaaaatggatatggtaaactatactatccaaagcctgcaaccacacttgcaagaacattccattcagtatgaacgcgctaagtttcaggagttgttaaacaagcaaccgtcactcctgaaccacacaacgaaatggttgacccaggccgctggcgacttgacaatgtcccctcccacttgtccagacacaagtgattcaagctctgtggccggaccctctcctaatgaggccgcaaacaaccctgaaccgcttagcccaaccatggtgctgtgtcagggattcttgaacttgttactatgggacttagaaaacgaagagtttcctgaaaccttgctgatggatcgcacgcggctccaggaattaaagtcacagctgcatcagctaaccgtcatggccagcgtgctcctggtggcatcgtctttttctggttccgtgttgttcggaagtccccagttcgtggacaagctcaagcgcattactaagtctttactggaggattttcactctagacctgaagaggccattctcacagtttccgaacaggttagccaggagatccaccagagcttgaagaacatgggcctcgtggccctttcatctgataacacagcctctctcatgggtcagttacaaaatatcgctaagaaggagaattgtgtctgctctgttatcgatcaacggattcatctattcctgaagtgttgcctggtgctgggcgtgcagcggtctctgctggatctgcccggtggtctgaccttgatcgaggcggagctggctgagctggggcaaaaattcgtcaacttgacgcaccacaaccagcaggttttcgggccatattacacggagattctgaaaacactgatttcccccgcacaggcattggagaccaaggtcgagtctgtttag

SEQ ID NO: 243631 - DNA, 1551 bp, synthetic construct
  misc_feature 1..1551: note = Description of Artificial Sequence: Synthetic coding sequence
  source 1..1551: mol_type = other DNA
atgacacgaggtgggggaggcggagataccatatccaagatgccagacgtgaaggaaagtgtgccacctaagtacccaggggacagtgaaggaaggtcttgcaagcccgagacatctgggcctcctcaagaggacaagtcagggagcgaggatcccccaccattcctgagcgtcacaggattgacagagaccgtgaatgaagtgagcaagctgtctaataagatcggaatgaactgcgattattatatggaagagaaagtcctgccaccatccagcctggagggcaaggtaaaagagactgttcacaatgccttctgggatcatctcaaggagcagctcagcgcgacaccccctgacttctcttgcgctttggaactattgaaggagatcaaagagatcttgctgagccttctgttgcctcgccagaacaggctacggatagagatcgaagaggccttggatatggacttgcttaaacaggaagccgagcatggcgcacttaaggtgctctatctgtcaaagtatgtattaaatatgatggccctgctgtgcgccccagtccgagatgaggcagtgcagaaactcgaaaatattaccgatcccgtgtggcttctgcgtgggatattccaggtgctggggagaatgaagatggatatggttaattataccatccagagtctacagcctcacctgcaggaacactcaatccagtatgaacgcgcaaagttccaagaactgctgaataaacaaccctcacttctcaaccacacaaccaagtggttaacccaggccgctggagacctgaccatgtctccacctacgtgccccgacaccagcgacagctccagcgtagctggcccttccccaaatgaagctgccaacaaccctgagccactgtcacccacaatggtgctgtgccaggggttcctaaacttactgctgtgggatcttgagaatgaagaatttcccgaaaccctcctcatggatagaacacggttgcaggagcttaaaagccaactccatcaactgacggttatggccagcgtcctactcgttgctagctcattttccgggtcagtgctgttcggaagccctcagttcgttgacaagcttaaaaggatcactaagtccctcctcgaggactttcatagtcggccagaagaggcgatcctaaccgtcagcgagcaggtcagccaggagatccaccaatccctgaaaaacatgggcctcgtggctctctcttcagacaatacagcctctctgatgggacagcttcagaacatcgcaaaaaaggagaactgcgtgtgctcggtgatcgaccagagaattcatctcttccttaagtgttgcctcgtgttgggtgtgcagaggagtctgcttgacttacccggtgggctaactttaattgaggccgaactcgccgaactggggcagaagtttgtgaatctaacacatcacaatcaacaggtgttcggaccatactatactgaaatcctgaagacactgatcagccctgcccaggcccttgagactaaagtggagagcgtgtag

SEQ ID NO: 243632 - DNA, 822 bp, synthetic construct
  misc_feature 1..822: note = Description of Artificial Sequence: Synthetic coding sequence
  source 1..822: mol_type = other DNA
ggtctcagtcatcgcgcaaccccacaacccgcagccccaccacggtggtatgctccaggcaggcaagcagccagaccgactgagcgtacacctgtggacgatcctaggcggggaaggcgcagtctcgagggcaaagtgaaggaaacggtgcacaatgccttttgggaccacctgaaggagcagttatccgccacccctcctgacttctcatgcgctttggagttgctgaaagagatcaaagagatcctgttgagcctgctgctaccaaggcagaatagactccgcattgagatagaggaagcacttgatatggatctcttaaagcaggaggcggagcacggagccctgaaagtgctgtacttaagtaagtatgtgttgaatatgatggccctgctctgtgccccagtgcgagacgaggccgtgcagaaattggagaatatcacggatcccgtgtggctgctccggggaatctttcaggtgcttggcagaatgaagatggacatggtgaattacaccatccagagtctccaacctcacctgcaggagcattctattcaatatgagcgtgcgaagttccaggagctactgaataagcaaccttccctccttaatcacacaacaaagtggcttacgcaggctgcaggcgaccttactatgagcccccctacatgcccggacacctcagattcgtctagtgtggccggacccagcccgaatgaagccgcaaataacccagaaccattaagcccaaccatggtgctttgccagggttttttgaatttattactatgggacttagagaacgaagagttccccgagtag

SEQ ID NO: 243633 - DNA, 1326 bp, synthetic construct
  misc_feature 1..1326: note = Description of Artificial Sequence: Synthetic coding sequence
  source 1..1326: mol_type = other DNA
atggcccctaagggaatcttggggtcctttccaacagcaatgaacctctcgcttgaaggcaaagttaaggaaaccgtgcacaacgcattctgggaccacctgaaggagcagttgagcgctactccacccgactttagttgcgctctagagctcctcaaggaaatcaaagagattcttctctccctcctcctgcctcggcagaatcgccttcggatcgagattgaggaagccctggacatggatttactgaagcaggaggcggagcatggggctctcaaagtgctctatctctcgaaatatgtcttaaatatgatggctctactgtgtgcacctgtgcgagacgaggcagtgcagaagttggagaacatcactgatccagtttggttactgcgcggtatttttcaggtgcttggcaggatgaagatggatatggtcaattataccattcagtcccttcagcctcatctgcaggagcattctatccaatatgagcgcgctaaattccaagagcttctgaacaagcagccctcactgttaaaccacacaaccaaatggctgactcaagcagctggtgatctgacaatgtccccaccaacatgtccagacacatctgattctagctcagtagccggacccagtcccaacgaggcggcaaataaccctgagcctctgagccctaccatggtgttatgtcaaggcttcctgaacttgttgttgtgggatctggaaaatgaggaattccctgagacactgctgatggatcgaacacgattgcaggaacttaagagccagctgcaccagctgactgtgatggcgagcgtgctgctggtggcctcatccttctcaggatctgtcctgtttggttcacctcagttcgttgacaagcttaagaggatcaccaagagcctgcttgaagactttcactccagacctgaagaggcgattctgaccgtatcggaacaggtatcacaggaaatacaccagtctcttaagaacatgggactagtcgccctaagttcggacaatactgccagcctgatgggacagctgcaaaacattgccaagaaagagaattgtgtttgtagcgtgatcgaccagcggattcatctgttcctcaaatgctgcttggttctcggcgtccagcgctcactgctcgatctgcctggcggtttaacccttatcgaggcagagctggctgagttgggccagaagttcgtgaatctgacccatcacaaccagcaagtttttggcccttactatacggagatcctgaaaacactgatctccccagcgcaagcccttgagaccaaagtggagagtgtctag

SEQ ID NO: 243634 - DNA, 312 bp, synthetic construct
  misc_feature 1..312: note = Description of Artificial Sequence: Synthetic coding sequence
  source 1..312: mol_type = other DNA
atggcacccaagggaatcttagggtcctttcccacggccatgaacttgagtctcgaaggcaaggtcaaggagaccgtccacaacgctttctgggatcacctgaaggaacagctctccgcgaccccgcctgactttagctgcgcccttgagctgctgaaagagatcaaggaaatccttttatccctgctgcttcctcggcaaaaccggctgagaattgagatcgaagaggcgcttgacatggaccttcttaaacaagaggctgaacacggagcactcaaggtcttatacctttcaaagtatgtcctgaactag

SEQ ID NO: 243635 - DNA, 1512 bp, synthetic construct
  misc_feature 1..1512: note = Description of Artificial Sequence: Synthetic coding sequence
  source 1..1512: mol_type = other DNA
atgccagacgttaaagagtctgtgccccctaaataccccggagactccgagggccgaagctgtaagccagagacatctgggccacctcaggaggacaaaagtggctcagaagaccctcccccatttctctccgtgacagggttaaccgaaactgtgaatgaggtgtctaaactgtcaaataagatcggaatgaactgcgattattacatggaagaaaaagtactccctccctcctctttggaaggcaaagtcaaggagactgtgcacaacgccttttgggatcatctcaaagagcagctcagtgcaaccccaccagactttagttgcgcactggagctcctgaaagaaattaaggagattttgctgagcttgctgctccccagacagaaccgccttcggatcgagatcgaggaggctctggacatggacctgctgaagcaggaagccgagcatggggcattgaaagttctgtatctgagtaagtacgtcctgaatatgatggctcttctgtgcgcaccggttagggacgaagctgtccaaaagttagagaacatcactgatcctgtatggcttctccgtggcatatttcaggttctcggacgcatgaagatggatatggtaaactatacaattcagagcttgcagccccacctgcaagaacactccatccagtacgaaagagcgaaattccaggagcttctgaacaagcaaccgtccctactaaaccatactaccaagtggctgacccaagccgcaggagatcttacgatgtctcctcccacatgcccagacaccagtgactccagctctgttgccggaccttccccaaacgaagcagctaacaacccagagcctctgtccccgacaatggtgctctgccaggggtttctgaatttactgctctgggacctcgaaaacgaagagttcccggaaaccttattgatggaccgtacacgcctgcaggaactaaaatcacagttgcaccagttgactgtcatggcatccgtcttgctggtggcgtcaagtttttctgggtcagttctgttcggctccccccagtttgttgataaactgaagagaatcactaaatctctgctggaagactttcactccagacctgaggaggctattcttaccgtgagtgaacaggtgtcacaggaaatacaccaatcccttaagaacatgggactcgttgcgctgtctagtgacaatactgcttccctgatggggcagctccagaacattgcaaaaaaggagaattgtgtgtgttctgtcattgatcagaggatacatctgtttctcaagtgctgcttggtgctgggcgtgcagcgcagcctgctggacctcccgggaggcctgactttgatcgaggctgaattggccgaactaggtcagaagtttgtaaaccttacgcaccataatcagcaggtattcgggccatactacaccgagatactgaagactctgatctcacctgcccaagcgctcgaaaccaaagtagagtccgtgtag

SEQ ID NO: 243636 - DNA, 1413 bp, synthetic construct
  misc_feature 1..1413: note = Description of Artificial Sequence: Synthetic coding sequence
  source 1..1413: mol_type = other DNA
atgacccggggaggcggtgggggagtgttgtctgtgaccggtctgactgagacagtcaacgaagtatctaagcttagcaataagatcggtatgaattgcgattactacatggaagagaaagtcctgcctccttctagcctggaggggaaagtaaaggagacggtgcacaatgctttctgggaccatctgaaggagcaactgtctgcaaccccgcctgactttagctgcgcactggagttgctgaaagagatcaaggagattctgctttccctcctgctgccacggcaaaacagactccgtatcgagatcgaggaggccttggatatggatctccttaagcaggaggccgaacacggcgctctgaaggttctttatctgagtaagtacgttttgaacatgatggccctgctttgcgctcctgtgcgagatgaggctgtccagaaactggagaatattaccgacccggtctggttgttgcgcggaatcttccaagtactcggtaggatgaagatggatatggtcaactatacaatccagagcctccagccacaccttcaggaacactccattcagtacgagagagcaaagtttcaggagttgctgaataagcaaccttcactgttgaatcacactacaaagtggctgacccaggccgctggcgatcttaccatgagtccgccaacgtgtccagataccagcgactcttcttctgtggcaggtcccagccctaacgaagccgctaataatcctgaacccctatctccaacaatggtcttatgtcagggctttctcaaccttctgttatgggatctcgaaaacgaggaatttcccgaaacactgcttatggataggaccaggcttcaggagcttaagagccagctgcatcagctcactgtaatggcgagcgttctgttggtggcgagctcatttagcggctctgtgcttttcggcagccctcagtttgtggacaaacttaagagaatcactaaaagtttactagaagattttcatagtcgtcctgaggaagctatcctgactgtctccgagcaggtgtctcaggagatccaccagtcgcttaagaacatgggacttgtagccctctcatccgacaataccgccagtcttatgggacagttgcagaacatcgccaaaaaggaaaattgtgtgtgtagcgttattgatcaacgtatacatctatttctgaagtgttgcctggtgttaggcgtgcagcggtctcttttggacctgcctgggggattaaccctcatcgaagcagagcttgccgaactggggcaaaagttcgtcaatctaacccaccacaatcagcaggtctttggcccttactatactgagatcttgaagacattaattagtcccgctcaggccctcgagacaaaagtagaaagtgtgtag

SEQ ID NO: 243637 - DNA, 1398 bp, synthetic construct
  misc_feature 1..1398: note = Description of Artificial Sequence: Synthetic coding sequence
  source 1..1398: mol_type = other DNA
atgaccagaggaggaggtgggggagggttaaccgagactgtgaacgaagtctccaagctgagtaataaaattggtatgaattgcgactactatatggaagagaaggttctgccccctagcagcctggaggggaaagtgaaagagacagtgcacaatgccttttgggatcacctgaaagaacagcttagcgccactccccctgattttagctgcgctctggaactgcttaaggagataaaggaaatcttgctgagcctgctcttgccacggcagaataggctccggattgagattgaagaggcactggacatggacctgctgaagcaggaggccgagcatggtgcgctgaaggtcctttacttgtctaagtacgtcctcaacatgatggccctcctttgtgctcctgtgagggatgaagccgtccagaaactagaaaatatcacagaccccgtttggctcctgaggggaatattccaggttttgggcaggatgaagatggacatggtgaattacacgatacagtcactccagcctcatctccaggagcacagtatacagtacgagcgagccaaatttcaggaactcttaaataagcaacctagcctattaaaccacacgacaaagtggttgacacaggctgccggtgacctaactatgagtccccctacttgtccggatactagtgactcctcaagcgtggctggtcccagtccaaatgaagccgctaacaaccctgagccgctgagccccactatggtactctgtcagggattcctgaatctactgctgtgggacctggagaatgaagaatttccagagaccctgctgatggacaggacccgtctacaggagctgaagtcgcaattgcaccagctcacagtgatggctagcgtgctgcttgtggctagctccttctcaggctctgttctatttgggtccccacagttcgtagataagttaaagagaataactaagtcgcttttagaggactttcattcgaggcctgaggaggccatacttactgtaagtgagcaggtgtcccaggagatacatcaaagtctaaagaatatgggcctggttgccctttcctcggacaatacagcttcattgatgggccagcttcagaatatcgccaaaaaggagaattgcgtgtgttcagtgatcgaccagcgtatccacctgttcctaaaatgttgtctggttctcggtgtgcaacggtccctgctggatttgccgggaggccttactctcatcgaagctgaattggcggagctcggccagaaattcgtgaatctgacccaccataaccagcaggtgttcggtccgtattacactgagattttaaaaaccttaatcagtccggctcaggccctggaaaccaaagtggagagcgtgtag

SEQ ID NO: 243638 - DNA, 165 bp, synthetic construct
  misc_feature 1..165: note = Description of Artificial Sequence: Synthetic coding sequence
  source 1..165: mol_type = other DNA
atgacacgcggtggtggcggaggcgacactatttcgaagatgccggacgttaaggaaagtgtgccacctaagtaccccggtgacagcgagggcagaagttgtaaacctgagacaagcgggcctccccaagaggacaagtctggttccgaggacccccctccttag

SEQ ID NO: 243639 - DNA, 165 bp, synthetic construct
  misc_feature 1..165: note = Description of Artificial Sequence: Synthetic coding sequence
  source 1..165: mol_type = other DNA
atgacccgaggtggaggtggcggagacaccatttccaagatgccagacgtcaaagagagcgtgccacccaaatacccaggcgactccgaggggagaagctgcaagcctgagactagcggtcccccacaagaggataaaagtggatcagaagaccctcctccttag

SEQ ID NO: 243640 - DNA, 597 bp, synthetic construct
  misc_feature 1..597: note = Description of Artificial Sequence: Synthetic coding sequence
  source 1..597: mol_type = other DNA
atgttcttcgagaggcatctcgaaaacctgctaaagcactttattcccggaaccaccgatccagctgtcatcctggacctgctgcccctatgccgcaactacgttcgcagagtgcatgtggatcagtttctcccccctgttcagctgcctgcccagctgcggcctggcgatcagtccgacagcggtagcgagggcgagatggaggaacccaccgtcgatcactaccagctgggcgaccttgtcgcaggccttagccatctcgaggagctggacctcgtgtatgacgtgaaggactgcggaatgaatttcgagtggaaccttttcctgttcacatatcgggactgtctatctctggccgctgccatcaaggcatgccacaccttgaaagacgggggtaagcagctgttggagggcatgtcagataataagactctgcttgaatttgacctgcggctctcggacgtggcccaagagtctgagtacctcattggtcaggctctgtatgcaaatagagaggctgctaggcagcgagcactcaatccgagtcattttatgtccacaatcacagcaaacggaccagaaaacagcgtcggttag

SEQ ID NO: 243641 - DNA, 597 bp, synthetic construct
  misc_feature 1..597: note = Description of Artificial Sequence: Synthetic coding sequence
  source 1..597: mol_type = other DNA
atgtttttcgaaagacatcttgagaatttgctgaagcatttcatcccgggtactaccgatccggcagtcattctagaccttcttccgctgtgtcggaattacgtccggcgagtgcacgtggaccagtttttgcctccagtgcagctgcctgcacagctgagacctggagatcaatctgatagcggtagcgagggggaaatggaagagccaaccgtggaccattatcagttaggagacctggtggcgggactttcacacctggaagagctggatctggtctacgatgtgaaagactgcggaatgaacttcgagtggaacctgtttctgttcacttaccgcgactgtttatctctcgccgcagccatcaaagcatgccacacattgaaggacgggggaaagcagctcctggaaggcatgtcggataacaagaccctcctcgaattcgatctgcggctctccgacgtcgcacaggaatctgagtacctgatcggtcaagcactctacgctaacagagaagccgctagacagagagcacttaatccatcccacttcatgagtactattaccgccaatggccctgaaaactcagtcggctag

SEQ ID NO: 243642 - DNA, 1506 bp, synthetic construct
  misc_feature 1..1506: note = Description of Artificial Sequence: Synthetic coding sequence
  source 1..1506: mol_type = other DNA
atgcaggacactgtgacgaccagcgccttgctcgacccttcacactcgagtgtgagcacccaggataactcctccaccggaggacacacttctagcacatctccacaactgagtaagccctcaatcacccccgtacctgcaaagtcacgtaaccctcaccctagggcgaacattcggcgtatgcggagaatcattgcagaagatcctgagtggtccctggctattgtaccgctgctcacagagctgtgcatccagcatataattcggaacttccaaaaaaaccccatactcaagcagatgctaccagaacatcaacagaaggtactaaatcacctgtcacctgatctgcccctggcggtcacagcgaacttaattgattccgaaaactattggctccgttgttgcatgcaccgctggcccgtgtgtcacgtagcccaccacgggggtagctggaagcgtatgttctttgaacgccatctcgaaaacctcctcaagcattttatcccagggactacggaccctgcggtgatcctggacttactcccgctctgtcggaactatgtgagaagggtgcacgtcgatcagttcttaccccctgtgcagttgccagcccaacttcggcctggcgaccagagcgattctggtagtgagggagagatggaggaacctacggtggaccactaccagctcggcgacctggttgcaggcctcagtcacctggaagagctggacctggtgtatgatgttaaagactgcgggatgaactttgaatggaatctgtttctgtttacttatcgggattgtctttcccttgcggcagcaatcaaagcttgtcacactcttaagatatttaaattgacccgctcaaaggtggatgatgacaaagcgaggatcatcattcgttcactgcttgatcaccctgtcctagaggaactggatctgagccagaacctgataggcgaccgaggggctaggggggctgccaagctcctgagtcactcccgactgagagtgctgaatctggccaataatcaagtcagggccccaggggcacagtctctggcccacgccttagcccacaatactaacttgataagtctgaacctcagattgaattgtatcgaggatgagggcggacaagcgctggcacacgcgttacaaaccaacaagtgtctgacaaccttacacttggggggtaatgagctgtctgaaccaaccgcaaccctcttgagccaggtgttggccataaacacaacattgacaagcattaaccttagttgcaatcacattggtcttgatggaggtaagcagcttctggagggcatgtctgataataagactctcctggagttcgacctgagactttccgacgttgcccaggagtccgagtacttaattgggcaggccctttatgcgaatagggaagcagctcgccaacgggctctgaatcctagccattttatgagcaccatcaccgcaaatggtcctgagaacagcgtggggtag

SEQ ID NO: 243643 - DNA, 597 bp, synthetic construct
  misc_feature 1..597: note = Description of Artificial Sequence: Synthetic coding sequence
  source 1..597: mol_type = other DNA
atggaaaaacgcggaaggggggttaagtcgagtccaatacagaccccaaatcagacaccccaacaggcccctgttacacccagaaaagagcgcagacccagtatgttcgaaaaggaggcatatacccagattcttcgcgagagactccgtgaatccattcacaacgttcagtacgtggagccgccattcgatgacagcatagcagatatcggcaaggaatggaaaagtgcattagccaagttgaagtttgccaatagctatcgcatggaacctctcaagaagttccaggcccattcggtggaaaccaaggtgcagcagattctaacggagtcgctaaaagacgtgaagtatgacgacaaggtcttttcacacttgtctctggaattagccgacagaatcctactggctgtcaaggaattcggctatcaccgctacaagtttataattaaagtgctcttcattcagaaaactgggcaggctataaatattgcgtcaaggtggatatgggacattgcctgggactcatgggttgcagcgaagcacgaagctgaaagttacgtagcactggtgctcgtgtttgccctttactatgagtag

SEQ ID NO: 243644 - DNA, 666 bp, synthetic construct
  misc_feature 1..666: note = Description of Artificial Sequence: Synthetic coding sequence
  source 1..666: mol_type = other DNA
atggctagtcgcccactgcctcccggtcgacaggaggaagagaatgcgaaggacagtggccgaaaaccctcccccgtgagacctcggggttgcctgccaagcattgacgaggctcggccagccggaccaggtcccgctccagcctcccggagagggagcatgttaggattggcggcatccttctcgcgccgtaacagcctggttggacccggagctggcccaggtggccagaggccctctctcgggccagtcccccctcttggatcacgggtttctttttcaggcttacctctggctcccgcacgttgggttgcaccaagctatcggaccgagcccgtgccaggcgagagatgggaagctgccagggcacagcgtgccctggaggctgccttagccgctggcctgcacgatgcttgttattcctctgacgaagctgccagactcgtgcgggaactgtgtgagcaggtgcatgtgaggctaagagagctctccccaccacggtataagttggtttgctctgttgtcttgggtccacgcgctggacagggagtccatgtagtctccagggctctctgggatgtggcacgcgacgggctcgcttccgtgtcttataccaatacgagtctttttgctgtcgcgactgtgcacggtttgtattgtgagtag

SEQ ID NO: 243645 - DNA, 666 bp, synthetic construct
  misc_feature 1..666: note = Description of Artificial Sequence: Synthetic coding sequence
  source 1..666: mol_type = other DNA
atggccagcaggcccctgcctcccggacgccaggaagaagagaatgcaaaggactctggaagaaaacccagtccagtcagacctcgcggatgcctgccaagcatcgatgaagctagaccggctggcccaggcccagcccctgcaagtagacgaggtagcatgctgggcctcgccgcttcattctccagacgcaattccctggtggggccaggggctgggccagggggacagagaccttcactcggaccagttcctcctctcggttcgcgcgtgagcttcagcgggctccccctagcacccgcacggtgggtggctccctcatacaggaccgaacccgttccgggagaaagatgggaagctgctcgcgctcagcgggcactagaggccgcattggcagctggactgcatgacgcgtgttattcctccgacgaagccgcacggttagtacgcgagctgtgcgaacaggtccatgtgaggctgcgtgaactgtctcctcccaggtataagctggtatgtagtgtagtgttggggcctcgggctggccagggagtccatgtggtttcaagggctctatgggatgtcgctcgagatgggctggcctctgtgagttatactaacaccagtctattcgctgtcgccactgttcacggcctgtattgtgaatag

SEQ ID NO: 243646 - DNA, 1074 bp, synthetic construct
  misc_feature 1..1074: note = Description of Artificial Sequence: Synthetic coding sequence
  source 1..1074: mol_type = other DNA
atggagaggatgtcagattccgcagacaaacccatagacaatgatgcagagggagtttggtcaccagatatcgaacagtctttccaagaagctctcgccatctatccaccatgcgggagacgcaagatcattctgagcgatgagggcaagatgtacggcagaaatgagctgatcgccagatacattaagttgaggaccggaaaaacccgaacgagaaagcaggtctcatcccatattcaggtcctggcgaggaggaaatccagggatttccactccaaactaaaggtcacaagcatggaccagacggcaaaagacaaggcactgcaacacatggcggctatgtcttctgcccaaatcgttagcgccaccgcaatccataacaagctcggactgccagggatcccccgacccactttcccgggagccccaggcttctggccgggtatgatccagacaggacaacctggaagcagtcaggatgttaagccatttgttcagcaggcctaccctatccagcctgctgtaactgctcctatccctgggttcgagcccgcatcggctcccgctccttctgtccccgcttggcaggggaggagtattggaaccacgaagttgcggttggtcgagtttagtgccttccttgaacagcagcgcgaccctgacagtgccgacctgaactgcaatatacaagatgatgccggagccttttatggagtaacatctcagtacgagagctcagaaaacatgaccgtgacctgcagcacaaaagtgtgtagcttcggaaaacaggtggtggagaaggtagagactgagtatgctaggttcgagaacggcaggtttgtctatagaattaaccgcagtcctatgtgtgaatatatgattaatttcatccacaagctaaaacacctgccagagaagtatatgatgaatagcgtgctggagaactttacaatccttctcgtggtgaccaatcgagacactcaagaaaccctattgtgtatggcatgtgtgtttgaagtctccaactcagaacatggagctcagcatcatatctacaggctggtgaaggattag

SEQ ID NO: 243647 - DNA, 1236 bp, synthetic construct
  misc_feature 1..1236: note = Description of Artificial Sequence: Synthetic coding sequence
  source 1..1236: mol_type = other DNA
atggaaagaatgagcgatagcgcagataagccaatcgacaatgatgcggagggagtgtggtcgcctgacatagagcagagctttcaggaggccttagccatttacccaccttgcggccgtcgaaagatcattctctctgacgagggcaaaatgtatggcagaaatgagctgatagccaggtacattaaattgcgcacaggcaaaactcggacacgcaaacaggttagcagtcacattcaggtcctggccagacgcaaaagccgtgactttcatagcaagcttaaggatcagacagctaaagataaggcacttcaacacatggctgccatgtcttcggcccagattgtgagcgccactgccattcacaacaaactcggcctccccggaattcctaggcccacgtttcccggagctcccggtttctggcctggcatgatccagaccggccagccagggagcagtcaggacgtgaagcccttcgttcagcaggcctatccaattcagccagccgtgactgcccctataccgggttttgagcctgcatccgctccagccccatccgtcccggcttggcagggacgatcaatagggactactaaactgcgtcttgtggagttcagtgcctttttggaacaacaacgggatcctgactcatacaacaagcatctttttgtccatatcggacatgctaaccactcttacagtgatccactgcttgagtctgtagacatcagacaaatctacgataaatttccggagaaaaagggcggactgaaggagttgttcggaaaggggccacagaatgctttctttctggtgaaattttgggctgacctgaattgcaacatacaggacgatgccggtgcgttttacggtgtaacctcacagtatgagagttcagagaatatgaccgttacctgttctacaaaagtctgtagttttgggaagcaagttgtagaaaaggtcgaaaccgaatacgctagatttgaaaatggccgatttgtctacagaataaacagatctcccatgtgcgagtatatgattaacttcattcataagctgaagcacctgcccgagaaatacatgatgaacagcgttctggaaaactttactatcctgttggtggtcacaaaccgggacacccaggagactctgctgtgcatggcctgtgtgttcgaggttagtaatagcgagcacggcgcacaacatcatatttatagactagtgaaggactag

SEQ ID NO: 243648 - DNA, 1281 bp, synthetic construct
  misc_feature 1..1281: note = Description of Artificial Sequence: Synthetic coding sequence
  source 1..1281: mol_type = other DNA
attgaacccagtagttggtctgggtcagagtcccccgctgagaacatggagaggatgtccgactctgcagataaacctatagataacgatgctgaaggcgtatggtcccctgacatagaacaatcgtttcaggaggctctagctatttacccaccgtgcggtaggaggaagattatcctctcagacgaaggcaaaatgtatggcagaaatgagctcattgcgaggtacatcaagctgagaacagggaagacccggactagaaagcaggtctcttcccacatccaagtcctggctaggagaaagagtcgcgattttcattctaagcttaaggatcagaccgcaaaagataaggctctgcaacatatggcagcgatgtcaagcgcacagatcgtgagtgccacagcgatccataataagttgggcctgcctgggattcccagacccaccttcccaggagccccaggtttctggcctgggatgatccagaccgggcagccaggttcctctcaggacgtgaagccctttgtgcagcaggcatatcctatacagcccgctgtaacggccccaatacccggattcgaaccagcctccgcaccggctcccagtgtgcctgcttggcagggtcgctccattggtaccaccaaactccggctggtggagttctccgcttttcttgaacagcagcgcgatcccgattcttacaacaaacatctgttcgtgcatataggacatgccaaccactcttattccgacccccttctcgagtctgtggatattcggcaaatctatgataagtttcctgagaagaagggaggtttaaaggagttatttggaaaggggcctcagaacgcgttctttctggtaaagttttgggcagacctcaactgtaatatccaggatgacgcgggagcgttttatggcgtgacctcacagtacgagtcttccgagaacatgacagttacctgttcgaccaaggtgtgctcattcggcaagcaggtcgtcgaaaaggttgagactgaatatgccagattcgaaaacggacgtttcgtttatcgtattaatcggtctcccatgtgcgagtatatgatcaacttcatccataaactgaaacatctgccagaaaaatacatgatgaatagcgtgctcgagaacttcacaatactgctggtagtcacaaatcgagatactcaagagactttactgtgcatggcatgcgtatttgaagtttccaactccgaacatggagcccagcatcatatatacagattggtaaaagactag

SEQ ID NO: 243649 - DNA, 993 bp, synthetic construct
  misc_feature 1..993: note = Description of Artificial Sequence: Synthetic coding sequence
  source 1..993: mol_type = other DNA
atgaggtatgtgctgtcctggtgcgtgacagtcactttcaaggatcagaccgccaaggataaagccttgcagcatatggcagcaatgagctctgcccagattgtgagtgctaccgcgattcataataaactcggcctgcctggaataccccgtcccacctttccaggggcacctggcttttggccaggcatgatccagacaggccagcctggctcttcgcaggatgttaaaccctttgttcaacaggcatatccgatacagcctgccgttaccgcccctatccccggattcgaaccggctagcgccccagcgccatcagtgcctgcttggcaggggcgttccatcgggaccactaagctgagattagttgagttttctgccttcctggagcagcagagagatccagatagttacaataaacatctgttcgtgcacattggccacgcgaatcattcctactccgaccctcttctggagtcagtggatattaggcagatctacgataagtttccagaaaagaaggggggattaaaggagctgttcgggaaagggcctcagaatgcctttttcctggttaaattttgggccgacttgaactgcaacattcaggacgatgctggcgctttttatggggtcacctcacagtatgaaagctctgagaatatgacagtaacctgcagtacaaaagtatgcagttttggcaagcaggtggtagaaaaagtggagactgaatatgccagatttgaaaacggccgattcgtttataggattaatagatccccgatgtgcgaatacatgatcaattttatacacaaactgaagcacctgcccgaaaaatatatgatgaatagcgtattggaaaattttaccatcttattagtggtcacaaatagagatacacaggaaacccttctctgtatggcctgcgtgttcgaagtatccaactccgagcacggcgcacaacaccatatctataggctggtgaaagactag

SEQ ID NO: 243650 - DNA, 207 bp, synthetic construct
  misc_feature 1..207: note = Description of Artificial Sequence: Synthetic coding sequence
  source 1..207: mol_type = other DNA
atcgaacccagttcttggagcggatccgaaagccccgctgagaacatggagcgcatgagtgatagcgccgataaacctatagacaatgatgccgagggggtctggtcccctgacatcgagcagagcttccaagaggcacttgccatttatcctccctgtggccgacgcaaaatcatcctcagcgacgaaggtaagatgtatggctag

SEQ ID NO: 243651 - DNA, 1281 bp, synthetic construct
  misc_feature 1..1281: note = Description of Artificial Sequence: Synthetic coding sequence
  source 1..1281: mol_type = other DNA
atagagcccagctcctggagtggcagcgagtctcccgcagaaaatatggaacggatgtcagattccgcagacaagcctatcgataacgacgccgaaggtgtatggagccctgacattgagcagtcttttcaggaggccctagccatttatcctccttgcgggagacggaaaataatcctttcagacgagggcaagatgtatggacggaatgaattgatcgctcgatatataaaactgaggaccggtaagactcggaccaggaaacaggtatctagccatatccaggtactggctagacgcaagagccgggacttccattctaaacttaaggatcaaactgcaaaagataaggcactgcagcatatggcggctatgagctccgcgcagattgtgtctgcgacagctattcataacaaactcggcttgcccggaatccctcgcccaacttttccgggagctccgggattttggccagggatgattcagactggtcagccgggtagctcacaagatgttaaaccattcgtgcagcaggcataccccatccagccagctgtgacagcccctattcccggtttcgagccagcttctgctcccgctccttccgtccccgcttggcaggggaggagtatcggaaccaccaaactcaggctcgttgagtttagcgcctttctggagcagcaacgagacccagatagttataacaaacatctctttgttcacatcggacatgctaaccatagttacagcgacccactgctggagagcgtggatatccgacagatttatgacaagttcccagaaaaaaagggtggactgaaggaactgttcgggaagggccctcaaaacgcgtttttcctagttaagttctgggcagacctcaactgcaatatacaggatgatgcaggagccttttacggtgtgacatcccagtacgagagttcggaaaacatgactgttacctgttcaacaaaggtttgttcattcggtaaacaggtggtagaaaaggtcgagaccgaatacgctagattcgaaaacgggaggtttgtgtaccggatcaatcgtagtcccatgtgcgagtacatgatcaattttatacacaagctcaagcatcttccagagaagtatatgatgaatagtgtgttggagaacttcaccattctgctggtggtgacaaatcgggacactcaggaaacattgctctgtatggcgtgtgttttcgaagtgtctaactcagagcacggtgcacagcatcacatttataggctcgttaaagattag

SEQ ID NO: 243652 - DNA, 1344 bp, synthetic construct
  misc_feature 1..1344: note = Description of Artificial Sequence: Synthetic coding sequence
  source 1..1344: mol_type = other DNA
atgggtgaacctcgagccggagccgcactagatgatggctccggatggaccggctccgaggagggatccgaagaagggacaggtggcagcgagggagctgggggtgacggcggaccagacgcagagggcgtttggtctcctgatattgagcagtcattccaagaagcgctggccatttaccctccctgcggtcgtagaaagatcatcctttccgacgaaggaaaaatgtatggacggaatgaacttatagcgagatatattaagctaagaactgggaagacgcggacacgcaagcaggtctccagccatatccaggtcctggccaggagaaaatctcgtgagatccaatccaaactgaaggatcaggtttcaaaagacaaagcgttccagacaatggccacgatgagttccgcccagctgatcagcgccccatctctccaggccaagctgggccctacaggccctcaagcctccgagctattccagttttggtcaggaggttctggccctccttggaacgtgcctgacgtgaaacctttcagccagacgccatttacactcagtttgactccaccaagtaccgatcttccgggatacgagccaccccaggctttatccccactcccccctccaaccccatcacccccagcatggcaggctcgtggccttggcaccgccaggttacagctggttgagttctctgctttcgtggaaccgccagacgccgtcgatagttaccagcggcacctgtttgttcatataagccagcactgtccgtctccaggtgcaccgcctctggaatctgtggatgtcaggcaaatatatgacaaatttcccgaaaaaaaggggggtctgcgggaactgtacgatcgcggacctcctcatgctttctttcttgtaaagttttgggcagatctgaattgggggccatctggagaggaggccggtgctggcggaagcatttccagcgggggattctatggcgtgagtagccagtatgagtcattggagcacatgacgttgacatgcagctctaaggtgtgtagttttggtaaacaggtcgtggagaaagttgagacggaacgggcacagttggaagacggtcgctttgtgtatagactgctgagaagcccaatgtgtgaatacctcgtgaacttcttgcataaactaaggcagctaccagagagatatatgatgaacagcgttttggaaaatttcactattctgcaggtagtcacaaatagggatacccaggagctcctgctgtgcaccgcttacgtgtttgaggtttccaccagcgagcggggagcacaacaccacatctacagactagtgcgggactag

SEQ ID NO: 243653 - DNA, 1353 bp, synthetic construct
  misc_feature 1..1353: note = Description of Artificial Sequence: Synthetic coding sequence
  source 1..1353: mol_type = other DNA
atgggggagcccagagctggtgcagccttggatgatggatctggctggaccggaagcgaagagggcagcgaagagggcacagggggaagcgagggagctggaggcgatggaggaccagacgctgaaggtgtttggagcccagacattgaacagagttttcaggaagccctggccatctaccccccatgcgggaggcgcaaaataattctgagtgacgagggcaagatgtatggtaggaacgaactgatagccagatatatcaagctcaggacaggaaaaactcgcacacgcaaacaagttagttcacatatccaggttctagctcgcagaaaaagtcgcgagattcagagcaaactaaaagatcaggtttccaaggacaaggcctttcagactatggcgactatgagcagtgctcaactgatttcagccccaagcctgcaggctaaattgggtcccacagggccacaagtggttcaggcaagcgagctttttcaattctggtctggtggcagcggaccaccctggaacgttcctgacgttaaaccgttcagtcagactccttttactctgagtctcacgcccccttccactgatctgccaggatatgagcctccacaagccttatctccactgcctccacctacaccttcgccgccagcttggcaggctcggggactgggcacagccagactgcagttggtggaattctccgcttttgtcgaacctccagacgcggtggattcctaccagcggcacctgttcgttcatatctcacagcactgtccctcccccggagctcctcccctggagtccgttgacgtcagacagatttacgacaaattcccagaaaaaaagggaggcctgcgtgagctgtacgaccgaggacctccccatgccttctttctggtcaagttctgggccgacctcaactggggtcccagcggggaagaagcaggcgcaggaggaagcatatcctcaggaggcttttatggagtatcctcccaatacgagtcgctcgaacatatgacactaacctgtagtagcaaggtttgctcctttggaaagcaggtggtggagaaggttgagactgagagagcccagctggaagacggacgctttgtgtatagactcctgcgtagccctatgtgtgaatacctggtcaatttcctccataaactaaggcagcttcctgagcggtatatgatgaactctgtcctggaaaacttcacaattcttcaagttgtaacaaatcgagacacccaagagctgctgctgtgcactgcttatgtgtttgaggtgtctacttccgaaaggggcgcacagcaccacatctaccggctggtgagggactag

SEQ ID NO: 243654 - DNA, 960 bp, synthetic construct
  misc_feature 1..960: note = Description of Artificial Sequence: Synthetic coding sequence
  source 1..960: mol_type = other DNA
atggctacgatgtcgtctgctcaactcatctccgccccttcattgcaggctaaactgggacccaccggtccccaggtcgtgcaggcttcagaactgtttcagttttggagtgggggttctggccctccctggaacgttccggacgttaaacccttctcccagacccccttcaccctaagcctcaccccacccagcacagatttgcccggttacgagccccctcaggcactctccccattgccccctcctaccccaagcccccctgcctggcaagctagagggttaggaaccgctagacttcagttggtcgaatttagtgcctttgtggaaccccctgacgcggtcgactcatatcagcggcacctcttcgtgcacatatcccagcattgccccagccctggggcaccacccctggagtcagtagatgtgcgtcaaatctatgataagttcccagaaaaaaagggagggttgagagagctctatgacaggggcccaccccatgcctttttcctggtgaagttttgggccgacctaaattggggccctagcggggaggaggccggagccggaggctcaatcagctccgggggattttatggggtaagctctcagtacgagtctctggagcacatgaccctcacatgttcttccaaggtgtgtagcttcgggaagcaggtggtcgagaaggtggagactgagagggcccagttagaggacgggagattcgtgtaccgactgctacgtagccccatgtgcgagtacctggtcaacttcctccacaagctgcgtcagctgccggagaggtacatgatgaactctgtcctcgaaaatttcaccattctgcaagttgtgactaatcgcgatactcaggaactcttgttgtgcaccgcgtatgtgtttgaggtgtctacatcggaacgaggcgcacaacatcatatttatcgcctggtcagggactag

SEQ ID NO: 243655 - DNA, 1356 bp, synthetic construct
  misc_feature 1..1356: note = Description of Artificial Sequence: Synthetic coding sequence
  source 1..1356: mol_type = other DNA
atgggcgaaccccgtgcaggcgctgctctagatgatgggtcagggtggacaggatccgaggagggctcagaggagggcaccggcggatctgaaggggcaggcggtgacggaggcccagacgctgaaggcgtgtggtcgccggatatagagcagtccttccaagaggccctcgcaatttatccaccgtgtggtagaagaaagatcatcctcagcgatgaaggtaaaatgtacgggagaaatgaactcatcgcaaggtatatcaaactgcgcacagggaaaacccgaacacgaaagcaggttagttcacatatccaagtactagcgcgtagaaaatccagagaaatccagtctaaactgaaggccctaaacgtggatcaagttagcaaggacaaggcctttcagacaatggccaccatgagctctgcacaactgattagcgccccttctttgcaggctaagcttggcccaactggaccccaggcatccgagctgtttcaattctggagtgggggaagcggacctccttggaatgtgccagacgtgaaacccttttcacaaacaccatttactctctcccttaccccccctagtacagacttacccggatatgagcctccccaggccctatcccctctccccccaccaaccccatcacctcccgcatggcaggcacgtggcctagggacggccaggttgcagctcgtggagtttagcgcctttgtggaaccccctgatgctgttgattcttatcagcgccacctgttcgttcacatatctcagcattgtccttctccgggtgcccctcccctagagtccgtcgacgtgcgccagatctatgacaaatttccggagaagaagggcggactccgcgaattatatgacagaggaccaccgcatgcgttctttctcgttaaattctgggccgacctcaactggggcccaagcggagaagaagcaggggcaggcggatccatctctagcggaggcttttacggggtctcatctcaatacgaatcgctagagcacatgaccctgacttgctctagcaaggtgtgctccttcgggaagcaagtggtggagaaagttgaaaccgagcgagcacagctcgaagatggcagattcgtgtaccgactcctaagaagccctatgtgcgaatatttggttaacttcctgcataaactgcggcaattacctgagaggtatatgatgaacagcgtgttggaaaatttcacaatcctgcaggtggtcacaaatagggacactcaggagctcctgctgtgcactgcatatgtttttgaagtgagcacctctgagcgaggcgctcagcatcatatctatcgactagtgcgcgactag

SEQ ID NO: 243656 - DNA, 1356 bp, synthetic construct
  misc_feature 1..1356: note = Description of Artificial Sequence: Synthetic coding sequence
  source 1..1356: mol_type = other DNA
atgggcgagccgagggcaggcgctgctctggacgacggctccggttggacggggtctgaagagggaagcgaagagggcaccggagggagtgaaggcgcaggcggtgacggtggacctgacgccgagggagtttggtcaccagatattgagcagtcttttcaggaggccttggcaatataccctccatgcgggcgtagaaaaatcatcctgtccgatgagggtaaaatgtacgggaggaatgagctcatcgccagatatatcaagctgaggaccggaaagactaggacccgaaagcaggtatcctcacacattcaagtgctagctcgcaggaaaagtagagagatccaaagtaaactgaaggctctcaacgttgatcaagtgtcaaaggataaggcctttcaaaccatggccaccatgtctagcgcccagcttatctcagccccttctctgcaggctaagctaggccctacagggccacaggcatctgagctgtttcagttctggtctggtgggtcaggcccaccctggaatgttcccgacgtaaaacccttttctcagaccccatttacactttcactgacacctccatccacagacctgccgggttacgagccacctcaggccctgagtcctctgccccctcccaccccctctccacctgcatggcaagcacgtggtctcggaacggctagactgcagctggttgaattttctgcctttgtagaaccacctgacgccgtggattcctaccagcgccacctgtttgtgcatatctcccagcactgcccctctcctggggcacctccccttgaaagtgttgacgtcaggcaaatctacgataaatttcctgagaagaaggggggactcagagaactgtatgaccgcggaccaccgcatgccttttttttggtgaagttctgggccgacctgaactggggtcctagcggcgaagaagccggagcgggaggctctatctcttctggcggtttctacggggtctccagccagtacgaaagcttggaacacatgaccttaacttgttcttcaaaggtttgttcctttgggaagcaagtagtggaaaaagtggaaaccgaacgagcccaactggaagatggcaggtttgtatatcgcttgttgcgctctcctatgtgcgagtatctggttaatttcctgcacaagctacggcagctacctgaacggtatatgatgaactctgtgttggaaaattttactattctacaagtggtgaccaaccgggatactcaggaattactactttgtactgcgtatgtcttcgaagtgtccactagtgaacgaggcgcacagcatcacatctacagacttgtccgtgattag

SEQ ID NO: 243657 - DNA, 1353 bp, synthetic construct
  misc_feature 1..1353: note = Description of Artificial Sequence: Synthetic coding sequence
  source 1..1353: mol_type = other DNA
atgggggagcccagggcaggcgctgcgctggacgacggctccgggtggactggcagcgaagaaggaagtgaggaggggaccggagggagtgagggggctggtggcgatggcggtcccgatgccgagggcgtgtggtccccagacattgaacagagcttccaggaagctctcgcaatctacccaccatgtggcaggaggaagattatcctctccgatgagggcaagatgtacggcaggaatgaactgattgcacggtacatcaaactgcgcacggggaagacccggacccggaagcaggtttccagccatattcaggtgctcgcaaggcgtaagtcccgagaaatccaaagtaagttgaaagatcaggtcagcaaagataaggccttccagacaatggccaccatgtccagcgcccagctgatctcagctcctagtttacaagccaagctagggcctacaggccctcaggtagtgcaggcctcagagttgtttcaattctggtccggcggtagtggacctccttggaatgtgccagatgtgaaacctttttctcagacaccattcaccttatccctcacaccaccttctactgatctaccagggtatgaaccacctcaagcactgagccccctgccaccaccgacacccagccctcccgcttggcaggctcggggtctgggaactgccaggcttcagctcgtagagttctctgcctttgtagagccccctgacgccgtggatagttatcaacggcacctgttcgtgcatatatcccagcattgtccttcccctggagcacctcccctggaatcggttgacgtacgccagatttacgataaattccctgaaaagaaagggggtctgcgcgagttgtatgatcggggacctccccatgccttttttctggtaaagttctgggcagatctaaactgggggcctagcggagaagaagctggagccggtgggagcatatctagcggcggtttttatggggtgtcatctcaatacgaatcgctggaacacatgacactgacttgttcatctaaagtgtgcagcttcgggaagcaggtggttgagaaagtggaaaccgaaagggctcagctcgaggacgggagatttgtctatcgtctcctacggagtccaatgtgtgaatacctcgtgaacttcctgcacaagttaagacagttgcccgaaagatatatgatgaactccgtgctcgagaacttcactatactccaggtagtcaccaatcgcgatactcaggagttgctgttgtgtactgcctacgtgttcgaggtgtcaactagcgaaagaggcgcacagcatcacatctaccgcctggtgcgagactag

SEQ ID NO: 243658 - DNA, 1308 bp, synthetic construct
  misc_feature 1..1308: note = Description of Artificial Sequence: Synthetic coding sequence
  source 1..1308: mol_type = other DNA
atagcttccaacagttggaacgcttccagcagccccggagaggcccgagaggatgggccagaaggcttagacaaaggtctcgataacgatgctgagggcgtgtggagccctgatattgaacaaagtttccaggaggccctggccatctatcctccatgtggtcgtcggaaaattattctcagtgacgagggcaaaatgtatggaaggaatgaactcatcgctcggtatattaagctgcggactggcaagacaaggacacgcaaacaggtgagtagccacatacaggtgttggcacggaagaaggtaagggagtatcaagtgggaattaaagctatgaaccttgaccaagtctcaaaagacaaggctctacagtcaatggcctccatgagctccgcacagatcgtgtctgcttcagtgcttcagaataagttctcaccgccatctcccctcccacaggctgtgttttccacctcgagccgtttctggtctagtccccctctcctgggccaacagccaggaccatcccaagacattaagccatttgctcaacccgcatatccaattcagcctccgttgccgccaaccctgagtagctacgaacccctcgcacctcttccatccgcagccgctagcgtgccagtttggcaagataggacaatcgctagtagcagattaagactattggagtactccgcctttatggaggtacagcgcgatccagacacatactccaagcatctatttgtccacatcggacaaacgaatcctgctttctccgacccccctctagaagctgtagatgtgagacagatctatgataaatttcccgaaaagaagggcggtttgaaagagctctatgaaaaggggccacccaatgcctttttcctggtgaagttctgggccgatctgaattcaacaattcaggagggacccggagccttctacggcgtaagcagccagtactcctcagccgatagtatgactattagcgtgtcgaccaaggtgtgcagttttgggaaacaagtggtggaaaaggtcgagacagaatacgccaggctcgagaacggccgttttgtatatcggattcacagaagccccatgtgcgagtatatgatcaactttattcacaagcttaagcatctcccggagaaatatatgatgaattctgttttggagaacttcacaattctgcaggtggtaacttcccgggacagccaggagacgctgctggtgatcgcctttgtctttgaggtgtctacatccgagcacggggcacagcaccacgtatacaagctggtgaaagattag

SEQ ID NO: 243659 - DNA, 1356 bp, synthetic construct
  misc_feature 1..1356: note = Description of Artificial Sequence: Synthetic coding sequence
  source 1..1356: mol_type = other DNA
ttgtcacgaccagtaggaagtgggcctgagcctcgggctacttctacaattgcatctaactcttggaacgcttctagttcccctggagaggctcgggaggatgggccagagggccttgataagggtttagataacgacgccgagggcgtctggtcgcccgacattgaacagagctttcaagaggccttggcaatttatccgccatgcggaagaaggaagatcattctctccgatgaagggaagatgtatgggcgaaatgagcttattgcgcgatacatcaagttgcgcacagggaaaacacgcactcggaaacaagttagctctcacctacaagttctggccagaagaaaatctagggaaatccaatccaagcttaagagttcgccacaggaccaggtgtcaaaagataaggccttacagagcatggctagtatgagtagtgcccagatcgtgtctgccagcgtgctccaaaacaaattcagcccacccagtcctctgcctcaggccgtcttttccacgagctctcggttctggagttctccccctctgttagggcagcagccaggacccagccaggatataaaacccttcgcacaaccggcttacccaattcagcccccacttcccccaactttgagttcctatgaacccctcgcccctttgccctccgctgccgcaagcgtcccggtatggcaagacagaacgatagcatcttctcgcctcagactattggagtatagcgcattcatggaagtacagagggatccagacacatactctaagcacctgttcgtccacattgggcagactaatcccgcattcagcgaccctccactggaggcagtggatgttcggcagatctacgataagtttccagaaaaaaagggagggctgaaggagttgtacgagaagggcccacctaacgccttctttttggttaagttctgggccgacctgaactccacgatacaagaaggtccgggagccttttacggagtcagcagtcaatatagcagcgccgactccatgaccatctccgtgtccaccaaggtgtgctcttttgggaagcaggtggtcgaaaaggtcgagactgaatacgcacgcttggaaaacggacgctttgtgtaccgtattcaccgcagtccaatgtgtgagtatatgataaatttcatccataaactgaaacatcttcccgaaaagtacatgatgaattccgtcctggagaactttactatacttcaggtggttacctctcgcgactcccaggagaccttgctggttatcgcttttgtatttgaagtctccactagcgagcatggcgctcagcatcatgtgtacaaactggttaaggattag

SEQ ID NO: 243660 - DNA, 1176 bp, synthetic construct
  misc_feature 1..1176: note = Description of Artificial Sequence: Synthetic coding sequence
  source 1..1176: mol_type = other DNA
ctcgaaggaacggccggaacgattacttccaatgaatggagctcacctacgtcacccgagggtagtacagcgtctggcggttctcaggcactggacaaacctatagataacgatgcggagggtgtgtggagccccgacattgagcaatcttttcaagaagcccttgcaatctacccaccctgtggcagacgcaagattatcctcagtgacgaaggcaaaatgtacggacggaacgagctcattgctcggtatataaaattgaggacagggaagaccagaacacgcaagcaggtgtccagtcacattcaagttctggccagacggaaagcccgagaaatacaggctaagcttaaattttggcagggtgcactaccaggacaggcgggaactagccacgatgtcaagcctttcagccagcagacctacgcggtgcagccacccctccccctgcctgggttcgagtctcccgctggcccagcccctagcccttccgctccccctgccccaccctggcagggtcgctccgtggcttccagtaaactgtggatgctcgaattttcagcctttctggagcagcagcaagatcccgacacgtataacaagcatctgttcgtacacatagggcagagcagcccctcttacagcgacccctatctggaggctgtggacatccgtcagatttacgacaaattccctgaaaagaagggcggtctaaaggacctgtttgaacgcggtccctcaaatgcctttttcctcgtcaagttctgggccgacctgaacacaaatatagaggacgaggggtctagtttttatggagtgtcctcacaatacgagtctccagaaaatatgattatcacttgttccaccaaggtgtgtagctttggcaaacaagtggtagagaaagtggagacagagtacgctcggtatgagaatggccactattcctatcggattcatcggtcacctttatgtgagtatatgattaactttatccacaagctgaagcacctgcccgaaaaatatatgatgaactcagtgttagaaaacttcaccattctgcaagtcgtcacaaatcgcgacactcaggagaccctgctgtgtatagcctatgtcttcgaggtatctgcatctgagcatggcgctcagcaccacatttaccgactagtgaaggagtag

SEQ ID NO: 243661 - DNA, 1305 bp, synthetic construct
  misc_feature 1..1305: note = Description of Artificial Sequence: Synthetic coding sequence
  source 1..1305: mol_type = other DNA
ctcgagggcacagccggtactatcacttctaacgagtggtcatcccctaccagcccggaaggcagtaccgcttcaggtggtagccaagccttggacaagccgatcgacaacgatgctgaaggcgtttggagtccggatatcgagcagtcatttcaggaggccctagccatctatccaccatgtggacggaggaagatcatactgagcgacgaagggaagatgtacggtagaaacgagttaattgccaggtatataaaactgagaactgggaagacccgaaccaggaagcaggtgtcttcacacatacaggtgctggccaggaggaaagcccgagagattcaagccaaactaaaagaccaggccgcaaaagacaaagccctgcagtccatggctgcgatgagctccgctcaaattatctccgctactgctttccatagttctatggccctcgctagagggcctggccgacccgcagtctccggcttttggcagggcgcattgcccggacaggcagggacaagtcatgacgtcaaacccttcagccagcagacttacgcagtacagcctccgctgcctctgccaggctttgaatccccggcaggacccgcaccttcgccttctgccccacccgcaccaccctggcaaggccgatccgtcgctagcagcaagctgtggatgctggagttttccgctttcttagagcaacagcaggaccccgacacctataacaaacatctgttcgtccacattgggcagtccagccccagctattcagacccttatttggaagcggtggacatccggcagatctacgacaaatttccagagaagaagggcggtctcaaagacctgtttgaaaggggcccttccaacgccttctttttagttaagttttgggccgatctgaatacaaacatcgaagatgaaggatcctctttctacggggtcagcagtcagtatgaaagccctgaaaatatgatcattacctgctccacgaaggtgtgcagcttcgggaagcaggttgttgagaaggtggagactgagtatgctcgatacgagaatgggcactactcgtatcgcatccaccgcagtccgctatgtgaatatatgatcaacttcatccacaagttgaagcacctgccggagaagtacatgatgaattcagttctcgagaacttcactatcctacaggtggtgacgaaccgggatacccaggaaacgctgctttgtattgcttatgtattcgaggtgagcgcctccgagcacggggcacagcaccatatctatcgcctggttaaagagtag

SEQ ID NO: 243662 - DNA, 918 bp, synthetic construct
  misc_feature 1..918: note = Description of Artificial Sequence: Synthetic coding sequence
  source 1..918: mol_type = other DNA
atggcagctatgtcatccgctcaaatcatctcagcgactgcgttccattcatctatggctctcgcccgtggcccaggtagacctgctgtctcaggattttggcaaggggctttacccggacaggctgggacctcacatgacgtgaagccattctcccagcagacatatgctgttcagccacctttaccactccccggttttgaatcccctgccggtcccgctccctctccatcggccccaccagccccaccttggcaaggacgctcagtcgcctcttcaaaactgtggatgctcgaattcagcgctttcttggaacaacagcaagatcctgatacgtacaataaacatctgttcgtgcatatcggacagagttccccctcctattctgacccttacttggaggctgtggacatacgccaaatctacgataaatttcccgagaaaaaggggggactgaaggacctgtttgaacggggtccaagcaacgcgttcttcctggtaaagttttgggccgatctgaatactaatattgaggacgagggcagctctttctatggcgtcagctctcagtacgagtctcctgagaacatgattataacctgcagtactaaggtgtgcagttttggaaagcaagtggtggagaaagttgaaactgaatacgccaggtatgaaaatggtcactatagctaccgcatccaccggtcacctctgtgcgagtatatgattaattttatccacaaactgaagcatctgccagagaaatatatgatgaattctgttttggagaatttcactatattgcaagttgtgactaatcgcgatactcaggaaactctgttatgcatcgcctatgtatttgaggtgagtgcatccgagcacggtgctcaacaccacatatatcgccttgtgaaggagtag

SEQ ID NO: 243663 - DNA, 219 bp, synthetic construct
  misc_feature 1..219: note = Description of Artificial Sequence: Synthetic coding sequence
  source 1..219: mol_type = other DNA
cttgagggaactgctggtaccataacttccaacgagtggtcatcccctacatcaccggaaggcagcactgcctccggcggaagtcaagccctggacaagcccatcgataatgacgccgaaggcgtttggagccctgatatcgaacagagtttccaggaggctcttgcgatctatccgccttgcggtaggcgaaagataatcctgtccgatgagggatag

SEQ ID NO: 243664 - DNA, 69 bp, synthetic construct
  misc_feature 1..69: note = Description of Artificial Sequence: Synthetic coding sequence
  source 1..69: mol_type = other DNA
ctggaaggcactgccggtaccattacttcaaacgaatggagttcccctacttcacctgaaggaagctag

SEQ ID NO: 243665 - DNA, 528 bp, synthetic construct
  misc_feature 1..528: note = Description of Artificial Sequence: Synthetic coding sequence
  source 1..528: mol_type = other DNA
ctggagggaactgcaggaacaattacgagtaacgagtggagctccccaacctctcccgagggttcaacggctagcggaggcagtcaggccttagataaaccgatcgacaacgacgcagagggcgtctggtctcccgatatagagcagtcattccaggaagccctggccatttatcctccatgcggtcgccgtaagatcatcctctccgatgagggcaagatgtatggacgaaacgagctgatagcacggtacataaagctccggactgggaaaaccaggaccaggaagcaggtgagctcacacatccaagttctggccaggagaaaagctcgtgaaattcaagcaaagctcaaagaccaagccgcaaaggataaggccttgcagtcgatggccgctatgagtagcgcccagatcatatccgccacagcgtttcatagcagcatggccctagctcgaggcccaggcaggcctgctgtctccggattttggcagggagctctccccggacaggcagggactagccattag

SEQ ID NO: 243666 - DNA, 3099 bp, synthetic construct
  misc_feature 1..3099: note = Description of Artificial Sequence: Synthetic coding sequence
  source 1..3099: mol_type = other DNA
atgtgcaacgaagagacagagatcaaagaggcccagtcctatcagaacagtcctgttagctcggcaaccaaccaggacgctggctacggctccccattctcggagtcatctgatcagctcgcccacttcaaaggaagctcttcaagggaggaaaaggaagatccccagtgccctgacagcgtgtcttacccacaggactccttagcccagatcaaagctgtttatgccaacttgttttcagagtcttgctggtcctcactggccctcgatctgaagaaaagcggttccaccactagcaccaacgacgctagccagaaggagtcatctgcaccaactccgacgccgcctacatgccctgtcagtactacagggcctaccacttccaccccctccacctcatgtagctcttccacttcccatagttctactacaagtaccagctcctcttctggctatgactggcatcaggccgctctcgccaaaacactccagcaaacatccagctacggactgctaccagaaccatctctattcagcaccgttcagctgtacagacaaaataacaaactctacggcagcgtgttcacaggcgcttctaagttccgatgcaaggactgttcggcagcctacgatactttagtcgaattaactgtgcacatgaacgaaactggccactatcgagacgacaaccgggacaaagattcagagaagactaagcggtggtctaagccgagaaaacggtccttgatggagatggaaggcaaagaggacgctcaaaaggtgctgaagtgcatgtattgcggacacagtttcgagtcattgcaggatttgtccgtccatatgatcaagaccaagcactatcagaaggttcctttgaaggaaccagtgcccgcaattaccaaactcgtgccatcgaccaagaagcgggctcttcaggatttggctcccccatgctcccccgaacctgcaggcatggcagccgaagtagctctatccgagagcgctaaagatcaaaaagccgctaatccctatgtgacacccaacaatagatacggatatcagaacggagcaagctatacctggcagtttgaggctcggaaggctcagatcctcaagtgtatggaatgcggatccagccatgatactctgcagcagctgactgcccatatgatggtcacgggacactttttaaaggttaccacgtccgcaagcaagaaggggaaacagctggtcctcgacccagtagtcgaggaaaagatacagagtataccattaccacctactacacacaccagacttcccgcaagctcgatcaaaaaacagcccgattctcccgcaggaagtactacatccgaggagaagaaggagccggaaaaagagaaaccacccgttgccggtgacgccgaaaagatcaaggaagagagcgaggatagcctggagaagtttgagccttcaaccctttacccttatcttagagaggaggacttggatgacagcccgaaagggggactggatatacttaagtctttagaaaatacagtgtccacagccatttctaaggctcagaacggcgctccgtcttgggggggttacccctctatacacgctgcctatcaactgccagggaccgtgaaaccgttacccgctgccgttcagagcgtccaggtccaaccctcatatgcaggcggtgtgaagagtctgagctccgctgagcacaacgctctgctgcatagtccgggatctctcacccctcccccacacaaatcaaatgtgtccgccatggaggagcttgttgaaaaggtcacggggaaagtcaacatcaagaaggaggagagaccccctgaaaaagagaaaagttccctcgcaaaagccgcatccccaatagcgaaagagaataaggatttccctaagacggaagaagtgagcgggaaacctcagaaaaagggacctgaagcagagacaggtaaggcaaagaaggagggtcctctcgacgtccacactccaaacgggactgaacctctaaaggccaaagtcactaatggatgtaataacttgggcatcatcatggatcattctccggagccctccttcattaatccccttagcgcgctgcaaagcatcatgaacactcatctgggaaaggttagcaagcccgtgagtcctagcctcgaccctttggccatgctctataaaattagtaacagcatgttggataagcctgtgtaccccgctactcctgtaaaacaggcggacgccattgacagatactactacgaaaattctgatcagcctattgatctgacaaagtctaagaataagcccctggtcagttctgtcgccgacagcgtagcttcgccactgcgggagagtgcattgatggatatttctgacatggtgaaaaaccttaccggacgcctgacgcccaagtcaagcaccccttctacagtgtcagaaaaatcagatgccgacggcagttctttcgaagaggcactcgatgagctctcccctgtgcacaagaggaaagggaggcagtctaactggaaccctcagcacctgctgatcctgcaggcccagtttgctagcagtctgcgcgagaccaccgagggcaaatacatcatgtcggacctgggccctcaggaacgcgtgcacattagcaaatttacggggctctctatgaccactatctctcactggctggcaaacgtgaaataccagttgcgcaggacaggaggcaccaagtttctaaagaatctggacaccggacatccagtatttttttgcaatgattgtgcttcacaatttcggacagcgtccacctatatcagccatctggagactcacctgggatttagcttgaaggatttatctaaactccccctgaatcagatccaagagcaacagaacgtgtctaaagttctgaccaacaagaccctgggacccctgggcgctacggaagaagatttaggttcgactttccagtgcaaactgtgcaacagaacatttgcgtctaaacatgccgtgaaattacatctgagtaaaacacacgggaagtcaccggaagatcatctgatttatgtcacggaactcgagaagcagtag

SEQ ID NO: 243667 - DNA, 237 bp, synthetic construct
  misc_feature 1..237: note = Description of Artificial Sequence: Synthetic coding sequence
  source 1..237: mol_type = other DNA
atgtgcaatgaagaaacagagatcaaggaggctcagtcataccagaattcacctgttagtagcgctacaaaccaggacgccggatacggcagccctttcagcgaaagttctgatcaactcgcacactttaaaggcagttcttcaagagaagaaaaagaagacccccagtgtcccgacagtgtcagttatcctcaggattctctcgcgcagataaaggccgtgtacgccaacctgtag

SEQ ID NO: 243668 - DNA, 321 bp, synthetic construct
  misc_feature 1..321: note = Description of Artificial Sequence: Synthetic coding sequence
  source 1..321: mol_type = other DNA
atgtgcaatgaagagaccgagatcaaggaggcacagtcttatcaaaacagccccgtctcctccgccaccaatcaggatgccggatacgggtccccattctccgagtcttccgaccagctggctcactttaaagggtctagctcccgagaagaaaaggaagatccccagtgtcccgactccgtctcttatccacaggattcactagctcagataaaggccgtgtacgccaacctgttcagcgagtcttgctggagctccctcgccctggacctcaaaaagtcaggttcaaccacttctacaaacgatgcgagccaaaagtag

SEQ ID NO: 243669 - DNA, 3096 bp, synthetic construct
  misc_feature 1..3096: note = Description of Artificial Sequence: Synthetic coding sequence
  source 1..3096: mol_type = other DNA
atgatggctgctgcgttattgcattataccggttatgcacaagaagagcagctgaaagaggaagaggaaatcaaggaggaggaggaagaggaggactctggatccgtggctcagctacaaggtgggaacgacacaggtacggatgaggaattggaaacagggccagagcaaaaaggctgtttttcgtaccagaactcacccggttcacatctgtcaaatcaggatgccgagaatgagtcactcctaagtgacgctagcgaccaggtgtcagatatcaagagcgtctgcggcagagatgcatcagacaagaaagcccacactcacgtgcgattgcctaatgaggctcacaactgtatggacaaaatgaccgccgtttatgcaaacatactgagcgattcttattggagtgggctgggcctggggtttaagctaagtaattccgagcgtagaaactgcgacacgcgcaatggcagcaacaaatccgacttcgactggcatcaggacgctctgtccaagagccttcagcaaaatcttccctcacgttctgtgtccaagccctctttatttagtagtgtccaactttaccgccaatcaagtaaaatgtgtggcactgtctttactggtgctagcagatttcgctgccgccagtgttccgccgcatatgataccctggttgagctcaccgttcacatgaatgaaacaggtcattaccaggacgataatcgcaaaaaagacaaactgaggcctacatcctatagtaagcctcgcaagcgagctttccaagacatggacaaggaagatgcccaaaaggtgctcaagtgtatgttctgcggggacagcttcgactcgttacaagatctgagcgtgcatatgataaaaaccaaacactatcagaaggtacctttgaaggagcctgtccctactatcagctcgaaaatggtcacccccgctaagaagcgggtgtttgacgtgaatcggccttgctctccggacagcacaactggctcgttcgcggacagcttctcatctcaaaagaacgcaaacctacagttgtcatccaacaaccggtacggctaccagaatggggctagttacacatggcagtttgaggcgtgcaagtcacaaatcttaaagtgcatggagtgtggaagctctcacgataccctgcagcagctgaccactcacatgatggtgacagggcacttcttgaaagttacctcctccgcctccaagaagggcaagcaactggtgctcgatcccttagcagtagaaaaaatgcagagtctgagtgaagcgcctaatagcgacagtttggcccctaaaccttccagtaactccgcttccgactgcacagctagtactacagagctaaagaaggaaagtaagaaagaacgcccagaagaaacgtccaaagacgagaaggtagtaaaatccgaggactacgaggacccactccagaagccactagaccccactataaaataccagtaccttagggaagaggaccttgaggacggatctaagggcggtggagatatccttaaatcactcgagaataccgtgaccaccgcaatcaacaaagctcagaatggtgcacctagttggtccgcctacccatctatccatgctgcctatcagctgtctgaggggactaaaccaccattgcctatgggctcccaagttcttcagatcagaccgaacttgaccaataagctacgacccatcgcacccaaatggaaagtgatgcccctggtttcaatgccgacccatctggccccttacacccaggtgaaaaaggaatctgaagataaggacgaagccgttaaggagtgcggcaaagagagtcctcatgaagaggcgagttcgttcagccactcagagggggacagctttcggaaaagcgaaactcccccagaggccaaaaaaactgaactgggaccacttaaggaagaagaaaaactaatgaaagaagggagcgaaaaggagaaacctcagcctttagagccaacttcggctctgtccaacggatgcgccttggctaaccatgcgccagcactgccatgtattaatcccctcagtgcgctccagtctgttttgaacaatcacctcggtaaggctaccgaaccccttcggagcccctcttgttcaagcccatcatcatccacaatctcaatgttccataagtccaatttgaatgtaatggataagcccgttctttcacccgcaagcacaaggagtgcctctgtatcccgccgatacctcttcgagaattccgatcagccaatcgatctcacaaaatcaaaatccaaaaaggctgagtcatcccaggcacagagctgtatgtcacctccacagaaacacgccctgtccgacattgcggacatggtcaaggtgctgcctaaggcaacaacaccaaagccagccagctcgtcaagagtacctcctatgaaactggagatggatgttagaagatttgaagatgtttctagtgaagtatcaaccctgcacaagcgtaagggtcggcaatccaactggaaccctcagcacctattgatccttcaggcccagtttgcctcttctctttttcagacaagtgaggggaagtacctgctaagtgatctgggcccacaggagagaatgcagatttctaagtttaccggactgtccatgactacaatatctcattggctagccaatgttaaataccagttgcgaaagaccggaggaactaaattcctgaaaaatatggacaagggacatcctattttttactgctctgattgcgcctcacagtttaggaccccctccacctatatttcccatcttgagagccacctcggcttccagatgaaagacatgacacgactgtctgtggaccagcagtctaaggtcgagcaggaaataagtagggtatctagcgcccagagatcccctgagaccatcgctgcggaggaggacaccgacagtaagttcaagtgcaagctctgctgccggaccttcgtgtccaagcacgctgtcaagctgcatctctctaaaacccactctaagtctccggagcaccatagtcagtttgtaactgacgtcgacgaggaatag

SEQ ID NO: 243670 - DNA, 3105 bp, synthetic construct
  misc_feature 1..3105: note = Description of Artificial Sequence: Synthetic coding sequence
  source 1..3105: mol_type = other DNA
atgcctcgacggaagcagcaggctcccaagagggccgcaggttatgctcaggaggaacagctgaaggaggaagaggagattaaggaggaggaggaggaggaagactccggttctgtggctcagttacagggcggtaacgacaccggcaccgatgaggaattggagaccgggcctgaacaaaaggggtgtttctcttatcagaattccccaggtagccatttaagcaatcaggacgccgaaaacgagtccttgctctccgatgcgtctgaccaggtgtctgacatcaagtctgtttgcggacgcgacgcctctgacaaaaaggctcatacccacgtgaggttgcccaatgaggcccataactgtatggataagatgacagcagtgtatgccaacattctttcagattcatattggagcggccttggactcggttttaagctctccaatagcgagcgtagaaattgcgacacgcgtaacggaagtaacaaatccgacttcgactggcaccaggacgctctcagtaagtccttgcaacagaacctgcccagtcggtccgtttcaaagcccagtttgttcagctcagtccagttgtatcgacaatcttctaagatgtgtggaacagtcttcacgggggcatcccgattccggtgcaggcaatgcagtgcagcctatgataccctggttgaactgacggttcacatgaacgaaactgggcattaccaggacgataaccgcaaaaaagacaagctaaggcctaccagctacagcaagccgcgaaagcgggctttccaggacatggataaggaggacgcacagaaggttctgaagtgcatgttctgtggcgatagctttgactctttgcaggacctctctgtgcacatgattaagacgaagcactaccagaaggttccgctcaaagaaccagtacctaccatcagcagcaaaatggttaccccagccaagaagcgggtttttgatgtcaatcgtccttgtagccctgattctaccaccgggtcattcgctgattctttttccagccaaaaaaacgccaaccttcaattgagctcaaacaaccgatatggctaccaaaacggtgcttcctacacctggcagttcgaggcatgcaaatcccaaattttgaagtgcatggagtgcggaagtagccatgacactttacaacaactgaccactcatatgatggtgaccggccacttcctcaaagtgacctcttccgccagcaaaaaagggaagcagctggtgctcgacccactggccgtcgagaaaatgcagagcctctcagaggcacccaattccgactctctggcccctaagccctccagcaatagtgcctccgattgtactgcttccactaccgaacttaaaaaagagagtaagaaggaacgccctgaggagactagtaaggacgagaaagtggtaaagtcagaagattacgaggatccactgcagaaacctcttgacccgaccatcaagtatcagtacctacgcgaagaagatttagaggatggaagtaaagggggaggcgacatcctcaagagcctggagaatacggtgactacagctatcaacaaggctcagaatggcgctccttcctggtctgcttacccaagcatccatgccgcttaccagctgagcgaggggacaaagccacccctaccaatgggctcccaggtactgcagatcaggccgaatcttacaaacaaattgaggcctattgctccaaaatggaaggttatgccgctcgtaagtatgcctacacacctagcgccatatacacaggtgaaaaaggaaagcgaggacaaggatgaggcagtaaaagagtgcggaaaagagtcaccccatgaggaagctagctcctttagccactctgagggagacagttttcgcaagtcggaaactccacctgaggctaagaagaccgagttgggcccactgaaggaggaggaaaaacttatgaaggagggatcagagaaggagaaacctcagcctttggaacctacttcggcactgtctaatggttgtgcactcgccaaccacgcacccgcactcccctgtatcaatccactcagtgctcttcagtcggttctgaacaaccatttaggaaaagcaactgagcccctgaggagccctagttgctcctcccctagcagtagcaccatcagcatgtttcataagagtaacctcaacgtgatggataaaccagtactgtctccagcgagcaccagaagcgcttctgtgtcccggcgatacctgtttgagaattctgaccaacctatagacctaacgaagtcgaaatcaaaaaaagccgagtctagccaggcccagagctgtatgagtccaccacagaagcatgcattaagcgatatagctgacatggtcaaagttttgcctaaagctaccacacccaaacctgcttcatcgtcccgtgttccccctatgaagctggagatggacgtgcgcaggttcgaggatgtgagcagtgaggtgtccaccctccacaaacggaagggaagacaatccaactggaatccccagcatctactcattttacaggcacaattcgcgtcctcactgtttcagacatcggaaggaaagtatttgctatccgatctcggtccccaggagaggatgcagatatcaaaattcaccggactgtcgatgaccacgatttcgcactggcttgccaatgttaaatatcagctacgcaagacaggaggtaccaagtttctgaaaaatatggataagggtcatcctattttctactgctctgactgcgcttctcagttcaggacgccctcaacgtatatctctcatttggaatctcatttgggctttcagatgaaagatatgacacgcctgtccgttgaccagcaaagtaaggtggagcaggagatcagccgagttagcagcgcacagcggtctcctgagacaattgccgctgaggaagatacagacagcaaattcaagtgtaagttgtgctgcagaacattcgtgtccaagcatgccgttaaactccacttgtccaagacacattccaagagtcctgagcaccactctcaattcgtcacggatgtggatgaggagtag

SEQ ID NO: 243671 - DNA, 3246 bp, synthetic construct
  misc_feature 1..3246: note = Description of Artificial Sequence: Synthetic coding sequence
  source 1..3246: mol_type = other DNA
atgccacggaggaagcagcaggcccctcgccgagcggctgcctacgtgagtgaagaactcaaggctgccgcactggtggacgaggggcttgaccctgaagaacacacagccgacggtgaaccatccgcgaaatacatgtgtcccgagaaagagctggcgagagcctgcccctcataccagaattctcccgctgcagagttctcttgccacgaaatggacagcgaatcccacataagtgaaacctccgataggatggcggatttcgagtccgggtctatcaagaatgaggaggaaactaaggaggtgacggttccccttgaggatacaacagtgtcagattccctggaacagatgaaggctgtttataacaactttctgagcaactcatactggagcaacctcaatctaaaccttcaccagccgagtagcgagaaaaacaatggaagctcttcaagttcatcgtcctcttccagctcctgtggatcaggaagcttcgactggcaccaatccgcaatggcaaagactctccagcaagtttcccaatcccgcatgctccctgaacccagtctcttctccaccgttcagctgtaccggcagagctctaagctgtacggctcgatttttactggtgcatccaaatttagatgtaaagactgctcagcggcttacgacacgctggtggaactgaccgtgcacatgaatgaaacaggccactaccgcgacgacaatcacgagacagataacaataacccgaaacggtggtcaaagcccaggaagcgaagcctgttggagatggaggggaaggaggatgcgcagaaggtgttaaagtgtatgtattgcgggcacagtttcgagtccctgcaggatctgagcgtgcacatgattaaaacaaaacattaccagaaggtgccccttaaggaacctgttacacctgtggcagcaaaaatcatccccgcaacaaggaagaaagcatctctggagttagagctcccatcatcaccagattcaactgggggaacccccaaagccaccatttctgacaccaatgatgcattgcagaaaaacagcaatccctatattaccccgaataaccgatatggacaccagaatggtgcctcatatgcatggcattttgaggctaggaaatcccagatcctgaaatgcatggagtgcggctcgtcccatgacacgttacaggagcttaccgcgcatatgatggtgactggccactttatcaaagttacaaacagcgcgatgaagaagggcaaacctatcgtcgagacaccggtcacgccaactattactacactcctcgacgagaaggtgcagtccgtcccactcgccgcaaccacatttacttcaccctctaatactcctgccagtatttctccgaagctaaacgtcgaagtgaaaaaagaagtagataaagaaaaggcagttacggacgagaagccgaagcaaaaggataaacctggggaggaggaggagaaatgcgatatctcatccaagtaccactacctcacagagaacgacctggaggagagccctaaaggagggctggacattcttaaatccctcgagaacaccgtgacgtccgctatcaacaaagctcaaaatgggaccccttcttggggaggctatccttccatacatgctgcttaccagctacccaacatgatgaaattgtcattggggagttctggaaagtccactcctctgaagcccatgttcggtaattccgagatcgtgagccccacgaagaaccagaccctggtgtctccaccctctagccagacttcacctatgcccaagacgaattttcacgcgatggaagaactggtcaagaaagtgacagaaaaggttgccaaggtcgaagaaaagatgaaggaaccggatgggaaattatccccccctaaaagggccacacccagtccctgttccagcgaggttggcgagccaatcaagatggaggcgagttcagacggcggtttccggagtcaggaaaatagtccgagtcccccacgagacgggtgtaaagatggcagccctctcgcagaacccgtggagaatggcaaagagctggtcaaaccccttgcctcttctctcagcggaagtacggcgattattactgaccatccacccgagcagccgttcgtgaatcctcttagtgccctccagtctgttatgaacatccaccttggaaaggcagctaaaccatccctcccagcattggacccaatgtccatgttattcaagatgagcaacagcctggctgagaaggctgctgttgcgaccccccctccattgcagagcaagaaagcagatcacttggacagatacttttatcacgtgaacaacgaccagccaattgacctcactaagggcaagtccgataagggctgttctttgggatctgtcctcctctcgccaacttcgaccgctcccgctaccagctccagcaccgttactactgcaaagaccagcgcagttgtcagcttcatgagtaattctcctcttcgtgagaacgctctcagtgacattagcgacatgctgaagaatctaaccgagtcccatacgtctaagtctagcacaccatcttccatatccgaaaaatctgatatcgacggagctactctagaggaagctgaagaatctacacctgcccagaaaagaaaaggcagacaatctaactggaatccacaacacctgctgattctgcaagcccagttcgccgcaagccttcgccagacatcggaggggaaatacatcatgtcggacttgtctccccaagagaggatgcacattagtagattcaccggactgtccatgaccaccatctcccactggcttgcaaacgtcaaatatcagctgagacgcaccgggggaaccaaattccttaaaaatttggacacaggccaccccgttttcttttgtaacgactgtgcaagccagatcaggaccccctccacatacatttcacacttagagtctcacttgggtttccgcctccgcgatctcagcaagcttagtacggagcagatcaacagtcagatcgcacagacgaagagcccgtctgaaaaaatggttacttcatcacccgaggaggacctggggacttcatatcagtgtaagttgtgtaaccggacctttgcctccaagcatgccgtaaagcttcatttatcgaagacccatggtaaatcgccggaggaccacttgttgtacgttagtgagctggaaaagcagtag

SEQ ID NO: 243672 - DNA, 1896 bp, synthetic construct
  misc_feature 1..1896: note = Description of Artificial Sequence: Synthetic coding sequence
  source 1..1896: mol_type = other DNA
atgaattttaatactattcttgaggagattttaatcaaaaggtcacagcagaaaaagaaaacatccccactgaattataaagaacgtctctttgtgttgacaaagagcatgctcacctactacgagggaagagccgagaagaaataccgcaagggatttatcgacgtaagcaagatcaaatgcgtggagatcgtcaaaaacgacgatggcgtgattccctgccagaataagtacccttttcaggtggtgcacgacgctaacaccctctacattttcgcacccagcccccagtcacgtgacctttgggtgaaaaagcttaaagaagagattaagaataacaataacattatgatcaagtaccaccccaaattctggacggatggttcataccaatgctgtcgccagactgaaaagctggcacctggctgcgagaagtataacctgttcgagtcttctattcggaaagccctccctcccgcacctgaaaccaagaaaagacgcccacctccccctattcctctcgaagaagaagacaacagcgaagagatcgtggttgccatgtacgatttccaggcagctgaggggcacgacctgagacttgagagaggccaggagtacctgattctggaaaaaaacgatgtgcattggtggcgggctcgcgataaatatggtaacgaggggtacattcccagcaattatgtgaccggcaagaaatccaataatcttgatcagtatgaatggtactgtaggaacatgaatcgaagtaaagcagagcaactgctccggagcgaggataaggaaggaggcttcatggttcgcgatagcagtcaacctggcttgtatacggtctcactctacaccaagtttggcggtgaagggtccagtggtttcagacactaccacataaaggaaaccacgacgtcacccaaaaaatactacttggctgaaaaacatgcatttggtagtatccccgaaattatcgagtaccacaagcataatgcagctgggcttgtgacaaggttgcgctatccggtgagcgttaagggcaaaaacgcccctactactgcaggtttctcctacgagaaatgggagattaaccctagcgaactgacatttatgagagaactcggctccgggctcttcggcgtggtgaggctggggaagtggagagcacagtataaagtggccatcaaagccatcagagagggcgcaatgtgtgaagaagattttattgaagaggccaaggtgatgatgaagcttacacacccaaaattagtgcagctgtatggcgtgtgtacccagcagaaacctatctatattgtgactgagttcatggagcgcggatgtcttctcaattttctcaggcaacggcagggccacttcagcagggatgttttgctgagcatgtgtcaagacgtctgcgagggtatggaataccttgaacgaaattcttttattcaccgcgaccttgcagccagaaattgcctagtctctgaagctggagtcgttaaagttagtgattttggcatggctcgttatgttctcgatgaccagtataccagtagcagcggagctaaattcccagttaagtggtgtccgcctgaggtgttcaattatagccggttctcctccaagagcgatgtttggagtttcggagtcctgatgtgggaggtcttcacagagggtcggatgcccttcgagaagtacaccaactacgaggtcgtgacaatggttactcgagggcatcgactgtatcagccaaaactggcctccaactacgtctatgaggtgatgctgcggtgctggcaagaaaagccggaagggagaccctccttcgaggacctactgaggaccattgacgaactcgtggagtgtgaagagacattcggacggtag

SEQ ID NO: 243673 - DNA, 2094 bp, synthetic construct
  misc_feature 1..2094: note = Description of Artificial Sequence: Synthetic coding sequence
  source 1..2094: mol_type = other DNA
atgggctttcagcctcctgccgctctcctgcttcgcctctttttactgcaaggtattctgcgacttctgtggggagacttggcgttcatcccaccgttcattagaatgagcggccctgcagtcagtgcctccctggtaggggatactgagggcgtgacagtttcactcgcagtgctgcaggacgaggccggaatcttgcccattcctacctgcggtgtgctcaacaacgaaactgaggactggagcgtgaccgtgattcctggtgccaaagtgctggaggtcactgtgaggtggaaaagagggctggattggtgcagttctaacgaaactgactcattctcggagtccccctgtatcctccagacactgttggtgtccgccagtcacaactcaagctgctccgcccaccttctcattcaagtggaaatctatgccaactcaagtctgacacataacgcgagcgagaacgttaccgttatccctaaccaggtataccaaccactgggcccttgtccgtgtaatctcacggctggcgcatgcgacgtgcggtgctgctgtgaccaggagtgttcttcaaatctgactacacttttcagacggtcatgttttactggggtttttggtggagacgtcaacccaccttttgatcaactgtgcagtgctgggacaaccacccggggtgtgcctgattggttccccttcctttgcgtgcagagtcctttggcaaacaccccctttctcggctacttttaccatggggctgtgagcccaaaacaagacagtagcttcgaagtctacgttgacaccgacgccaaagacttcgccgacttcggctacaaacagggtgaccctataatgaccgtcaagaaagcatactttactatcccccaagtgagcttagcgggtcagtgcatgcagaacgccccagtcgccttcctgcataactttgacgtcaagtgtgtgactaacttagagctataccaggaaagagatggtattatcaacgccaagatcaaaaatgtcgccctcggaggcattgttacaccaaaggtgatttacgaagaggccactgacctagataaattcattactaacaccgaaacaccccttaacaacggttctacaccgaggattgtgaatgttgaagagcattacattttcaagtggaacaacaatactataagcgaaattaacgtgaaaattttccgggcagagatcaatgcccatcagaagggaattatgacacaaagattcgtggtgaaattcttatcttacaacagcggcaatgaagaggagctttccggcaatccgggataccaacttggcaagcctgttcgagcactcaatattaaccgcatgaacaatgtaacaaccttacacctctggcagtccgccggtaggggcctgtgtactagcgccacttttaagcctatattatttggagaaaatgtacttagcggctgccttctggaggtgggaattaatgaaaattgtacccagctgcgcgaaaatgccgtggagcgattagacagtctgatccaggcaacacacgtggctatgcgagggaattctgactatgccgacttatctgatgggtggctcgagattatccgagtggacgcccctgaccctggggctgatcctcttgcatcatctgtgaatggcatgtgccttgatatccctgcgcatttaagtatccgcatcctgatcagcgatgccggagccgtagagggaataacacagcaggaaatactgggcgtcgaaacacggttcagctcagtgaactggcagtaccaatgcgggctgacctgtgagcacaaggccgaccttcttcctatttctgcctctgtgcagttcatcaaaattccagcgcagttaccacaccccctaactagatttcagattaactatactgagtatgattgcaaccgaaacgaagtgtgttggccacaactcctgtacccctggacacagtactaccaaggtgagcttcactcacaatgcgtggcgaaaggcctgttgctccttctgttccttactttggccttattcctctccaatccatggaccaggatttgcaaggcatacagttag

SEQ ID NO: 243674 - DNA, 2091 bp, synthetic construct
  misc_feature 1..2091: note = Description of Artificial Sequence: Synthetic coding sequence
  source 1..2091: mol_type = other DNA
atgggatttcagccaccagccgctctgctcctgcggctgttcctcctgcagggcatcctgaggttactgtggggtgacttagcctttataccaccattcatccgcatgtccggtcctgcggtcagtgcctcactagtgggcgatactgagggggtgacggtaagcctcgctgttctgcaggacgaagctggaattctgcccatcccaacctgcggtgtactcaacaacgagacagaggattggtccgtcactgtgattccaggagcagtcctggaagttactgtgcgctggaagcgcggtttggactggtgctcttcaaacgagaccgactcattctcagagagcccgtgtattcttcagactttactggtgagcgctagtcataactcttcctgctcagcccatttgttaatccaggtggaaatttacgctaacagctccctcactcacaacgcaagtgaaaacgttacagtcatcccaaaccaggtgtaccaaccattaggtccctgcccctgcaatctcactgctggcgcatgtgatgttagatgttgctgcgaccaggagtgttctagtaacctgacaacattgttccggaggagctgtttcaccggcgtgtttgggggtgacgtcaacccaccattcgaccagctgtgctcagccggtactacaacccgcggagtgcccgactggttcccatttctatgtgtccaatcacccctagccaatacccctttcctggggtatttttatcatggcgcagtatcaccaaagcaggattcttccttcgaggtttacgttgacacagatgctaaagatttcgctgactttggttacaagcagggggatccaatcatgaccgtgaagaaggcctacttcacaataccgcaggtatccctggcagggcagtgcatgcagaacgccccagtggcctttcttcataatttcgatgtgaagtgtgttactaacttagagctgtaccaagaacgggacggcattataaacgcaaagattaaaaatgtggcattaggagggatcgtcacgcctaaggtgatatacgaggaagccactgacctggataagtttattacaaacacagagactcccctgaacaacggctccaccccccgtattgtgaacgtggaagagcactatatctttaaatggaataataatacaataagcgagattaacgtgaagatttttagggcggagatcaatgcccaccagaaaggcattatgactcagcggttcgtggttaagttccttagctacaactccggaaacgaggaagagctttcaggcaatcccggttaccagttaggaaagcccgtcagggcacttaacataaaccggatgaacaacgtgacgaccctgcatctatggcagtcagccggtagggggctttgtactagtgcaacattcaagccgatcctgtttggcgagaacgtactcagcggatgcctgctggaagtcggcattaatgagaactgtacacagttgagggaaaacgcagtggaacgcctagattcccttattcaggcaacccacgtcgcaatgcggggtaatagcgactacgctgatctgagcgatgggtggctggagatcattagggtcgacgcccctgatcccggtgctgatccattagcttcttcggtcaacgggatgtgcctagatatccctgcccacctgagcattagaatcctgatatctgacgcaggagcagtcgaaggaattacccagcaagaaatactgggggtggaaacgagatttagcagcgtaaactggcagtatcagtgtggactgacctgcgaacataaggcggacttactccctatatccgccagcgtacagtttatcaagatcccagctcagttacctcatcccctgacaaggtttcagatcaactatacagagtacgattgcaaccggaacgaggtatgctggccccagttgctgtacccatggacacagtattatcaaggggagttgcactcacagtgcgtagctaaaggactgctgttattgttgtttctgaccctggccctgtttctttctaatccgtggacaagaatctgtaaggcatattcctag

SEQ ID NO: 243675 - DNA, 1824 bp, synthetic construct
  misc_feature 1..1824: note = Description of Artificial Sequence: Synthetic coding sequence
  source 1..1824: mol_type = other DNA
atgcgaacaccacagcttgctctgttacaggtcttcttcctggtcttccccgacggtgtgcgaccccagccctccagttccccgtctggcgcagtgcctacaagtcttgagctgcagcggggaacagacggaggaacgttacagagcccctctgaggctactgctactcgccctgcagtgccaggcctccccaccgtagtgccaactctagtcacgccaagcgctccagggaatcgaactgtggaccttttcccagtacttcctatttgcgtctgcgatctcacccccggtgcgtgtgatatcaattgctgctgtgaccgggactgctatctcttgcatccaaggaccgtatttagcttctgcctgcccggaagcgtacgcagctcatcatgggtctgcgtcgacaattctgtcatcttcaggagtaactccccctttccaagtcgagtgttcatggatagcaatggtattaggcagttttgcgtgcacgtgaacaattccaatttgaactatttccagaaactacaaaaggtcaatgctacaaactttcaagcgctggctgcagagttcggcggagaaagctttacatctacatttcaaactcagagtccaccctccttttaccgtgcgggagacccaatattaacttactttccaaaatggagcgtgatcagtctgctgcgccagcctgcaggagtaggtgcaggcggactgtgtgcagagagcaaccccgcaggttttctcgaatctaaaagtaccacgtgtacacggttcttcaagaatctggctagcagttgcactctggactcagccttgaatgccgctagttactataactttacagtcttaaaagtgccccgttcaatgacagatcctcagaatatggaattccaagttccggtcattctgacttcccaggccaacgcaccgcttctggcaggcaatacttgccagaacgtggtgagtcaggtcacctacgagatcgagaccaatggaactttcgggattcagaaagtcagcgtgtctctgggacagacgaatttgacagtggagccaggagcttctctgcaacagcacttcatcctgcgatttagggcctttcaacagagcaccgccgcaagcctgaccagccctcgcagtgggaatccagggtacatcgtgggtaaacccttactggctcttactgacgatatctcttattcaatgaccctgttgcagtcccagggcaacggaagctgtagtgttaaaaggcatgaggtgcagtttggagtgaacgccatttccgggtgcaagctgaggctgaaaaaagcagactgctcacacttgcagcaggaaatataccagacgctacatggcaggcctagacctgaatacgtggccatcttcgggaatgctgacccagcccagaagggcggatggacccggatcctgaataggcattgttctatcagcgctataaactgcaccagctgctgtctgatcccagtgagcctggagatccaggtgctgtgggcatacgtgggactgctgtcgaacccacaggcccacgtaagcggcgtccgttttttgtatcagtgtcaatcaatccaggactcccagcaagtgaccgaagtcagcctgaccacactggtaaattttgtggacattacccaaaagccacagcctcccaggggtcagcccaaaatggattggaaatggccctttgacttcttcccattcaaagtggctttcagccggggagtgttcagccagaaatgctcagttagcccaatactgattctctgtttattgctcttaggcgtattgaatctcgaaaccatgtag

SEQ ID NO: 243676 - DNA, 1290 bp, synthetic construct
  misc_feature 1..1290: note = Description of Artificial Sequence: Synthetic coding sequence
  source 1..1290: mol_type = other DNA
atggacagcaacggaattcggcagttttgcgttcatgtgaacaattctaacctcaactacttccaaaaactgcagaaggtgaacgcgaccaattttcaagccctggccgcagagttcggaggcgagtctttcacttctacatttcaaactcagtcaccacctagtttctacagggcgggtgatcctattttgacatactttcctaaatggagcgtcatatcgctcctcagacaacctgctggtgtaggggcaggcggactgtgcgctgagagcaacccggcaggtttccttgagtcaaagagcactacctgtacacgcttttttaaaaatttagcctcctcttgtaccctagactccgccctgaatgctgcttcatactacaattttacagtacttaaagtcccacgttcaatgaccgacccacagaacatggaggtcacttacgaaatagagacaaacgggacttttggaattcaaaaggtcagcgtgagcctgggccagaccaacctcactgtggaacctggagcaagcctgcagcaacacttcattctaaggtttagggcgttccaacagtctactgccgcaagcctcacgagccctcgaagcggaaacccaggctacattgtagggaagccccttcttgctctcaccgatgatattagctactctatgacgctcctccagtctcagggcaacggctcatgctcagtcaagcggcatgaggtccaatttggcgtcaatgcaatttccggctgtaaacttaggctcaaaaaagctgattgcagccatttacagcaggaaatttatcagaccttacatggcagacctcgtccagaatatgttgccatcttcggcaatgctgatccagcacaaaaaggcggatggacccggatcctgaatcggcattgctccatctctgcgattaactgcacatcttgttgtcttattcccgtgagtctcgagatccaggtattgtgggcatatgttggtctgctgtcgaatccccaagctcatgtgtccggagtaagattcttgtatcagtgtcagtcaattcaggactctcaacaggtgaccgaggtctccctgacaacacttgtgaatttcgtcgacataacacaaaagccccagccgcctaggggacagccgaaaatggattggaagtggcccttcgatttttttccttttaaggtggccttttcgcgaggggttttcagccagaagtgctctgtcagccccattttaatcctttgtctccttctactgggtgtgctcaatctggagaccatgtag

SEQ ID NO: 243677 - DNA, 1332 bp, synthetic construct
  misc_feature 1..1332: note = Description of Artificial Sequence: Synthetic coding sequence
  source 1..1332: mol_type = other DNA
atgagaaccccacaactggcgctccttcaggtgttcttcttggtcttccctgatggggtgcggccacaaccctcatcgtccccaagcggggctgtaccaacatccctggagttacagaggggaacagacggaggcacactgcagagcccttcggaagccaccgccacccgcccagccgtccccggactgcctaccgtagtgcccactctggtgacaccatcagcgcctggtaaccgtactgtggacttgtttcctgtgctcccaatatgcgtctgcgacctgacacccggagcatgtgatattaattgctgctgcgatagagactgctatttacttcatccaagaacggttttcagcttttgtctcccgggttccgtgcgaagttcaagctgggtatgcgtagacaactctgttatttttcggagcaatagtccttttccctcccgagtgtttatggattcgaacgggatcaggcagttctgcgtacatgtcaacaacagcaatctgaattacttccaaaagcttcaaaaagtaaacgcaactaatttccaggcgctcgcggcagaattcggcggtgagtctttcacgtcaacttttcagacccagtctccaccttctttttaccgggcaggggatccaattttgacttatttccctaagtggtccgtcatcagcctgctgcgccagcccgctggggtcggtgcaggcggactgtgtgcagagtcaaatcctgcaggattcctcgagtctaagagtacaacttgcacaagattctttaaaaatttagcgtcatcctgcacgctcgattccgccctcaacgctgcgtcctactacaattttacagtcctgaaggtacctagatctatgaccgatccccaaaatatggaatttcaggtcccagtaatcctgacgtcacaggccaatgctcctctgctggctgggaacacatgccaaaatgtcgttagtcaggttacttatgaaatcgagacaaacgggacctttggcattcagaaagtctccgtgtccctgggtcagaccaatctgacagtcgagccaggcgcttctttacaacagcacttcatcttgcgcttcagggcattccagcagtccacagccgcaagcctgacaagccctagatctgggaacccagggtatattgtgggaaagcccctgcttgctctgacagacgatataagctattccgtgtccttcctggaactcggaggactgttgcagccgaatgaaaagtcatgtaaaggtttccagacttatgtgagactggcaaagggtgaagagtttttcgtgcattacaatgaagtcctgatctactag

SEQ ID NO: 243678 - DNA, 1878 bp, synthetic construct
  misc_feature 1..1878: note = Description of Artificial Sequence: Synthetic coding sequence
  source 1..1878: mol_type = other DNA
atgcggctcgaaactgcggaagcctacgtcggaccaggcggaccagagtgtcccatgcggaccccacagctggcccttttgcaagtattcttcctcgtgttcccagacggggtcaggccccagccaagtagtagcccttctggggctgtccccacaagcctagagcttcaacggggtacagatgggggtacactgcagtctccttctgaggccacggccactcgcccagctgtgcccggtctaccaactgtggtaccaacactggtgacacctagtgctcccggaaacaggaccgtggacctcttcccagtcctgcctatctgcgtttgtgatctcactcctggtgcatgtgatatcaactgctgttgtgaccgggactgctatcttctgcaccctcgtaccgtgttcagcttctgtctccctggctcggtccgcagctcttcatgggtatgtgtagataacagtgtcatatttcgatccaactctccttttccctctcgcgtattcatggacagcaatggtattcgtcaattttgcgtccacgtcaacaattcaaacctaaactattttcagaaactccagaaggtgaacgctactaatttccaggcccttgccgcagaattcggtggggagagttttacgtccacttttcagactcagagtcctccaagcttctatagagctggggatcccattttaacatattttcccaagtggtcggttatttctctcttgagacaacctgctggggtgggggctgggggtctctgtgctgaatctaatcctgctggttttctggagtcaaagagcacaacctgtacccggttctttaagaatttggctagctcctgcaccctcgactcggccctcaacgctgcaagttactacaactttacagtgttgaaggtgcctagaagcatgactgatccacagaacatggagttccaggtgccggttatcctgacatcacaggccaatgcgccactgttagccggaaacacctgccaaaacgtcgtgtctcaggtgacttacgagattgagaccaacggtacgtttggtattcagaaggtgagtgtttctttaggacagaccaacctgacagttgagcccggtgcctcgttgcagcaacatttcatcctgcgattcagagcttttcagcagagtaccgctgcaagcctgacatctcccaggtcaggaaacccaggatatatcgtgggaaagcctctccttgcactgactgatgacatctcctacagtatgactctgctccagtcacaagggaacggcagttgctcggtaaagaggcacgaggttcagtttggcgtgaacgctattagcgggtgcaagctccgcctgaagaaggccgactgcagccacttgcagcaggagatttaccagaccttacatggacgcccaaggcccgaatatgtggcgatcttcggaaacgcagatccagcccaaaaggggggttggacacggattctgaaccgccactgttccatctccgccatcaactgcaccagctgctgcctaataccagtttccctggagattcaggtgctctgggcctatgtaggcctcctgagcaatccacaggcacatgtgagcggagtgcgctttctgtaccagtgccagagcatccaagattctcagcaggtgactgaagttagcctgaccaccctggttaacttcgtggacattacgcagaaaccacagccccctcggggacagccgaaaatggactggaagtggccgttcgattttttccctttcaaagtagcattctctaggggagtgttttcacaaaagtgcagcgttagccctatactgatcctgtgcctgctcctcctgggcgtactgaatttggaaaccatgtag

SEQ ID NO: 243679 - DNA, 1380 bp, synthetic construct
  misc_feature 1..1380: note = Description of Artificial Sequence: Synthetic coding sequence
  source 1..1380: mol_type = other DNA
atgaggactcctcagttggcactcttacaggtcttttttctggtatttccagacggcgttaggccgcagcctagttccagcccttccggagctgtgcctactagcctggagctgcagcgaggaacagatggaggcacgctgcaatctccatccgaggcgaccgcaactaggcccgctgtcccaggactccccaccgtcgttccgactctcgtgaccccttctgcgccagggaaccgtacagtggacctgtttccagtccttccgatctgcgtctgtgatttgactcctggagcgtgcgacattaattgctgttgtgaccgtgactgctatttacttcacccgaggaccgtgttttctttttgtctccctggcagtgttcgatcaagctcctgggtgtgcgtggataactccgtgattttccggtcaaattctccattcccttctcgggttttcatggactcgaacgggatcaggcagttttgcgtccatgtaaataactgtttcctggagtccaagagtaccacctgtactaggttcttcaagaacctcgcctcgtcctgcaccctggacagcgccctgaatgccgcttcgtactataactttacggtactaaaagtccctaggtccatgactgatccacaaaatatggaggcctttcagcaatctacggcagcgagcctgacttcgccgaggtcggggaatccaggatatatcgtggggaagccccttttggccctcacagacgacataagctatagtatgaccctgcttcaaagccagggcaacgggtcctgttcagtaaaacgccatgaggtccagtttggagtcaacgcaatcagcggctgtaaactgcgcctgaagaaggcagattgtagccacctgcagcaggagatatatcagacccttcatgggaggcccaggcccgaatatgttgctatctttggcaacgccgatcctgctcagaaaggtggctggaccaggatcctgaataggcactgcagtatctcagcgataaactgcacttcttgctgcctgatccccgtaagcttggagatacaggtgctctgggcctacgtgggactgctcagcaaccctcaggctcacgttagtggtgttaggttcctgtaccagtgtcagtccattcaggacagccagcaggtgacagaagtaagtctcacaactctggtcaatttcgttgatattacacagaaaccccaacctcccaggggccaacccaaaatggactggaagtggccctttgacttttttccctttaaggtagcattcagcagaggggtgttttcccaaaaatgcagtgtttctcccattctcatcctttgcttactgctgctgggggtactgaatctggagaccatgtag

SEQ ID NO: 243680 - DNA, 6468 bp, synthetic construct
  misc_feature 1..6468: note = Description of Artificial Sequence: Synthetic coding sequence
  source 1..6468: mol_type = other DNA
atgaattactccagcttcctccgaatttgggtctcctttatttttgctctggttcagcatcaggcgcagccgagagaactgatgtaccctttctggcagaatgataccaaaacgccaaaggtggatgatggatcttcctctgagatcaaactggccatccccgttttcttttttggcgttccttatagaaccgtgtacgtaaataacaacggcgtcgtttccttcaacgtgctcgtcagccagttcacccccgagagctttccgctgaccgacggcagggcctttgtggcaccattctgggctgacgtgcacaatggcatacgaggagaaatctattatcgagagacgatggagcccgctattctgaagagggccaccaaagatatcagaaaatacttcaaggacatggcgacattttcagccacctgggtgttcattgtgacctgggaggaagtaacattctacggaggctcttctactacccccgtgaacacatttcaggccgtcctggtatccgatggctcatacacttttactctgtttaactactacgaaataaactggaccacagggactgcctccgggggtgaccctctgacaggactcgggggagtaatggcgcaggctggatttaatggcggaaatctaacaaatttcttttcgttgcccggttccagaactccagagatcgtcaatatacaggaaaccaccaacgtaaatgtgcccggtagatgggctttcaaggtggatggaaaagagatcgacccagccaacgggtgtacgtcgaggggccaattcctgcgccgaggagaggtcttctgggatgatctcaattgtactgtaaagtgccggtgcttggattttaacaatgaaatctactgtcaagaggcctcttgctccccttacgaagtgtgtgagcccaaagggaagtttttttattgttcagcagtggagaccagcacatgtgttgtttttggtgaaccccactaccacacttttgatggcttcctcttccacttccagggctcttgcgcctacttgctggccagacagtgcctgcagaccagcagcttgccattttttagcgtggaggccaagaacgaacaccgacgtggatctgccgtcagttgggtcaaggagttgagcgtggaagtgaacgggtataagatattgatccctaaaggaagttatggaagggttaaggtgaacgacttggtgacatctttgccagttacccttgacctgggcacagtaaagatctaccagagcggaatttcgacagcagtggagaccgacttcgggctgctggtgacttttgatggacagcattatgcatccatctctgttccaggcagttatataaattctacttgcgggttatgcgggaactataacaagaaccctctggatgacttcctccgccctgacgggagacctgcaatgtctgtgctggacctgggggagtcatggcgagtgtaccacgccgactggaaatgcgacagcggctgtgttgataactgcacacaatgtgacgcggcaaccgaggctctgtatttcggttccgattattgcggcttcctcaataaaaccgacggacccctctgggagtgcggtaccgtcgttgaccccacagcttttgtgcactcatgtgtctacgatctgtgctccgttagggataatggcaccctgctgtgtcaagcaatacaggcctatgctctggtttgccaggccttggggattcccatcggagattggaggactcagaccggttgtgtttccaccgtccaatgcccttcattttctcattactccgtgtgtacgtcaagttgtcctgacacatgtagtgacttaacggcaagtaggaattgtgctactccctgcacagaaggctgtgagtgtaatcaaggatttgtactctctacatcccagtgcgtcccactccacaaatgtggatgtgacttcgacggacattattacacaatgggggaatttttttgggcaaccgctaattgtaccgtccaatgcctgtgcgaagagggcggagatgtgtactgttttaacaaaacctgtgggtctggagaagtctgtgcagtcgaagacggttaccaaggatgctttcccaagcgcgaaaccgtctgcctactttcacagaaccaggtgctacacacattcgatggagcctcctacgcatttccgagtgagtttagttataccctcttgaaaacatgcccagaacggcctgagtacctggaaatcgacatcaacaaaaagaaaccagacgctggcccagcatggctccgaggcctgagaattctggttgcagatcaggaagtcaaaatcgggggaatcggggcaagtgaggtgaagctgaacggccaagaggtggaactgcctttttttcacccatccggcaagctggaaatctaccgtaataaaaactcgactaccgttgagagcaagggggttgtgacagtccagtattcagatattggacttctctatattagactatctacaacctactttaactgcacgggtggactctgcggattttataacgccaacgcctcagacgaattctgtctgcccaatggcaagtgcaccgataatctcgccgttttcctggaatcatggaccacatttgaagaaatttgtaacggagagtgtggcgacttgctgaaagcctgcaacaacgactccgaactgctgaagttttaccgctcccggtcccgctgcggcatcattaatgacccgagtaatagctcattcttggagtgtcatggcgtcgtcaatgtgacagcttactatcggacctgtctattcagactctgccagagcggagggaatgagtccgagctgtgtgactcggtggctaggtacgcatccgcctgtaaaaacgccgatgttgaagtgggcccatggcggacttatgacttctgccccctagaatgtccagagaacagtcatttcgaagagtgtattacctgcactgagacctgtgagaccttgacactgggacctatctgcgtagattcttgtagcgaagggtgccagtgtgatgagggttacgccctgttaggatctcagtgtgtgactcgcagcgagtgcggttgcaacttcgaagggcaccagcttgccacgaacgagacgttctgggtggatctcgattgtcagatcttctgttactgcagtggaacagataaccgcgtgcattgtgaaaccattccatgtaaggatgatgagtactgtatggaggagggcggattgtactactgtcaggctagaaccgacgccagttgcatcgtgtctgggtatggacattatctcacattcgacggcttcccttttgactttcagacatcctgtccattgattctctgtactacaggatctaggccatcctcagattccttccccaaatttgtggttactgcaaaaaacgaggatagggaccctagcctcgctctctgggtgaagcaggtcgatgtgactgtttttggctactcaatcgtcattcatcgtgcatataagcacacagtcctcgtgaacagcgagaggctctatctgcccctgaaactgggccaaggcaagatcaacatcttttcatttgggttccatgtggtcgtggaaactgacttcgggctcaaggtggtgtacgactggaagacgttcctcagtatcacagtgcccagatctatgcagaatagcacttatggactttgtggtaggtataatggtaacccagacgacgacctggaaatgcccatgggtctgctggcatcgagcgtaaacgaatttggacaaagctgggtaaaacgagataccttctgtcaggtcggatgtggcgatagatgcccttcctgcgccaaggtggagggattctcgaaagtgcagcaactgtgttccctgattcccaaccagaacgcggcattctccaagtgccactcaaaagtgaaccctaccttcttctacaaaaattgtctgttcgacagctgcatagacgggggagctgtgcaaaccgcctgctcttggttgcagaactatgcatccacttgtcagacacaaggcatcactgtcacgggctggaggaactacacttcctgtaccgtcacttgtcccccaaactcgcactacgaatcctgcgtcagtgtctgtcaaccacggtgtgctgccattcgcctgaagtccgactgtagtcattattgtgtagagggctgccactgtgatgcgggttatgtcctgaacggaaagagttgcattctgccacactcctgcggctgctattccgatgggaaatactatgagcctaagcagctgttctggaactctgattgtacacggagatgtaggtgtttccggcgtaatgtgatccagtgcgatccgagacaatgtaagtcagatgaggaatgcgctctgaggaacggagttcgcggatgcttcagtaccaaaacttcatactgcctggccgcagggggaggcgtcttcaggacctttgatggggctttcctgcgcttccccgcaaactgcgctttcgtcctctccacaatctgccagaagttacctgatatttccttccaactcattatcaatttcgacaaatggtccgctcccaatttgacaattatctcaccagtttatttctacatcaacgaggagcagatcctgatcaacgacaggaacacagtaaaagtcaacggaacacaagtcaatgtcccatttataaccggacttgccacgaagatctattctagtgagggcttcctagtgatcgatacatcaccggacatacaaatctactacaatgggtttaacgtgattaagatctcaatctctgaacggctacaaaataaagtgtgtggcctgtgtggcaactttaacggagacctcaccgacgattacgtcacactgcggggaaagcctgtggtgtcgagtgttgttcttgcccaatcctggaaaacgaacggaatgcagaaaaggcctttagcccctagctgcaacgaactccaattcagccaatacgccgctatgtgcgataatgtccacatccagaaaatgcaaggagacgggtattgcttgaaattaacagacatgaaggggttctttcaaccctgttacgggctcttagaccccttgccattctatgagagctgttaccttgatggctgttatagtcacaagaagttccagctgtgtgggtctctagctgcatacggggaagcctgccgctcttttgggatccttagcaccgaatggatcgaaaaagaaaattgctctggcgtagttgaagatccatgtgtgggggctgactgtcccaaccgcacctgtgaactgggcaatgggagggagctgtgcggatgtatcgaaccacctccctacggtaataatagccatgacatcattgacgccgaagtaacctgcaaagctgcacagatggaagtgagcatcagtaaatgtaagttattccaactcggctttgaacgagagggggtgagaattaacgaccgacaatgtactggcatcgaaggagaggatttcatctctttccaaattaacaatacaaaaggcaactgtgggaacatcgtccagtctaacggcactcatatcatgtacaagaacacactttggattgaatcggctaacaacaccggcaatatcatcacccgcgaccgtacgatcaacgtagaattctcttgcgcatacgaactcgacattaagatctctctcgacagtgtggtgaagccaatgctgtccgtgatcaacctgacagtgccaacccaggaagggagcttcattacgaaaatggccttgtacaagaacgcttcttacaaacatccatatagacagggcgaggttgtcctaaccacacgcgatgtcctgtacgtgggggtattcgtggtcggcgcagacgctacccatctcatattgactttgaataagtgttacgctacaccaacgcgggattccaacgacaaacttcggtattttatcatcgagggtgggtgtcagaacctgaaagacaacacgatcgggattgaagaaaacgccgtcagcctgacgtgcagatttcacgtgacagtgtttaagttcatcggtgattatgacgaggtgcatctgcattgcgctgtgtccctgtgcgatagcgagaagtactcatgcaaaatcacatgtcctcacaactcacgtatagctaccgattataccaaggagcccaaggaacagattatctccgtggggcctattagacgtaaaagactggattggtgcgaagacaatggcggatgcgagcagatctgtactagccgggtggacggtcctctgtgttcgtgcgtgactggcaccctccaagaagacggaaagtcttgccgggcatccaatagtagcatggaactgcaggtatggacattgctgctaattatgattcaaatatctctgtggcactttgtatacaagtcgggcaccaccagctac

SEQ ID NO: 243681 - DNA, 6467 bp, synthetic construct
  misc_feature 1..6467: note = Description of Artificial Sequence: Synthetic coding sequence
  source 1..6467: mol_type = other DNA
atgaactactcgtctttcctacggatttgggtcagctttatttttgctttagtgcagcaccaggctcagcctcgcgagttgatgtatcctttctggcagaacgacaccaaaactccaaaagttgacgacggaagttcctcggaaattaaactggcaattcctgtctttttctttggcgtgccttaccgaactgtttatgttaataataacggcgtggtatcctttaatgtgcttgttagtcaatttactccggaatcctttccgctaaccgacggacgcgcttttgtcgcccctttctgggctgatgtgcataatggaatccgaggtgaaatatattatagagaaaccatggagcctgcaatactgaagagagcaactaaagatatcagaaaatatttcaaggatatggccactttctccgcaacgtgggtctttattgttacatgggaggaggtgactttttatggcggtagctcgactacacccgtaaatacgtttcaggctgtacttgttagcgacggcagctacacctttaccctgtttaactactacgagataaattggaccaccggcaccgcttcaggcggagatcctctaaccgggttagggggtgtaatggcacaagcagggttcaacggaggcaatctcaccaatttcttttcactcccagggtccagaacgcctgaaatcgtgaatattcaagagaccacaaatgtgaacgtccccggtcgctgggccttcaaagtggatgggaaagagattgatcctgccaacggttgtacttcgcgtggccagttccttcgaagaggggaggtgttctgggatgatctgaactgtaccgtgaagtgccgatgtctggatttcaataatgaaatttattgccaggaagccagctgcagcccgtacgaggtttgtgagccaaagggcaaattcttttattgctcagcagtggaaacttcaacctgcgtggtattcggcgagcctcactatcacacctttgatggctttctgtttcactttcagggttcctgtgcgtacctgctggcccgtcagtgcctgcagacctcctcccttccattcttcagtgtagaagccaaaaatgaacaccgcaggggatcagccgtctcttgggtgaaagaactgagcgtagaagtcaacgggtacaagattctcattcctaaaggctcttacggtagagtcaaagttaacgacctggttacctccctgccggtcacgctggatctgggaaccgtgaagatttatcagtccggaatttcaaccgcggttgaaactgacttcggacttttggtcacattcgacgggcagcactatgcatccattagcgtccctggcagttacattaattctacatgcggcttgtgcggaaactacaacaagaatccactagatgactttttgcgaccggacggccgtcctgctatgtcagtgctagatttgggagagtcctggagagtctaccacgcagattggaaatgcgattcgggctgcgtagataattgcacacagtgtgacgctgccacagaggcactctattttggatccgactattgcggcttcctgaataaaaccgatggtcccctgtgggaatgcggtactgtagtcgatccgacagcattcgtccactcttgtgtctatgatctctgttctgtgcgggacaacggaacactgttgtgtcaggccatccaagcttacgcgctcgtgtgccaagccttagggatcccaattggggactggcgcacccaaaccggctgcgtgtccactgtgcagtgcccttctttcagccactacagtgtttgcaccagcagctgtcccgatacatgttctgacctgacagcttcgagaaattgtgccacgccttgtacagaggggtgtgagtgcaatcagggctttgtgctctccacttcacagtgtgtcccgctgcataaatgtgggtgtgacttcgacggacattactacactatgggagaatttttctgggccaccgcaaattgcactgttcagtgtctgtgtgaagagggaggcgatgtgtattgcttcaacaaaacatgcgggagcggagaagtgtgcgcagtagaggacggctaccagggttgcttcccaaaacgggagacagtgtgcctccttagtcagaatcaggtcctgcatacgtttgacggcgcttcctacgccttccctagcgaattctcctatactctcctgaagacatgcccagaacgacccgagtacctggaaatcgatataaataaaaagaagcccgacgctggccctgcatggctgaggggcttgcgtatccttgtggccgatcaggaggtgaagattggcggtataggcgcatcggaggtcaaacttaatggccaagaggtagagttacccttcttccatccgtccggaaagctggaaatttaccggaataagaactccactacggttgagagcaagggcgtggtgacggtccaatatagtgatatcggtctcctgtatatcaggctgtccacaacctacttcaattgcactgggggtctgtgtgggttttataacgcgaatgcctccgacgagttctgtctgccaaacggtaagtgcacggacaacctcgccgtcttcctggaatcttggacaaccttcgaagaaatttgcaacggtgagtgcggcgacctcctaaaggcatgtaataatgacagtgagcttcttaaattttaccggagtaggtccagatgtggcatcattaatgacccatctaactcttcctttctggaatgtcatggggtcgtgaacgtgacagcatattacaggacctgcctttttcgtctgtgtcaaagtgggggtaacgagagcgagctgtgcgattcagtggcacgatacgccagcgcttgcaagaacgccgacgtggaggtcggaccttggcggacctacgatttttgtcctctcgagtgccccgagaactctcacttcgaagaatgcatcacatgcaccgagacatgtgagacgctgacgctgggtccaatttgtgtggattcctgcagtgaaggctgtcagtgcgatgaaggatatgctctgctgggttcacaatgtgtcaccaggagtgaatgcgggtgtaattttgaaggccatcaactggcgactaatgagactttctgggtggatctcgattgtcagatcttttgttattgcagcgggacagataatcgagtgcactgcgaaactattccatgcaaagatgatgaatattgtatggaggaaggaggcttatattattgtcaggcacgtacggacgcctcatgcattgtctcaggatatggacactatctgacttttgatggctttcctttcgatttccagaccagctgtccactgattctgtgcactacaggctccaggccatctagcgatagtttccccaagttcgtggttaccgcaaagaacgaggacagagatcctagcctggccctctgggtgaaacaggtggacgtgacagtgtttggttacagtatcgtgattcatagagcgtataagcatactgtcttggtgaactccgagagactttacttacccctcaagctggggcagggcaaaataaacatcttttcctttggctttcatgtggttgtggaaacggactttggccttaaagtggtttatgactggaagaccttcttaagcatcactgtcccacgatctatgcaaaacagcacctacggcctgtgcggaaggtacaatggaaatcctgacgatgaccttgaaatgcctatggggctgttagcctcaagtgtaaatgagtttgggcagtcatgggtgaaacgggatacattctgccaggtgggctgcggcgatcggtgtccatcttgtgccaaagtcgaggggtttagcaaggtccaacagctttgttcgctgattcccaatcaaaatgcggcattttcaaagtgtcattctaaagtgaatcccaccttcttttacaagaattgtctgttcgactcgtgtatcgacggaggcgcagttcagactgcttgcagctggttgcaaaattatgccagtacttgtcaaactcagggaattaccgttaccggatggcgaaattacacaagctgcaccgtcacttgcccccctaactctcactatgaaagttgcgtctccgtgtgccagccgcgatgcgcggctatacgactcaagtccgattgcagccactactgcgtagaaggttgtcactgtgacgctggctatgtgcttaacggcaagtcctgtatcctgccccattcatgcgggtgctattctgacggaaaatactacgagccaaagcagctgttctggaacagcgactgcactagacgctgtagatgtttccggaggaatgtgattcagtgtgacccccgacagtgcaagtccgatgaagaatgtgccctcaggaatggtgtcagagggtgtttcagcactaagactagctactgcctggctgccggtggaggtgtatttagaacatttgacggcgcattcctgaggttccccgcaaattgcgccttcgtgctcagcactatctgccagaaactgccagacatctccttccagctcatcatcaacttcgacaagtggtcagcgccaaatctgacgatcataagcccagtttacttttatattaacgaggaacagatacttatcaacgacagaaacacagtcaaggtcaacggcactcaggtgaatgttccttttattaccggtttggccacaaagatatacagctccgaagggttcttagttattgatacctctcccgatattcaaatctactataacggcttcaatgtcatcaagataagcatctccgagagactgcaaaataaggtttgcggtctttgtggcaactttaacggggatctgactgatgactatgtcaccctgcgcggaaagcctgtggtgagctctgtggtgctcgctcagtcttggaagacgaacggtatgcagaagcgccctttagccccttcttgcaacgaacttcagttcagccagtacgctgcaatgtgcgacaacgtgcacatccagaaaatgcagggtgacggatattgcctgaaattaaccgacatgaaaggcttttttcaaccctgttacgggctgctcgacccactgcccttttatgagtcctgttacctcgacggatgctatagtcataagaaatttcaactgtgtggtagtttggctgcctacggcgaggcgtgtaggtcctttgggatcctttctactgaatggatcgagaaggagaattgctccggcgtggtcgaggacccttgtgtcggcgcagactgcccgaatcggacttgcgagttgggcaacggtagggagctatgcggctgcatagagcctccaccctatgggaacaacagccacgatatcatcgacgctgaagttacctgcaaggcggcacagatggaagtgagtattagcaagtgcaagctcttccagctgggatttgagcgtgaaggcgtgaggatcaacgataggcagtgcaccggcatcgaaggagaggacttcatttccttccaaattaataatacaaaaggaaattgtggcaacatagtacaatctaatggcacgcacatcatgtataagaacacactgtggattgagtccgcaaacaatacgggaaatatcatcactcgcgaccgcacgataaatgtggaattttcatgcgcgtacgagctcgatataaagatatcgttggacagtgtggtgaagccaatgctgagcgtgatcaatctcacagtgcccacacaggagggatcgttcatcacaaaaatggccctctataagaatgcatcttacaagcatccataccgccagggtgaggtggtacttaccacacgggatgtgctgtatgtcggggtgttcgttgtcggcgcagacgccacacatcttatattaacactgaataagtgttacgccacccccacaagggatagcaatgacaagctacggtattttatcatcgaaggaggctgtcaaaacttgaaagataatactatcgggatcgaggaaaacgctgtgagcttgacatgtcgcttccacgtcactgtttttaaattcattggggattacgatgaagtacacctgcattgcgccgtgtccctgtgcgattccgagaagtatagttgcaagattacctgcccacacaactctaggatagcaacagactacacaaaggagcctaaggaacagattatcagcgtgggaccaattaggcgcaagagactcgactggtgcgaagacaacggagggtgcgagcagatctgtaccagccgcgtggacggccctctttgcagctgcgtgacaggaacgctgcaagaagatggcaaaagctgtcgcgcttccaattcctcgatggaactgcaggtgtggaccctgcttctgatcatgatccagataagcctgtggcacttcgtgtataagagcggtacaacctcata

SEQ ID NO: 243682 - DNA, 1257 bp, synthetic construct
  misc_feature 1..1257: note = Description of Artificial Sequence: Synthetic coding sequence
  source 1..1257: mol_type = other DNA
atggctaagctcctgcagccacctcccaagttcttgccttcagaatggcacatagctaataaaaaccagtaccaccgagccgacgcccaacggagtaggtctgagcggctggttgcggagtcccagagactagtggacgagatcgagaaaacaacaaggaaaagtcaatccgacgttaataagaagctcgagcaacgtctggaagaggtccagttttggaaaaaagaactggatgacaagctggagcagctggtcaacgtgaccgatgacctacttatttacaagataaggttagagaaagccctcgaaaccctcaaggagccgctgcacattacagaaacctgcctggcctaccgagaaaagaggattggcatagacctggttcacgacaccgtcgaacatgagctgatcaaagaggctgagataattcagggcatcatggcccttctgacacgaacactcgaagaagccagtgagcagatccgtatgaacaggagcgccaagtataatctggaaaaagaccttaaggataagttcgtggctctgaccatcgacgacatttgtttctctcttaacaacaactcccccaacattaggtatagtgagaacgccgtaagaattgagcccaacagcgtttccttggaagattggctagacttctccagcacaaacgtggaaaaggccgacaagcagcggaataattcacttatgctaaaggcgctggttgaccgcatcctttcccagactgctaatgatcttcgaaagcagtgcgatgtggtggatacagctttcaaaaacggactgaaggacacaaaggacgctagggacaaacttgctgaccacctggccaaggtgatggaggagatcgcgagtcaagaaaagaacatcaccgccctggagaaggcgattctggaccaggaaggccctgccaaggtggctcatacaagactcgagactaggacacaccgccctaatgtcgaactctgcagagacgtggctcagtaccgccttatgaaggaggttcaggaaattacccataacgttgctcgactaaaagagaccctggctcaggcccaagccgagctcaaggggctccaccgacggcagctcgcactgcaagaggaaatccaggtgaaagagaacaccatctatatcgatgaagtgttgtgcatgcagatgcgtaaaagcattcccctgcgggatggcgaggaccatggagtatgggcgggagggcttcgtcctgacgcagtatgctag

SEQ ID NO: 243683 - DNA, 819 bp, synthetic construct
  misc_feature 1..819: note = Description of Artificial Sequence: Synthetic coding sequence
  source 1..819: mol_type = other DNA
atggctttactcacccgcaccctcgaggaggcatccgagcagataagaatgaatagatctgccaagtacaacctggagaaggacctcaaggataaattcgtggcactcacaatagacgacatctgttttagtctgaataacaactcccccaacatccgctattccgagaatgcagtcagaatagagcccaatagcgtaagtttagaggattggctcgacttctccagtaccaacgtcgaaaaggccgataagcagaggaacaattcacttatgctgaaagcccttgttgacagaatcctatctcaaaccgcaaacgatttgagaaagcaatgtgatgtggtggataccgctttcaaaaacggcctgaaggatacaaaagatgcccgagacaaactcgctgatcacctggccaaggtgatggaagagatcgcatcccaagaaaagaatatcacggccctcgaaaaagctatcctcgaccaagaagggcctgctaaggtagcacacacccgacttgagacaagaacccatcggccaaacgtggaactctgccgggatgtggcacaatacaggctgatgaaggaagtacaggaaatcacacacaacgtggcacgtctgaaagagaccttagcacaggctcaggccgagttaaaaggcctccatcggcgtcaacttgctttgcaggaagagatccaggtgaaggagaatactatctacatcgacgaagtgctttgtatgcagatgagaaagtctatccccctccgtgacggtgaagatcacggtgtttgggctggcggactccgacccgatgctgtctgctag

SEQ ID NO: 243684 - DNA, 1473 bp, synthetic construct
  misc_feature 1..1473: note = Description of Artificial Sequence: Synthetic coding sequence
  source 1..1473: mol_type = other DNA
atggagagagtggggtgtacactgactaccacctatgcacaccctcgtcccacacccacaaactttctgccagcgatctctacgatggcttccagttatcgcgatagatttccccattccaatctgactcattcactgagtctgccatggcgaccaagtacatattacaaggtagcatccaactctccatctgttgccccatactgcactagaagccagcgggtctcagaaaataccatgcttcctttcgtgtccaacaggaccacgtttttcactcggtatacacccgacgactggtacagaagtaatctgaccaattatcaggaaagcaatacttctcggcataatagtgaaaagcttagagtggatacgtcacggctgattcaagacaaatatcagcagacacgcaaaactcaagccgatactacccagaatcttggcgagagggtgaacgacatcgggttttggaagagcgaaattatccatgaattggacgaaatgataggggaaaccaacgcactcacagacgtgaaaaagagactagagcgagcgttgatggagacggaggcccctctccaggtggctcgtgagtgtttgtttcaccgggagaagcgaatgggcattgatttagtacacgacgaggtggaagcacagttactgaccgaagttgacaccattctatgttgccaggagagaatgaaactccatctggacaaggccatcgcacagctggctgccaatagagctagccagcatgagctagagaaggacctcagcgataagcagacagcctatagaatcgatgacaaatgccaccaccttaggaacactagcgacggcgtgggctattttaggggcgtggaaagagtggacgccaccgtttctgttcctgaatcatgggctaaatttacagatgataatatcctacggagtcagtcagaacgcgcagcctcggctaaactgagagatgatatcgagaatctgctggttgtcaccgccaacgagatgtggaatcagtttaacaaggtgaatctaagttttacgaacagaatcgccgaaaccgctgatgcaaaaaataaaattcaaacacatctcgcgaaaaccttgcaggaaatcttccaaactgagatgaccatagagtcaatcaagaaggccatcaaagacaaaactgcgtttctaaaagtggcccagacgcgcctagatgaaagaacccgtcggccaaacattgagctgtgcagagacatggcccagctccgcttggttaatgaggtgcatgaagtcgatgatacaattcagacactgcaacagaggctgcgggacgccgaggacactttacagtctttagtacacattaaagccactcttgaatacgatctggccgtcaaggctaactcgctttacattgaccaggaaaagtgtatgagcatgaggaaatcttacccaaacactctgcgcctagtgggattttgttag

SEQ ID NO: 243685 - DNA, 1473 bp, synthetic construct
  misc_feature 1..1473: note = Description of Artificial Sequence: Synthetic coding sequence
  source 1..1473: mol_type = other DNA
atggagcgtgttggctgcactctcactaccacctatgcccatccaagaccaacaccaacaaatttcctgcctgcgatttcaacgatggcaagttcttacagggaccgattcccacattccaatctgacacacagcctctccctgccatggcggccttctacttattataaagtcgccagtaattcaccctctgtggctccctattgcactcgatcccagagggtatctgaaaatacgatgctaccatttgtgtctaatcggaccactttttttacccgctacacgcccgatgactggtacaggtcgaatctcacgaactaccaggagagtaacacaagccgtcataactcagaaaaattgcgggtggatacctcacgtctcattcaggacaagtatcagcagacaagaaagactcaggccgacactacccagaatctgggcgagagagtgaatgacattggattctggaagtcagagattattcacgaacttgacgaaatgatcggagagacaaatgcgctaacagacgtgaaaaagaggctggaaagggctctgatggagactgaggcccctctgcaggtcgccagagagtgcttattccatcgagagaaaagaatgggaattgatctggttcacgatgaagttgaggctcagctgctgacagaggtggacaccattctgtgttgtcaggaacgcatgaagctccatttagacaaagctatcgctcaactggcggctaatagagcttctcagcatgagctggaaaaagacttaagtgacaaacagaccgcttaccgtattgatgacaagtgtcaccacctgcgcaacacctcagatggtgtggggtattttcggggagtcgagcgggtggatgcgaccgtgagtgttccagagtcttgggcaaaattcactgatgataacattctgaggtctcagtcagagagggcagccagcgcaaaacttagagatgacattgagaaccttcttgtagtaactgccaatgagatgtggaatcaatttaataaggttaatctttccttcacgaaccgcattgcagaaaccgccgatgctaaaaacaaaattcagacccatctagccaaaacgctgcaggagatatttcagacagaaatgacaattgaatcgatcaagaaagccattaaagataaaaccgccttcctgaaggttgcccagacaaggctggacgagcgcaccagacggcctaacatcgaactgtgtcgcgacatggcacagctgcgcctcgtcaacgaggttcacgaagtggacgataccattcaaacccttcaacaaagacttcgcgacgcagaggatacactgcagtcattggtgcacatcaaggccacactggaatatgatctggctgtgaaggctaacagtctatatatagatcaagaaaagtgcatgtcaatgagaaagagctaccctaatactctacggcttgtgggtttctgttag

SEQ ID NO: 243686 - DNA, 444 bp, synthetic construct
  misc_feature 1..444: note = Description of Artificial Sequence: Synthetic coding sequence
  source 1..444: mol_type = other DNA
atggagagagtgggctgcactctcacgactacctacgctcatccacgtcctactcctacgaactttctgcccgcaataagtacgatggcttcaagctacagagaccgctttccgcacagtaacttgacacattctctctccctgccatggaggccctcgacatattataaagtggcctctaatagcccatcagtggccccatattgcacacggtctcagagggtttctgagaacacaatgttgcccttcgtgagtaaccggacgacattctttactaggtatactccagacgactggtataggagtaatctcacaaattatcaagaaagcaacacctcaagacacaacagtgagaaactcagagttgacacttctagactgatccaggacaagtaccagcagacccgtaagacccaagcggatacaactcagaacttagggtag

SEQ ID NO: 243687 - DNA, 423 bp, synthetic construct
  misc_feature 1..423: note = Description of Artificial Sequence: Synthetic coding sequence
  source 1..423: mol_type = other DNA
atggagagagtagggtgtacgttaaccactacatacgcgcacccccgaccaactcctacgaactttttgccagctatcagtactatggcctcaagctatagagaccggttcccgcacagcaacctcactcatagtttgtcactgccttggaggccatcaacgtattataaagtcgcctctaattctcccagcgtggcgccttactgcaccagatcacagcgggtctctgaaaacacaatgctgcctttcgtcagcaacagaacgacatttttcacccgttatacgcctgacgactggtataggagcaacctgaccaactaccaggaatcaaacactagccgacataattctgagaagctcagggtggatacgtcaagactaatccaggataaataccagcaaacaaggaagacacaagcatag

SEQ ID NO: 243688 - DNA, 249 bp, synthetic construct
  misc_feature 1..249: note = Description of Artificial Sequence: Synthetic coding sequence
  source 1..249: mol_type = other DNA
atggaacgcgtgggatgcacactaaccacaacttatgcccatcccagacctacccccacgaattttctccccgcaatctcaacgatggcatcgtcctatcgggacaggttccctcattcaaaccttactcatagcctctccctgccatggcggccatctacttactataaggtggcttcaaacagcccctccgtggcaccctattgtacaaggagccaacgggttagcgagaacactatgctaccgtag

SEQ ID NO: 243689 - DNA, 2514 bp, synthetic construct
  misc_feature 1..2514: note = Description of Artificial Sequence: Synthetic coding sequence
  source 1..2514: mol_type = other DNA
atggagccggcaccttctgaagtaaggctcgccgtacgcgaggccatacatgccctcagctcatcagaggatggaggacacattttctgcactcttgagagcttgaaacgctatctgggcgaaatggaacctccagccctgccacgagagaaggaggagttcgcctctgctcatttttcccctgtcctgcggtgcctcgccagtagactgtcacccgcttggttggagctcttgccccacggcagattggaagagttgtgggcctcatttttcctggaggggccagccgaccaggctttcctcgtgctgatggagaccatagagggtgctgcgggacccagttttaggctcatgaagatggctcggctcctcgcccgatttttgagagaagggaggctcgcagtactgatggaggcacagtgccgacaacaaactcagcccggatttatcttgctgcgcgagactttactcggcaaagtcgtggccctgcccgatcacctcggcaatcgtctacagcaagaaaacctcgctgaatttttcccccaaaactatttccgtctgttgggcgaggaagtcgtgcgcgtgcttcaagcggtggtcgattccctgcaaggcggtctcgacagttctgtgagttttgttagccaggtgttgggaaaggcctgtgtgcacggtcggcaacaggaaatactgggcgtgcttgtcccccgtttggctgcgctgactcaggggagttatctccaccagagagtgtgttggaggctcgtagaacaggtcccagaccgggctatggaagccgtactgactggactggttgaagcagcgctcggccctgaagtgctcagtagactgctcggcaacctcgtcgttaagaataagaaagctcagtttgtcatgactcagaaactgttatttcttcagagcagactgacaaccccaatgctccagagtcttcttggacacctagctatggattcgcagaggcgtcctctgttgttgcaggtgttgaaggaattgctggagacctggggctcctcctctgcaattagacacacacctcttcctcagcagagacacgtgagcaaggctgtgcttatctgtctggcccagctgggggagcctgaactgcgagatagccgagatgagctgctggctagtatgatggccggagttaagtgccgtttggattcatctttacccccagttagacgtcttggtatgatcgttgccgaagtggtgtcagccaggatccaccccgaaggcccacccctgaagttccagtacgaagaggatgaactgtcgctggaactgctggctttagcttctcctcagcctgccggagatggagcttccgaagccggaacctcactggttcccgctacagcagagcctcccgcagaaactcccgcagagattgttgatggtggcgtcccacaagcacagcttgccggaagtgattccgatcttgacagtgatgatgagttcgtgccgtacgacatgtcgggtgacagagagttaaagagcagcaaggctcctgcatatgttagagattgcgtggaagccctaacaaccagtgaagacattgagcggtgggaggctgcactgcgcgctctggagggactcgtctatcgaagccccacagccacaagagaggtaagtgtagagctcgctaaggttttactgcatctcgaagaaaaaacgtgtgtggtaggtttcgccggacttcgccaaagggcactagttgctgttactgtcacggaccccgcaccagtcgccgactacttaacatctcagttttacgctctcaattattctctgaggcagcggatggacattcttgacgtcctgacattagcagcccaggaactgagtcggcctgggtgtttgggcagaactccacagcctgggtcaccgtcccccaataccccatgcctccctgaggcagcagtgtcacagcctggatctgctgtcgcttctgactggcgggtagtggtggaggagaggatcagaagtaagacccaacgccttagtaagggaggacctcggcaggggccagcgggatccccatctaggtttaactcagtggccggacacttctttttccccctcctccagcgctttgacagaccccttgtaacattcgatctgctgggagaagaccagctggttttagggagactggctcataccttgggcgcactcatgtgtctagccgttaacactacagtggcggtggcgatgggcaaggcactgctcgagttcgtatgggcactccgatttcacatcgacgcttatgtgcgccagggcctgttaagtgctgtctccagtgtgctgctgagcctacctgcagccaggcttctcgaggatctgatggatgaactgcttgaagcccgaagttggcttgcggacgttgccgagaaagatcccgatgaggattgtaggactctcgccttaagagctctccttctccttcagcgactgaaaaaccggcttcttcccccagcctccccatag

SEQ ID NO: 243690 - DNA, 1083 bp, synthetic construct
  misc_feature 1..1083: note = Description of Artificial Sequence: Synthetic coding sequence
  source 1..1083: mol_type = other DNA
atgatggccggtgtaaagtgtcgcctggatagtagtctgccacctgtccgtcgactggggatgatcgtcgcagaagtggtttctgccagaattcatcccgaggggcctcctctcaagtttcaatatgaggaggacgagctctctctcgaactcctggctctcgcctccccccagcccgctggagacggtgccagcgaagcaggaacatcactggtgcctgcgacggcggaaccccctgccgaaacaccagccgagattgttgatggtggggtccctcaggcgcagctggccggaagcgacagcgatctcgatagcgacgacgaattcgtcccatatgatatgtctggcgatagggaactgaagagctcgaaagcgcctgcctatgtgcgtgattgcgtggaggttctcgatgtacttaccctggctgcccaagagcttagtcgcccaggatgtctgggccgtacaccgcaacccggaagtccaagcccgaatacgccatgtctccccgaagccgctgtttcgcagcccggatccgcagtggcttccgactggcgggtcgttgtggaggaacggattaggtccaagacgcagcggctgagcaaagggggacctcgtcagggtcccgctggaagcccttccaggttcaacagcgtggccggtcacttctttttcccactcctacagcgtttcgatcgacccctggtaactttcgacctcctcggtgaggatcaactcgtgctgggcagactggcacatacgttgggggctcttatgtgccttgccgttaataccaccgtcgctgtcgccatgggaaaggccctgcttgagttcgtgtgggccttgagatttcacattgatgcctatgttcggcaaggtctgctcagcgcagtgagttcagtactcctcagcctgccggctgcacgactgctagaggacctcatggatgagttgctggaggcaagatcttggctggctgatgtggccgagaaagaccctgatgaagactgccgcacattggccttgcgagccctccttctgctgcagagactgaaaaatcgcttgctgcctccagcaagcccatag

SEQ ID NO: 243691 - DNA, 3270 bp, synthetic construct
  misc_feature 1..3270: note = Description of Artificial Sequence: Synthetic coding sequence
  source 1..3270: mol_type = other DNA
atggctgtttttgacactcctgaagaggccttcggagtcctacgccctgtgtgcgtgcagctgactaagacacagactgtcgaaaacgtggagcaccttcagacgcgcctgcaggcagtctcagacagcgccttgcaggaactccagcagtacatcttattcccactgagattcaccctgaaaaccccagggccaaagcgtgaaagacttattcagagcgtggtcgaatgtcttacctttgttctgagctccacgtgtgtgaaagagcaggaactgctgcaggaactctttagtgagctgtcagcctgcctgtattctcccagtagccagaagcccgctgcggttagcgaggaactgaagctggcggtcatccagggactttccacgttaatgcattctgcttacggtgatatcattcttaccttctacgaaccatcaatactccccaggttaggcttcgccgtttctttgctactgggacttgccgagcaggaaaagtctaagcagattaaaatcgcagccctcaaatgtctccaggtgcttctgctgcagtgcgactgccaagaccatcctcgtagtctcgatgaacttgagcagaagcaactgggtgatctcttcgcctcatttcttccaggcatcagcactgccctgacccgtctcatcacaggcgatttcaagcagggacatagcatagtggtgtcctcccttaagatattttacaaaacagtttctttcatcatggccgacgaacagttaaaaagaatatccaaggtgcaagctaaacccgcagtggagcaccgtgtggctgaacttatggtctatcgcgaagctgactgggtgaaaaagaccggagacaagctgacaattctgatcaaaaagataatcgagtgtgtcagcgtgcaccctcactggaaggtgagacttgagctcgtggagctggtggaagatctgctgttgaagtgttcccagagcctcgtggagtgcgccggtccgctactcaaggccctggttggactggtgaacgatgagtccccagagatccaggcacaatgtaataaggtgctgcggcactttgcagatcagaaggtggtggtcggaaataaagctttggccgacatcctgtctgaatcactccattctctcgcaacttcattacccaggctgatgaattcccaggacgaccaggggaagttcagcaccctctcgttgctgctcggctatttgaaactgttgggccctaaaatcaattttgtgctgaactcagtggcacatctgcaaaggctcagcaaggcactgattcaagtcctagaattggatgttgctgacataaagattgtggaggaaaggcgctggaatagtgatgatctgaatgcttctccgaaaacgtccgccacccagccatggaatagaatccagcgacgctatttcagatttttcacggatgagcgtatttttatgctcctgcggcaggtgtgtcagctcctggggtactacggcaatctctatcttctcgttgaccattttatggaactttaccaccagagcgtcgtgtaccgtaaacaagcagccatgatcctgaatgaactggtgacgggggcagctggacttgaggtagaggacctgcacgagaaacacatcaaaacaaaccccgaagaactcagggagatagtcacgtctatccttgaggaatacacatcgcaggagaactggtatctggtgacctgcctggagacagaagaaatgggtgaggaacttatgatggagcatcccggattgcaggctatcacctccggcgagcacacttgccaggtcacatctttcctcgctttctctaagccaagcccaacaatctgtagcatgaactctaacatctggcagatttgtatccagctcgagggtataggacaatttgcctacgccttaggcaaagatttttgcctgctgttaatgtcggctctctaccctgttcttgagaaagctggagatcaaactctgcttatcagccaggtggccaccagtaccatgatggacgtttgcagagcgtgcggttatgactcacttcaacacctcattaaccagaatagcgactacctggtgaacgggatcagcctgaacttgcggcacctcgctctgcacccccacacccccaaagtgttggaggttatgttgcggaacagcgatgccaacctgttaccgctggtagcggatgtcgttcaggatgtgctcgctactttggaccagttctacgacaagcgggctgcaagtttcgtgtccgtgctgcatgccctgatggcagccttggcccaatggttccccgacactgggaatctgggccacctgcaggagcagagtctgggcgaagaggggtctcatttgaatcagagacccgcagccttggaaaaatctacaaccaccgcagaagatatcgagcaattcctgcttaattatctgaaagaaaaggatgtagctgatgggaatgtgtcggattttgacaatgaggaagaagaacagagtgttcctcctaaagtggacgagaatgatacgcgccctgatgtggaacctcccctcccacttcagatccagattgccatggatgtgatggagagatgcatacatctgctctcggacaagaatctacagataagactgaaagtgctggacgtcctagatctttgcgttgtggtgctgcagagccataagaatcaactgttgccccttgcacaccaggcctggcctagtctcgttcaccggctgacccgggacgcgcctttggctgtgcttcgggctttcaaggtgctgcgcactttaggcagtaagtgcggcgattttctgaggtctcggttctgcaaggacgtgctgcccaaattggcagggagcctggtcacccaggcccctatttccgctcgagccggacccgtttattcacacacactagctttcaagcttcagctggccgtcctacagggactggggccactgtgtgagcggctggatctcggagaaggcgatctgaacaaggttgcggacgcttgcctgatctacctctccgtgaagcagcctgtgaagctacaagaggcagcaaggagcgttttcctgcacctgatgaaggtcgaccctgattcaacgtggtttctgctgaacgagctgtattgccccgtacagttcacacccccacacccgagtctgcaccctgtgcaactacatggcgcatccgggcagcagaacccatacacaaccaacgtcctacaactgttaaaggaattacagtag

SEQ ID NO: 243692 - DNA, 3270 bp, synthetic construct
  misc_feature 1..3270: note = Description of Artificial Sequence: Synthetic coding sequence
  source 1..3270: mol_type = other DNA
atggcagtcttcgatacccccgaggaggcgtttggtgtattacgtccggtgtgtgtccagctgacaaaaacccagactgtggagaatgtggagcacttacagacgaggctccaagcggtgtctgactcagccctccaggagctgcaacaatacatcttgtttcctctccgctttaccctgaaaacacctggtccaaaacgcgagagactcatccagtctgtggtcgagtgcctgacatttgtcttatccagcacatgcgtcaaagagcaggagctactccaagagctgttcagtgagttgagcgcatgcctctactcccccagctcacaaaaacctgccgcagtaagcgaagagctgaagcttgccgtgattcaaggtctgagcacgttgatgcattctgcctatggcgatatcatactcaccttctacgaacctagtattctaccacggctcggattcgcagtctctcttctccttggtctggctgagcaggagaagagcaaacagatcaagattgcggctctcaagtgtctccaagtccttctgctgcagtgcgattgtcaggaccaccccagaagcttggatgaacttgaacagaagcagctaggagatctcttcgcatcatttctgcccggaatctcaacagccctcactcgactgataaccggggactttaaacagggtcactcaattgtggtcagtagtctgaaaatcttttataaaactgtctcttttattatggccgatgagcaattaaagagaatatctaaggtgcaagcgaagcccgcagttgaacatcgagtggctgagttaatggtgtaccgggaggctgactgggtgaaaaaaacaggggataagctgacgatcctgataaagaagatcattgaatgtgttagcgtccacccacattggaaagtgcggcttgagctcgtggaattggttgaagatttgttgctgaaatgttcgcagagtttggtcgaatgtgcgggaccactgttaaaagccctcgttggattagtcaacgacgaaagccccgagatccaggctcagtgtaacaaggtattgaggcacttcgctgaccagaaggttgtggtgggaaataaggcactggccgatatcctgtctgaaagccttcactccctagctacttcattaccgagactgatgaatagccaagatgatcagggaaaatttagcacactgtcattgttgttgggctatctaaaactactcggacctaagatcaatttcgtgcttaactcagtcgcacaccttcagagactaagtaaggcactgattcaggtacttgaactggatgtcgcagatatcaagatcgtggaggagcgcagatggaatagcgatgatctgaacgcatctccaaagacatcagctacccagccctggaatcgtatccagcgcagatacttccgcttttttaccgacgagaggattttcatgctgttgcgtcaggtttgccagctcctaggttactatggaaatctttacctcctggtagatcatttcatggagctttatcaccagagcgttgtgtaccgtaagcaagcggcaatgattctcaatgaactggtgaccggcgctgctgggctggaagtagaagacctccacgagaaacacattaagacaaacccggaggaactgagggaaatcgtcacctctattctggaagagtacacgagccaagaaaattggtaccttgtcacttgcttggagacagaagaaatgggggaggaactgatgatggagcatcccggtctccaggccataacaagtggggagcacacatgtcaagttacctcattcctggccttctccaagcctagccctaccatttgcagtatgaacagcaacatctggcagatttgcatacaattggaaggaatcggtcagttcgcctacgcgctgggcaaagatttctgtttgttactcatgagcgcactttatccggtcctcgagaaggctggtgaccagactctacttatatctcaagtagctacttccactatgatggacgtgtgccgcgcttgtggttatgacagtctgcagcatttgatcaatcagaactctgattatcttgtgaatggcattagtctcaatctgaggcaccttgcgctgcacccacacaccccgaaagtactggaggtgatgctgcggaactccgacgctaacttactgcccctggtcgcagatgttgtacaagatgtgctggctaccttagatcagttttacgataagcgcgctgcaagttttgtatccgttctgcatgctcttatggccgctttagcccaatggttccccgatactggtaatctgggtcacctgcaggagcagtccctaggtgaggagggaagtcacttgaatcagagacctgccgctctagaaaaatccacgacgactgctgaggatatagagcagttcctactcaactacttgaaggaaaaggacgtcgccgatggcaacgtgagcgatttcgacaacgaggaggaggaacagtccgtaccgccaaaggtggacgaaaacgacactcgcccagacgtcgagcctcctctgcctttgcagatacagattgcgatggacgtcatggaacgctgcatccacttactgtcagacaagaacctgcagatacggctgaaagtcctggatgtcctggacctctgtgtggtcgttttacagtcccataagaaccagctcctgccattggctcatcaggcttggccatcgctagtacataggctaacccgcgatgctccactagcagtcctgcgagccttcaaggtcctgcgaaccttagggagcaagtgtggcgacttcctgcgttctaggttttgcaaggacgttctgcccaagctggctggttcccttgtgacgcaagcacccatctctgccagagctgggccagtgtactcccacaccctggccttcaaattgcagctagccgtcttgcagggcctgggacctctttgcgaacgcctggatctcggagagggtgacctgaataaggtagcagatgcttgtctcatatatctatccgtgaaacagccagttaagctgcaagaggccgcacggtcagtcttcctacatctgatgaaagtggacccagattcaacttggttcctgctgaacgagctttattgccccgttcagttcaccccgcctcacccatctctgcatcctgtgcagcttcatggggcatccggacagcagaacccatataccacgaatgtcttgcagctcctcaaggagctgcaatag

SEQ ID NO: 243693 - DNA, 3270 bp, synthetic construct
  misc_feature 1..3270: note = Description of Artificial Sequence: Synthetic coding sequence
  source 1..3270: mol_type = other DNA
atggctgtattcgatacaccagaggaagcattcggagtgctgaggccagtgtgtgtgcaactgacaaagactcaaactgtcgaaaacgtggagcatttgcaaaccaggctgcaggctgtgtccgattcagctctgcaagaactgcagcagtacatactgttccccctccgttttacactgaagacacccggacctaaacgggaacgtctgatacaatcagtagtggaatgtctgaccttcgtcctgtcatccacttgcgtgaaggagcaggaactgctacaagagttgttcagcgaattgtccgcttgcctttactcgccttccagtcagaagccagcggcagtgtccgaagaactgaagttggccgtaatccagggcctgagcacattgatgcatagcgcctacggcgacattatcctgacgttttatgagcctagcatcttgcccaggctggggtttgccgtgtccctgcttctcggtctggccgagcaggagaagagtaaacaaatcaagattgcagccctaaagtgcttgcaggtacttctgctacagtgcgactgccaagaccatcccaggtcactggatgaactggagcagaagcagctgggggatctgtttgcaagttttttgcccggaatcagtactgcccttacgagactcatcacaggagacttcaagcaaggacatagtatcgtcgtaagcagcctaaaaattttctacaagaccgtgtcctttatcatggctgacgaacagttaaaacggatttctaaggtccaggcaaagcccgctgtagagcaccgggtcgccgagctcatggtgtaccgagaagctgactgggtcaaaaagacaggcgataaactcacaattttaatcaagaaaatcatcgagtgtgtgtctgtgcacccccattggaaagtgcggctggagttagtggagctggtagaggacttactgctcaagtgttctcaatctctggtcgagtgtgcaggcccactgctgaaagccctggtcggactcgtgaacgatgagtccccagaaattcaggcacaatgcaacaaggtgttacgccatttcgctgatcagaaggtcgtcgttgggaacaaggctctcgctgacatcctgagcgagtctctccactccctcgccactagtttgcctcggctaatgaactcccaggatgatcaaggcaaatttagcacgctgagcctcctgttgggctacctcaagctactaggtcccaagattaatttcgttctaaatagcgttgcacacttgcagcgcctgtctaaggcacttattcaggtcctcgagctcgacgtagccgacattaagatcgtggaggaacgaagatggaattcagatgaccttaacgcttctccaaaaacaagcgccactcagccatggaaccgtatccagagaagatactttagattttttacagatgaacggatcttcatgttgctcagacaagtgtgccaacttctgggctattacgggaatctgtacttgttagtggatcacttcatggagttgtatcaccagtcggtggtctataggaaacaggcggctatgattctgaacgagcttgtgactggcgctgccggacttgaggtggaggatctgcatgagaagcacattaagacgaatcctgaagagctgagggagattgttaccagcatcctggaggagtatacgagccaagagaactggtacttggtgacctgtctggaaaccgaagagatgggcgaggagctgatgatggaacatccaggtcttcaggcgataacctccggcgaacacacctgccaggtgactagttttttagcattttcaaagccaagtcccaccatttgtagcatgaatagcaacatatggcagatttgtatccagctggaaggcattggtcagtttgcatatgccctcggcaaggatttctgtctgctgctaatgagcgcattatatccagttcttgaaaaagctggggaccagactctcctgatttctcaagtggccactagcacaatgatggacgtgtgtagggcctgtggatacgatagcctccagcacttgataaatcagaattctgactacctggtcaatggcattagtctgaacctacgccacttagctctgcatccgcataccccgaaagtgctggaggtcatgcttcgcaattcggatgctaacctgctccctcttgtggctgacgtagtacaggacgtgctggctaccctcgatcaattctacgataagcgggctgcaagctttgtaagcgtgctgcatgcattaatggcagcactggctcaatggttcccagacaccggaaacctgggccatttgcaggagcagtccctgggggaggagggctcacacctgaaccagcgcccagccgctctggagaaaagtaccaccacagctgaggacatagagcagttcctgctcaactaccttaaagaaaaggatgtggccgatggcaacgttagcgacttcgacaatgaggaggaggaacagagtgttccgccaaaggtggacgaaaatgacacacgcccagacgtagaacctccgttgccccttcagatccagattgctatggatgtgatggagaggtgtattcacctgctttcggacaagaaccttcaaattaggctcaaggttcttgatgtcttagacctctgtgtagtggtcctccagagccataaaaaccaactactgcctcttgcacatcaggcatggccttctctcgtccatagactcaccagagatgccccactggctgtgttgagagcgtttaaagtcctacggacactgggttccaagtgcggggatttcctgaggtcccggttttgcaaggacgttctgccaaagttggctggttcattggttacacaggcacctatttcagctcgtgccggtcccgtgtattcccatactctggcctttaagttacagcttgccgtgctccaagggctaggcccactctgtgaacgcctggacctgggtgagggggacctcaacaaagttgccgacgcctgtctcatctatctgagcgttaagcagcctgtcaagttgcaagaagcagcacggagtgtttttcttcatcttatgaaagtggacccagacagtacgtggtttctcctgaacgaattgtactgccctgtccaatttaccccacctcatcctagtctgcatcctgttcagctgcacggtgccagtgggcagcagaacccttacaccacaaacgtcctacagctcttgaaggaacttcagtag

SEQ ID NO: 243694 - DNA, 1527 bp, synthetic construct
  misc_feature 1..1527: note = Description of Artificial Sequence: Synthetic coding sequence
  source 1..1527: mol_type = other DNA
atggagctggactctgccttggaagccccatcgcaggaggactctaacttaagcgaggagctcagccatagcgcttttgggcaagcgttctcgaaaatactccattgtttagctagacctgaagccagacgtggcaacgttaaagacgccgttcttaaggacctgggggatcttatcgaggccacggagtttgatcggctttttgaaggaacgggagcgagactgagagggatgccagaaacgctgggacaggtggcgaaagcactggagaagtatgctgccccaagcaaggaggaggagggcggaggcgacggacatagtgaggccgcagaaaaggccgctcaggttgggttgcttttccttaaattgctggggaaggtcgaaaccgccaaaaactcactggtgggacccgcttggcagaccggactgcaccacctggccggacctgtgtacattttcgcaatcactcactccctggagcagccatggaccacccctcgcagccgcgaggtcgccagagaggtgctaactagtttattgcaagtgaccgagtgcggaagcgtggccggattcttgcatggcgagaacgaggacgaaaaaggtcgtttgagcgtcatcctaggcctgcttaagcctgatctttataaggaaagttggaaaaataatcctgcaatcaaacatgttttcagctggactctgcagcaggttacaaggccgtggctctctcagcaccttgaacgtgtattacccgcatcgcttgtgattagtgacgattaccagactgagaataagatattgggcgtgcattgcctgcatcatattgtgttgaacgtccctgctgcagacctgctgcaatataacagagcacaagtgttgtaccatgccatttccaaccatctctacactccagaacaccaccttattcaggccgtcctgctgtgtttacttgatctgtttcctatcctcgaaaagacattacactggaagggagacggggcacggccaaccacacactgtgacgaggtcctgaggctcatccttactcatatggagccagagcaccggctgctgctgcggaggacatatgctaggaatctgcctgccttcgtaaacagacttggcatactgacagtgcgacacctcaagcgcctagagcgggtgataattgggtatctcgaagtgtacgacgggccagaggaggaggccaggttgaagatactggaaaccctcaaactgctcatgcagcatacatggcccagggtctcttgtcggttggtggtgctgctgaaggccctgctgaaactgatttgcgacgtggcacgtgatccaaatctgacaccggagagtgttaagagcgcacttctccaggaagccacagattgcctgatccttctggataggtgctcccaggggagagtcaaggggctgctggcaaagatcccgcagagctgcgaagacagaaaggttgtcaactacatcagaaaggtccagcaggtctcagaaggggcaccctataatggaacttag

SEQ ID NO: 243695 - DNA, 1527 bp, synthetic construct
  misc_feature 1..1527: note = Description of Artificial Sequence: Synthetic coding sequence
  source 1..1527: mol_type = other DNA
atggagcttgacagtgcactcgaggccccttcgcaagaagattctaacctgagtgaggagttatctcatagcgcattcgggcaggcatttagcaagatcctgcattgcctcgccaggcctgaagctaggcgtggtaatgtcaaggacgctgtgcttaaggatctaggcgacttgatcgaggccactgaattcgatagactgttcgagggcacgggcgcacgtctacggggtatgcccgaaacactgggacaagtcgccaaggctctagaaaaatatgctgctccttctaaggaagaagaaggcggaggggacgggcactccgaggctgccgagaaagctgcccaggtaggcttgttatttctcaagttgctcggtaaggtagaaaccgccaaaaactcccttgttggaccggcttggcagactggattgcaccaccttgcgggaccagtgtatatcttcgctatcactcattccttggagcaaccttggactactcctaggagcagagaagtagcacgcgaggtgctgacaagcctgctacaagtaaccgagtgcgggtccgtcgccggatttcttcacggcgagaacgaggacgaaaaaggcaggttaagcgtgatcctcggtcttctcaaaccagatctctacaaagagtcatggaagaacaacccagccatcaaacacgtttttagctggactctgcagcaggtgacccgaccatggctttcccagcaccttgagagagtccttcccgctagccttgtaattagcgatgactatcagaccgagaacaaaatcctgggcgtccattgcctccaccatattgttctgaacgtgcctgccgctgacttgcttcagtacaaccgagcacaggtattataccacgccatcagcaatcacttgtacacaccggagcatcacttgattcaggcagtcctgctatgcctgttggatctctttccaattctggagaaaaccctgcattggaaaggagacggggctcgtcctaccacacactgcgatgaggtactcaggctaatactgactcacatggaacccgaacatcgattgcttctgcgcaggacctatgccaggaaccttccagcgttcgtgaacagactaggcatactgacagtcaggcatttgaagcggttggaacgggtgatcattggatatcttgaggtgtacgatggcccagaagaggaggcaagactgaagatccttgaaaccctcaagctgttaatgcagcatacttggccacgggtctcctgtcggcttgtagtgttgctgaaagccctgctcaagctgatatgtgatgtggcccgtgatcctaaccttactccagagagcgtgaagtccgccctgctgcaggaggcgacagactgtctcattctactggatagatgttcccaaggtagagtgaaaggactcctcgccaaaattcctcaatcttgtgaagaccgcaaagtcgttaattacatcagaaaagtgcagcaggtgagcgaaggagccccttacaacggtacctag

SEQ ID NO: 243696 - DNA, 1494 bp, synthetic construct
  misc_feature 1..1494: note = Description of Artificial Sequence: Synthetic coding sequence
  source 1..1494: mol_type = other DNA
atggaattagacagcgcactcgaggccccaagtcaagaggacagtaatctaagtgaggaattaagccacagcgcctttggccaggcgtttagtaaaattttgcattgtcttgctcgaccagaggctaggcgaggcaacgtgaaagacgccgtactgaaagatctcggagatctgattgaagcaaccgaattcgatcgtctgtttgaaggaactggcgcaagactccgcggaatgccggagactctggggcaggtggcaaaagcgttagaaaagtacgctgctcctagcaaggaagaggaaggcggaggagatggacattctgaggcggcagagaaagcggctcaggtaggattgttgttcctgaagcttttgggcaaggtagagaccgctaagaactctcttgtgggcccagcttggcaaactggtcttcaccatttagcaggtccagtatacatcttcgccatcactcactctctagaacagccatggaccactcccaggtccagggaagttgctcgcgaagtgctcactagcctgctgcaggtgaccgaatgtggaagcgtggctggcttcttgcatggtgagaacgaggacgagaagggacggctttccgtaatcctgggcctcctgaagcccgacctgtacaaggagtcttggaaaaataaccctgcaattaaacacgtcttcagctggacactacagcaggtcacacgtccttggctgtcccagcatctcgaacgcgtgttgccagccagcttagtgatcagtgatgactaccagaccgaaaacaagatcctaggcgtgcattgcctccatcacatcgttctcaatgtacccgcagccgacttgctgcagtataaccgagcgcaagtcctctaccacgccatctccaatcatctgtatacaccagaacatcacctgatacaagctgtgctactgtgcctgctcgacctctttcccattctcgaaaagaccctccattggaagggggatggagccagaccaaccacacattgcgacgaagtcctgagattaattcttacccatatggaaccagaacaccggctgctgctgaggcgcacctacgcgcgaaatttgcctgcctttgtgaaccggttggagcgcgttatcatcggttatctggaagtttacgacggcccagaagaagaggctcgactgaaaatcttagagactctgaaacttcttatgcaacatacctggccacgggtctcttgtaggctcgtagtgctgctgaaggccttgttgaaactgatatgtgacgttgccagagatcctaacctgacccctgagtctgtgaagtccgcccttctgcaggaagccaccgactgtttgatcctgctcgatagatgcagtcaggggagagtcaaggggttgctggcaaaaattccacagtcctgcgaggatcgcaaggtcgtaaattatattcgaaaagttcaacaggtaagtgagggcgcaccatacaatgggacgtag

SEQ ID NO: 243697 - DNA, 306 bp, synthetic construct
  misc_feature 1..306: note = Description of Artificial Sequence: Synthetic coding sequence
  source 1..306: mol_type = other DNA
atggagttggactccgctttagaggcacctagccaggaagacagcaacctctccgaagaattatcacatagcgcattcggacaggccttttccaagatcctgcattgcttggcaagacctgaggcacgcagaggcaacgtcaaagacgctgtgctgaaagatctcggtgacttgattgaggccacagaattcgatcggctgttcgaagggactggagccagactgcgtggaatgcctgaaactctggggcaggtcgccaaggccttggagaagtatgctgccccttcaaaagaggaggagggctag

SEQ ID NO: 243698 - DNA, 2424 bp, synthetic construct
  misc_feature 1..2424: note = Description of Artificial Sequence: Synthetic coding sequence
  source 1..2424: mol_type = other DNA
atgcccagggctcccaggtgcagggccgtgcgatcgttgctgaggagccactaccgagaggtgttgccacttgctacttttgttcgacgtctaggcccacaggggtggagacttgtccagcgcggagatccagccgcatttagggcgcttgtggcccagtgtcttgtgtgcgtcccttgggatgcacgaccacctccggcagccccaagctttagacaagtatcttgtcttaaagaactggtggccagggtcctgcagcgtctgtgcgaacggggagctaaaaacgtccttgcattcgggttcgcattgctggatggggctcgcggtggccctcctgaggcatttactactagtgtgcggtcttacttacccaacaccgtcacagacgccctgcgaggatcgggggcttggggtttactactccgcagggtgggggacgacgtgttggtgcatctactcgcccgatgtgccctttttgtgttggtggccccaagctgcgcataccaagtatgcggtcctccactgtatcagctcggagcggcaacacaagctcgcccaccgccacatgccagtggacccaggaggcgcctggggtgcgagagagcatggaatcactcagttcgcgaagcaggagtccccttgggactcccagcacctggcgcacggaggaggggaggatctgcaagtcgctctctgcctctgccaaagcgtcctcgcaggggagctgctccagaacccgaaagaacccctgtgggtcaggggagttgggcccaccctggacggactcgaggaccctccgaccgcggtttttgtgtagtatcgccggcaagacccgctgaagaggccacctccctggaaggggctctgtcggggactcggcattcgcatccttctgtcgggcgtcagcaccatgccggacctcccagcacttcaagaccacccagaccctgggataccccctgtcctcctgtgtacgccgagacaaaacatttcctctatagtagcggagataaggaacagcttcgacctagcttcttactgagttccctccggcctagcctcacaggcgctcgcaggctcgtggaaacaattttcttagggagtaggccctggatgccaggaactccaaggcggctccccagactgccacagcggtattggcagatgagaccactgttcttggagctcctaggcaatcacgctcagtgcccctatggggtcctgttaaagacacattgcccccttagggccgctgtgactccggcagctggagtgtgcgctcgtgaaaagccgcaaggttcagtggctgctccagaggaggaagacactgacccccgacgtttggtgcaacttctgcgacaacacagttctccgtggcaggtatatgggtttgtgagagcatgccttagaaggctggtccctcccggactttggggcagccggcacaacgagaggagatttttgaggaatacaaaaaagtttatttctctcggtaagcacgccaagctctctctgcaggaacttacttggaagatgtccgttcgagattgtgcgtggctgcggcgaagcccgggagtggggtgtgtgcccgctgccgaacataggctaagggaggagatccttgctaaattcctgcactggttaatgagcgtgtacgtggtggagctgttgaggagctttttctacgtcaccgagacgacctttcagaagaatcggctgtttttctacagaaagtctgtctggagcaagttgcagagtatcggtatcaggcaacatcttaaacgcgtccaactgcgggagctcagcgaagctgaggtgcggcaacatagagaagcccgacctgctcttttgactagtaggttgaggttcatcccaaaacctgatggattgcgacctattgtgaatatggattatgtggtaggcgctcgtacttttcgcagggaaaaacgagccgaaaggttgacctcacgcgtgaaggcactgttttcggtattaaattacgagcgagcccgacggcctggtctgctgggggctagcgttcttggcctggacgacatccatcgcgcttggagaacatttgtgcttcgggtcagagcacaggatccccctcccgagttgtatttcgtcaaagtggatgtgacaggagcctacgatacgatccctcaagacagacttactgaagtgattgccagtataattaaacctcagaacacttactgtgttcgaagatacgccgtcgtgcagaaggccgctcacggacatgtgagaaaggctttcaaaagtcacgtcctgcgacccgttccaggggatcctgctggtctgcatcctttacatgccgcattacagccagtcctacggagacatggcgagcaggctgtctgcggagactcagctggtcgggcagcgccagccttcggcggatag

SEQ ID NO: 243699 - DNA, 3399 bp, synthetic construct
  misc_feature 1..3399: note = Description of Artificial Sequence: Synthetic coding sequence
  source 1..3399: mol_type = other DNA
atgcccagggcgccaaggtgcagggccgttaggtctctcttgcgttctcattatcgggaggtcctgccccttgccactttcgtgcgccgactcggccctcaaggatggaggctggtccaacgcggagatccggcagcgtttcgggctcttgtggcccagtgcttagtttgcgtgccctgggacgcgcgtcctcccccagcagccccatctttcagacaggtcagttgtctgaaagaattggtggctagggttctgcagcgcctgtgtgagagaggagctaagaatgtgctggcttttgggttcgccttgttggatggggcaaggggaggtcctccagaggctttcactacgtctgtgagatcttaccttcccaacactgtcaccgatgcactgaggggaagtggcgcatgggggctactgttgcgtcgggtcggtgacgacgtgctcgttcatctgctggctcgctgtgctctctttgtgctggtagccccaagttgcgcttaccaggtgtgcggccctcctctgtatcagctcggcgcagcaacccaggccaggccccctcctcatgcgtctggccctcgcagaaggctgggatgtgaacgcgcatggaaccactcggtcagggaggctggagtgcctctggggttacccgctcctggagctagacgtcgtggcggaagtgcttccagatcccttcccctccccaagcggccaaggaggggcgcagctcccgagccagagcgtacccccgtcgggcaagggagctgggcccacccaggtagaaccagagggccttcagacaggggcttttgtgtggtatcaccagcccgtcctgctgaggaggccacctcactagagggcgcattgtctgggacccgtcattcacacccttcagtagggagacaacaccatgccggaccaccctcaaccagcaggccacccagaccttgggataccccatgtcctccagtatacgccgagacaaagcatttcttatattccagtggcgacaaggaacagttaagaccgtcatttctcctcagtagtctgcgaccctctcttactggcgcacgccgactggtcgagaccatattcctgggcagcaggccatggatgccagggacccctaggaggctacccagactgccccagcgatactggcagatgcgtcctctcttcttggagctgttgggcaaccacgctcaatgcccctacggtgtgctcctcaaaactcactgccctctgagagcagccgtcacacccgctgccggagtctgcgcaagggagaaaccccagggctccgtcgcagcccctgaggaagaagacacagaccccaggcgcctcgtccaactcctgcgtcagcacagctcaccatggcaggtctacggtttcgtgcgcgcttgtctgagaaggctggtgccacctggactttggggaagtcgacacaacgagcgtcgttttctgcgaaacacgaagaagttcatttcattggggaaacatgctaaactgagtctgcaggagttaacgtggaagatgagtgtgagagattgcgcctggttgcgcaggtctcccggagtaggttgtgtgccagcagcagagcataggctccgtgaggagatcctcgccaaatttctccattggttaatgagtgtgtacgtggttgagcttttgcgctcttttttctatgtgacagaaacaactttccagaagaatcgattgttcttttaccgcaaatcagtctggagcaaactacagtccattggaattagacagcacttgaaaagagtgcagttacgggaactgtctgaagccgaagtacgccagcacagggaggcacggccagccttgctaacatcgcgcttaaggttcatcccaaagcctgatgggctgcggcctatcgttaatatggattatgtggtcggtgctaggaccttccgcagggagaagagggcggagcgcctgacaagccgcgttaaggcactgttttccgtgctgaactatgagcgtgctcgaagacctggtctgctgggcgcatccgtactcggcttggacgatatccatcgagcctggcggacctttgtgctcagagtcagagcacaggacccgcctcccgaactctacttcgtgaaggtcgatgtgaccggggcttatgataccattccccaggaccgcctgactgaggtcatcgcttccatcatcaaaccgcaaaatacttattgtgtcagacgatacgccgttgtgcagaaggccgcacatggccacgtgcgcaaggcattcaaatcccatgtgtcaactcttaccgacctgcagccctatatgagacaatttgtcgcgcacctgcaggagacttcgccactgcgtgatgcagtcgtgatcgaacaatcttcatccctaaacgaggcctctagcggtttatttgatgtgtttctgaggttcatgtgtcatcacgcagtgcgcatcagagggaagagctatgttcagtgccagggtattcctcaggggtccatcctctcaacattgctgtgtagcctctgttatggcgatatggaaaacaagttatttgctgggattaggagggacgggcttctcctccgcctggtggacgactttcttctcgttacgccacatcttactcatgccaaaacctttctccgcactttggtgcgcggagtgcctgagtatggttgtgtggttaatctgcggaaaacagtggtgaattttcccgttgaagacgaagcccttggcggaactgctttcgtccagatgcccgctcacggattgttcccttggtgcggtctcttgttggacacacggaccttagaggttcaatccgactacagtagttatgctcggacctctatccgcgcttcgcttactttcaatcgcggtttcaaggccggtcggaacatgcgcaggaaactctttggagtcctgcgcctcaagtgtcattcactcttcctggaccttcaggtcaattcacttcagacagtttgcaccaatatttacaagatcctcctcttgcaagcctatcgtttccacgcttgtgtcctgcaactcccattccatcagcaggtgtggaaaaatcccacatttttcctccgggttattagcgatacggcctccttgtgctatagcatcctgaaagcaaagaacgccggaatgtcactgggggctaaaggagcagcaggacccttgccgtccgaggcagttcagtggctatgccatcaagctttcctgctgaagttgacccgccacagagtgacgtatgttcctctgctgggttcactccggaccgcgcagacacagttgtctaggaaactgccgggtacaaccctcactgcactggaagcggctgccaatcctgctctaccatccgacttcaaaacaattctggattag

SEQ ID NO: 243700 - DNA, 3210 bp, synthetic construct
  misc_feature 1..3210: note = Description of Artificial Sequence: Synthetic coding sequence
  source 1..3210: mol_type = other DNA
atgcccagggctccgaggtgtcgggctgtccgttcacttctccgctcccactaccgggaggtcctgcctctggcaaccttcgtgagacgactgggaccgcagggctggaggctggttcagcgaggtgatcccgcagcattcagagcccttgtcgctcaatgtttagtatgcgtcccgtgggatgccagaccccctccagccgcaccaagtttcagacaagtgtcttgtctgaaggaattagtggctcgggtgctacagcgcctgtgtgagcgaggggctaaaaatgtgctcgcattcggatttgccttattagacggggcacgaggaggtccacctgaagcgtttaccaccagcgtcaggtcctatctccccaatactgtcacagatgccctgaggggctccggggcttggggactactgctcagacgcgtgggcgacgatgtcctggtgcatctgctggctcgatgcgccctgtttgtcctagtggccccatcatgcgcataccaggtgtgtggccctcccctgtaccaactgggcgctgcaacccaggctcgcccaccgccacacgctagtggccctcgtaggcgcttggggtgtgagcgtgcctggaatcatagcgtacgagaggctggcgtacctcttgggttacctgcccctggtgcccgtagacgcggtgggagcgcatctcggtcccttccactgcctaagcggcctcggagaggggctgccccagaaccggagcgaactccggtaggtcagggatcttgggctcatccgggtaggacaagaggcccatcggatagggggttctgtgtggtctcaccagcacgcccagccgaagaagccacaagtctggaaggcgctctatctggcactcggcactcacacccatccgtcggaagacagcaccatgcaggaccaccgagcacttctcgcccaccgcgaccctgggatactccgtgccctcctgtatatgctgagacaaaacacttcctgtacagcagtggcgacaaggagcagttaaggccctcctttctgctctcctccctgaggccatctctgacgggcgcaagaagattggtggaaaccatattcttaggcagccggccatggatgccagggactcctcggaggctacctcgcttgcctcagcgatactggcagatgcgcccactgttcctggaactgcttggtaatcatgcccaatgtccatatggagtgctcttaaagacacattgccctttacgggctgccgtgactccagccgcaggcgtgtgcgctcgcgaaaaaccccaggggtcagtcgccgctcccgaggaagaagacaccgacccaagacgcctggtgcagctcctgagacagcattcatctccttggcaagtctacggcttcgtcagggcctgcctgcgacgtctggtcccacccggtctctggggttcccgccacaacgagcgacggtttcttcgcaataccaagaaattcatcagcctcggcaagcacgccaagctatcactgcaggagttaacttggaaaatgagtgtccgtgactgcgcctggctgaggcgctctccaggggtgggttgcgtgccggcagcggagcaccgcctgcgggaagaaattcttgcaaagttccttcactggctgatgtccgtttatgtagtcgagttactgcgctcgtttttttatgtgacggagactaccttccagaagaaccgattatttttctacagaaaaagcgtgtggagcaagttgcagagtataggtatcaggcaacacctcaaaagagtccagttgcgagagctgagcgaagcagaggtgcgacagcatagggaggccagaccagctctgttgactagccgtttgagatttattccaaagcccgatggactgcgccctatcgtaaatatggactatgtggttggagcccgtacgtttcgcagggaaaagcgggcagagcgactaacctcccgggtgaaagctctgttttccgtgctaaactacgaaagggcccgacggcctggtctcttaggtgcgagtgttcttgggttagatgacatccatcgtgcatggcgaacgttcgtccttagggtaagagcccaggatccaccacccgaactgtactttgtgaaggtagacgtgaccggggcatatgacactattcctcaggaccgactgacagaggtgattgcctccataatcaaaccccagaacacatattgtgtgagacgttatgcggtcgtgcagaaggcagctcatggtcacgtgagaaaggccttcaaaagccacgtctctacgctgacagatcttcagccatacatgcgccaattcgttgcacacctccaggagacctcgcctttgagagacgctgtggttattgaacagtcttctagtctcaatgaagcttcaagtggtcttttcgatgtgttcttgagattcatgtgccaccacgctgtgcgcatccggggtaagagttatgttcagtgccaggggatacctcaaggcagcatactgtctaccctgctttgttctctctgttatggggatatggaaaacaaactgtttgctgggataagacgcgacggtctgctgctgagactggtcgacgactttcttctagtgaccccccacttaacacatgctaagacgtttctgtcgtacgcgaggacaagcatacgcgcatcgctcacttttaatagagggtttaaggctggacggaatatgcgcaggaaattgtttggggtgttacggctgaagtgtcactccctattcctggacttacaggtaaatagccttcagacagtgtgtacaaacatatataaaattttgctcctgcaggcctataggttccacgcctgcgttctgcagttgccttttcatcagcaagtctggaaaaacccgactttttttctgcgtgtcatctcagacaccgcatccctctgctacagcattcttaaggccaaaaacgctgggatgagtctcggcgctaaaggggcagcaggccctcttccctccgaggctgtccagtggctctgtcaccaggcctttctcctgaagcttacgagacatagggttacttatgtccccctgctcggctctctcagaaccgcgcaaacccagttaagtcggaaactccccggaacgacactgactgcactggaagcagcagccaacccagccctgccgtctgattttaaaactattttggattag

SEQ ID NO: 243701 - DNA, 2424 bp, synthetic construct
  misc_feature 1..2424: note = Description of Artificial Sequence: Synthetic coding sequence
  source 1..2424: mol_type = other DNA
atgccaagagctccccgatgccgcgctgttaggtccctgttgagatcacattacagggaggtcctgcccctcgctaccttcgtccggagactgggacctcagggctggagacttgtgcagcgtggagatcctgcagcattcagagctctggtcgcacagtgcctcgtgtgcgtgccgtgggacgccagaccacccccagccgctccctcttttcggcaggtgtcatgccttaaggagctggtagcacgggtgctccagagactgtgtgaacggggtgccaagaacgtactggcatttggcttcgccctcctcgacggtgccagaggcggacctcctgaagcgttcaccacctccgtgcgtagctacttgcctaatacggttacagacgcgcttagggggagtggagcctggggtctgctcctcaggcgcgttggtgatgatgtgctcgtgcaccttttggccaggtgcgcgctgtttgtattggtggctccatcttgtgcctatcaggtgtgtggtccaccgctgtatcaacttggtgctgctacgcaggctagacccccaccacatgccagcgggcctcgcaggagactgggctgtgaacgggcttggaaccacagcgtgcgggaggcaggagtaccccttggcctgcctgccccaggcgctcggagaagaggtggctccgctagccgcagtctccctctgccaaagcggcctcggagaggtgctgcaccagagccagagagaacccccgtgggccagggaagctgggctcacccaggccgaacgcggggaccttccgatagaggcttttgtgtcgtgagcccagctcgacctgccgaggaggctaccagcttggaaggcgctctttccggcacgcgccacagccatcccagcgttgggaggcagcaccacgccggacctcccagcacaagtcggccaccacggccttgggacacgccttgtcccccagtatatgccgagacaaaacacttcctttattcatccggtgacaaagagcaactaaggccttcttttctgctgagctccctccggccatccctgactggagctagaagactggttgaaacaatcttccttggcagccgcccttggatgcctggcactcccagaaggttgccacgactcccccagcgatactggcagatgaggcccctatttctggaattgctcggcaatcacgcccagtgcccttacggcgtgctgctcaagactcattgcccgctacgggcagccgtaactccggctgccggagtgtgcgccagggagaagccgcagggctctgtggccgcacccgaagaggaagatacggatcctagaaggttagttcagttgcttcgccagcactcttcgccctggcaagtctatgggttcgtccgagcatgcctgcgaagattagtgccacccggactttggggatcaaggcataatgagcgcagattcctgcgaaacactaaaaaattcatctcgctcggcaagcacgctaaacttagccttcaggagttgacctggaagatgtctgttcgcgattgtgcatggttaaggcggtcacccggagtgggctgcgtgccggctgctgagcacagactgagagaggaaattctggcaaagttcctgcattggctgatgtcagtgtatgtggttgaattgttgcgctcatttttttacgtgacggagaccacattccagaagaaccgcctcttcttctataggaagagtgtctggtccaagttgcagagtattgggatcaggcagcaccttaaacgggtgcaattgagggagctgagcgaggccgaggttaggcaacacagggaggcaagaccggctttgcttacaagccgcctgaggtttatccctaagcctgacgggttacggccaatcgtgaatatggattacgttgttggcgctagaacctttagacgggagaagcgcgctgagcgactgacatcaagggtgaaagccctgttttccgtcctgaactatgagcgggctcgccgacctggtctcctcggcgctagcgtgctcggtcttgacgatattcatcgggcttggcgcaccttcgtcctgcgagtcagagcacaggatcccccaccggagctgtacttcgtcaaggtggacgtcacaggcgcatacgatacaatccctcaggatagattgacagaggttattgcatcaatcatcaaacctcagaacacctattgcgtcagacgctacgctgtggtacagaaagccgcacatggacatgtcagaaaggcgttcaagtcgcacgttctgcgcccagttcccggtgaccctgccggtctgcatcctctccacgccgctctgcagccggtactgagaagacatggagaacaggcagtctgtggagactctgctggccgtgctgccccagctttcggagggtag

SEQ ID NO: 243702 - DNA, 372 bp, synthetic construct
  misc_feature 1..372: note = Description of Artificial Sequence: Synthetic coding sequence
  source 1..372: mol_type = other DNA
atgatgttgccgaagccgggaacttactatttgccctgggaagtcagtgccggtcaggtgccagatggcagtaccttaaggaccttcggcagactgtgcctgtatgacatgatccaaagtcgcgtgaccttgatggctcagcacggaagcgatcagcatcaagtgcttgtgtgtaccaagctagtcgagccctttcatgctcaggtgggaagtctctacattgtactgggtgaactccagcaccagcaggaccggggaagcgtggttaaggcgcgtgtgctcacttgtgtcgaaggaatgaatctacctctcctcgaacaggctatccgagagcagaggctttacaagcaggagcggggaggctcacagtag

SEQ ID NO: 243703 - DNA, 369 bp, synthetic construct
  misc_feature 1..369: note = Description of Artificial Sequence: Synthetic coding sequence
  source 1..369: mol_type = other DNA
atgcttcctaaacccggtacctactatttgccttgggaagtctctgccggacaggtcccagatggttctacattacgcacctttggacgactctgcctgtacgatatgatacagtcccgcgttaccctcatggcacagcacggaagcgaccaacatcaggtgctggtgtgtaccaaactggtggagccgttccacgcccaagtgggcagcctgtatattgtgttgggcgagctgcagcatcagcaggacagaggctcagtagtaaaagcgcgtgtgctgacatgtgtggagggcatgaacctgcccctgttagagcaggcaattcgtgaacagcgactctacaaacaagagcgcggaggaagccaatag

SEQ ID NO: 243704 - DNA, 5514 bp, synthetic construct
  misc_feature 1..5514: note = Description of Artificial Sequence: Synthetic coding sequence
  source 1..5514: mol_type = other DNA
atgggagcaatgacccagctgctggctggagtgtttctcgcgttcctggctctggcgactgaaggaggcgtgctgaaaaaggtcatcagacataagcgccagagtggagtcaatgcaacccttccagaggagaaccagccagtggtcttcaatcatgtttataacatcaagttgccggtaggatctcaatgcagtgtggacttggaatcggcctccggtgagaaggatcttgcccctccctccgagccttccgaaagcttccaggaacatacagtcgacggcgaaaaccagatcgtctttacgcaccggataaacatccccagaagagcttgcggttgcgcagcggctcccgacgtcaaagagcttttgtctcggttagaggagttggagaatctggttagttccctgcgggaacaatgtacagccggagcgggatgttgcttgcagcctgcaacgggcaggctggatacacgcccattttgctccgggagagggaatttctcgaccgaaggctgtgggtgcgtctgtgagccgggatggaaggggcctaactgtagcgagcctgaatgccccggaaattgccaccttaggggcaggtgcatcgatggccagtgtatctgcgatgatggtttcaccggagaagactgcagtcagctggcttgcccctccgactgtaatgatcagggcaaatgcgtcaatggagtgtgtatctgctttgaggggtacgctggagcagattgctcccgtgagatttgcccagttccgtgttctgaggaacacggaacctgtgtcgacggactttgcgtatgccatgacggatttgccggagacgactgcaacaagcctctctgtctgaacaattgctacaatagaggcaggtgcgttgaaaatgagtgtgtgtgcgacgaagggtttactggtgaagattgctcagaactaatatgccctaacgactgttttgataggggcagatgtattaatggaacatgctactgtgaggaaggatttaccggcgaggactgcggaaagccaacttgcccccacgcctgtcacactcaggggagatgcgaggaggggcagtgcgtttgtgacgagggcttcgcaggggtggactgcagcgagaagcgctgccccgctgattgccacaacagggggagatgtgtggatggacggtgcgagtgcgatgacggatttaccggtgctgactgtggcgaattaaagtgccccaatgggtgttccgggcatggacggtgcgtaaacggacagtgcgtttgtgacgaaggatatacgggcgaggattgttctcagctaaggtgcccaaatgactgtcacagcaggggtcgttgtgtggaaggcaagtgtgtgtgtgagcaggggttcaagggttacgattgcagcgatatgagctgccccaatgattgtcaccagcacggccgatgcgtcaatggcatgtgtgtttgcgacgatggatacaccggggaggactgtagagatcgacagtgcccccgagactgctcaaacaggggcctctgcgtggacgggcaatgtgtgtgtgaggacggatttactggccctgactgcgccgaactttcttgcccaaacgattgccacgggcagggacgctgcgtcaacggacagtgcgtctgccacgaaggcttcatgggaaaagattgcaaagaacagcggtgtccctcagactgccacggccagggtcgatgtgtggacgggcagtgcatctgccacgaggggttcactggattggattgcgggcagcacagttgtccgagcgattgcaacaatcttggccaatgcgtgtccgggagatgcatatgcaatgaaggctacagcggggaagactgcagtgaagtctcccccccaaaagacttagtggttacagaggtgactgaagaaacagttaatctggcctgggacaacgagatgagggtgacagaatacctcgttgtctacacccctacccacgaaggaggtttggagatgcaattcagagttcccggagaccagacctcaactatcatacaagagctggaacccggtgtggaatactttattagagtgttcgcaatactggaaaataagaaaagtatccccgtctccgccagagtggccacctatctgccagcaccagaaggccttaagttcaaaagcattaaagagacatcagttgaagtggagtgggaccccttggacattgcttttgagacttgggagattatctttcggaacatgaacaaggaggacgaaggagaaatcaccaaatctttgcgcagacccgagacctcctacagacagaccggtctggcacctggacaagaatatgaaatttccttgcacatcgtcaaaaacaatacccgcggtccgggattaaagagagtcaccactacccgattagatgcccctagccagatcgaagttaaagatgttactgatactacagctttgatcacttggttcaagcccctcgctgagatagacgggatcgagctgacatatggcatcaaagatgtgcctggggatagaacaaccattgatctgactgaagacgaaaatcaatacagcattggaaacttgaagcccgacactgagtacgaggtgtcactgatctcacgtaggggggacatgtcttccaacccagcgaaagaaacattcacaaccggcttggacgctccacgaaatttgcgccgagtgagccagacagataacagcatcacattggaatggagaaatggcaaagctgcaatcgatagttatcggattaagtatgctcccataagtgggggtgaccatgccgaggttgatgtgccaaagtctcaacaggcaacaaccaaaaccaccctcacagggctgcgtcctggaacagaatatggcatcggcgtgtcagctgtaaaagaggataaagaatccaacccagcaactatcaatgccgctacagagctcgacactcctaaggatctccaagtgtcagaaacggccgagaccagtctcacactgctgtggaagacccctctggcaaaattcgatagataccggctcaactactcccttcccacaggacagtgggttggcgttcagctgcctaggaataccacatcttatgtgcttaggggtctggaaccgggtcaggagtacaatgttcttcttaccgccgagaagggtcggcataagtccaagcccgctcgggtgaaagcttctaccgcaaaggaacccgagattggcaatctcaatgtcagtgacattacaccagagtctttcaacctcagttggatggccaccgatggcatcttcgagacattcacaatagagattatcgattccaatcgcctcctggaaacagtggagtacaatattagcggtgctgaacggaccgcacacatctccggactgcccccatcaactgacttcattgtatacctgtccggactagcaccgtctatcaggacaaagactatctccgccacggctaccactgaggctctgcccctactggaaaacttgacaatatccgacataaatccctacgggtttaccgtgtcctggatggcctctgaaaacgccttcgacagctttctggttacagtcgttgacagcggtaaactgctcgaccctcaggaattcaccctttcaggcacccagaggaaactggaattgagggggttaattaccggaatcgggtacgaggttatggtgtctggattcacacaggggcatcagactaagcctttacgagccgagatcgttacagaggcggaaccagaggtggataatttactcgtgtccgatgccacaccagatggtttccgcctaagttggacagcggacgagggtgttttcgataattttgtgttgaaaattcgcgatacaaagaagcaatccgagccgctggaaatcaccctcctggcccctgagcgtacccgcgacatcactggcttgagggaggcgactgagtacgagatcgaactgtatgggatcagtaaggggaggagatctcaaactgtgtctgccattgcaaccacagccatgggaagtccaaaagaggtcatcttctctgacataaccgagaactcagctacggtgagctggcgcgctcccaccgctcaggtggagtcttttcggattacctatgtccccatcactgggggaacaccaagcatggttaccgttgatggtacaaaaacacaaaccagattggttaagttaatcccgggagtggagtacctggtgtcaataatcgcaatgaagggatttgaggaatctgaacccgtctccggctctttcaccaccgccttggacgggccttcggggttagtgacggcaaacataactgacagcgaggccctggctagatggcaacccgctatagccactgtcgacagttatgtgatttcctacaccggcgaaaaggtgcccgagatcacccggaccgttagcggtaacaccgttgagtatgcccttaccgatctcgagcctgccactgaatatactctgaggatctttgctgagaaaggaccgcagaaatcctctactattacagccaagtttacgacggatcttgactcaccaagggatctcacagccacagaggttcaatccgagaccgcccttctgacctggcgccctcccagggcctctgtgaccgggtatctcctagtttacgagtctgtggatggaaccgtcaaagaagtcatcgtcggacctgacaccacgtcatatagcctcgccgaccttagtccttccactcactataccgcgaaaattcaggcactgaacggtccgctccgctccaacatgatccaaaccatcttcacaaccatcggactgttgtaccctttcccgaaggactgctcccaggccatgctgaatggtgacactacttccggcttatacaccatatatctcaatggagacaaggctgaggcattggaggtcttctgcgatatgacctctgacggcggtggttggattgtattcttacgacgcaagaacggacgagaaaatttttaccagaactggaaagcctatgctgccggttttggagacagaagagaagaattttggctcgggctggataatctcaacaagattaccgctcagggccagtatgaactgcgcgtcgacctacgcgatcacggcgagactgcatttgcagtgtatgataaattcagcgtcggggatgctaaaactcgctataagctaaaggtggaaggctattctggaactgcgggtgactcaatggcctatcataatggccgtagtttctcaacctttgacaaagacactgattccgcgatcaccaattgtgcactgtcctacaagggggctttctggtaccggaactgccacagggttaaccttatgggcaggtacggggataataatcatagccagggagtgaactggtttcattggaagggacacgaacactccatccaatttgcagagatgaaactcaggccaagcaatttcagaaacctcgaggggaggcgcaagcgcgcttat

SEQ ID NO: 243705 - DNA, 4695 bp, synthetic construct
  misc_feature 1..4695: note = Description of Artificial Sequence: Synthetic coding sequence
  source 1..4695: mol_type = other DNA
atgggcgctatgactcagctgttggcaggcgtgttcttggcttttctggctctggctaccgagggtggcgtgctcaagaaggtaattcgacacaaaaggcagtccggggtgaacgcaacactgcctgaggaaaatcagccagttgtgtttaaccatgtttacaacattaagttgcctgtaggcagtcaatgcagtgtggatctggaatcagctagtggagaaaaggatctcgcaccaccgtccgagccaagcgagtcttttcaagaacatacagtcgatggcgaaaatcaaatcgtgtttacccatcgaatcaacatccccagaagggcctgtgggtgcgccgctgctccagacgtcaaagagttgctctctcggttggaagagcttgaaaacctggtgtcaagcctgcgagagcaatgcaccgccggtgcagggtgctgcttgcagccagcgactggcagactggatacccggccattttgtagtgggagaggaaactttagcaccgaggggtgcggctgcgtatgtgaaccaggatggaagggccctaactgctcggaaccagagtgtcctggtaattgtcatctaagaggacgctgcatcgatggccaatgcatctgtgatgacggctttacaggagaggattgcagtcagttggcttgtccctctgattgcaatgatcaaggaaagtgcgtgaatggggtctgcatctgtttcgagggatacgccggagccgactgctcccgtgagatttgtcctgtgccttgctctgaggagcatggcacctgtgtcgatggcctctgtgtgtgtcacgacggatttgctggggatgattgtaacaagcctctttgcctgaataactgttataatagaggtcggtgcgtcgagaatgagtgcgtctgtgacgagggctttacaggtgaggactgttccgagctcatctgtccaaatgattgcttcgatagaggccgatgcatcaacgggacttgctactgtgaggaaggctttaccggagaggactgtggcaaacccacttgcccccacgcctgccacacacaaggtcgctgcgaagagggacagtgtgtatgcgacgaggggtttgctggagtggattgttccgagaaaaggtgtcccgcagactgccacaaccggggaagatgtgtggacgggagatgcgagtgcgacgacgggttcactggggcagactgcggagaacttaaatgccctaatggctgtagtggtcatgggcgatgcgtgaatgggcagtgcgtgtgcgatgaaggatataccggggaggactgctcccagctgaggtgtcccaacgactgccatagtcggggaaggtgtgtggaggggaaatgcgtttgcgagcagggattcaagggctatgattgctctgatatgtcatgtccgaacgactgtcaccagcacggcaggtgcgtaaatggaatgtgcgtgtgcgatgacggctatactggcgaagattgccgggaccgtcagtgccctagagattgttccaaccgcggactctgcgtagacggccaatgcgtctgcgaagatggattcaccggaccagactgtgcggagctctcttgccctaatgactgccatggtcagggcaggtgtgtaaatggccagtgcgtgtgtcatgaaggctttatgggaaaggattgtaaagagcagcgttgtcccagcgactgccatgggcagggtagatgcgtggacggacaatgtatctgtcatgaaggcttcacgggcctcgattgtgggcaacacagctgcccttccgattgcaacaacctgggccagtgcgtgagcgggcgatgtatctgtaatgagggttattctggagaagattgctccgaggtgagcccccctaaagatctggtagtgaccgaggtcacggaagaaaccgtcaatcttgcctgggacaacgagatgagagtgacagaataccttgtggtttacaccccaacccacgaggggggtcttgagatgcagtttcgggtgcctggtgatcagacgagtacgatcatccaggaactggagcccggtgtcgagtactttattagggttttcgccatcttggaaaataagaagtctatccctgtatcagcacgcgtcgccacctatctgcctgctccagagggtctcaaatttaaaagcattaaggagaccagtgttgaggtcgaatgggatccactggatatcgcgtttgagacatgggaaattatattccggaatatgaataaagaggatgaaggtgaaattaccaagtctctgcgccgaccagagacctcctatcggcaaacgggactggccccaggacaggaatatgagatctcactccacattgtcaagaacaacactagaggtccaggcttgaaacgggttactactacacgcctcgatgcaccctcccagattgaagtgaaggatgtgaccgacacaaccgccctgatcacctggtttaaacctctggcagagattgatggcatcgagctcacctacgggatcaaagatgtacctggtgacagaaccaccatagacctcacagaagatgaaaatcagtactctatcggcaacttaaagccagacactgagtacgaggtgagtctgatcagtagacgcggagacatgtccagcaaccccgcaaaagaaactttcacaacagggttagatgcacctcgtaatctgcgccgagtttcgcagacagataattccatcactctagaatggaggaacgggaaggccgctattgattcttatcggatcaaatacgcaccaatctctggtggagaccacgctgaagtggatgtgccaaaaagccagcaagcaacgacgaagaccacactcactggcctcaggcccggaaccgagtacgggatcggcgtttcagccgtcaaggaagacaaggagtctaacccagccacaatcaatgccgctactgaactcgacactcccaaggatctccaagttagcgaaacggcggaaacctcccttaccctgctttggaagacgccattagcaaagttcgaccggtacagactgaattatagccttccgaccggacaatgggtgggagtccagctgcccagaaacacaacctcatatgtgctgagggggctggagccgggacaggaatataatgttcttttaaccgccgagaaaggtagacataaatctaagcctgccagagttaaggctagcacagcaatgggctcccccaaagaggtgattttctcagacattacagaaaattcggcaaccgtctcttggcgagccccaactgcccaggtagagtcttttcgcataacctacgtccctatcaccggcggaactccaagtatggtcactgtggatggaacaaaaacacagacgagactagtaaagcttatacccggtgtcgagtatctggtgtcaattattgcgatgaagggcttcgaggagagtgaacccgtgagtggcagtttcaccactgccctcgatggtccctccggactggtcaccgctaatattacagacagcgaggctcttgctagatggcaaccggcaattgccacggtagactcatacgtgatctcttatactggcgagaaggtccccgagattactcgcaccgtatctggcaatacggttgagtatgcactgacagatctcgaacctgccactgagtacacattgcggatctttgcggagaagggacctcagaaaagttcaactatcacagcgaagttcacaaccgatctcgacagcccaagagacctcaccgctacagaggtgcagtccgagaccgctcttcttacttggcggcctccgagagctagcgttacagggtacctgctcgtgtacgagagcgtcgatggcaccgtaaaagaggtcatcgtgggcccagatacaacatcctacagcctcgcagatttgtccccttcgactcactacactgcgaagatacaagctctcaacggccctctgagatccaatatgatacagactatctttactactatcgggctcttatatcccttccccaaggactgtagccaagcgatgctcaacggggataccactagtggactatatacgatttatctgaacggcgacaaggctgaggccttagaggtcttctgtgatatgaccagcgatggtgggggatggatcgtctttctgcggagaaagaatggccgagagaatttttaccagaactggaaagcctatgccgcagggttcggggacagaagggaggaattctggttaggcttggataacctcaacaagattacggctcaaggccagtatgagcttcgcgtggacttacgcgatcacggggaaactgcgtttgccgtctacgataagttctccgtgggagacgcaaaaacacgctacaagctgaaggtcgagggctatagcggaacagccggtgacagtatggcctaccacaacggtagaagctttagtactttcgacaaggacaccgatagtgccattaccaactgcgccctcagttacaaaggggcattttggtaccggaactgtcatagggtaaatctgatgggacgatacggggacaataaccactcacagggcgtcaactggtttcactggaagggccatgagcattccatccaattcgccgagatgaaactgagaccctccaatttccgaaacctcgagggcaggcgaaagcgcgcttag

SEQ ID NO: 243706 - DNA, 4968 bp, synthetic construct
  misc_feature 1..4968: note = Description of Artificial Sequence: Synthetic coding sequence
  source 1..4968: mol_type = other DNA
atgggagcgatgacccagcttcttgccggagtgttcctcgccttcctggctctggctactgaaggaggtgtactgaagaaagtaatcaggcataaacgccagtccggcgtaaatgcaactctcccagaagaaaatcagcctgtagtcttcaatcacgtctacaatatcaaactgccagtggggtcacagtgttccgtggatctggaatctgcttcaggagagaaggatttggctccccctagcgagccctccgaatccttccaagagcacaccgtcgatggcgagaatcaaatcgtgtttacgcaccggataaacattccaagaagagcctgtggctgtgccgctgccccagacgtaaaggagctgctgagcaggctggaggaactggaaaatctggtgtcgtctttacgggaacagtgtacagccggagcgggttgctgtctgcagcctgccactggaaggctggacactagacccttctgcagcggtcggggaaatttcagtactgaggggtgcggatgcgtatgtgagccaggttggaagggtcccaattgcagtgaacctgagtgtcccggtaattgccatctccgaggaaggtgcattgacggtcagtgtatttgcgacgatggcttcactggggaggactgttcacagctggcctgcccttctgattgcaacgaccaggggaagtgcgttaatggggtctgcatctgtttcgaaggctacgccggtgccgactgtagccgcgaaatctgtccagtgccttgttctgaggaacacggcacatgcgtagatgggctgtgcgtgtgtcatgacggttttgcaggggacgactgcaataagcctctctgcctcaataactgttacaatcgaggacggtgtgtcgagaatgagtgcgtttgtgatgaagggttcacaggagaggactgcagtgagttaatatgccccaatgactgcttcgaccgcggtcggtgcattaacgggacctgctattgcgaggagggattcacaggggaggattgcggcaagcctacgtgccctcatgcatgccacactcaggggaggtgcgaagaagggcagtgtgtgtgcgacgaaggttttgcgggtgtggattgttccgagaagcggtgccctgccgactgtcataatcggggtcggtgtgtagacggacgttgcgaatgcgatgatggctttacaggggctgattgcggggaactcaagtgcccgaacgggtgctctggccacgggaggtgcgtaaacgggcagtgtgtgtgcgacgaaggctatactggcgaggactgtagtcaactgcggtgcccaaacgattgccatagtaggggaagatgtgtggagggcaaatgcgtctgtgagcaggggttcaagggttacgattgttccgacatgtcttgccccaatgactgccaccagcatggtcggtgcgttaatgggatgtgtgtgtgcgatgatggttacaccggtgaagattgccgagatcgccagtgtcctcgtgactgttccaacaggggtctctgcgtggacggtcagtgcgtctgcgaggacggctttactggtccagactgcgctgagctgagctgtcctaacgattgccacggacaaggaaggtgtgtaaacggacagtgtgtatgccatgagggattcatggggaaagactgcaaggagcagagatgtccttctgactgccatggacagggtcggtgtgtagatggccagtgcatttgtcacgaaggcttcactggccttgactgtggtcaacatagttgcccatccgactgcaataatcttggccaatgtgtgtccggtcggtgtatatgcaacgaggggtatagcggcgaggattgctccgaggtgtcaccacccaaggaccttgtggtgacggaggtgacagaagagacagtgaatctggcctgggacaatgagatgcgggtgactgaatatctggtcgtgtatacaccaacacacgagggagggctggaaatgcagtttagggttcctggcgaccagacttctaccatcatccaagagctggagccgggtgtagaatattttataagagtgttcgccatactggagaataagaaatcaattccagtttctgctagagtggccacatatctgccggcacctgaagggctgaaattcaaaagcatcaaagagacttcagtggaggtcgagtgggatcccttagacatcgcgttcgagacctgggaaatcatttttcgcaacatgaacaaggaagatgagggcgaaattaccaagtccctgagaaggcccgagacctcctaccgccagaccggcttggcccctggccaggagtatgagatttctctccacatcgtgaagaataatacgagggggccaggcctgaagcgtgtgaccaccaccagactggacgccccttcgcaaattgaagtaaaggatgtaaccgataccacagcgctgattacctggtttaaaccgctggccgagattgacggcattgagctcacctacggcataaaagacgtgcccggagatcgtacaacaattgacctgacagaggacgagaatcagtatagcatcgggaacctcaagcctgataccgagtacgaggtgtctctgatttccagacgcggagatatgtcatcaaatccagctaaggagacctttactaccggactggacgccccacggaaccttaggcgcgtcagtcagacggacaacagcattactcttgagtggcgcaatggcaaggctgccatcgactcctatcgcataaaatatgcacccatcagcggaggagaccatgcagaagttgatgtcccaaaaagccagcaggccaccaccaagactacgctaaccgggttgcgcccagggacggaatatgggataggcgtgtcagcagtgaaagaggataaggaatccaaccccgcaactataaacgccgctaccgagcttgatacccccaaagatttgcaggtgtccgagaccgccgaaacaagcctgacgttactttggaagacccctctggctaagttcgatcggtatcgactgaattattcccttccaacagggcagtgggttggggtccagctgcctaggaacactacaagttatgtgcttcgtggcctggagccaggacaggagtacaacgtcttgctaacagcggagaaaggaaggcataagagcaaacccgctagggtaaaagctagtacagaggccgaaccggaagtagacaacctactggtgagtgacgctacaccagacggattcaggctgtcctggaccgcggatgagggggtgttcgacaatttcgtcctcaaaatccgagacaccaagaaacagtcagagcctctggagattacactgttagcacctgaacggacgcgcgatattaccggactcagagaggctacagagtacgaaatagagctctacgggatttccaagggaagacgctcacagactgtgtcagccattgctacgactgcaatgggcagtcctaaggaggtgatcttctctgacatcacggagaattctgccacggtgtcttggagggcccctactgcccaggttgaaagcttcagaattacatacgtccctattaccgggggtacgccctccatggttactgtggacggaacaaaaacacagacccgactggtgaaactcattccgggtgttgaatacctggtctccataattgctatgaagggatttgaggagagcgagcccgtctcagggagtttcaccactgccttggatgggccttccggtctggtcacagctaatatcaccgattccgaagcactggccaggtggcagcccgctatcgctaccgtggacagttatgttattagctataccggggagaaggtgcccgaaatcaccaggacagttagcggaaacaccgtggaatacgctttaaccgatctggagcccgcaactgaatacacgctaagaatctttgccgagaagggtccgcagaaaagctccaccattacagcgaagttcactactgacctagactcccccagggacctgactgcaaccgaagtgcagtcagagacggccctgctcacctggcgaccgccaagggccagcgtgacgggctacctcctcgtctacgagtcagttgacggaacagttaaggaagttattgtgggacccgatacgacttcctactcccttgccgatctgtccccctccactcattatacggccaagatacaggccttgaatggccctctccgttctaatatgattcaaacaatctttacaacgatcggccttctctaccctttcccaaaggactgttcccaggcaatgctgaacggagatactacgtcaggtctgtatacgatctatctgaacggcgataaggctgaagccctcgaagtcttttgcgatatgacttccgatgggggagggtggattgtattcctcaggagaaagaacgggagggagaacttctatcagaattggaaggcatacgccgctgggttcggtgacagacgtgaggagttctggctcgggctggataatcttaataagattaccgctcagggacagtatgagcttcgcgtggacctgcgtgatcacggcgaaaccgcctttgcagtgtacgataagttctcggtgggagacgctaagactagatataaactcaaagtggagggctacagcggcacagcaggggattctatggcatatcataacggtcgaagcttctccacattcgacaaagacaccgattccgccattactaattgcgctctctcctataagggcgcattttggtacagaaattgccacagggtgaacttaatgggcagatatggggataataaccactcacaaggagttaactggttccattggaaaggacatgaacacagtatccagttcgccgagatgaaattgcgcccaagcaacttcagaaatctcgaaggtcgcaggaagcgcgcttag

SEQ ID NO: 243707 - DNA, 6605 bp, synthetic construct
  misc_feature 1..6605: note = Description of Artificial Sequence: Synthetic coding sequence
  source 1..6605: mol_type = other DNA
atgggggcaatgacacaactactggcaggagtgtttctcgcctttctagcgctggctactgagggaggagtcttgaagaaagtcattcggcataagcgtcagagcggggtcaatgccactctgcccgaggagaatcagcctgttgtgttcaatcatgtctataacattaagctgcctgtcggatcacagtgctctgtcgacttggaaagcgccagtggcgaaaaagacctagcaccacctagcgaaccttctgagagctttcaggaacatacagttgatggtgagaaccagatcgttttcactcatagaatcaatatcccaaggagagcttgcggctgtgcggctgcccctgatgtgaaggagctattatcacggttggaagagctagagaatctggtgtcttccttgagagagcagtgcaccgcgggagcaggatgttgtctgcagccagctacaggtagactggacacacgccctttctgttccgggaggggcaatttttctactgaagggtgtggctgcgtatgcgagcccggttggaaggggccaaactgcagtgaaccagaatgtcctgggaattgccacctacgcggtcgctgtatcgatggccagtgtatctgtgatgatggctttactggtgaggactgctcgcagctcgcctgccccagtgattgcaatgaccaaggaaagtgtgtgaacggggtgtgtatttgttttgaggggtacgcaggagccgattgttcccgggagatatgccccgtcccctgtagtgaagagcatgggacatgtgtggatggtctttgcgtctgccatgacggctttgcaggagatgactgtaataaacccttgtgtttgaataattgttataaccggggtcgctgcgtggaaaatgaatgcgtgtgtgatgaggggttcacgggagaggattgtagtgagcttatctgtcctaacgattgtttcgatcggggacgatgcataaacggaacttgctactgcgaagaaggcttcaccggggaagattgtggcaagccaacgtgcccacatgcatgtcacactcagggccgatgcgaagaaggtcagtgcgtgtgcgatgagggatttgctggggtggactgcagtgaaaagcggtgtcccgcagactgtcataacagagggcgatgcgtcgacgggagatgtgagtgtgatgacggatttacaggagccgactgcggggagctaaagtgtcctaatggctgttcgggccacggacggtgtgttaacggccagtgcgtctgcgacgaaggttatacaggagaagactgcagtcagctgcggtgccctaatgactgtcatagccgcggtcggtgtgtcgagggaaagtgtgtttgtgaacagggattcaaaggttatgattgttcagacatgtcgtgcccaaatgactgccaccaacatgggaggtgtgtcaacggaatgtgcgtttgcgatgacggttacaccggagaggattgccgcgatcgccagtgtccacgagactgcagcaaccgaggcctgtgcgttgacggccagtgcgtttgcgaggacgggttcactggccctgactgcgccgaattgtcttgccccaacgactgccacggccaagggagatgtgtgaatggtcaatgtgtatgccacgaaggattcatgggcaaggattgcaaggagcaaaggtgcccttccgactgccatggacaggggagatgcgtagacggacagtgtatttgtcacgaagggttcaccggcctagactgcgggcagcactcttgcccgagcgactgtaacaatcttggccagtgtgtttcagggagatgcatctgcaacgagggatacagtggagaagattgttccgaagtgagccctccaaaggaccttgtggtcacggaggttaccgaggaaacagtgaacctcgcctgggacaacgagatgcgggtgaccgagtacttggttgtctacactcctactcatgaagggggactggagatgcaatttagagtccccggagatcagacttctacaatcatccaggagctggagcccggagtggaatatttcattcgggtctttgccatcctcgaaaataagaaaagtattccagtgtcagcaagggtggcaacttacctgccagctcctgaagggctgaagtttaaaagcattaaggagacatcggtcgaggttgagtgggatccccttgatattgcgttcgagacctgggagatcatcttccgcaatatgaacaaggaagatgaaggagagataacaaagtcacttcgtcgtcctgagaccagctacaggcagacaggtctggcaccgggacaggaatacgaaatctctctgcacatagtgaaaaacaacacccggggaccgggtctgaagagagtgactaccacacgcttggatgccccatcacaaatcgaagtaaaggacgtcaccgacaccacagcactaatcacctggtttaaacccctcgctgaaattgatggaatcgaactgacttacggcattaaggacgtccctggtgacaggacaaccattgatctgacagaggatgaaaaccaatatagtattggcaaccttaaaccggacaccgagtatgaagtgagtttaatatcacgaaggggcgatatgtctagtaatcctgctaaggagacgtttacgaccggactggatgcaccaagaaacctgcggcgtgtttcacagactgacaactcaataacactggaatggcgcaatggtaaagccgctatcgattcatatcggattaagtatgcacctatttccggaggcgatcatgctgaggtggatgttccaaaaagccagcaggctacaacgaagaccaccctgacaggtttgagacccggtacagaatatggtatcggtgtcagtgcagtcaaagaggataaggagtctaatccggctaccattaacgcagcaactgagcttgatactcctaaagacctgcaagttagtgaaacggctgaaacgagccttactctgttgtggaagacccccttggctaagtttgatcgatacagactgaactactcactgcctactgggcaatgggtcggggtgcagcttccgagaaacacaacaagttacgtgctgcgagggttggaaccgggacaggaatacaatgtgctgctcacagctgagaagggaaggcataagagcaagccggctcgagttaaggcttccactgaacaagcgccagagctagaaaacctgactgtgacagaggtgggctgggatggcctaagattaaattggaccgccgcagaccaggcttatgagcactttatcattcaggtgcaagaggcgaacaaggtggaggccgcacgaaatttgaccgtcccaggcagcctgagggccgtggacataccagggctcaaagctgctactccatataccgtctcaatttatggggtgattcagggataccggactcccgtactgtcagctgaggcctcaaccggcgagacaccgaatctcggagaagtagtggtggccgaggtcggctgggacgccctaaagctcaactggacagccccagagggcgcttacgaatatttttttattcaggtccaggaagctgacacggtcgaggcggctcagaatttaaccgtgcccggtggcctgcggagtactgatctcccaggcctgaaggccgctacacattacactatcaccattagaggggtgacccaggacttttccaccaccccgctgtctgtggaagttctgacagaagaggttccagatatgggaaatctgactgtaacagaggtgtcttgggatgctttaagactgaactggaccactccagatggtacttacgaccagtttactattcaggtgcaggaagccgatcaagtcgaagaggcccataaccttaccgtccctggatccctaaggtctatggagataccaggacttcgggcagggacaccttataccgtgactctgcatggcgaagtgcggggacacagcacacggcctttggccgtggaggtggttacggaagacctgccacagcttggcgacttagccgtttctgaagtggggtgggatgggttgcgcttaaactggacagcagccgataatgcctatgagcacttcgtgattcaagtgcaggaagtaaataaggttgaggccgcacagaacttgactcttcccggatctttgcgggcagtggacattcctggcttggaggcagccacaccctaccgtgtctccatttatggagtgatccggggataccggacgcccgtgctctccgccgaagcctccaccgccaaagaaccagagatcggaaatctgaatgtatccgatatcactccggaaagttttaatctttcttggatggccacggatggtatctttgaaacattcacaattgagattattgacagcaatagactgctagaaacagtcgagtacaatatatccggcgctgagaggactgcccacatcagcggcctgccgccttccacggactttatcgtttacctttcaggactggctccaagcattagaactaaaaccatatctgccactgcaaccacagaagccttaccactactagaaaaccttactattagcgacattaacccatacggcttcaccgtgagctggatggcctcagaaaatgcatttgattcattcctggtcacagtcgttgattcaggcaaactgctggacccccaagaattcactctatcggggacacagcgtaagcttgaactgagaggactgattacaggcattgggtatgaagttatggtttctgggtttacccagggacaccagaccaagcccttgagagcggagatcgtcaccgaggcagaacccgaagtcgataacctgctggtgagtgacgccacacctgatggtttccgcctaagctggacagccgacgagggggttttcgataactttgtactgaaaatacgggatacaaagaaacaatcagagccattggagatcacactcctggcccctgaaagaacaagggacatcacagggttgcgagaggcgaccgagtacgagatcgagctgtacggcatcagcaaagggcgacgcagccaaaccgtcagcgcaatagccactactgctatggggagcccaaaagaggtgattttttccgacataactgaaaactctgctactgtgtcatggagagcacccactgctcaggtggagagtttccgcattacatacgtgcctattaccggcggaactccatcaatggttactgtggacggaacgaagacgcagacccgcctggtgaaattgatcccgggagttgagtatttagtttccattatcgcgatgaagggattcgaggagtccgaacccgttagtggtagcttcaccaccgcccttgatggcccttctggcttagtcacagcaaacatcacagattcagaggctcttgcgagatggcagcctgcaatcgccactgtggacagttacgtgatatcctacactggcgagaaggtgcctgaaatcactcgaacagtttccggaaataccgtggagtacgcactgactgatttagagcccgcaacagagtacactcttcgaatatttgctgaaaaaggtccacaaaaaagctcgacaatcaccgctaagttcaccacagacctggattcccctcgggacctgacagctaccgaggtccagtctgaaacggcacttctgacctggaggccgccacgcgcttctgttaccgggtatctgctggtgtatgagagcgtcgatggcactgttaaggaagtgatcgttggcccagacaccacgtcctacagtctcgcggacctctcaccatctacccattataccgccaagatacaggcactcaacggccctctccggagtaacatgattcaaaccatttttactaccattggtctgctttacccattcccaaaagactgcagccaggctatgcttaatggcgataccacaagcgggctgtatactatctatcttaatggcgacaaagccgaggccctcgaagtattttgtgatatgacatctgacggtggcggttggatcgtgtttctgcgcaggaaaaacgggagagaaaatttttaccaaaattggaaggcgtatgctgcgggttttggagataggagagaggaattttggctcggtctggacaacttgaataagattactgcccagggccagtatgagttgcgtgttgatttgagagatcacggtgagacagccttcgccgtctatgacaaattttcagtcggcgatgccaaaactagatacaaactgaaggtcgagggttattcaggaaccgccggagacagcatggcctatcataacggacgttccttttctaccttcgacaaagacactgacagtgccatcactaattgcgcgctgagctataaaggggctttttggtaccgtaactgtcatcgggtgaatctgatgggaaggtatggagacaacaatcactctcagggggttaactggtttcattggaagggacacgagcactccatccaattcgccgaaatgaagctccggccatcgaattttcgcaatcttgaagggaggagaaagagggctta

SEQ ID NO: 243708 - DNA, 3240 bp, synthetic construct
  misc_feature 1..3240: note = Description of Artificial Sequence: Synthetic coding sequence
  source 1..3240: mol_type = other DNA
atgggcgctatgactcagctgctggccggagtgttcctggccttcctggcactggcaacggagggtggcgtgctcaaaaaagtgatcaggcacaagcggcagtctggggtcaacgctactctgcccgaagagaaccagcctgtggtgtttaaccacgtgtataatatcaaactgcctgtggggtctcaatgcagcgtggatcttgaatccgcgtcaggcgagaaagaccttgccccacccagcgagccgagcgaatcatttcaggagcacacagtggatggcgagaaccagatcgttttcacacaccggatcaatatcccaagacgggcatgcgggtgcgccgcagctccggacgtcaaagaactgctgtcccgcctcgaagaactggaaaatctcgtaagttcactccgggagcaatgtacagcaggtgccggttgctgtttacaacccgctaccggtcgactggacacgcgccctttctgcagtggaaggggaaatttcagtactgaagggtgcgggtgcgtttgcgagcctggctggaagggaccgaactgctcagaaccagaatgccctggcaattgtcatctgcggggtcggtgtatcgatggccagtgtatctgtgacgatgggttcacaggcgaggactgctctcagctggcctgtccctccgattgtaacgatcaaggcaaatgcgtgaacggagtgtgcatctgtttcgaaggatacgctggtgccgactgttctcgtgagatttgccccgtaccatgcagtgaagaacatggcacctgtgtggacggcctgtgcgtgtgccatgatggcttcgccggtgatgactgtaataagccgctatgcctcaacaactgctacaatcgcggtcggtgcgtggagaacgaatgcgtgtgcgacgagggattcactggggaggattgctctgagctaatctgtccaaatgattgctttgacagggggagatgtatcaatggcacttgctactgcgaggaggggttcactggggaagactgtggaaaacctacttgcccccatgcatgccacactcagggcagatgtgaggaaggccaatgcgtgtgcgatgagggctttgctggcgtagattgctcagaaaaaaggtgtcccgctgattgtcacaacaggggaagatgcgtggacggtcggtgtgagtgcgacgacggctttaccggtgctgactgcggcgaactgaagtgccccaacgggtgttccggtcatggccgatgtgtgaatggtcagtgcgtatgtgatgagggatacactggggaggattgtagtcagctcagatgcccaaatgactgccactcacggggacgttgcgtcgaggggaaatgtgtctgcgagcagggctttaagggctacgattgtagcgatatgtcctgccctaatgactgccaccagcacgggaggtgtgtgaacggaatgtgcgtatgtgacgatggctatacgggagaggactgccgggatcgccagtgcccgagggactgtagcaatagagggctatgtgtcgatggccagtgcgtctgtgaggatggctttacaggtcctgattgtgcggagctgagttgccccaacgattgccacggacagggacgctgtgtcaatgggcagtgtgtttgtcacgagggctttatggggaaagattgtaaagagcaaaggtgcccctccgactgccacgggcaggggaggtgcgtggacgggcagtgcatctgccatgagggctttactgggctagattgcggccagcactcttgcccatctgattgcaacaacctagggcagtgtgtctccggtaggtgcatttgtaacgagggttatagcggagaggactgttctgaggtttctccaccaaaggatctggttgtgactgaagtaacagaggagactgtcaatctagcttgggacaacgaaatgcgagtgacagaatacctggtggtttacacaccgacacacgaaggagggctagaaatgcagttccgcgtgcccggagaccaaacctcaacaataattcaggagctcgagccaggcgtcgaatacttcatacgcgtgttcgcaatcctcgagaataaaaagagcatcccagtgagcgccagagtggcaacatacctgcctgcacctgaaggtttaaaatttaaatcaataaaggagaccagcgtggaagtggaatgggatccactagatattgctttcgagacctgggagataatcttccggaatatgaacaaagaggacgaaggagagatcaccaagagtctgcgtcgccctgaaaccagttaccgtcaaactgggttagccccaggacaggagtacgagattagtctccacatcgtgaaaaacaataccagaggacctgggttgaagagggttaccactacacgccttgacgctccctcccagatcgaagtgaaggacgtaaccgacactacagccctgatcacctggtttaaacctttggccgagatcgacgggatagaactcacttatgggatcaaggatgttccgggagataggacgactatcgatctgacagaggacgagaaccaatatagcataggtaacttgaaaccagacaccgagtatgaggtgtctctgatcagccggaggggcgacatgtctagtaatcctgccaaggagaccttcacaacgggcctggacgcccctcggaacctcagaagagtgtcccagaccgacaattcaataactctggagtggcggaacgggaaggcagctatcgactcataccgcataaaatacgccccaatcagcggaggggatcatgcggaagtggacgtgccgaagagccagcaggccaccactaaaactattacggctaaattcacaacagacctggatagccccagagatttaacagccacggaagtgcagtcagagaccgcgcttctgacctggcgtcctccacgagcgtcagtcaccgggtatttgcttgtctatgaatccgtggacgggactgtgaaggaagtgatcgttggccctgacacaacgagctactccttggccgatctgtctccccctagtctgttcctgcactttatacagcagaaacccgagaaacagtattgctttcattttaaagacatgatcaacattattaatataatcatgatgatgatgatgatgaagaccaaggattttagtagggatctttccttccagaacatctccgggcagtacctgattgttttttttttttag

SEQ ID NO: 243709 - DNA, 279 bp, synthetic construct
  misc_feature 1..279: note = Description of Artificial Sequence: Synthetic coding sequence
  source 1..279: mol_type = other DNA
atgggggctatgacccaactccttgctggcgtattcctggcctttcttgccctcgccactgaaggcggtgtgttgaaaaaggtgatacgacacaagagacagtctggagtgaatgccactctgcccgaagagaaccagcctgtcgtattcaaccatgtatataacatcaagctgccagttggctcgcaatgttccgtggatctcgaaagcgcttccggggagaaagatttggctcccccatcggagccctctgagtctttccaggaacacactgtgtag

SEQ ID NO: 243710 - DNA, 5240 bp, synthetic construct
  misc_feature 1..5240: note = Description of Artificial Sequence: Synthetic coding sequence
  source 1..5240: mol_type = other DNA
atgggtgccatgacacaattgctggcaggcgtttttctggcctttcttgcgctggcaactgagggcggtgtcctgaagaaggtgattagacataaaagacagtctggggtcaacgctactctcccagaggaaaatcagcccgtggtgttcaatcacgtgtataatatcaaactccctgtcggctctcaatgctctgttgacttagaatcagcttctggagaaaaagacttggcccctccttccgaaccctcagaatcattccaggaacataccgtcgatggcgagaatcagatcgtttttacccatcggatcaacataccgagacgagcttgcggttgtgcggcagctcccgatgtgaaggagttacttagcaggctggaagaactggagaatctggtgtcttcgctgcgcgagcagtgtactgccggagccggatgctgtttgcagcccgcaacaggcagattggacacccgcccattttgctctgggcgaggaaacttctctactgaaggttgcggctgtgtttgcgaaccgggatggaaaggaccaaattgcagcgagccagaatgtcctggtaactgccatctccgaggcaggtgtatcgatggacaatgcatctgtgatgatggatttacaggggaagactgctctcagctggcatgtccaagtgactgcaatgaccagggaaaatgcgtgaatggcgtgtgtatctgcttcgagggctacgccggtgcagactgctcacgagaaatttgccctgtaccatgcagtgaagagcatggcacctgcgttgacggcctttgcgtgtgccatgatggttttgcgggagacgattgcaataaaccactgtgtctaaacaactgctataaccggggtaggtgtgtagaaaatgagtgcgtgtgcgatgaagggtttacaggagaggattgcagtgagctaatatgccctaacgattgttttgataggggcaggtgcattaatggcacttgctactgtgaagaagggttcactggggaggactgcggtaagcccacctgtcctcacgcctgtcatacgcaagggagatgcgaggaaggtcagtgtgtgtgtgacgaggggtttgctggtgtcgactgttcagaaaagagatgccctgccgattgccacaatagaggcaggtgcgtcgacggaaggtgtgaatgtgacgatgggttcacaggcgctgactgcggcgaactcaagtgtcccaatggctgttccgggcacggaagatgcgtcaatggtcaatgcgtgtgtgacgaagggtataccggcgaggattgcagtcagctgcgttgtcccaatgactgccattccagggggaggtgcgtggaggggaagtgcgtgtgcgagcagggattcaaaggttatgactgcagtgatatgtcatgccctaatgactgccatcagcacgggagatgcgtgaatggtatgtgcgtgtgtgacgacggctacactggggaggactgtagggaccgacagtgcccacgggattgcagtaatcgcggtctctgcgtcgacggacagtgtgtgtgtgaggacggattcactgggcctgattgtgccgagttatcatgtccgaacgattgccacggccaaggacgctgcgtgaacgggcaatgcgtgtgtcatgagggctttatgggcaaggattgcaaagaacaaagatgtccttccgattgccatgggcaggggaggtgcgtcgatgggcagtgtatttgtcatgaggggttcactgggctggactgcggacagcactcctgccccagtgactgcaataaccttggacagtgcgtttccggccgatgcatatgtaacgagggatacagcggagaggattgttccgaggtgagtccacctaaagacctcgtggttacggaggtgactgaggaaactgtgaatctggcatgggataacgaaatgcgggtgacagagtacctggtggtttacacgcctacccacgaggggggtctggaaatgcagtttcgggtccctggcgatcaaacctcgaccatcatccaagagctggaacccggtgtggagtattttatacgtgtgtttgccattctggaaaataagaaatctattcccgtgtccgcacgcgttgccacttacttgcctgctccagagggacttaagtttaaatctataaaagaaacttcggtggaggtcgaatgggatccccttgacattgcgtttgagacttgggaaatcatcttcagaaatatgaataaggaagacgaaggcgagatcacaaagtcacttcgacgtcccgagactagctaccgccagaccggcttggcaccgggacaggaatacgagatttccctgcacatcgttaagaataacacccgaggacccggattaaaaagggtgaccacaacccggttggatgctcccagccagattgaggtaaaggacgtgacagataccacggctctaatcacctggttcaaaccacttgctgagattgacggtattgagcttacatacggcattaaggacgtgcctggagacagaactaccatagacttgacagaggatgaaaatcagtactctattgggaatctaaaacccgacaccgaatacgaggtttccctgatctccaggaggggagatatgagcagcaatcctgctaaggaaactttcacgaccgggctggacgcaccccgtaacctccgcagggtgtcccagaccgataatagcattacgctggagtggaggaacggcaaagccgctatcgacagctatcgtatcaagtatgctccaatcagtggcggagaccacgctgaggttgacgtgcctaaatctcagcaggcgactaccaagacaacacttactggactccggcctgggactgagtacggaatcggcgtctccgccgtcaaggaagacaaagagagcaaccctgctactattaacgccgctaccgagctggacacacctaaggacctccaagttagtgagacggccgagacttccctgactctgttatggaaaacaccgttggcgaagttcgatagatataggttaaattatagcttgcccaccgggcagtgggtaggcgttcaactccctagaaacactacaagttacgttctgcgcggacttgaacccggacaggagtataacgttctcctgactgccgagaagggtcgtcacaagagtaagcctgctagggtgaaggcttctaccgcgaaggaaccagagatcggcaaccttaatgtgtctgatattactccggagtcctttaatctgtcttggatggctacagatggtattttcgagacgttcactattgaaatcatcgattccaaccgcctcctagaaacggtagaatataacattagtggggctgagagaactgcccacattagtggattgccgccatccacagattttattgtgtatctttcaggtctcgcacctagcattcgcacaaagactatttctgcaacagctactactgaggcggagcctgaggtggataacctcctggttagcgatgctacgccggacgggtttaggctgagctggaccgccgatgagggcgtgttcgataactttgtcctaaagattcgtgatacaaagaagcaaagcgagcctctggagatcactcttttggcgcctgaacggaccagagacattacgggccttagggaggccaccgagtatgagatcgagctgtacggcatcagcaaaggtagaaggtcccaaactgtgagtgcaatcgcgaccacggctatgggctctcccaaggaggtaatttttagcgatattaccgaaaactctgccaccgtgtcctggcgagcaccaacggctcaggtggagagtttccggattacatatgttcctataaccggaggtactccaagtatggtaacagtcgatgggacgaagactcagactagactagttaagctaattccgggtgtggaatatttggttagtattatcgctatgaaaggcttcgaggagagtgaaccagtcagtggctcttttaccaccgcgctggacggaccttcaggcctcgttaccgccaacatcaccgacagcgaggccttggctcgctggcagccagcaattgcaactgtggattcatacgttatatcctacactggtgagaaagtaccagaaatcactagaaccgtttctggtaatacggtggaatatgctctgactgacctggagcccgcaactgaatatacacttcggatttttgcggaaaagggaccgcagaagtcttccaccattacagctaagttcaccacagacctggatagccctcgggacctcaccgccacggaggttcaaagtgaaactgccctgctcacctggaggccgcctagagcaagcgtaactggctatttgctcgtttatgaatccgtcgatggaacagtcaaggaagttatcgtgggcccagacacgaccagttattcgctggctgacctgtcaccctccactcattacaccgccaagattcaagcactcaacggacccctacgctccaacatgatacagacaatattcaccactattggcctgctatatccatttccaaaggattgttcacaggcgatgcttaacggcgacacaacttctggactatatactatctacctcaatggtgacaaggcggaagccctggaagtcttctgcgacatgacctccgatggtggagggtggattgtgttccttcgaaggaagaacggacgggaaaatttttaccaaaattggaaggcttacgccgctggctttggtgatcgcagagaagaattctggttgggtctcgataacctcaacaaaattaccgctcaaggccagtatgagctgcgcgttgatttacgggaccatggggaaacggcgtttgccgtctacgataagtttagtgtgggggatgccaaaacaaggtacaagctgaaagttgagggatattccgggaccgccggtgactctatggcttaccacaacggtcggtccttctccacattcgataaggataccgattccgcaattaccaactgcgctctgagttacaagggggcattctggtatcgcaactgtcaccgggttaatctgatgggtcgatacggggacaacaatcactcccagggagttaactggttccactggaaagggcatgagcatagcatacagttcgctgagatgaagctgcgaccatctaacttcagaaatctggaaggcagacgtaaacgggcata

SEQ ID NO: 243711 - DNA, 5516 bp, synthetic construct
  misc_feature 1..5516: note = Description of Artificial Sequence: Synthetic coding sequence
  source 1..5516: mol_type = other DNA
atgggcgctatgacccaactcctggcaggtgtgttcctggcattcctagccctggcgacggagggcggagtgctgaagaaggtcatccggcacaagcgccagtctggcgtgaatgccaccctgccggaggagaaccaaccagtggtgttcaatcatgtatataatatcaaactgcctgtcggatcacagtgctccgtagatcttgagtcagctagcggtgagaaagacctcgctcctcctagcgagccttccgagtcctttcaggaacacactgttgacggtgaaaaccagattgtattcacccatagaatcaacataccaagacgggcatgtggatgcgcagccgctccagacgtaaaggagctgctaagtaggctggaggagctggaaaacctagtaagttccctgcgcgagcagtgcacggcgggagcaggatgctgcttacaaccggctacgggcagactagacacccgcccattttgttctggacgcggaaattttagtacggagggttgcgggtgcgtgtgtgaacctggctggaaaggtcccaattgttctgagcctgagtgcccaggtaattgtcatttaaggggaaggtgtatcgatggccagtgtatctgcgacgacggctttaccggggaagactgcagtcagctggcctgtccatccgattgcaacgatcagggcaaatgtgttaacggggtgtgcatttgtttcgagggctatgcaggagctgattgctcacgggaaatctgtcctgtgccttgctcagaggaacacgggacctgtgtggatgggctgtgcgtatgtcacgatggattcgctggagacgattgcaacaaacccctctgcctaaataattgttacaatcggggacggtgcgtggaaaatgaatgtgtgtgtgacgagggctttactggagaagattgcagcgaactaatatgtccaaacgattgcttcgaccgtggtcggtgcattaatggaacctgttactgcgaagaaggcttcacgggagaagattgcgggaaacccacatgtccacacgcctgtcatacgcagggcagatgcgaggaaggccagtgtgtgtgtgacgagggcttcgccggtgtggattgctctgagaagagatgccctgccgattgtcataatagggggcgttgtgtggacgggcgatgtgaatgcgacgacggcttcaccggagcagactgcggtgagctgaagtgcccaaatgggtgttcaggccatggcaggtgcgtcaacggacagtgtgtgtgtgatgagggctacaccggtgaggactgttctcagttgcggtgtccaaacgattgtcatagtcgaggccgttgcgtcgagggcaagtgcgtgtgtgagcaggggtttaagggatacgactgtagcgatatgtcttgcccaaatgattgccaccaacacggcagatgcgtgaacggtatgtgtgtttgcgatgatggctatacaggggaagattgcagggaccggcagtgtcccagggattgcagtaaccggggactatgtgtggacggccaatgcgtgtgcgaggatggttttactggacccgactgtgccgaactcagctgtccaaatgattgtcatggacagggcagatgcgtgaacgggcagtgtgtgtgtcacgaaggctttatgggcaaagattgcaaggaacaacgctgtccctcggattgccatggtcagggcagatgtgtggatggacagtgtatttgtcacgaaggctttacaggacttgactgcggtcaacatagctgcccttctgattgtaacaatctaggtcaatgtgtgtccggacgctgcatctgcaacgaaggttatagcggcgaggattgcagtgaggtgtcacctccaaaagatctggtagtgaccgaagtgaccgaggaaacggtcaatttggcctgggataacgaaatgcgggtgactgaatacctcgtagtttacacacctacccatgagggaggcttggagatgcaatttcgggtgccgggagaccaaacttctaccattatccaggaactggaacctggggtggaatatttcattagggttttcgcaattctggagaataagaagagtatccctgtttcggctcgggtcgcaacatacctgccagccccagaaggcctaaaattcaaaagcataaaggagacatctgttgaggttgaatgggatcccctcgatatcgcattcgagacatgggagataatattccgcaacatgaacaaagaggacgagggagagatcactaaaagtctgaggagacctgaaacaagctacaggcagacgggactggccccagggcaggagtacgagattagtctgcatatcgtgaaaaacaacacccgcggtcccggacttaagagggtgaccactacgaggttagacgccccttctcagattgaggtaaaggatgttactgatacgacagcactcattacgtggttcaagccacttgcagaaatcgatggaatagaacttacgtacggcatcaaggacgttcccggtgaccggaccaccattgacctgactgaggacgaaaatcagtactctattggcaacttgaaaccggacaccgagtacgaagtgtcgttgatcagccgcagaggagacatgtcttctaacccagcgaaggagacttttaccacaggtttggatgccccaaggaatctgcgccgagtgtctcaaaccgataacagtatcacactggaatggcgcaacggaaaggctgcaattgacagctaccgcatcaaatacgcccctatctccggcggagatcatgccgaagtggatgtgccgaaaagtcagcaagccacaacaaagaccaccctaacaggcctgcggcctggcactgagtacggtatcggcgtatccgcggttaaggaggacaaggagagcaacccagcaaccattaacgcagcgactgagctggacactccaaaagacctgcaggtgtcagaaacagcggaaactagcctgactctcttatggaagacgcccttggcaaagtttgatcgctaccgcctgaattattcactgcccaccgggcagtgggttggagtccaactgcctcgcaacactacttcatatgtcctcagaggactggagccaggtcaggagtataacgtgttgctgaccgccgagaaggggaggcacaaaagcaagcctgctcgtgttaaagctagcaccgccaaggagcccgagattggcaacctaaacgtttctgatatcactcccgaaagttttaatttgtcctggatggctacagatggcatcttcgaaacgttcacaattgagattatagacagcaacagactgcttgagaccgttgaatacaacattagcggtgccgaacgcaccgcgcacatcagcggcctgcccccaagtacagactttatcgtgtatttgtccggcctggccccaagcataaggacaaagactatatccgcaacagccaccacggagcccaaaccccaacttggcacactgatctttagcaacataaccccaaagtccttcaacatgtcatggacaacgcaagcgggactgtttgcgaagatagtgattaatgtatccgacgctcactccctccacgagagccagcaattcacagttagcggggacgccaaacaggcccacatcactgggctggtagagaacacaggatacgatgtcagtgtggccggaactacactggcaggtgacccgactcgcccactcaccgcatttgtgataacagaagccgagcccgaggtggataacctcctagtgtctgatgccacccccgatggttttcggctttcgtggaccgcggacgaaggagtgtttgacaattttgttctgaagattcgcgataccaagaagcagtctgagccactcgaaatcacactgctggcgcctgagcgcaccagagatatcaccggtctccgcgaggctacagaatacgagatagaactctatggcatcagcaaggggaggcgatcacagaccgtgagtgctatagccaccacagccatgggatcaccaaaggaggttatattcagcgatatcaccgagaattcagccacagtgtcatggcgggcacctacagctcaggtggaatccttcaggattacgtacgtgccaatcacggggggaacaccttcaatggtgactgtggacgggacaaagacccaaactagactcgtgaagctgatcccaggcgtggaatatctcgtgtctattattgctatgaagggcttcgaagagagcgagccagtttctggaagtttcacgactgcattggatggaccttctgggctggtcacagccaatattacggactcagaagctctcgcaagatggcagcctgccattgctaccgtggattcctacgtaattagctacaccggagagaaagtgcccgagatcactcgaacagtttccgggaacactgtagaatacgccttgacggacttagagccggctactgagtatactctgaggatctttgccgagaaaggaccccagaagtcttctactatcactgctaagtttacaacagaccttgacagcccacgggatctgaccgcgactgaagttcaatctgaaaccgccctgcttacttggagaccccctcgcgcatctgtcacaggttacctgcttgtgtacgaaagcgtggatggcaccgtaaaagaagtcatcgtggggccagacactacatcatactcccttgcagacttgtccccaagcacgcattacaccgcaaaaattcaggcactgaacgggcctctgaggtcaaacatgatccagacaatctttaccactatcgggttgttgtacccctttcccaaggactgttcacaggctatgttgaacggagacacaacatccggactctatacaatttatctcaatggtgacaaagcagaggccctggaagtgttctgcgatatgacaagtgacggcggaggatggattgtgttcctgcggagaaaaaatggcagagagaacttttaccagaattggaaagcctacgccgctgggttcggcgatagacgcgaggaattctggctaggactagataatttgaacaaaatcactgcccaggggcagtatgagttaagagtggacctcagggatcacggtgagacggcgtttgcggtttacgacaagttttccgtcggagatgccaagacccgctataagctcaaagtggaaggatactcaggcactgccggtgacagcatggcctaccataacggacggagcttctccactttcgacaaggataccgacagcgccatcactaattgcgccttatcgtataaaggcgcattttggtataggaattgccacagagtgaacctgatgggtaggtacggtgataacaatcactcgcagggggttaattggtttcactggaaggggcacgagcactcgatccagttcgccgagatgaaactacgcccttcaaacttccgaaacctggagggcagacggaagagagccta

SEQ ID NO: 243712 - DNA, 4077 bp, synthetic construct
  misc_feature 1..4077: note = Description of Artificial Sequence: Synthetic coding sequence
  source 1..4077: mol_type = other DNA
atgggagcggatggggagaccgtagtgctgaaaaatatgcttatcggcattaatctgatcctattagggagcatgatcaagccatccgagtgtcaactcgaggtaaccacagagagagtgcagagacagagcgtggaagaagaaggtggaattgcgaactacaataccagctccaaggaacagccggtagtctttaaccacgtgtataacattaacgttcctctggataatctttgtagctccggcttagaagcatctgctgaacaggaagtcagtgcagaagatgagacactggcagaatatatgggacagactagcgatcatgaatcccaagtcacctttacacatcgcataaatttccccaagaaggcctgcccatgtgcgtccagcgcacaggtcctacaggaactgctgtcacgaattgagatgttggagagggaagtgagcgtactccgggatcaatgtaacgcaaactgctgccaggaatccgctgcaacaggtcaactcgactatatcccacattgtagtggacacgggaatttcagcttcgagtcctgtgggtgtatttgcaatgaggggtggtttggtaagaactgttctgagccatattgtcctttggggtgttcctctcgaggagtgtgtgttgatgggcagtgcatatgtgatagcgagtacagcggcgatgattgcagcgaactgagatgccccaccgactgctcttcccggggactgtgtgttgacggcgaatgcgtttgtgaagagccatacaccggggaagattgcagggagctacggtgccctggcgactgtagcgggaagggccgatgtgccaatgggacctgcctttgcgaagagggctatgtgggggaagactgtggacaacggcagtgcctgaacgcctgtagcgggcgtggccagtgtgaggaggggttgtgtgtgtgcgaagaagggtaccaaggtcctgactgcagtgcagtagcaccgcctgaggacctacgtgtcgccggtatctctgaccggtccattgaactggaatgggacggccctatggccgtgactgaatacgtcatctcctatcagccaaccgcccttggtggtttgcagcttcaacagcgagttcccggtgactggtccggggtgacgattactgagttagagccagggctgacttataacatcagcgtgtacgctgttatctccaacatactgtctcttcctataaccgcaaaggtagctacccacctttcaacccctcagggcttgcaattcaagacaatcacggagacaacggtcgaagtacagtgggaacccttctccttttcatttgacgggtgggaaatcagtttcattccaaagaacaacgaagggggagttatcgcccaggttcccagcgatgtgacgtccttcaatcagaccggcctaaagcccggagaggaatatatcgtgaacgttgtggccctcaaagagcaggcaaggtccccacccacttctgcttccgtatctactgtgattgacggtcccacccagattctggtccgggacgtgagtgacaccgtcgccttcgtggaatggatcccaccgcgtgcaaaagtcgactttatactgcttaagtatggcctggtgggaggggaaggagggagaacaacattccggctccagcctccactctcccagtactcagtgcaagccctgcgccctggtagcagatatgaagtttctgtaagtgcggtacggggtaccaacgagtccgactctgctactactcagtttaccacggagattgatgccccaaaaaacctgcgcgtcggatctagaaccgcgacctccctggatcttgagtgggacaactcggaagctgaagtgcaggagtacaaagtcgtgtatagcacactggccggagagcaatatcacgaagtcctcgtcccacgcggtatcggtccaactacccgtgccacacttacagatctcgtacctggaactgagtatggcgtaggaattagcgcagttatgaactcacagcagagcgtccctgcaaccatgaatgcaaggaccgagctggatagccccagggatctcatggtaaccgcttccagtgaaacatcaatatcactcatttggacaaaagctagcggcccaattgatcactatcggataacctttactccttccagcggcattgcttccgaagtgactgtgccaaaagaccgtacaagctatacactcacggatttggaacccggagccgagtatataatctccgtgaccgccgagcgcggtaggcagcagtcactggaatccacggtagatgcattcaccggcttcaggcccatcagccacctgcacttcagtcacgtgacgtcctcttcagtaaacatcacctggtccgatcctagtcctccagctgaccggctcatcctcaattattccccacgagatgaggaagaagagatgatggaagtgtccctcgacgctacaaagcggcatgccgtgctgatggggcttcaacctgccacagaatatatcgtgaacctggttgcagtgcatggaacggtgacatctgaacccatcgtgggctctatcaccaccgggattgacccacctaaagatatcactatatcaaatgtgaccaaggactctgtgatggtctcttggtccccgcctgtggctagttttgactactaccgagtgagctacaggcccacccaggtgggtaggttggatagttccgtggtgccaaatacagtgaccgaatttacaataacgaggctcaaccccgcaaccgagtatgaaatctccctgaacagcgtccggggaagggaagagtccgaaagaatctgtacactggttcacacagcaatggataaccccgtcgaccttattgccacaaacatcacccctaccgaggctctgctacagtggaaagctccagtcggagaagtcgaaaattacgtcatcgtgctcacccacttcgcagttgccggtgagacaatattggtggacggggtgtcagaagaattccgtttagttgacttgttgccatctacccactatacagcgaccatgtacgctacaaacggaccattaactagtggaacgatttcaaccaacttctcaactctgctcgacccaccggctaaccttactgcatcagaggtgactagacagagcgccctgatcagctggcagccacccagggcagagatagagaactatgtgcttacctacaaatccactgatggttcccggaaagaactgatcgtggacgctgaagacacttggattagactggagggccttctcgagaacactgattacaccgtgctgcttcaggctgctcaggacacgacatggagctcaatcacatccacggcgttcactacaggaggtcgggtgtttcctcatccacaggactgcgcccagcatctgatgaatggcgacacattatcaggcgtctatcccatttttctgaacggtgagcttagtcagaaattgcaagtctactgcgacatgaccactgatgggggaggttggattgttttccagcgcaggcagaacggccagacagacttctttcggaaatgggctgactatcgagtggggtttgggaacgtcgaggatgagttttggcttgggctcgataacattcatcggatcacttcccagggcagatacgagctgagagtggatatgagggatgggcaagaagccgcttttgctagttatgacagattctccgtcgaagatagccggaatctttataaattgagaatcggcagctataacggaaccgccggtgatagcctgagctaccatcagggtaggccatttagcaccgaagatagagacaacgatgttgcagtgaccaactgcgccatgtcctacaagggtgcatggtggtacaaaaactgtcaccggacaaacttgaacggaaaatacggggagagtcggcatagtcaggggattaattggtatcattggaagggtcacgagttctcaataccattcgtcgagatgaagatgaggccatataaccatcggcttatggcagggaggaagcggcagagtctgcagttttag

SEQ ID NO: 243713 - DNA, 3807 bp, synthetic construct
  misc_feature 1..3807: note = Description of Artificial Sequence: Synthetic coding sequence
  source 1..3807: mol_type = other DNA
atgggagccgatggagaaacagtcgttctcaagaatatgttaatcggtatcaacctgatactgctgggctcaatgatcaaaccaagcgaatgccagctcgaagtcaccaccgaacgtgtgcagcgccagtcagtcgaagaggaggggggaatcgcaaactataataccagcagcaaagagcagcccgtggtgttcaaccacgtttataacatcaatgtgcctttagacaacttatgcagttctggattagaggcgtccgcagagcaggaggtgagcgctgaagatgaaactttagccgaatatatgggacaaacgagtgatcacgaaagtcaggttaccttcactcatcgaataaatttccccaagaaggcttgcccatgcgcttccagtgcgcaagtgctgcaggaactactgtccagaatcgagatgctcgagcgcgaagtatcggttctccgggaccagtgtaacgctaattgctgtcaggaatcagccgctactggtcagctggattatatcccacattgttctggacacggcaatttcagctttgaaagctgtggttgtatatgtaatgaaggctggttcgggaagaactgttccgaaccttactgccctctgggctgcagctccagaggggtctgcgttgatggccagtgcatctgcgactccgagtactcgggcgacgattgtagtgagctcagatgccctacagattgctcctccaggggtctctgtgtggatggtgagtgcgtgtgcgaggaaccttatactggggaagattgtcgcgaactcaggtgccccggagattgcagtggcaaaggccgatgtgcaaacggcacatgtctttgtgaggaagggtatgttggtgaggattgcggccaacgacagtgtctcaacgcctgctccggacgagggcagtgtgaggagggcttgtgcgtctgcgaggaagggtatcagggacccgactgctctgccgtggctcctccggaggatctgcgcgtcgccggaatttcggaccgatccattgaactcgagtgggacgggcctatggcggtcaccgaatacgtaatctcataccagccaactgcgctcggcggtcttcagctgcagcagagagttcccggagattggtcaggcgttacaattacagagcttgagccgggactgacctataatatctctgtgtatgctgtgatctctaacattctatctttaccgattacagcaaaagtcgccactcacttgagtactccacaggggttgcagtttaagacaatcaccgaaactaccgtcgaggtgcagtgggagccctttagcttttcatttgacggctgggagatttcctttatccccaagaacaacgaaggcggtgtgattgcgcaggtccccagcgatgtgaccagctttaaccagaccggcctgaagccaggcgaagaatacattgtcaacgttgtagccttgaaggagcaggctagatctccccctacgagtgccagtgtgtcaactgtgatcgacggaccaacgcagatcttggtgagggacgtgtccgacaccgttgctttcgtggagtggatccccccacgggcaaaagtggattttattcttctgaaatatgggcttgtggggggagaaggaggcagaactacattccgtctgcagccaccactttcccagtactcggtgcaggccctgaggccgggtagcagatatgaagtgtccgtaagcgcagtgaggggaacgaacgagtccgattccgccaccactcagttcaccacggagatcgacgcacccaagaatctgcgagtaggctccaggaccgcaacgtctctggacctggagtgggataattcagaagcagaggtccaggagtacaaagtcgtttactctactctggccggagaacagtatcatgaggtgttagtgccacggggtatcgggccaacaacgcgcgcaaccctcactgatttagttccaggaactgagtatggagtgggaatctcagccgttatgaactcccaacagtccgtgcccgctacaatgaacgccaggacggaactggactcccctagagatctgatggttactgcctctagcgagacctccatcagcctcatatggacaaaggccagcggccctattgatcattatagaattactttcactccgtcatctggcattgcaagcgaagtgacagtgcctaaagaccgcacatcctacactttaacagacctggaaccaggtgcggaatacatcatatctgtgacagccgaacggggaaggcaacaatctctcgagagtacagtcgacgcatttacaggaattgatccaccaaaggacattacaatcagcaacgttacaaaagattcagtgatggtctcatggagtcctcctgtggcttcgttcgattattaccgagtctcttatagaccaacacaggtggggaggctagattcctccgtggtgccaaacaccgtaacagaattcactattacgaggctaaacccagctacagagtacgagatctctctgaactccgttcggggtagggaagaatctgaacgcatttgcactctggtgcataccgccatggacaatccggtcgatcttatcgcgacgaacattacacctaccgaagctttgctgcagtggaaggccccagtgggtgaggtagagaattacgtgattgtcttgacccacttcgccgtagctggcgagaccattcttgttgacggggtcagcgaagaattccgcctcgttgatctgctgccaagcacccactacactgctaccatgtatgccacaaacgggcctctgacatcaggcacaatcagtacgaacttctccaccctcttagacccaccggcaaacctgacggctagcgaggtaactaggcagtctgcattgatcagctggcaaccccctagggccgaaatcgaaaactacgtcctgacgtataaatccaccgacggttcccggaaggaattgatagtggatgccgaggacacatggataagactggagggacttctggaaaataccgattacacggtgctgttgcaggctgctcaggatacgacctggagcagcatcacaagcactgcgtttacaacaggtgggagagtattcccacacccgcaggactgtgctcaacatctgatgaacggggacaccctctctggcgtgtacccgatttttctgaacggcgaactcagtcaaaaattgcaggtgtactgtgacatgacaactgatggcggagggtggatcgtgttccagcgcaggcaaaatggacaaactgatttctttcggaagtgggcagactatcgggtcggcttcgggaacgtcgaagatgagttctggttgggcctggacaacatccataggatcacttctcaaggccgatacgaactgcgggtggatatgagagacggccaagaggcggcattcgcatcatacgatcggttttccgtcgaagactcgcgaaatctgtacaagcttagaatcggtagttacaacggaacagcgggtgattcattgagctaccaccagggccgtccattctcaactgaggatcgggacaatgacgtagctgtaaccaattgcgccatgtcctacaaaggcgcttggtggtacaaaaactgccatcggaccaatctgaatgggaagtacggcgagtcacggcattctcagggtattaattggtatcattggaaaggccatgaattctcaataccctttgtcgagatgaaaatgcgcccatataaccaccgacttatggctggcagaaaacggcagagcctgcagttttag

SEQ ID NO: 243714 - DNA, 4077 bp, synthetic construct
  misc_feature 1..4077: note = Description of Artificial Sequence: Synthetic coding sequence
  source 1..4077: mol_type = other DNA
atgggggcagacggagaaaccgtagtgcttaagaatatgctaatcggcataaatctgatcctcttggggagtatgataaaacccagtgaatgtcagctggaagtgaccacggagagggtccagagacagagtgtggaggaggagggaggaattgctaactataacaccagcagtaaggaacagcccgtagtcttcaaccacgtctacaatatcaacgttcctttagataatctatgctcctccggattggaggcaagcgccgaacaggaggtgagcgccgaagacgagacactcgcagagtacatgggccagacaagtgaccatgaatcccaagtcacctttacgcaccgtatcaacttccccaaaaaggcatgcccctgtgcctcgtccgcacaggttctgcaggaactcttgagcaggatcgagatgttggagagggaggtgtcggtgctgcgggatcagtgcaacgctaattgctgccaagagagtgctgcaacggggcagctggactatatacctcactgctcagggcacggcaatttcagttttgagagttgtggctgcatttgcaacgagggatggttcggcaaaaattgttctgaaccttactgcccgttaggatgctcaagcaggggtgtctgcgtggacggtcagtgtatttgtgacagcgagtactccggggacgactgcagcgagcttaggtgtccaaccgactgcagtagtagaggcctctgtgtggacggagaatgtgtgtgtgaagaaccttataccggcgaggattgcagggagcttcgctgtccgggtgactgctccggtaaggggcgttgtgcaaacggcacctgtctgtgtgaggagggctacgtgggagaggattgcggccagcggcagtgcctcaacgcctgcagtggcagagggcagtgtgaggaaggactttgcgtgtgcgaggaggggtaccagggtccagactgttctgcagttgccccaccagaagatctgagagtcgccggtatatcagaccgctcaatagagcttgaatgggacgggccaatggcggtgaccgaatatgtgatttcttatcagcccacagccctgggcggactgcagctgcaacagagggtccctggtgattggagcggagtcacaatcactgagctggaacccggactcacctacaacatcagtgtatacgctgtcatatcgaatattcttagcctacccattacagcgaaagtggcaacacacctgagtacaccccaggggttgcagtttaagaccatcaccgagaccaccgtggaggtgcagtgggaaccattctcgtttagctttgacggttgggagattagtttcatccccaaaaacaatgagggcggagtgatcgcgcaggttcccagtgacgtgacatcctttaatcagaccggtctcaaaccaggagaggagtacatcgtgaatgtggtggctctgaaagaacaagcaagaagccctccaacttctgcgtcagtgtcgacggtcatcgatggtcctactcagatcctggtgagagacgtgagtgatacagtcgcattcgttgagtggattcctccaagggcgaaagtggattttatcttgctgaagtatgggctggtcggaggagaagggggacgcaccacattccgcctgcaaccccctctgagccaatatagcgtccaggcactaagaccaggatctagatatgaagtcagcgtttctgctgtccgtggtacaaacgagtccgatagcgcaaccacccagtttacaacagaaatcgatgcacccaagaacctgcgggtgggctccagaacggctacaagcctggaccttgaatgggataacagtgaggctgaggtccaggaatataaggtggtttacagcacattggccggtgagcagtatcatgaggtgctggtgcccagaggaattggtcccactacacgcgctacactcaccgacctggtgcccggaacggagtatggagtaggcatctccgcagtgatgaacagtcagcagagcgtgcccgctacaatgaatgctcggactgagctggactctcctagagatctgatggtgaccgccagtagtgagacctctatctccctcatttggaccaaagccagcgggcctattgaccactaccgcattacttttactcctagcagtggcatagcaagcgaagtaactgttcctaaagacagaacaagctatacactaaccgacctggagcccggtgccgaatacattatctctgtgacggccgagcgtggccgacagcagtctctggagtctaccgttgacgcctttaccggtttccgtccaatttcccatctacacttctcacacgtgacctcgtcaagcgtcaatatcacatggtcagatcctagcccgcctgcggatcggctgatccttaactattcccctagagatgaagaggaagaaatgatggaagtctccctggatgctacgaaacgccacgcggtactcatgggattgcagcccgctaccgagtacattgttaatctcgtcgctgtgcacggtactgtcacaagtgagccaatagttggctcgatcactactggtattgatccccctaaagacataacaatttcaaatgtaacaaaggactctgtcatggtgtcctggtcccctccagtggcaagtttcgattactacagagtgagctaccgacccacacaagttggcagactcgactccagcgtggtgccaaatacggtgacagagtttacaattacaagactgaaccccgctacggagtacgagatcagcctcaattccgtgcgtggaagagaagaatccgaaagaatctgtacactcgtccataccgccatggataatccagtggacctgatcgctaccaacattacacccacagaggccttgcttcaatggaaagcacccgttggcgaagtggagaactatgtgattgtgctaactcatttcgcggtggcaggtgagacaattctcgtcgacggcgtgtccgaggagttccgactggtggacctgctcccgtcaactcattatacggccacaatgtatgcaaccaacggccctctaacaagtgggaccatcagcactaatttctcgactctgctagatcctccagccaatttaaccgcttcggaagtcacacgtcagtcggccctcattagctggcagcccccaagagccgagatcgaaaattatgttctcacctataagtcaaccgacggcagccggaaagagctgatcgtcgatgccgaggatacctggattagactagaaggcctgttagagaacactgactacactgtactgctgcaggctgcacaggacaccacatggtccagcattacatctaccgcttttacaacgggcggacgcgtgttcccccacccgcaagattgcgctcaacatctgatgaacggcgacaccctttcaggcgtgtaccccattttcctgaatggcgagctttctcagaaacttcaagtgtactgtgacatgaccacagatggcggaggttggattgtatttcaacggcgtcagaacggccagacagacttctttagaaagtgggctgactaccgagtggggtttggcaacgtcgaagacgagttttggctagggttggacaatatccataggataacgtcccaaggtagatacgagctgagagtcgacatgcgcgatggtcaggaggcagcatttgcctcatatgatcgatttagtgtcgaagactcacggaatctgtataaattgcgaatcggcagctacaacggaacggcaggggactctttgtcatatcaccagggaaggccattttccaccgaagaccgggacaacgacgtcgcagtcacaaactgcgctatgtcatacaagggagcctggtggtataaaaactgtcaccgaacaaatctgaatggcaaatacggagaaagccgccacagccaaggcatcaattggtaccactggaagggtcatgaattttctattccgtttgtggagatgaagatgcggccttacaaccacagattgatggcgggaagaaagcgccaatctttgcaattctag

SEQ ID NO: 243715 - DNA, 534 bp, synthetic construct
  misc_feature 1..534: note = Description of Artificial Sequence: Synthetic coding sequence
  source 1..534: mol_type = other DNA
taaattaactttcccaaaaaagcttgtccctgtgcaagcagcgctcaggtgctgcaggaactgctctcacgcatcgagatgctcgagcgtgaggtcagcgtgcttagggaccagtgcaatgctaactgttgccaggagtcagctgcaacagtcgccccacctgaggacttacgagttgcaggcatcagcgataggagcattgaactagaatgggatggtcccatggctgtgactgagtacgtaatttcctaccagcccacagccctggggggtctgcagttgcagcagcgcgtccctggagattggagcggagtcaccattaccgagcttgagccgggactgacctataacatttcagtttacgctgtgatttccaatatcctatctctgcctataacagcaaaagtcgctactcacctttcaacacctcaaggattacagttcaagaccatcacagagacaacagttgaagtacaatgggagccgtttagcttctcctttgatggctgggaaatatccttcatccccaagtag

SEQ ID NO: 243716 - DNA, 12669 bp, synthetic construct
  misc_feature 1..12669: note = Description of Artificial Sequence: Synthetic coding sequence
  source 1..12669: mol_type = other DNA
atgatgccagcccaatacgcactgaccagcagcctggtgctgctggtgctattgagcactgctagggccggtccctttagttcacgctctaacgtcacactccctgccccaagacccccaccccaacccggaggccataccgttggtgccggtgtgggcagtccctcgagtcaactctatgaacacaccgtggaaggaggggaaaagcaggtggtgtttacacacaggatcaacctacctccctcgacaggatgcggttgcccacccggtactgagccgccagttctagcaagcgaagtgcaggccctccgggttaggctagagatcctcgaggagcttgtcaaagggcttaaggaacagtgtactgggggatgctgcccagcaagtgcccaggcagggaccggacaaaccgacgtccgaaccctatgctcacttcatggagtgtttgatctctcccggtgtacctgttcttgcgagcccggttggggtggacccacctgttcagatcccaccgatgccgaaatccccccttcctctcccccatctgccagcggcagttgccccgatgactgtaatgaccaggggcgatgtgtgcggggacggtgtgtctgctttccaggctatactggcccttcctgcggatggccatcgtgccccggagactgtcagggacgcggtagatgtgttcagggcgtctgcgtgtgtcgggctgggttcagcggcccagactgttcacagaggtcctgcccaagggggtgttctcaacggggacgctgtgagggtggtcgttgcgtgtgtgatcccggttatacaggcgatgattgtgggatgagatcttgccctcgcggatgcagtcagagggggagatgtgaaaatggcaggtgcgtctgcaatccagggtacgccggtgaggactgcggagttcgcagctgccctagaggttgtagccagcgaggcaggtgtaaggatgggcgatgcgtttgtgaccctgggtataccggcgaggactgtggaacgcgctcttgcccatgggactgcggagaaggaggtcggtgcgtggacggacgctgtgtgtgctggcccggatacaccggagaggactgttcaacccggacatgccccagggattgtaggggcagaggcagatgcgaggacggcgaatgcatatgcgacaccggttacagcggcgatgactgtggggtacggtcttgtcccggagactgtaatcagcgtgggcgatgtgaggatggaaggtgcgtgtgctggcctggatatactgggaccgattgcgggagtagggcatgccccagagattgtcgcggtagaggcagatgcgaaaacggggtctgtgtttgcaatgccggttatagcggggaagactgcggtgtgcgctcgtgccctggagactgtagaggcagagggagatgcgagagtggtcgctgcatgtgctggcccggatatacagggagggactgtggaaccagggcgtgtcccggagactgccgcggaaggggacgatgcgttgacgggagatgtgtttgtaaccctggctttacaggagaggattgtggatcacgacgctgcccaggtgactgtaggggccatggcttgtgcgaggatggggtgtgcgtatgtgatgcgggttactccggcgaagattgctccacccgttcgtgccctggagggtgccgcggacggggacaatgcctcgacggtaggtgcgtttgcgaggatgggtacagcggcgaggattgtggagtgaggcagtgccccaatgactgtagccagcacggtgtgtgccaggatggggtgtgcatctgttgggaaggttatgtgtctgaagattgctcaattcgaacttgtccaagcaactgtcatggtcgaggacgctgcgaagaggggaggtgtctctgtgatccgggatacaccgggcctacatgtgctacaagaatgtgccccgcagattgtcggggacgtggcaggtgcgtgcagggggtttgtctctgccacgtgggttacggcggagaggactgtggacaagaggagccaccggctagcgcttgtcccggtggttgcggacccagggaactttgtcgcgcaggtcagtgcgtctgcgtggaaggtttccgcggaccagactgtgccatccagacatgcccaggcgactgtcgtggacggggagaatgtcatgacgggtcttgcgtgtgcaaggacggatacgcaggtgaggactgcggtgaggaagtgcctacgatagaaggcatgcggatgcatttactggaggagacaaccgtgagaaccgaatggacacctgctcctgggccagtcgatgcatatgagatccagtttatccctaccacagaaggagcaagtcccccttttactgcacgcgttccctcatccgcatccgcgtatgaccagcggggattggcccctggccaggaataccaagtgacagtgcgagctcttagagggactagctggggactgcctgcctctaagacgataactactatgatcgatggcccacaagacctgagagtcgtggcggtgactcccacaacgctcgaattggggtggctcagaccacaagcagaggtagaccgtttcgttgtgtcctacgtgtccgctgggaatcagcgtgttcgactggaagtgccacccgaggccgacggaaccctgctaacagacctgatgcccggtgtcgaatatgtggtgaccgtgaccgcagaacggggaagagccgtgtcctacccagctagtgttagggccaacactggctcctctcctcttggtctgctgggcacaacggacgagcctccgcctagcggcccttccactacccagggcgctcaggccccactcctgcagcagcgcccacaagagcttggagagctgcgagtgctgggaagagatgagaccggtaggctccgtgtagtgtggacggctcaaccggacacgtttgcttatttccagctccgcatgcgcgtgccagaaggacctggtgcccacgaggaggtgctccctggcgatgtgcgccaagccctggtgcctcctcctcctcccggaaccccttacgagctgtcattgcatggtgtaccaccaggaggaaaacccagcgaccccatcatctatcagggcattatggacaaggatgaggagaagcctggcaagtcatccggtcccccaaggctaggagagcttacggtgacagaccgaacaagtgattcgttactgttacgttggacagttccggagggagagtttgattccttcgtgatccagtataaagaccgggacggccagccacaagtcgtgcccgtggaggggccacagagaagtgcagtcattactagcttggatccgggacggaaatataagtttgttctttacggtttcgtcggaaagaaacgccacggccctctcgttgccgaggctaagattcttcctcaaagtgatccttcgcctgggactccaccacatctgggcaacttatgggtgaccgaccccaccccagactctttgcacctgtcttggaccgttccagaaggtcaattcgatacatttatggtccagtaccgggatcgggatggaagaccccaggttgttccggtggaaggacccgaacggtcatttgtggtctcgtcattagaccccgaccataagtaccgctttactctgtttggcattgccaataagaagagatacggaccactgaccgcagatggcacgaccgcccctgagcgcaaagaagaacctccacgacccgagtttctggagcagccactgttaggtgaactgaccgtcaccggggtgactcccgattcgctaaggttaagctggacagtggcccagggtccattcgactcattcatggtccaatataaagacgcccaagggcagccacaggcagtgcctgttgctggcgacgagaatgaagtgacagtgcccggattagacccagatcggaaatacaaaatgaatctgtatgggttacgcggaagacagagagtcgggccagagtcagtggttgctaagacagcaccgcaagaggacgtggatgagaccccgtcccctaccgaactggggacggaagctcctgagtctcccgaagaacctctgctaggcgaactgacggtgactggaagcagtcctgattcactttctctgttctggaccgtgccacagggatctttcgactcctttaccgtgcaatacaaggatcgcgatggacgccctcgggcagtgcgcgttggcggaaaggaaagcgaagtgactgttggagggctggaacctgggcacaagtataagatgcatctgtatggactgcacgaggggcaaagagtgggccctgtgagcgctgtgggtgtcacagccccacaacaagaggaaacgccacccgcaaccgaatccccattggaaccgcgactaggtgagttgaccgtcacagacgtcaccccaaacagcgttgggctgagttggactgtgcccgagggtcagttcgattccttcattgtgcagtataaggataaggatggccaaccacaggtcgtgcctgtggccgcagatcagagagaggtcaccgtttataacttggagcccgagcgtaagtataagatgaatatgtacgggctgcatgatggacagagaatgggccctctctcagtggtaatcgtcactgccccactgccacccgctcctgctactgaggcctctaagccgcctttagaacccagattaggggagctgaccgtgacggacattacccctgattctgtgggattgtcctggacagttccggaaggcgaatttgactcctttgtagtccagtataaagaccgcgacggacagccccaggtcgttcctgtggctgctgaccagcgagaagttactattcctgatctagagcccagcaggaagtacaagtttttgttgtttggcattcaagacggaaagcggaggagcccagtctctgtggaagccaaaaccgtagctagaggggatgcttctccgggagcgcctccccgacttggggaactgtgggtgaccgatcctaccccagatagcctgaggttatcttggaccgtgccggagggccaattcgactcgtttgtggtgcagtttaaggacaaggacggtccgcaggtcgttcctgtcgaagggcacgagagaagcgtcaccgtgactccactagatgccggtcggaaatatagatttctgctgtacggcctgcttgggaagaaaaggcatgggcctttaacagccgacggaactaccgaggctcgctccgccatggacgataccggcacaaagaggccacccaaacctcgcctcggtgaagaactccaggtgaccacagtgacacagaactctgttgggttgtcttggactgtgcccgaaggccagttcgattccttcgtagttcagtacaaagatcgggacggccagccacaagtggtgccggtggagggcagtctccgggaggttagcgtcccaggtctggatcccgcacaccgatacaagttgctcctctatggcctgcaccacggaaagcgagtgggacccatttcagcagtcgccattaccgctggaagagaggagacggaaaccgaaaccacagcccctaccccacctgcacctgagccacatctgggagaattaacagttgaagaggcaaccagccacacccttcacctgtcctggatggttacagagggggagttcgacagctttgagatacaatacaccgatagagacggccagctgcagatggtccgcattggcggtgacagaaacgacatcaccctctcaggactggagtctgatcatagatacctcgtcaccctgtacgggttcagtgacggcaagcacgtgggccctgttcacgtagaagcactgacagtgcctgaggaagaaaagccttcagagcctccaacggctacccctgaacctcccattaagcccagattaggcgagttgacggtgactgatgccacccctgattctctgtcactgtcttggaccgtgccagaagggcagttcgatcattttctggttcagtaccgtaacggagatgggcagcctaaggccgttagagtgccaggccatgaggagggcgttactattagcggtttggaacctgaccacaaatataagatgaacttatatgggtttcatgggggacagcgaatgggccctgtcagcgttgtcggagtgaccgcggctgaggaggagactcccagtcctactgagccatctatggaggcccctgaacccgctgaagagccactgctgggagagctaacagtgacaggatcatctcctgactctctatccctatcttggaccgttccacaaggaaggtttgattcattcaccgtccagtacaaggaccgggatgggaggccccaggtggtcagagtgggaggcgaagaatcggaggttactgttggcggacttgagcctggaagaaaatataaaatgcacctgtacgggctccacgaaggtcgacgtgtgggtcctgtgagtgctgtcggtgtgactgccccagaggaggaatcccctgatgccccactggccaagttacggctggggcagatgacagtccgcgacattacctctgattctctgagcttgtcctggacagtgccagaagggcagttcgaccacttcctggttcagttcaagaacggcgatggccaaccaaaagccgtcagagtgccagggcacgaggacggggttactatctcgggcctcgagccagaccacaagtataaaatgaacctatacggatttcacggaggccagcgggttggtcctgtaagcgctgttggcctcacggcacccggtaaagacgaggagatggccccagcttctactgaaccccctacccccgaaccgccaatcaaaccccgactggaggagttgactgttacagacgcaacaccagactcactgtccttgagttggaccgtcccagagggacagttcgatcacttcctggtgcagtacaaaaatggggatgggcaaccaaaggccactagagtgccgggacatgaggaccgagtcactatctctggtctcgaacccgataacaagtacaaaatgaacttatacggattccacggaggacaaagagtgggccctgtcagtgctataggggtaacagcggcagaagaggaaactcctagccctaccgagccttccatggaagcaccagagcccccagaggaacccctcctcggcgagctgaccgtcaccggaagcagtcccgacagcctgtcgctgtcttggaccgttccccaaggcaggtttgacagtttcactgtgcagtacaaggatcgtgatggcaggcctcaggtggtgcgggtggggggagaggaaagcgaggtcacagtgggcggactggaacctggcaggaaatacaagatgcacttgtatgggctgcacgaggggagacgcgttggcccagtctctacggtgggggtcacggctcctcaggaagacgtagacgagactccttccccgaccgagcctggcacagaggcaccagagccaccagaggagcctctgcttggcgagctgactgtgacaggcagctctcccgattccctgtccctttcttggaccgtgccgcagggtcgattcgattcgtttacagtgcagtacaaggatcgcgatgggaggccacaggcagtgcgggtgggcggacaggagagcaaggtcaccgtgagaggactcgaaccaggcaggaagtacaagatgcacttgtatggcttgcacgagggtaggaggcttgggccagtaagtgccgtgggagttaccgaggacgaggccgaaacaacccaggccgttccgactatgacacctgagccacccataaagcctcggctcggggagctcacaatgacggatgcaacaccggattctttatctctgagctggactgttcccgagggccagtttgaccactttttggtgcaataccggaatggggatggacaacctaaggccgtcagagtgcccggacacgaggatggagtcaccatctctggcctcgagcccgatcacaagtacaagatgaatttgtatgggtttcacggagggcagagggtagggccaattagcgtgataggcgtcacagccgcagaagaggaaaccccttctcccaccgagctttcgaccgaagcgcctgagcctcccgaggaacctctgctcggagagcttaccgtgactgggtcttctccagactctctaagtctcagttggaccataccacaaggccactttgatagcttcaccgtgcagtataaggatcgtgatggtagaccacaggtcatgcgagtccgcggagaggagagtgaagtcaccgtgggcggactggaacccggaagaaaatataaaatgcatctgtacggactgcacgagggcaggcgcgtcgggcctgtgtcgactgttggcgttacagttcctactacgacaccagaaccccctaacaagcccaggctgggagagttgacagtcactgatgcaactccggactcactgagcctctcgtggatggtgcccgagggacagtttgatcactttctggtgcagtatcggaatggggacggccagccaaaggtagtacgagtgcctggacacgaggatggcgttacgattagcggtttagagcctgaccataaatacaaaatgaacctgtacgggtttcatggcggacagcgggtcggccctatatcagtgatcggcgtgaccgcggcagaagaggaaactcccgcacccacagagccgagcaccgaggcacccgagcccccagaagagccacttctgggagaattgacagtaacgggatcatcccccgactcattgtccctttcctggacaatcccccagggcaggtttgattccttcaccgttcagtacaaggatcgggatgggaggccgcaagtcgtccgcgtccgcggagaagaaagcgaagtcactgtaggagggctggaacccggatgcaagtacaagatgcacctttacgggctccacgaaggacagagagtcgggccagtgagtgccgtgggcgtgaccgtgcctacgatgactcccgaaccgcctatcaagccaaggctcggtgaactgacagtgaccgacgcaacacctgacagtctgagtctatcttggatggttcctgaaggccaattcgatcattttctggttcagtatagaaacggagacgggcagccgaaagccgtcagggtgcccggacacgaggacggtgtcactataagtgggctggaacctgaccacaaatacaaaatgaacctgtacggattccatggcggtcagagagtgggcccagtgtcggcgataggggtgacagaggaggaaacccccagtccaactgagcccagcaccgaggccccagaggccccagaggagccactccttggcgaactgactgtgaccggcagttcacctgactcactctcattgtcgtggaccgttccccagggccgatttgattcattcaccgtccagtacaaagaccgcgacggtcagccacaagtggtccgagtgcggggagaggaaagcgaggtcacagtcggaggactggagccaggcaggaaatacaagatgcatctatatggcctgcacgaagggcagcgtgttggcccagtgtcgactgtggggatcactgctcccctgcccacgcctctccctgtggagccacgcctgggcgagctggctgtggcggctgtgacctcagatagtgtcgggctgtcctggacagtcgcccaaggccctttcgattccttcctcgttcagtatagggacgcccaaggacagccacaggcagtgcctgtctccggcgaccttcgggctgtagcagtgtcagggctcgaccctgctcgcaagtataagttcctgttattcggtctgcagaacggcaaacgacatggcccagtgcccgtggaagccaggactgcgcctgacaccaaaccttccccacggctgggagaactcacagtaacagatgctacaccagactctgtggggctgtcttggactgttcccgaaggggaattcgatagttttgtggtacagtataaggacaaggacggaaggctgcaggtcgtccctgtggctgccaaccaacgcgaagtgacggtccaggggctagaaccatctcgcaagtatcggtttctactctacggtttgtccggtcggaaacgactcggccctatctcagcagattccacaaccgcgccactcgagaaggagctccccccacatctgggtgaactgaccgtagctgaggaaacaagtagtagcctacgcctcagttggaccgtcgcccaaggccctttcgactcctttgtggtgcaataccgggacacagatggccaaccacgggctgtgcccgttgccgcagaccaaaggaccgtcacagtggaagacctggagccaggtaagaaatacaagtttctcctgtacggtctgctggggggtaagagactcggacccgtttccgccctcgggatgaccgccccagaggaggacacgccagctccggagctagccccagaagccccagaacccccagaagagccacgattaggtgttctcactgtgacagacaccacacctgatagcatgcgtctatcgtggtcagtggctcaggggccattcgacagttttgtcgtgcagtacgaagatacaaacggccagccacaggcactgcttgttgacggggaccagagtaagattttgatttccggcttggagcccagcacaccctaccggtttttgctgtacggtctgcacgagggcaagagattgggacccctgtcggccgaaggaacgactggattagcaccagctgggcagaccagtgaagagtccaggccaagactttcacagttaagcgtgacagacgtcacaacctcctctttgcgactcaactgggaagccccaccgggagctttcgacagtttcctactgaggtttggcgtgccgagccctagtactctggaaccccaccctagacccctccttcaacgcgagctgatggttccagggactcggcatagcgcagtgttacgcgatcttaggtctggtaccctgtacagtctgactttgtacggcctgcgcggtcctcacaaagcagacagcatacagggcaccgcacggacattatcccctgtgctcgagagtccaagggatcttcagttcagcgagatcagagaaaccagcgccaaggtaaactggatgccaccgccttctcgcgctgactcattcaaagtctcttaccagttagccgatgggggagagccccagtctgtacaggtggacggccaagctagaacccagaagctccaggggctgattcctggagccaggtatgaggttaccgtagtgagcgtaaggggttttgaggagtctgaacctctgaccggctttcttactaccgtgcccgacgggcctacccaacttagagctctcaatctgacggagggctttgcagtgctccactggaaacctccccagaatcctgtcgatacctacgatgtccaggtgactgcacccggtgcaccgccactgcaggcagagaccccgggatcagccgtagactaccccctgcacgatctcgttttgcataccaactacaccgccaccgtaagaggactgcgcggtccgaatcttacaagccctgctagcattaccttcacaaccggacttgaagccccaagagacctggaggctaaagaggtcacgccacgcaccgccttactgacctggaccgagccacctgtgcgcccagcaggttacctgctcagcttccacaccccgggaggacagaatcaagagatcctgctgcccggaggtatcactagtcatcagctgcttggacttttcccaagcacatcctacaatgcacgcctccaagccatgtggggccagagcctgctgccccctgtctcaacttcctttacaacaggtgggctgagaatcccattcccacgcgactgcggagaggaaatgcagaatggcgcaggtgcaagtcgcacgtctaccatatttttaaatggcaaccgggaaagaccactgaacgtgttctgtgacatggagacagatggtggcggttggcttgtctttcaacgtagaatggacggacaaacagacttctggcgagattgggaggactatgctcatggattcggaaatatctccggggagttttggctgggaaacgaggccctgcacagcctgacccaggctggagactattccatgagagtagatctgcgggctggcgacgaagctgtctttgcccaatatgactccttccacgtcgatagcgcggcagagtactacaggttacacctggaggggtaccacggcactgctggtgacagcatgagttaccattctggaagcgttttcagcgctagagacagagaccctaatagtctgcttatttcctgtgcggtgtcatacagaggagcatggtggtacaggaattgccattatgccaacttgaacgggctatacggcagcactgtagaccatcagggcgtctcatggtatcattggaagggctttgagttcagtgtcccttttactgaaatgaagctcagacccagaaacttccgcagccctgccggtggcggatag

SEQ ID NO: 243717 - DNA, 6449 bp, synthetic construct
  misc_feature 1..6449: note = Description of Artificial Sequence: Synthetic coding sequence
  source 1..6449: mol_type = other DNA
taagctgaagaggaaacaccatccccgaccgagccgagcatggaagccccagaacccgctgaggagcctctgctcggtgaactgactgtgaccggctcctctcccgactccttgagcttgtcatggacggtcccgcagggcagatttgacagtttcaccgtccagtacaaagatcgcgacgggaggccccaggttgtgcgcgtggggggagaagaatccgaggttacagttggaggcttggagccaggccgaaaatacaagatgcacctgtacggtttacacgaagggagaagggtggggccagtatccgcagtaggagtcactgcccctgaggaagagtcccccgatgctcccctcgccaagctgcggctaggccagatgaccgtgagagacattactagcgactcgttgtctttgtcttggaccgtccccgaggggcagttcgatcacttcctcgtgcagttcaagaacggggatggccagccaaaggccgtccgtgtcccagggcacgaagacggtgtcacaatctctggactagagcctgaccacaagtataagatgaacctgtatggattccatggtggtcagagggtgggccctgtgtctgccgtgggcctgacagctcctggcaaggacgaggagatggctcccgcttcgacagaacctccgacccccgagcctcctattaagcccagactcgaggaattgacagtaaccgacgccactcccgatagcttatccctctcttggactgtccctgaaggacagtttgatcacttcctcgtgcagtacaaaaacggagacggccagccaaaggcaaccagagttcccggtcatgaggatagagtaactatctctggactggaaccagacaacaagtataagatgaatttatacggcttccatggaggccagcgagtcggaccagtctccgcaataggggtaaccgccgcagaagaggaaacgccatcccctaccgagccttctatggaggcaccggagcccccagaagaacctctgctgggggagttaacagttacaggctcgagccccgattccctgtccctgagctggaccgtgcctcaagggagatttgactcattcaccgtgcagtacaaggacagggacgggcgaccccaggtggtgcgggtgggcggtgaggaaagcgaggtgaccgtgggaggtctcgagcccggaaggaaatataaaatgcatctgtacggcctgcatgaagggagacgggtcggtccggtgagtaccgttggtgtgactgctccgcaggaggacgttgatgagacaccgtcccccacagaacctgggactgaggctcccgagcctccagaggagccactccttggggaacttactgtcacgggtagcagtcccgattctctttctctgagctggacagtacctcagggtcgattcgattcattcacagtgcagtacaaggaccgggacggaaggccgcaggctgtacgcgtcggcggacaagagagcaaggtgaccgtcagaggtctcgagcctggtcgcaaatacaagatgcacctctatggactgcatgagggcagaagactgggcccagtctccgccgtgggtgtgaccgaagacgaagcagagaccacccaggctgtcccgaccatgactcctgaacctccaatcaagccacggctgggagagctgaccatgaccgatgcgactccagatagtttgtccctgagctggactgtccccgaaggtcagttcgatcattttcttgtccagtatcgcaatggtgacggccagcccaaggcggtgagagtgccaggacacgaggacggggtaactatctctggtctggagcctgaccacaaatacaagatgaatctgtatggttttcacggtgggcagagggttggccctattagtgtgactggagtgacagccgctgaagaggagactccatcccctacagaactgagcaccgaggcgcctgagccacccgaggaaccccttctgggtgagctcacagtcacagggtcctcgcccgactctctcagcctgtcctggacaataccacagggacacttcgacagctttaccgttcagtataaagacagagacggcagaccccaggtgatgcgggtgagaggcgaggagtccgaagttaccgtgggaggtctggaacccggacggaagtacaaaatgcacttgtacgggctacatgaaggccgaagagttgggccagtgtcaactgtgggtgtcaccgtgcccaccactacacctgagccacctaacaaaccgaggcttggtgagctcacggtgactgacgccacccccgactcactgtccctgtcctggatggtgcccgagggccagtttgatcattttctggtacagtaccggaacggggacggccaaccaaaagtggtgcgagtgccgggtcacgaggatggggtaactatcagtggactggagccggatcacaagtataagatgaacctgtacgggttccatggtggccagagggttggcccaatctccgtgatcggcgtaactgccgcagaggaagagacaccagcccctaccgagccaagtacggaggcgccagaacctccagaggaacctttgctgggagaactaacagttacagggtctagccccgacagtctttcgttgagttggacgatacctcagggcaggtttgattcctttaccgtgcaatacaaggatcgggacggcagacctcaagtcgtgagagtacgcggtgaggagtctgaggtaaccgtgggaggtctcgagcctggctgtaaatataaaatgcatctctatggactgcatgaagggcagagagtgggccctgtgtcggctgtgggcgtgacagtcccaaccatgacccctgaacccccaatcaaacctcgactgggagaactcactgtcaccgatgcaactcccgattcacttagcctttcctggatggttcccgaaggccagttcgaccacttcctagtccagtaccgaaacggcgacgggcagccgaaggctgtccgtgtaccgggtcacgaggacggcgtgactatctcaggcttggaaccagaccacaaatataagatgaacctttatggcttccacgggggacaacgcgtcggcccagtttctgcaatcggcgtgaccgaagaggaaacaccttcccctactgagccctcgaccgaggcgccagaggcccctgaagaacccttgctcggcgaactgaccgtcaccggctcctcacccgacagtctgtcgctgtcatggacagtgccccagggtagatttgactcctttacagttcagtacaaggaccgggatggccaacctcaggtcgttcgagtccgaggcgaggaaagcgaggtcaccgtcggcggtctggagcctggacgaaagtacaagatgcatctgtacgggctccacgaaggccagcgcgtcggcccagtttccactgtgggcattacagctcctctgccaacacctctgcctgtcgaacctcgcttaggagagctggcggtggccgctgtaacaagcgattccgtaggtctctcttggaccgtggcccaggggccatttgacagctttttagtgcagtatcgggacgctcaaggacaaccccaagcagtgccagtgtcgggggacctgcgggctgtcgctgtgtctggtcttgatcccgctagaaagtacaagttccttctcttcggcctccagaacggtaagcgtcatggaccagtccccgtggaagcccgtactgctcctgatacaaagcctagtccaagactgggcgaattgacggtgaccgacgctaccccagatagcgtgggtctgtcctggaccgttcccgagggcgagtttgattcgttcgttgtccagtataaggataaggacggcagacttcaggttgtgcccgtggcagccaaccagagggaggtaaccgtccagggacttgagccatcaagaaaatatcgctttctgttatacggactttccggcagaaagcgtctgggcccaatctccgctgattctacaacagctccactggaaaaggagctaccccctcatctcggcgaacttactgttgcagaggaaacttcaagtagcttacgattgagctggactgtcgcccaagggccatttgactcctttgttgtccaatatagagacaccgacgggcagccccgagctgtccccgtggcagcggaccaacgcactgtcactgtcgaagacctggagcccggaaaaaagtataaatttcttttatacggtttgctggggggaaaacgtctggggccagtatctgccttggggatgaccgcccctgaggaagatacacccgcaccggagctagctcctgaagctccggaacccccagaggaaccaaggctgggggtccttactgtgactgatacaacaccggacagcatgaggctttcttggagtgttgctcaaggtccgtttgactctttcgtcgtacagtacgaggatacaaacggacagccacaggccctgctggttgacggcgaccaaagtaaaatcctcataagcggcttggaaccgtcaaccccatacaggtttctgctgtatggactccatgaaggcaaacgattggggcctcttagtgctgagggcacaaccggcctggcccctgctgggcaaacaagcgaagagtcccgaccacgcctctcccagctgagtgtaaccgacgttacaacatcctcactgcggctgaactgggaggccccacctggtgcctttgattcgtttttactacgctttggggtcccttctccctccactctggagccacatccaagacctctcttgcagagagaactgatggtgcctgggactcgacatagcgccgtgctgcgagatctacgtagcggaacgctgtattcactgaccctgtatggcctgcgaggaccgcacaaggctgactctattcagggtactgcacgcacactctctccagtcttggagtctccacgggatctgcagtttagcgaaatcagggaaacgtccgcaaaggtaaattggatgccccctccctcacgggctgattcatttaaggtttcatatcaactggcagacggcggagaaccccagtccgtccaggtagacggacaggctcgcacccagaaactgcagggactcatccctggagctcgttatgaggtcactgttgtgtccgtccgcggatttgaggaatccgagcccctcaccggtttcttaacaacagttccagatggtcccactcaattgagagccctgaatctcactgagggctttgccgtgctgcattggaaaccaccccagaaccctgtggacacttacgacattcaagttacggcacccggtgctccacccctgcaggctgagacccccggtagcgcggtagactacccacttcacgacctggtgctgcacacaaattatacagccactgtgcggggactaagaggccctaacttgacctcaccggctagcatcacttttaccaccgggcttgaagcaccaagggatttagaagccaaagaggttacaccacggacagctcttctcacttggaccgaacccccagtgcgcccagccggttacctactgtctttccacactcctgggggacagactcaggaaatcctgctccccggtgggataacatcccaccagctgctggggttgtttcctagtacttcttacaatgctcggttacaggccatgtggggccagtccctgcttccaccagtctcgacatccttcactacaggcggtctgagaatcccttttccacgggactgcggcgaggagatgcagaatggagcaggcgctagtcgcaccagtaccatcttcctgaacggcaaccgggagcgtcctcttatagttttctgtgacatggagaccgatggcggaggctggttggtgttccagaggcggatggacgggcagactgatttttggagggactgggaggattacgctcatggcttcgggaacatctctggggagttctggctcgggaatgaggcgcttcattcgctgacacaggccggtgactactcaatgagggtcgacctgagagccggagacgaggcggtgtttgctcaatacgacagtttccacgtcgacagtgcggcagaatactatagactccatttggaaggataccacggtactgcgggagactccatgtcctatcattcggggtctgtgttcagcgcgagagaccgagacccaaattctctgctgatatcatgcgccgtgtcataccggggtgcatggtggtataggaactgccactatgccaatcttaatgggctgtatggctcaaccgtggatcaccagggtgttagttggtaccattggaagggcttcgagttctcggtgcccttcacggagatgaaacttaggccgagaaatttcagatctcccgcaggcggtggcta

SEQ ID NO: 243718 - DNA, 27 bp, synthetic construct
  misc_feature 1..27: note = Description of Artificial Sequence: Synthetic coding sequence
  source 1..27: mol_type = other DNA
atgatgcctgcgcagtacgccttgtag

SEQ ID NO: 243719 - DNA, 27 bp, synthetic construct
  misc_feature 1..27: note = Description of Artificial Sequence: Synthetic coding sequence
  source 1..27: mol_type = other DNA
atgatgcccgcacagtatgccctctag

SEQ ID NO: 243720 - DNA, 9890 bp, synthetic construct
  misc_feature 1..9890: note = Description of Artificial Sequence: Synthetic coding sequence
  source 1..9890: mol_type = other DNA
taatcaagtcccctgggtctgcttggcactactgatgaaccgccaccctcaggaccctccactacccaaggagcccaggctccgctgttacagcagaggccccaagagctgggggaactgcgcgtcctgggcagagacgagaccggcagacttagggtcgtctggaccgcccagccagacaccttcgcctattttcagctgagaatgagagttcccgagggacctggggctcatgaagaagtgttgccaggtgacgtgagacaggcgctggtcccacccccaccccctggaacaccttacgagctgtccctgcatggcgtccctccaggcggtaagccatcagatcctattatatatcaagggattatggataaagacgaagagaagcccggaaagagctctggccctcctcgcctgggcgagctcacggttaccgatcggacttcggacagtctcctgctgcgctggaccgtgccagaaggagagtttgatagctttgtgatccaatataaagatagggatggacagccacaggttgtgccagttgagggaccacagcgatctgctgtgatcacctctttggaccctggaagaaaatacaaatttgtgctctacggatttgtaggaaaaaagagacatggacctttggtggcagaagctaagatccttcctcagtccgaccccagccctggcaccccaccacatctcggtaacctgtgggtgacagaccctaccccggattctttacacctgtcatggacagtacccgaagggcagtttgatacgtttatggtgcagtatagagacagagatgggaggccacaggtggttccagtggaagggccagaaaggagctttgtggtttctagtctggacccggaccacaagtaccggttcaccctatttgggatcgctaataaaaaacgatacggccctctgacagccgatggaacaacagcccctgagagaaaggaagagccacccagacccgagtttctcgaacaacccctgctgggcgagctaaccgttacgggggtgacacctgattccctacgcttgtcttggacggtagcccagggcccatttgatagttttatggtgcagtacaaagatgcccaggggcagccccaggccgtgccagttgctggagacgaaaatgaggtgaccgtgcccggtttagatccggaccgaaagtataagatgaacctatacggcctgcggggaaggcagcgagtcggcccagaatccgtggtagctaagacagccccacaggaggacgtggacgaaaccccatcgccgactgaactcggtacagaagcaccagagtctccagaagaacccttgctgggcgagcttactgttaccggctccagtccagatagcctgtccctattttggacagtgccacaaggatctttcgacagttttactgtccagtacaaggaccgagatggaagacctcaggctgtgagggtgggtggcaaggaaagtgaagtgaccgtgggtggacttgagccaggccacaagtataagatgcacctgtacggtctgcacgagggacagcgggttggcccagtgtctgctgttggggtcaccgcccctcagcaggaggaaactccccctgccaccgagtctccactggaacccaggctgggagaactgactgtgacagatgtcacccctaattccgtagggttgtcttggaccgtcccggagggtcagtttgattctttcatcgtccaatacaaggacaaggatggtcagcctcaggtggtgcctgtcgccgcagatcagagggaagtcactgtatataacctcgagcctgaacggaagtacaagatgaatatgtacggcttacacgacggacaacggatggggcctttatctgtggtcatcgtgacagcgccattgccccctgccccagccacagaggcaagtaagcctcccctagagcctcggttaggtgaactgactgttactgatattacacctgactcagtcggacttagttggactgtaccagaaggagaattcgacagcttcgtggtgcagtataaggatcgagacgggcagccccaggtggttccagtggcggcagatcagcgtgaggtgactattcctgaccttgaaccatcccggaagtacaaatttcttctgttcggtatacaggacggtaagcgcaggtcgccggtttccgtggaagccaaaaccgtggctaggggagatgcttcccctggagcccctcctaggctgggtgaactgtgggtgacagaccctaccccggatagtctgcggctatcttggactgtgccagaaggccaatttgattcattcgtggtgcaattcaaagacaaagacggcccacaagtggtgcctgtggaagggcatgaacgcagcgtaacagtaacgcctctggatgccggacgaaagtataggttcctcctgtacggcctgctcggaaagaaacgacacgggccactcactgccgacggcaccactgaggcccgatccgcaatggacgacactggaactaagcgcccacctaaacctcgattaggggaagaactccaggtgactactgtgacacagaacagcgtcgggctgtcttggacagtgcctgaaggacagtttgactccttcgtggtccaatacaaagatcgagatggacagccccaggtcgttcccgtcgagggcagccttagggaagtttctgtgcctggacttgacccagctcaccgatataagttgctcctctatggactacaccacggcaaaagagttggcccaataagcgcagtggctattacagccggaagggaagagacagagactgagacaacagccccaacgcctcctgcccctgagcctcacctcggcgaactcacagtcgaagaggccacctcccacacccttcacttgtcctggatggtgacggagggagagtttgactcctttgagatccagtatacggaccgtgacgggcagctccaaatggtccgcattgggggagacaggaacgacatcaccttgtccgggctggaatccgaccaccggtatctagttacactctatggcttcagtgacggaaagcacgtggggccagtccacgtcgaggcccttactgtccctgaggaggaaaaaccttccgaaccaccaaccgcgactccagaacccccaattaaaccaagactcggagaactcacagttacggatgccacaccggactcgctctcactctcctggaccgtgcctgagggtcaatttgaccattttcttgtccagtatcggaatggagacggccaaccaaaggctgtcagagtccccggacacgaagagggtgtgaccattagtggacttgagcccgaccacaagtataagatgaatttgtatgggttccatggcggacagcggatgggacccgtgtctgtcgtgggagtgactgctgctgaagaggagacaccttcccctactgagcccagcatggaggcgccagaacccgcagaagaaccgcttctaggggagctaacggtgaccggctcctcgcccgattctttgagtctctcgtggacggtgccacaagggagattcgacagctttaccgtgcaatataaggatcgcgatggcagaccgcaggttgtgagagtgggcggtgaggaaagtgaagtcacggtcggaggtttggagcccggtaggaagtacaaaatgcatctctacggcctgcatgagggtcggagggtgggccctgtcagtgcggtgggagttacagccccagaggaggaaagtcccgatgccccattagctaagctgaggctgggccagatgactgtgcgggacattactagtgattccttgagcctgtcctggactgtgcccgagggacagttcgaccattttctggtgcagttcaagaacggagatggccagccaaaggctgtgcgagtgcccggacatgaagatggagttactatctctggtctcgaaccagatcataagtacaaaatgaatctttacggcttccacggtggccaacgggttggtcccgttagcgcagtaggtctgactgctcccggaaaggatgaggaaatggcacctgcctccacagaaccccctactcccgagcctcccataaaaccaaggttagaggaattgactgtcactgatgccacaccagattctctgtccctctcatggactgtgccagagggccaatttgaccatttcctggttcagtacaaaaacggtgatgggcagcctaaagccaccagggtgccagggcacgaggatcgggtgacaattagcggcctggagcccgacaacaaatacaagatgaacctgtacgggttccatggaggtcagagggtcggcccagtctctgctatcggcgtgactgccgctgaagaggagacaccatcaccgaccgaaccaagtatggaggcccctgagccgccagaagagccattgctgggcgaactgaccgtgaccgggtcctctccagacagcctgagcctctcgtggaccgttccccaggggcgattcgattcttttacggtgcagtataaagatagggacgggcgaccccaggtggtccgcgtcggcggagaggaatctgaggtgacggtgggtggtttggagcctgggcgaaagtacaagatgcacttgtacggcctgcacgaaggacggagggtcggtccagtgtcaactgtgggcgtgacagcaccacaggaagacgtggacgagaccccatcccctacggagccgggaaccgaggcacccggacccccagaagagcctctgctgggtgaactgactgttactggctctagtcccgattcactttcactgtcttggacagttccgcaagggagatttgatagttttacagtgcaatacaaggaccgtgacggccgaccccaggcagtgcgtgttggcggacaggagagcaaggtgactgtaagaggtcttgaacctggtcggaaatacaaaatgcacctgtacggactgcatgaaggcaggcgcctggggccagtgtctgccgtgggtgtgaccgaggacgaagcagaaactacgcaggcagtgccaactatgacacctgaaccaccaattaagcctcgtctcggcgagcttaccatgacagacgcgacacctgactccctatcactttcatggaccgtgccagaaggccagttcgatcattttcttgtccagtaccgcaatggggatggccagccaaaagctgtgcgtgtgcccggtcacgaggacggagtcaccatttcagggctggaaccagatcataagtataagatgaacttgtatggctttcacggcggacagcgcgtcgggccaatctcagtcattggcgtgacagctgcagaggaagaaacgcccagccctacagagttgagcaccgaagcgccagagcctcctgaggaaccgcttttgggcgagttgactgtaactggcagctcccctgattcactgagccttagttggactatacctcagggccacttcgactcattcaccgtgcagtataaagaccgcgatggccgtccacaggtgatgcgcgtcaggggggaggaaagcgaggttacagtggggggactggagcctggtcggaagtataaaatgcacctatacgggctgcacgaggggaggagagttgggccagtatctaccgttggagtgacagtccctaccacaacacctgagcccccaaacaagccaagactgggagaactcacggtgacagacgccactcccgacagtctgagcctctcttggatggtgcccgagggccaattcgaccactttttagtccaataccgaaacggtgatggacagcccaaggtggttagggtacccggtcacgaggatggagtgacaatctccgggctggaacctgatcataaatataaaatgaatctttatggctttcatggtggccagagggttggacccatatctgtaattggagtcaccgctgctgaggaggaaacgccagcgcctaccgagccatccacggaagctccggaaccacccgaggagcctctcctgggtgaactgaccgtgacaggaagctctcccgactcattgagccttagctggacaataccacaggggagattcgattcttttactgtacaatacaaagatcgggacgggcgtccccaggtggtgcgggttcggggtgaagagagtgaggtcaccgtgggcggacttgagcctggctgtaaatataaaatgcatctatacggacttcacgaagggcagagagttgggccagtgtcagccgtcggcgtcactgttccaacgatgacccctgagccacctataaaacctcggttaggtgaattgaccgttactgacgcgacccctgactccctctctctttcctggatggttccggaagggcagttcgaccatttcctggtccagtacaggaatggtgatggacaacccaaagcagttagagtcccaggccatgaggacggggtgacaattagcggcttggaacctgatcacaaatataaaatgaatctctacggctttcacggaggtcaaagggtgggacccgtctcagccattggcgtcaccgaggaggaaactccctccccgactgagccctcaacagaagcccctgaggccccagaggagccactcctgggtgagctcactgtgactggttcttcaccagacagtctgtccctgtcctggacggtccctcaggggcgttttgattcatttaccgtccaatacaaagaccgtgatggacagccacaggtggtgcgcgttcgtgtggaagagtcagaggtgaccgtgggaggattggagcctggtaggaaatacaaaatgcatctttatggtttgcatgaaggacagagggtgggtccggtgtccaccgtgggcatcactgcaccactgcccacacctctgcccgtggagccaagactcggcgagctcgctgtggctgccgtcacaagtgattcagttggacttagttggacagttgctcagggccctttcgacagttttctagtgcagtatagagacgctcagggtcaaccccaggccgttccagtcagtggcgacctacgggctgtggccgtgagcggtctagatcccgcacgaaagtacaaatttctcctgttcggtcttcagaatggcaaacgtcacggcccagttcccgttgaagccaggaccgcaccagataccaagccgagccccaggctcggtgaacttaccgtcacggatgccacccctgacagtgtgggtctgtcatggacagtcccagagggggagttcgattcttttgtagtgcagtataaggataaggacggacgactccaggtggtccccgtggcagctaatcagagggaggtgacagttcagggccttgaaccgtcgaggaagtaccggttccttttatatggactctcaggacgcaagcgactcgggccaattagtgcagattcgacaaccgccccactcgaaaaggagttgccaccacaccttggagaactgaccgtagccgaggagacatcttcttccctgcgtctcagctggacagtggcccaggggccttttgactcatttgtcgtccagtaccgggacacagacggtcagcctcgggctgtgcctgtggccgctgaccagaggaccgtgaccgtggaggacctggaaccagggaaaaagtacaagttcttactgtacgggctgctggggggaaagaggctgggcccagtgagcgccttggggatgaccgcacccgaggaggatacacctgctcccgagctggctcccgaagcccctgaaccgcctgaagagcccagactgggagtgttaactgtaacagacaccactcccgacagtatgagactcagttggtcagtggctcagggtcccttcgatagctttgtcgttcagtatgaagacactaacgggcagccacaggcgttactggtggatggagaccaatccaaaatcctgattagtggtctggagccgtccactccctacagattcctgctctacggactacacgaaggcaaacgattgggccctctgtctgcggagggtacaactggcctcgcgccagcgggtcaaacatccgaggaatctcgcccaagacttagtcagctttctgtcacagatgtcacaactagctccctccgtcttaactgggaggctcctccgggagctttcgattcctttctgctaagattcggggtcccatccccctctactctggagccacatcctcggccactcctccagagagaactaatggtgcccggtactcggcattctgctgtgctgcgcgatttgcgctccggcaccctttatagtctaacgctatacggtttgcggggaccacacaaagctgacagcatccagggcactgcaaggaccttgtcaccggtgctggagtccccaagggacctgcagttcagtgagattcgcgagacaagtgcgaaggttaactggatgcctccccctagccgcgcagactcatttaaggtgtcttaccagttggccgatgggggagaaccccaatctgtgcaggtcgacggacaggccagaacccaaaaacttcagggattgattcccggagctagatacgaggtgactgtcgtaagcgtacgaggattcgaggagtctgagcccctgacaggcttcctcacaacggtacctgatggaccgactcagcttcgggctctcaacctgacggaaggctttgcagtactgcactggaagccacctcagaatccagtcgatacatatgatgtccaggtgactgctcccggtgcccctcctctccaggccgaaacccctgggagtgctgtcgattacccccttcatgaccttgtcttgcacaccaactatacagccactgtacggggacttagaggacctaacctcacatccccagcatcgatcacatttaccaccggcctggaggcgccaagagacttggaggccaaggaagtgacaccgagaacagcactgttgacatggacagagccacctgtgaggcccgctggatatctgctgagctttcacacacccggtggccagaatcaggaaattttgctcccgggaggaattacgtctcatcaactcctggggctgtttccttccacctcctataacgctcgtctccaggcaatgtgggggcagtctctcttacctcctgttagtactagttttaccacaggaggcctgaggataccttttccacgcgactgtggcgaagagatgcaaaatggagcgggtgcatccaggacctcaaccatcttcttgaacggcaacagagaaagacccctaaatgtgttttgcgacatggagacagacgggggtggttggctggtctttcagcgccgaatggacggtcagaccgacttctggcgtgattgggaggactatgcccacggtttcggtaacatttcaggtgaattctggctcggcaacgaggcactgcactccctgacccaggctggagactacagtatgcgagttgatctgagagccggagatgaggccgtgtttgcacagtacgattcctttcacgtcgactcagctgcggaatactaccgattgcacttggaggggtatcatggtaccgccggtgacagtatgtcctaccactctgggagcgtgttctcagcccgagatcgagacccaaactctctgttaatcagctgtgccgtgtcttaccgtggggcatggtggtatcgcaattgtcactatgcaaatttaaacgggctgtatggatctaccgtggaccaccagggtgtgtcatggtaccactggaagggcttcgagttctccgtgcctttcacagaaatgaagctccgcccaagaaactttcgttcgcccgcaggaggtggtta

SEQ ID NO: 243721 - DNA, 12669 bp, synthetic construct
  misc_feature 1..12669: note = Description of Artificial Sequence: Synthetic coding sequence
  source 1..12669: mol_type = other DNA
atgatgcctgctcagtacgctctcacctcttctctggttctcttggtgctgctgtccactgctcgggctggccctttctccagccggtcaaacgttaccctgccggcacctagacccccaccccaacctggcggtcataccgtgggcgcaggcgtaggaagtccatcctctcagttatacgagcacaccgtggaaggcggagagaagcaagtggtttttacacaccgcatcaacctgccgccaagcactggctgtggctgtcccccaggcaccgagccccctgttctggcaagcgaggtccaggcactcagagtgcggttagagatattggaggagctggtgaagggcctgaaagagcaatgcacgggaggctgttgccccgcatccgcacaggctgggaccggccagactgatgtgcgtactctgtgttccctccacggggtcttcgatttgtcccgctgcacttgttcttgtgaacctggctggggtggccctacatgttccgacccaacagacgctgagataccaccctctagcccgccttcagcaagcggctcttgccctgatgattgtaatgaccaggggagatgcgtgcgtggcagatgcgtgtgtttcccagggtatacaggccctagctgtggttggcccagctgtcccggagactgccagggtcgcggacgttgcgttcagggagtgtgtgtctgtagagccggattctcaggcccagattgttcccagcgaagttgtccaaggggctgtagtcaaagaggacgatgcgaaggagggcgatgtgtatgtgaccctgggtacaccggtgatgattgcggtatgagaagctgccccaggggatgctcccaacgtgggcgttgtgagaatggcaggtgcgtgtgcaacccagggtacacgggtgaagactgcggagtgcgatcttgtcccagaggctgtagtcagagagggaggtgtaaggacggccgatgcgtctgcgatcccggttacaccggagaagactgtggtacgcggtcatgtccctgggattgtggtgaaggaggacgctgtgtcgatggtaggtgcgtttgctggcccggatataccggtgaggattgctccacacgcacatgcccaagagactgcagaggcaggggtcggtgtgaagacggagagtgcatttgcgacaccgggtacagcggtgacgattgcggagtgcgatcctgtccaggtgactgtaatcagagaggtaggtgcgaggatggacgatgcgtttgctggcctggctacacggggactgattgcgggtccagagcatgccctcgagattgcagaggaaggggtcggtgcgagaatggcgtatgtgtgtgcaacgcgggatattccggggaggactgcggggtgcggagttgtcccggagattgtaggggtagaggtcggtgtgaaagcggccgatgtatgtgctggcccggatacacaggacgcgattgcggcactcgtgcttgccctggggattgccgtgggcgtggcaggtgtgtggacgggcgttgcgtatgcaatccaggcttcaccggcgaagactgtggctcccgccgttgcccaggggactgccggggacacggcttgtgtgaagacggagtgtgtgtgtgcgacgccggatacagtggagaggactgttccactcgcagctgtcccggagggtgtcgagggaggggccagtgtctcgatggaaggtgtgtttgcgaagacggatatagtggtgaggattgcggagttagacagtgccccaacgattgtagccaacacggcgtctgtcaagatggtgtgtgtatctgttgggagggttatgtgtcagaagactgctcaattcggacgtgccccagcaactgtcatggcaggggccgatgcgaggagggaagatgtttatgcgaccccggttacaccggaccgacctgcgccactcggatgtgcccagcagactgtagggggagggggagatgtgtccagggggtgtgcctctgccatgtcggttacgggggagaagactgcggtcaggaggagcctcctgccagcgcatgcccagggggatgtggacctagggagctgtgtcgcgctggtcagtgtgtgtgtgtcgaagggttccgaggacctgactgtgccatccagacatgccccggagactgccgcggaaggggtgagtgtcacgacggtagctgtgtgtgcaaagacgggtacgcaggagaggattgcggggaggaggtgcctaccattgaggggatgcggatgcacttgttggaggagaccacagtgaggactgaatggactcccgctcctggaccagtggatgcttatgagattcagtttatcccaaccaccgagggggcttcaccccctttcacagcacgcgtcccatccagtgcaagcgcttacgaccagcggggacttgcacctggacaggagtaccaggtaactgtccgagccctgagaggtacctcttgggggttacccgcaagcaaaacaatcacaacaatgatcgatggcccacaggatctcagagtggtcgcagtgacaccgacaacgcttgaattggggtggctgcgcccacaggcagaagtagatcgattcgttgtgagctacgtcagcgctggcaaccagcgagtgcgtctggaagtgccaccagaggcggatggcacactgctcacggacctgatgcccggagtggagtatgttgtgacggttacagccgagcggggacgagcagtgagctatcctgcgtccgtaagagccaacaccggaagcagccccctcggcctgctgggcactactgacgaaccccctccatctggcccaagcactacccaaggtgcccaagccccacttctgcagcagagacctcaggagctgggagaactgcgtgtgttgggtagagacgagaccggtcggttgcgcgtggtgtggactgcccagcctgacacattcgcctacttccagcttaggatgagggtgccggaggggccaggggcacacgaggaggtactccccggagacgtacgccaggcattggtcccccctccccctccaggaacgccttatgaattgagcttgcacggagtgcctcctggaggtaagccctccgatccaattatctaccaggggattatggacaaggatgaggagaagcctggcaagtcttcgggccctcccagactaggggagttaaccgttaccgaccgaacgagtgatagtctgctgctgcgatggacggttcctgagggggaatttgattcttttgtgatacagtacaaagaccgggacggacagcctcaagttgtgcctgttgagggcccacagagatccgcggtgatcacatccctggacccgggacgcaagtataagtttgtcctctatggtttcgtagggaaaaaacggcacggaccattggtggcagaagccaaaattctgccccagagcgatccttccccagggactccacctcggctaggcaatctatgggtgacagacccgacacccgacagcctgcaccttagctggaccgttccagaaggacagttcgatacgttcatggttcaatacagggacagagacggccgacctcaggtagtccctgttgagggcccagagcggtcattcgtggtaagttctctggatcccgatcataaataccgctttacacttttcggaatagcgaacaagaaacggtacggtcctctgaccgcagacggaactaccgctcccgagcgcaaagaggaaccccctagaccagagttcttggaacagccccttctgggggaattgaccgtgacaggggttactcctgattcactccgcctgtcttggactgttgcgcagggaccattcgatagtttcatggttcagtacaaggatgcccagggccaaccacaggccgtccctgtcgcaggagatgagaatgaagttacggttccaggactggatcctgataggaaatataaaatgaacttgtacggtctgcgaggtcgccagcgggttggtcctgaaagcgttgtggcgaagactgccccacaggaggatgtggatgaaacaccttccccaaccgaactagggaccgaggcccctgaaagccccgaggaacccctgctcggcgaactgactgtcacgggatcctcccccgactcactgtcgctgttttggacagtcccacaaggtagcttcgactcattcactgtccaatacaaggatcgcgatgggaggccaagggcagtgagagtcgggggaaaagaaagtgaggtgaccgttggcggtctggaacccggtcataagtataagatgcatctgtacgggttgcatgaagggcagagggtcgggccagtctctgcagtaggcgtgacggcccctcaacaggaggagacaccccctgcaaccgaaagtcccctggaaccacgcttgggcgagcttaccgtgacagatgtcaccccaaattccgttggattgagttggaccgttcctgaagggcagttcgactctttcatcgtgcagtataaggataaggatggccagccgcaagtggtaccagtggccgctgatcagcgagaagtgactgtctacaacttggagcctgagcgcaagtataagatgaacatgtatggattacatgacggacaacggatgggaccgctgagtgtcgtaattgtgaccgcaccccttccgcctgcaccagctactgaagcctcaaaacctcctctggaacctcggctgggcgagctgacggtgaccgacataacaccagatagcgtgggtctctcttggaccgttcctgaaggagaatttgatagcttcgtcgtgcagtataaggacagagatggacagccccaagtggtgcctgtcgccgctgaccagagagaggtaactattcctgatctggagcctagcagaaagtacaagtttcttcttttcggcatccaggatgggaaaaggcgctcccccgtctctgtcgaggctaagacggttgctaggggtgacgctagcccaggagcccctccaaggctgggagagctctgggttacggaccccacccctgatagtctgaggctgagttggacagtccccgagggtcagttcgattcctttgtcgtgcaattcaaagacaaggacggcccacaggtagtgcccgtcgagggacacgagagaagcgttaccgtaacccctcttgatgcagggcgtaaataccgatttctcctttatggactgcttggtaaaaaaaggcacgggcctctcacggccgatgggactaccgaggctcgaagtgcaatggacgacaccggaactaaacggcctcctaaaccaagactaggcgaagaacttcaggtgacaaccgtaacacaaaattcagtcggcctgagctggacagttccggaggggcaatttgacagtttcgtggtgcaatataaggatcgggacgggcagcctcaagtggtgccggttgagggctcacttagggaggtgtctgtgccaggactggatccagcccatcgctataaactcctgctgtacggcttacatcacggcaaacgggtcgggccaatcagtgccgtcgctattacagccggaagagaagaaaccgagactgagaccaccgctccgactcctccagcacctgagccccatctgggagaacttaccgttgaagaagcaacatcccacacactccatctgtcatggatggttaccgaaggggaattcgacagctttgaaattcagtacaccgatcgcgatggtcagttacagatggtaaggataggtggtgatcggaatgacattaccctgtctggcttggagagcgaccaccgctatctcgttactctgtatggcttttccgacggtaaacatgtgggccctgtgcatgtcgaagcactgactgttcccgaggaggagaagccctctgaacctcccacagccaccccggaacccccaatcaagcctcgcttgggggagctgacagtgaccgatgccactccggattctctgtctctgtcatggaccgtgcccgaaggacagtttgaccattttctggtgcagtatcgaaatggtgacggacagcctaaggctgtgcgggtaccagggcacgaagaaggcgttaccatttcgggcctcgagcctgatcacaaatacaagatgaacctgtacggtttccacggtggccaacgtatgggtcctgtatcggttgtcggagtcaccgccgctgaggaggaaacccctagtcctacagaacccagtatggaagccccagaaccagctgaggagcccctgctgggcgagttgactgttaccgggtctagcccggacagtctgtctctctcctggacagtaccccaggggagattcgacagtttcactgtacagtataaggaccgcgacggccgtccacaggttgtccgggttggaggcgaagaatcggaggtgacagtgggagggctcgagccaggacgaaagtataaaatgcacctgtatgggttacatgaagggcgtagagttgggccagtttccgcggtgggcgtgacggcccctgaagaggagtctcctgacgcccctcttgccaagctgaggctaggtcaaatgactgtgcgagacattacctccgactcactctccctcagttggaccgttcccgagggccaatttgatcactttctggtgcaatttaaaaatggtgatggccagccgaaggcggtgcgcgtacctggtcacgaggacggggtgacaatcagtggccttgagccagatcacaagtacaaaatgaatttgtatggtttccatggcggacagagggtgggcccagtgtctgctgtgggacttaccgccccagggaaggacgaagagatggcccctgcaagtacagagccgccaacgcccgaacctccaatcaagcccagattggaggagctgactgtcaccgatgccaccccggacagtctgtccctatcatggactgtgccagaaggtcagtttgatcacttcctggtgcagtataagaatggggacggacagccgaaagctacacgagtcccaggacacgaggatcgggtcaccatctccggactggaaccagacaataagtacaaaatgaacctgtacggttttcacggcggtcagcgtgtcggacctgtctctgccattggcgtcacagccgcagaggaggaaaccccctcccctaccgagccctctatggaagcacccgagcctcccgaagagcccttgctcggagagttaaccgtgactggttccagcccagactcgctttctctgagttggaccgtcccacagggacgctttgatagtttcactgtgcaatacaaggaccgtgatggtcgtccccaagtcgttcgcgtcggaggagaggaaagcgaggtaaccgttgggggactcgaaccgggaagaaagtataagatgcacctgtacgggctgcacgaagggagacgcgttggtccagtgtctacagttggggtaactgcaccgcaggaagatgtagacgagaccccctctcccaccgagccaggcacagaagcccctgaaccgccagaggagcctctcctgggcgaactgacagttactggctcctcccccgacagcctgagtttgtcatggaccgtgccccaaggacggttcgactctttcactgtgcaatataaagatcgagatggacgccctcaggccgtaagggtgggtgggcaggagtccaaggtgactgtcagaggcttggaacctgggcgaaagtacaaaatgcatctctacggcctacatgaggggagacgactcggcccagtgagcgccgtgggcgtgacagaggacgaggctgaaactacgcaggcggtacccaccatgacacccgaaccaccaattaaaccaagactgggcgaactgactatgaccgacgcaacgcccgactcgctgtctttaagctggaccgtgcctgagggtcaattcgaccacttcctggtgcagtacaggaatggtgatggccagccaaaggccgtgcgtgtccccggacatgaagatggcgttaccatctctgggctggagcccgaccataagtataagatgaacctctacggattccatggaggccagagggtcggccctatcagtgttatcggagtgaccgcagcagaggaggaaactccttctcccacagagctttcaacagaggccccagaacctcccgaggaacccctcctcggtgaattgacagttactgggagctcgcccgactctctatccctcagctggaccattccacaaggccattttgactccttcacggtgcagtacaaggaccgggatggtaggccacaggttatgcgagttcggggtgaggagagcgaagtcacagttgggggactggagccaggccgaaaatataaaatgcacctgtacgggctgcatgagggaagaagggtgggccctgtgtccaccgtgggcgtgacggtcccaactacaaccccagaacctccaaataagccaaggcttggcgagctgaccgtcaccgacgctactcccgacagtctgtcccttagctggatggtgcctgagggccagttcgatcatttccttgtgcaataccgcaatggtgacggccagcccaaggtcgtccgggtgccgggacatgaagatggagtgacgatctcaggtctcgaacccgaccataagtacaaaatgaacctgtatggattccacggcggtcagagggtcggaccgatctcagtaataggcgtgaccgcggcagaagaggaaactcccgctccaacagaaccgagcactgaagccccagagcctcccgaggaacccctgctcggcgaactgaccgtcaccgggtcaagtcccgatagtctgtccctgagttggacaataccccagggacgcttcgactcttttaccgtgcagtataaggaccgtgacggtcggccacaggtagtgcgcgtgcgaggggaggagtccgaggtgaccgttggcggactggagccaggctgtaaatataaaatgcatctctacggcctacatgagggccaacgagttgggcctgtgtcagccgtgggggtcaccgtgcctacaatgacccctgaaccccctatcaagcctaggctgggggagttgacggttaccgatgccacaccagacagcctctcactgtcttggatggttcccgaggggcagttcgaccactttctggttcaatacagaaacggggatggtcagccgaaggccgtgagggtgcccggacacgaggacggggttaccatctcgggattagaacccgatcacaagtacaagatgaacctgtatggttttcatggcggacagcgggtgggacccgtgagcgctatcggagtcacagaggaagagactccttcccccaccgagccctcaaccgaggcacccgaggccccagaggagccgctgctgggggaattgacggtgactggttcatcaccagactcactatcattatcctggaccgtcccccagggacggttcgacagcttcaccgttcagtacaaggacagagacggtcaaccacaggtggtacgagtcagaggcgaggagtccgaggttacagtcgggggactagagcccggaaggaaatataaaatgcacctgtacggtctgcatgaaggccaacgcgtgggtcccgtgtccacagttggtatcaccgctccactgcccacacccctccccgtggagccacggttgggagaattagcggtggctgccgtgacttcagactccgtggggctctcctggaccgtggcccagggtccctttgacagctttcttgtgcagtacagggacgctcaaggccagccccaagcggtccctgtatccggggacttgcgggctgtcgcagtctcagggttggatcctgccaggaaatacaagtttctcctgttcggcctgcagaacgggaaaaggcacggccctgtgcccgtggaggcccgaactgccccagatacgaaaccatccccaagactcggggagctgacagtgacggacgcaaccccagactccgttggcctgtcctggaccgtgcctgagggcgagtttgacagcttcgtggtgcagtataaagacaaggacggccgattgcaggtggtgccggtggctgcaaaccagcgtgaagttactgtacagggtctcgaaccgtcccggaagtaccgcttcctgctgtatggactgagtggaagaaagagacttggccctatctccgccgactcaaccacagcaccattagagaaggaactgccgcctcacttgggggaactgactgtggctgaagaaactagttcgtcattaaggttaagttggaccgtggcccaggggccattcgacagcttcgtggtgcaatatcgcgatactgacggacaacccagggcagtgccggtagccgcagaccagaggactgtcacggttgaggacctggaacccggaaagaaatataagttcctcctgtacggtctactgggcggaaaacgtttgggtcctgtgagtgctttggggatgactgccccagaagaggatacccccgctccggagctggcccctgaagctcccgagccgcctgaagagcctcggctgggcgttttgaccgttacagatactacacctgacagcatgcgattaagttggtctgtcgcccaggggccatttgactccttcgtagttcagtatgaggatacaaatggacagccacaggctttgcttgtggacggcgatcaaagcaaaatccttatttcaggactagaaccttccactccctaccgctttctgctgtatggcctgcacgagggaaagcggcttgggccattgtctgcagaggggactacggggctggccccagccggtcagacctcagaggagagccgtcccaggctgtctcagctgagtgtcacggatgtgacaacatcttctctccggcttaactgggaggctcctccgggtgcctttgacagcttccttctgagattcggagttccttctccctccaccctggagccccacccccgaccacttctgcagcgggaactgatggtcccgggtactagacattccgccgtcttacgcgacctgcggtctggcacgctctactctctgacactgtacggcctgcgcggtcctcacaaagccgactccattcagggcaccgccaggacactgagtcccgtgttagaatctccccgtgatctgcaattttccgaaattcgcgagacaagtgccaaggtgaactggatgcccccacctagcagggcagattcattcaaagtttcctatcagttggcggacggcggagagccccagtcagtccaggtggacggacaggctcgcactcaaaaactgcaaggactcatccctggcgctaggtacgaggtgacagtcgtttccgtccggggatttgaagaatcagagccattaactggttttctgactacggtgcctgacgggccaacacagctgagagccctgaacctgaccgagggtttcgcagtgctgcattggaagcccccacagaacccagtagatacctacgatatccaggtgaccgctccaggcgcacctcccctacaggcagagactcccggatctgctgtagactacccattacacgacttggttctgcacacgaactacacagcaactgttcgcggactccgaggcccaaaccttacttctccagccagcatcacattcacgacaggcctagaggctcccagggatctcgaagctaaggaggtgaccccacggaccgccctgctgacgtggactgagccgcctgtccgccctgcgggatacctgctatccttccatactcccggaggacagacccaagaaatcctgctacccggagggatcacgtcccaccaacttttgggccttttcccaagcacctcttacaacgctaggctgcaggctatgtggggccaaagtctgctgcctcctgtgtccacctcgttcaccactggagggctgcgcatacccttcccccgtgattgcggcgaggaaatgcaaaatggagccggtgcctcacgaactagtactatatttctgaacggtaatcgagaaagaccactcatcgttttctgcgacatggagaccgacggagggggatggcttgttttccagcggcgaatggatggtcagacagatttttggcgcgactgggaggattatgcccatggctttggaaatatttctggcgagttctggttaggcaatgaagcactccattccctcacccaggcaggggactactctatgagagtggacctgagagcaggagatgaggcagtattcgctcagtacgatagctttcacgtggattcagccgctgagtattaccggctccatttagaaggctaccatggaactgcgggtgattcgatgtcttaccattctggcagcgtgtttagcgcaagggaccgcgatcccaattcattgttgatttcctgcgcagtatcctacaggggggcatggtggtaccggaactgccactacgccaacctgaatggcttgtatgggagtaccgtggatcaccagggagttagctggtatcattggaaaggttttgagttttcggtaccgtttactgagatgaagctgcgccctaggaacttcagatcccccgctggcggaggttac

SEQ ID NO: 243722 - DNA, 27 bp, synthetic construct
  misc_feature 1..27: note = Description of Artificial Sequence: Synthetic coding sequence
  source 1..27: mol_type = other DNA
atgatgcccgcacagtatgctctctag

SEQ ID NO: 243723 - DNA, 1905 bp, synthetic construct
  misc_feature 1..1905: note = Description of Artificial Sequence: Synthetic coding sequence
  source 1..1905: mol_type = other DNA
taaagctcccccctggggctcctcggcacaaccgatgaacccccacctagcgggccttccacaacacagggggcacaagcccctcttttgcagcagcgtcctcaagagctgggagagctcagagtgctgggtagggatgaaaccgggaggttgcgggtggtctggactgcacaaccggacactttcgcctacttccagctgcgtatgagagtgccagagggaccaggcgcacacgaggaggttctgcccggagacgttaggcaggcgctggtgccaccacctcctccgggaactccttacgaactctcgctgcacggggtgccccctgggggaaaaccttcagaccccatcatctatcaggggatcatggataaagacgaagagaaacccggtaagtcaagcggaccccctaggcttggggaacttacagtgactgatcgtaccagtgacagcctgctactaaggtggacagtgccagagggagagttcgatagcttcgtgattcagtataaggatcgcgatggacagccacaggttgtccctgtggaggggcctcaacggtcggccgttatcacgagcctcgatcccggacggaaatacaaattcgtgctgtatggttttgttggtaagaagcggcatggacccctagtcgcagaggccaaaatccttccccaatccgacccaagtccgggaacccccccaaggctggggaacctctgggtgacagatccaacccccgattctctgcacctaagctggactgttcctgaaggccagttcgatacatttatggtgcagtacagagatagagacgggcgtccacaagtggtgcccgtggaagggccagagaggtcttttgttgtgtctagtttggatccggatcacaaatatcgttttactttgtttggcatcgcaaataaaaagaggtatggacctctcactgcggatggcactaccgcccctgaacgaaaagaggagcccccaaggccagaattcttggaacaacctcttctgggagagctcacagtgactggagttacgcccgactcgctaagactctcctggacggtggcccagggaccctttgattccttcatggtgcagtataaagatgcccaaggacagccgcaggcagtgcctgtggctggagatgagaacgaggttacagttcctggacttgatcctgaccgcaaatataagatgaacctctatgggctccgcggacgccagagggtggggccagagtcagtcgtggcgaagacggcccctcaggaagatgtggacgagactccaagcccaaccgaactgggtacagaggcaccagagtctcccgaagagcccctgcttggtgagttgaccgtgacgggcagctctcctgattccctctcactgttttggactgtgccccagggcagcttcgactcattcacagtgcaatataaggatagggacggacgccctagggccgtccgtgtgggaggaaaggagtctgaagtgacggtcggcggattagaacccggtcacaaatacaaaatgcacctttacggtctgcatgagggccagcgtgtcggtccagtgtccgccgtgggagttacggctccgcagcaggaggagactcctcctgccacagagtcacctctcgagccaagactgggagagctcacagtcaccgacgtgacccctaattctgtgggacttagctggaccgtgcctgagggccaattcgacagtttcatcgtccagtataaggacaaggacggacagccccaggtggtgccagtcgccgcagatcagagggaagttacggtgtataacctcgagccggaaagaaagtacaaaatgaatatgtatgggctccacgatggacagcgtatgggacccttatccgtggtgatagtcacctag

SEQ ID NO: 243724 - DNA, 27 bp, synthetic construct
  misc_feature 1..27: note = Description of Artificial Sequence: Synthetic coding sequence
  source 1..27: mol_type = other DNA
atgatgcccgcacagtatgccctgtag

SEQ ID NO: 243725 - DNA, 12668 bp, synthetic construct
  misc_feature 1..12668: note = Description of Artificial Sequence: Synthetic coding sequence
  source 1..12668: mol_type = other DNA
atgatgccggcacagtatgctctaacttcctcgctggtgctcctggtcctgctgagcacagctcgcgctggcccattttcttcccggtccaacgtaacactcccagcgccacgacctccgccacaaccgggtggacacacagtgggcgcaggcgtcggtagcccatcctcacaactgtacgagcacacagtggaaggaggcgaaaaacaggtcgttttcacacatcgcatcaacctgccgccttccactggctgcggctgcccacctggaaccgagcctcctgttttagcctcagaggtgcaggcattgcgggtaaggctggaaattctggaagagttggtcaaaggcctgaaagaacagtgtaccgggggttgttgtccggcaagcgcccaagcgggaacgggacaaaccgatgtcagaactctgtgctcattgcatggcgtcttcgatctgtcccgttgcacctgcagttgtgaacccggatggggcggtccgacctgtagcgacccaactgatgcagaaattcctccctcctctccaccctctgcctcgggcagttgtcctgacgattgcaacgatcaggggagatgcgtcaggggacgctgcgtctgctttcctgggtacaccgggcctagttgtggctggccgagctgccccggtgattgccaaggtcggggtagatgcgtgcagggcgtttgcgtctgcagagccggattctccggacccgattgttcccaacgaagttgcccacgcggatgttcccaaagaggcagatgcgagggcggtaggtgcgtctgcgaccctggctatacgggcgacgactgtggtatgcggtcgtgcccacggggatgctctcagcgagggaggtgtgaaaatgggaggtgcgtgtgtaacccaggatatacaggagaagactgcggggtacggtcatgtcctcgtggctgctcgcagcgcggacgctgtaaggacgggagatgcgtttgtgacccaggctatacaggtgaggactgtggaacccgatcttgcccctgggactgtggagaaggtggcagatgcgtggatggacgctgcgtttgttggcctggttatacaggagaagactgttcaactaggacgtgcccccgtgactgcagggggagggggaggtgtgaagatggagaatgtatctgtgacaccggttactctggagatgattgcggagtgagatcatgccctggagactgcaatcagagagggaggtgcgaggacggacgctgcgtgtgttggcccggttacacaggaacggactgcggttcacgggcttgtcccagggattgtagagggagggggagatgtgaaaacggcgtgtgcgtgtgcaacgccggatacagcggtgaagactgtggggtgcgatcgtgcccaggggattgcagaggcagaggcagatgcgagtccggaaggtgtatgtgctggcccggttataccggtcgggattgcggtacacgggcatgtccaggcgactgccgaggcaggggtagatgtgtggacgggaggtgcgtgtgcaaccctggctttaccggggaagactgtgggagtcgcaggtgccccggtgactgtagaggacacggactgtgcgaggatggcgtgtgcgtgtgtgacgccggttattcaggggaggactgctctactaggtcctgtcctggcggatgtagaggccgtgggcaatgcctggacggcagatgtgtctgtgaagacggctacagtggcgaggactgcggggtgcgtcagtgccctaatgactgctctcagcacggagtgtgtcaggacggggtgtgtatatgttgggagggctacgtgtctgaggactgcagtattaggacgtgcccgtctaattgccatggccgagggaggtgtgaagagggcaggtgcctctgtgacccaggctataccggcccaacttgcgcaacgagaatgtgcccagctgattgccgagggaggggaaggtgcgtgcagggcgtgtgtctttgtcacgtcgggtatggaggcgaagattgcgggcaggaggagccacccgcaagcgcgtgtcccggtgggtgtggtcctagggagctgtgtcgggcagggcaatgtgtctgcgtcgaaggcttcagggggccagattgtgccatacagacttgccctggcgattgcagaggaaggggcgaatgccacgacggctcatgtgtgtgcaaggacggctatgcaggggaagattgtggggaagaggtgccaactatagaaggcatgagaatgcatttgttagaggagactaccgtgcgcacagaatggactcccgctcccggacccgtggatgcatacgagatccaatttatacctaccacggagggagcctcgcccccattcacagcccgagtcccttcgagtgctagtgcctatgatcagcggggactggctccaggacaagagtaccaggtcaccgtccgggctctgaggggcacaagctggggtctaccagccagtaagacgatcaccaccatgatcgacgggccacaggatcttagggtcgtggccgtgaccccgactaccctcgagctggggtggctgcgaccccaggcagaagtcgataggttcgtcgtgtcgtatgtgagcgccggtaaccagagagtcagacttgaagtgccccctgaagccgacggcactctcctgaccgaccttatgccaggagtggaatatgtagtgacagtgacagcggaacgcggacgagccgtgtcctatccagcgagcgtgcgagccaacaccggcagtagtccacttggactcttggggaccaccgacgagccccctccatcaggaccctccacaacgcagggagcccaggcgccacttctgcaacagcggcctcaagagctgggcgaactgcgcgtcctgggacgcgacgagaccggcagacttcgcgtcgtgtggaccgctcagcctgatacgttcgcatactttcaactccgtatgagggttccagagggcccaggagcacacgaggaggttcttcccggagacgtgcggcaggcacttgtacccccaccccctcccggtacgccctacgaactgagccttcacggagtcccacctggtggcaagccatccgacccaatcatttatcaaggaatcatggacaaagatgaggaaaaacccggtaagtccagcggcccacccaggttaggcgaactcaccgtaaccgacaggacatctgattcattactcttacgctggaccgtgccagagggagagtttgactcctttgtgattcagtataaggatcgggacggtcagccacaggtggtgcccgtggaggggcctcagcgcagtgcagttatcacttctctggatcccggacgcaagtacaagttcgttttgtacggcttcgtggggaagaagagacacggacccttggtcgcggaagctaaaattttgcctcagagtgatccttcgccaggtactccccctagactgggcaatctgtgggtgaccgatcctacacccgattcgctccatctctcatggactgtgccagaagggcagttcgacacgtttatggtgcagtatcgggatagggatggaagaccccaggttgtaccggttgaaggaccggagagaagttttgtcgtcagctctcttgacccggaccataagtataggtttacgcttttcggtatcgcaaacaagaaacggtatgggccactgactgcagacgggactactgcgcctgagcggaaggaggaacctccacaccccgagtttctggaacaaccactgctaggagaactgacagtgacaggggtgactcccgattctttgagactgagctggacagttgcccagggcccatttgacagttttatggtgcagtacaaagacgcacagggccagccgcaagccgttcccgtggctggcgacgagaacgaggtgaccgtaccagggctggacccagatagaaaatacaagatgaacctgtatggcttacgagggagacagagggtgggtccagaaagtgttgtggccaaaaccgctccccaagaggacgtggatgaaaccccgtctcccacggagctgggtacggaagcaccagaatctcctgaagaaccactcctgggagaattaaccgtaactggaagctcacctgattcactgagcctcttttggactgtgccacagggatctttcgattcttttaccgtacagtataaggaccgcgatggcagacctagagctgtgcgggtcggaggcaaagaatctgaagtgacagtggggggactcgagccgggtcacaaatataaaatgcacctgtacggactgcacgaaggccagagggtgggcccagtgagtgccgtgggcgtgacagcgccacagcaggaagagactccaccagctaccgagagtcccttggagccacgcctgggagagctgactgtaacggatgtcacgcctaattcggtgggcctctcctggactgtgcccgaggggcagtttgatagcttcatcgtccagtataaggacaaagatggtcagccgcaagttgttcctgttgccgcagatcagagagaggtgacagtgtacaaccttgagccagagaggaagtacaagatgaatatgtacgggctacatgacggtcaaaggatgggaccactctcagtggtaatcgtgaccgcccctttaccaccagctccagccaccgaagccagcaaaccacctctggaaccccgactaggcgaattaactgtgaccgacattacgccagatagcgtgggcctgagctggaccgtgcctgaaggcgagtttgatagctttgtggtccagtacaaagaccgagacggtcagcctcaggttgtgcctgtcgccgcagatcagagagaagtgacgattccagacctcgagccttcccggaagtataaatttcttctgttcggaatccaggacgggaaacggagatctccagtgagcgtcgaggccaagaccgtggctcgcggagacgcatcacccggtgctccccctaggctcggcgagctgtgggtcaccgacccgacgcctgattccctccgcctttcttggaccgtgcctgagggccagtttgattcctttgttgtacagtttaaagacaaagacggacctcaggtggtccccgtcgagggccacgagaggtctgtgaccgtcaccccgctggacgccggtcggaagtacagattccttttatatggacttctgggcaagaagcggcacggtccactcacagcagatggtactaccgaggcacgttctgcaatggatgacactggtacgaaaagacctccaaaacccaggctcggtgaggagttgcaggttaccactgtcacccagaactctgttggtctctcttggacagttccagaaggccagtttgactcgtttgtagtacagtacaaggatcgggatggccagcctcaagtggtccccgttgaagggagcctgagggaggtgtccgtgcccggactcgaccctgctcaccggtacaagctgctgctgtatggactccatcacgggaagcgcgtgggccctatctccgccgttgctataacagctggtcgggaggagacagaaactgagacaactgcgcctactcccccagcccctgaaccgcatctcggcgagttgacggtcgaggaggccacctcacacactctacatctgtcctggatggtcactgaaggggagttcgatagcttcgaaatccagtacactgatagggatgggcaacttcagatggtcaggatcgggggagacagaaacgacatcactttgagtggtctggagagtgaccaccggtacctggtgaccctctacgggttctccgacggaaagcatgtcggccctgtgcacgttgaggcactgactgtccccgaggaggagaagccatccgaaccaccaacagctactcccgaaccaccaatcaaaccacggctcggggagttaacagttacggatgcgaccccagatagtctgtctttgagttggaccgtgccagaggggcaatttgatcacttcctggtgcagtatagaaacggagacggacagcccaaggccgtgcgcgttccaggacacgaagagggcgtgacaatttcaggactggagcctgaccacaaatacaaaatgaatttgtacggcttccatggcggtcagcgcatgggcccagtgtctgtcgttggtgtaactgccgctgaggaggagactccgtcccctaccgaaccttcaatggaggcccctgagccagccgaagaacctctgctcggggagttaacggtcactggatctagccctgactcccttagcctttcttggactgtgcctcaaggaaggtttgactccttcactgtgcagtataaggaccgtgatggccgtccacaggtggtgagagttggaggggaagaaagtgaagtgaccgttggcggacttgagcctggccgtaagtataaaatgcacctgtatggtcttcacgagggccgacgggtggggcctgtgtctgccgtgggggtgacagctccagaggaagagagccccgacgccccactggccaagctgagacttggacagatgaccgtcagagacatcacgtctgactccctaagcttaagttggactgttcctgaaggtcaattcgatcactttctggtacagtttaagaatggagacgggcagcccaaagccgtccgtgtccctggccatgaagatggggtcacaatctcaggcctcgaaccagaccataagtacaagatgaacttatatggctttcatggtggacaacgcgtcggcccagtatccgctgtaggcctgactgcccctggcaaagatgaggagatggctccggcatcaaccgaacccccaacacctgaaccacccattaaacctagactggaagaacttaccgttaccgatgccacccctgattctttatcactgtcttggacagtccccgaagggcaatttgatcatttcctggtgcagtataagaatggcgacggccagcctaaggccactcgggtccctggccacgaggaccgggtgaccatcagtgggctcgagcctgacaacaaatataagatgaacctatatgggttccatggcggacagcgggtgggccctgtctccgcaatcggggtcacagccgcagaggaggagaccccgtcccctaccgagccctctatggaggcaccagaaccacctgaggaaccactgcttggggagttgaccgtgaccggatcctccccggattcgttgtcacttagctggaccgtgccacaaggacgctttgattcattcactgtccagtacaaagatcgcgacggtcgtccacaggtggtgagggttggcggagaagaaagcgaggtgacagtaggcggactggaacccggacgcaagtataaaatgcacctgtacggactacatgaaggacgtcgcgtggggcctgtctctacagtaggagtgacagccccacaagaggacgtcgacgaaacaccatcacccaccgagcccggaactgaggcgcctgaaccccctgaggagcccctcctcggggagctgactgtgactgggtcaagccctgattcgctgtccctgtcttggactgtcccacagggcaggttcgactcattcaccgtgcagtataaagaccgggatggacgtccacaggccgtgcgcgtaggcggtcaggagtcaaaagtgactgttaggggcctggaacccggtagaaagtataaaatgcacctgtacggactgcacgagggccgtcgcctgggtcccgtgtctgccgttggggtcaccgaggacgaggccgaaactacacaggctgtgcctactatgactccagagccccctatcaagccaaggctaggggagctcaccatgactgatgctacaccagactctctctccctttcttggacggtccccgaagggcaatttgaccatttcttagtacagtatagaaatggcgacgggcagcctaaagctgttcgggtacctgggcatgaagatggggtaacaatctccggtctggagccagatcacaagtacaagatgaatctgtacggcttccatgggggtcaaagggtgggccctatttccgtaattggggtgacagccgcagaggaagaaacaccgtctccaactgagctctcaacagaagcccctgaacccccagaagagccacttcttggcgaattgactgttactgggtctagccctgatagcttgagcctgagctggacaatccctcagggtcacttcgactcctttaccgtccagtacaaagacagagatggaaggcctcaggtgatgagggtgcgaggcgaagagtccgaagtaaccgtaggaggactcgagcccggtagaaagtacaagatgcacctctatgggctccatgaggggaggcgggtgggtccagtgagcacagttggcgttactgtgccaactactacccccgaaccacctaataaacccaggctaggtgaactgaccgtgaccgacgccactccggattctttatcgcttagctggatggtgcccgaagggcagttcgaccatttccttgtccagtataggaacggtgacggccagccaaaggtggtgagagtacctggccacgaagatggggtgaccatctccggacttgaacctgatcacaaatacaaaatgaacctctatggttttcatggcggacaaagagtgggacctatatcagtgatcggggtcacagctgctgaggaagaaacaccggcacccacggagcctagcactgaggcgcctgagccaccagaggaaccacttctaggcgagctgactgtgacgggcagcagccctgactctcttagtctgtcttggacgattccacagggtcggtttgattctttcacagtgcagtataaggatagagacgggcgaccccaggtggtgagagtgagaggcgaagaatcggaagtgacagtcggcggactggagccgggttgtaagtataagatgcacttatacggtttacatgagggccagcgggtgggccctgtgtcggccgtgggggtgaccgttccgaccatgacaccagagccaccaattaaacctcgcctcggcgagctaactgtaacggacgccacgcctgattctctctcgttatcttggatggtgcctgaaggacagtttgaccacttcctcgtccagtatagaaacggagacgggcagccaaaggcagtgagagtgcctggacatgaggacggcgtaactatcagtggcctcgaacccgaccacaagtataagatgaatctgtacggtttccacggtggccagagagtaggtcctgtatcagccatcggcgtgaccgaggaggaaacaccctcacctactgagccttctacagaggcacctgaggccccagaggagccacttctcggcgagttaacagtgaccgggtccagccccgacagcctgagtcttagctggacaatcccccagggccgtttcgactccttcacagtgcagtataaagatagagacggtcagccacaagttgtgagggtgcggggagaggagagcgaggtgaccgtgggaggactggaaccaggcaggaaatacaagatgcacctctatggcctgcacgaaggtcagagagtgggtccggtgagcacagtcggtatcacagcaccgcttcccacgcccctacctgtggagcctagattgggtgagctggctgtggccgcagtaacctctgacagcgtgggactgtcgtggaccgttgcccagggtccattcgactcattcttggtgcagtatcgcgatgcccagggccaaccacaagccgtgccggtgagtggagaccttcgtgctgtggccgtgagtggtctggacccagccaggaagtataaatttctacttttcggtctacaaaatgggaaacgacacggaccggtccccgtggaggcgagaaccgctcccgacactaagccgtctccgcgtctgggcgagctgactgtcaccgatgcaactccagacagcgttgggctatcttggacagtccctgagggggaattcgattctttcgtggtgcagtacaaggacaaagatggaaggttacaagtggtgccagtggctgccaatcagcgcgaagtgactgtgcaggggctcgagcccagcagaaagtaccggtttcttttatatggactatccggcaggaaacggctggggcctatctctgccgactccacaaccgccccactcgagaaagagttgccaccccacctcggggagttgactgtcgccgaagaaactagttcatccttgcggttgagttggacggtggcccagggaccattcgattctttcgtagttcaataccgggatacagacgggcagcccagggctgtgccggtggccgcagatcaacgcaccgtgacagttgaagatctggaacccggtaagaagtacaaatttctgttgtacgggcttcttggcggaaagaggttgggacccgtgtcagccctgggaatgaccgcgccagaagaagatacacctgctcccgaattagctcccgaggcacccgaacctcccgaagagcccaggctcggagtgctgaccgtcactgatacgaccccagattccatgcggctttcttggtccgtagcccaagggccttttgactccttcgttgttcagtatgaagatactaatggccagccacaagctctcctggtggacggcgatcaatccaaaatactgatttcagggctggaacctagcaccccctatcgatttctgctttacggcctgcacgaaggcaaacggctaggtcctttatccgctgagggcactacggggctcgcacctgcaggccaaacttcagaggagtcacgtcccaggctgtctcagctgtccgttacagacgtgacaacaagctccctgcggctaaattgggaagccccacctggcgcatttgattccttcctcttacgttttggagttcctagcccctccacgctagagccccaccctcgaccactgctccagcgcgagttaatggtgcctggaactcggcattctgccgtcctccgagacttacgttctgggactctctactccctgacactgtacggattgagagggccacacaaagccgattcaattcagggaaccgcccgaaccttgtcccctgtcttagagtcacctcgagacctgcagttctctgaaataagggaaacctccgcaaaggtcaactggatgcccccaccttccagagccgacagcttcaaggtgtcgtatcagctcgctgatggcggtgaacctcagagcgttcaagtggatgggcaggcaagaacacagaagctccaggggcttataccaggcgcacggtacgaggtgaccgtcgtgtctgtgaggggctttgaggagtctgaaccactgacaggctttctaacaacagtgcccgatggtccaacccagctgagagcacttaacctcactgagggcttcgctgtgctgcattggaaacctcctcaaaacccagttgacacttacgacattcaagtcactgccccaggtgcgccaccacttcaggcagaaactccaggttccgcagtcgactatccgctccacgatttagtgctccacaccaattatactgcaacagtgagaggattacggggtcccaacctgacttcccctgcgagcatcactttcaccacaggtctggaggcgcctagggaccttgaggcgaaggaggtcactccgcgaacagcactgttgacttggacagagccacctgtgagacctgccggttacctcctctcatttcatacgcctggcggtcagacccaggagatcttactaccaggaggcatcacttctcaccaactgcttgggctatttcctagcacctcatataacgccaggttacaggctacatgggggcaaagcctgctgccacccgtcagtacgtccttcacaacaggaggattgcggatcccattcccacgtgattgtggcgaagaaatgcagaatggagccggtgccagcaggacgtcaactatctttttaaatggcaacagagagaggcccctgaatgtcttctgtgacatggaaaccgatggtgggggatggctggtgttccaaaggcgcatggacggccaaaccgacttctggcgagactgggaagactatgcacatggtttcgggaatatttccggcgaattctggcttgggaatgaggcactccacagcttgacacaggctggtgactatagtatgcgtgtagacctccgagccggtgatgaggctgtatttgcacagtacgattccttccacgtggacagcgcagcagagtactatcgcctacacttagagggatatcatggaactgccggtgatagtatgagctatcattccgggtccgtgtttagcgcccgagatcgggatccaaacagcctgcttattagttgcgccgtttcttatcggggagcctggtggtatagaaactgccattacgctaacctgaacgggctctatggctctaccgtagatcatcagggtgtgtcttggtatcactggaagggattcgagttcagcgttcccttcacggagatgaagctgagaccgagaaactttcgttcacccgcaggaggcggtta

SEQ ID NO: 243726 - DNA, 27 bp, synthetic construct
  misc_feature 1..27: note = Description of Artificial Sequence: Synthetic coding sequence
  source 1..27: mol_type = other DNA
atgatgcccgcacaatacgccttgtag

SEQ ID NO: 243727 - DNA, 6842 bp, synthetic construct
  misc_feature 1..6842: note = Description of Artificial Sequence: Synthetic coding sequence
  source 1..6842: mol_type = other DNA
atgatgcccgctcagtatgctctcacctcaagtctagtgttactcgtgctgcttagtacggcaagagccggtcctttctcatcaagatccaacgtgacactgcccgctccccgtccgcctccacagcccggaggtcatactgttggggcaggagtgggctccccctcgagccaactctacgagcacacagtagagggaggcgagaagcaggtagtctttacccatcgcatcaatctcccacctagtactggatgcggttgtccacccggaaccgagccaccagtattggcttcagaggtccaggctctccgagtgcgattggaaatcctggaagagctggtgaaggggctgaaagaacagtgtaccgggggttgttgccctgcatccgcccaggccggtacgggacaaaccgacgtcagaacactgtgcagcctgcatggggtgtttgacctctctagatgtacttgtagctgcgaaccagggtgggggggacctacatgctcggatcctactgacgcggaaattccaccgtcgagtccacccagtgcgtcgggaagctgtcctgacgattgcaatgatcagggcagatgcgtgcgcggtagatgcgtatgcttccccggatacaccggcccttcctgtgggtggccatcttgccccggagactgtcaggggcgtgggaggtgtgtgcagggcgtatgtgtgtgccgcgctggatttagtgggccagactgctcacagaggtcttgtccaagaggctgctcacagcgcggaaggtgtgaagggggtaggtgtgtttgtgacccaggttacacaggagacgattgcggaatgcgatcctgtcccagaggctgctctcagcgcggaaggtgtgaaaatggtcggtgcgtgtgcaacccaggatacaccggtgaggactgcggagtgcgcagctgcccccgaggctgctctcagcgtggcagatgtaaggacgggaggtgtgtgtgtgacccaggctacactggggaagactgcggaacaaggtcatgtccctgggactgtggggaggggggtcggtgtgtggacgggcgatgtgtttgttggcctggatacaccggagaggactgtagcactcgtacctgcccaagagactgccgtggtaggggccgttgcgaagacggcgagtgcatatgtgacacaggctactccggtgatgattgtggtgtgaggagctgcccgggagattgcaatcaacgagggcgatgtgaggacggtcggtgcgtctgttggcctggctatacaggcactgactgtggctcccgcgcttgccccagagattgtcggggacgcggtcggtgtgagaacggggtatgcgtttgcaacgccggttacagtggggaggactgcggggtgaggagctgtccgggagattgcaggggccgaggcaggtgcgagagcggtcgctgtatgtgctggcccggatacactgggcgtgattgtggaacgagagcctgccctggggattgtcggggacgtggacgatgcgtggatggcaggtgcgtgtgtaaccccggttttacaggcgaagattgcggttcccggagatgtcctggtgactgtaggggccatggattgtgcgaagatggggtgtgcgtgtgcgacgcaggctattccggggaagattgctctactcggtcgtgcccgggaggttgccggggacgcggacagtgtctcgacgggcgttgtgtgtgtgaggacggctatagtggagaagattgcggcgtgcgccagtgcccgaatgattgctcacagcacggagtgtgtcaggacggggtctgcatatgctgggagggctatgtgtctgaagattgttctataagaacttgtccaagtaactgccatggccgaggcaggtgcgaagaaggcaggtgtctgtgcgaccccggttacactgggccaacgtgtgcaacaaggatgtgcccagctgactgtcgcggtaggggtcggtgcgtccagggagtgtgtctctgccacgtcggttatggaggcgaggactgtggccaggaggaacccccagcaagcgcttgccctgggggatgtggacctcgtgaactgtgtagggccggacagtgtgtgtgcgttgaaggtttccgaggcccagattgtgctatacagacttgtcccggtgactgcagaggacgcggtgagtgccacgatggctcatgcgtctgcaaggatggctacgccggagaagactgcggtgaggaagtccccacaattgaagggatgcggatgcatcttctcgaagagaccacagtccggacggagtggacacccgcaccaggaccagtagatgcttacgagattcagtttattccaacaacagaaggcgcttcacctcctttcactgcaagagtgccctctagtgcatcagcctatgaccaaaggggtttggcgcctgggcaggaataccaggtcaccgtacgcgctttaaggggaacatcctggggcttaccagcttccaagacgatcactacgatgatcgacggtccacaggatctgcgcgtagtcgctgttacacctactaccttagagctcgggtggctgaggcctcaagccgaggttgacaggtttgtagtgtcctacgtctcagctggaaaccagcgcgtgcgcttagaagtgcctcctgaggccgatggcactctactgaccgacttgatgcccggtgtggagtatgtggtaactgtcaccgccgaacggggtagggccgtttcttaccccgctagcgtaagggccaacaccggtagtagccctctgggtttgctaggaaccacagacgaaccccctccaagtggaccatccacaacccaaggagcgcaagcaccactcctgcagcagcgtccccaggagctcggcgagcttcgggtgctagggagagacgagactgggcgactcagagttgtgtggaccgcccagccggatacctttgcttatttccagctgcgcatgcgagtgccagaaggacccggagcacacgaggaggtgctgccaggcgatgtgagacaggccctggtgccacctccccctccaggtactccatacgagttgtccctccatggagttccgccaggaggcaagcccagcgaccctattatttatcagggaattatggacaaagatgaagaaaagccgggaaagtcatcagggccaccgagactcggggagctaactgtgacagacagaacttccgattctctgcttctcaggtggactgtcccagagggcgaattcgactccttcgtgattcaatacaaagaccgcgatggccagccacaggtcgtccctgtggaaggaccacagagatcagctgtaatcacttccttggatcctggtcggaagtataagttcgtcttatacgggttcgttggcaagaagcggcatggtccgctggtcgccgaggccaagatcttacctcaatctgatccgagtcccggaacgcctcctcatctaggtaatttgtgggtgaccgatcccacccctgattctctccatctgagttggaccgttccggagggccagtttgatactttcatggtgcagtatagagacagagacggtaggcctcaggtcgtgccagtcgagggacccgagcggagttttgtagtcagtagcctcgatcccgaccacaaatataggtttactctatttgggatagcaaacaaaaagcgctatggcccactaacagccgacgggactacggcgcctgaacggaaggaagagccccctagacccgagtttttggaacagcctcttctgggcgagcttacggtaactggagtgaccccggattccctcagactttcatggaccgtcgctcaggggccattcgactccttcatggtccagtacaaagacgctcaggggcagccacaggctgtgccagttgccggagatgagaatgaagttaccgtaccgggtctggaccccgatcgcaagtacaaaatgaacctgtatggtttgcggggtcgacagcgcgtgggccctgaatcagtagtggccaaaactgctccacaggaggacgtggacgagacaccttccccgactgaactcggcacagaggcacccgaaagccctgaagaaccgctcttgggagagttaaccgtgaccggatcttcaccagatagtttaagtctcttttggactgtgccccaaggtagtttcgacagctttacagttcagtataaagatcgggatggtcggcctcgggctgtgcgcgtgggcggtaaggaatctgaagtgacagtgggcggtctggaacccggacacaagtacaaaatgcatctgtacggtctgcatgagggacagagggtgggaccagtgtctgcagtgggagtgactgcaccccagcaggaagagacccctccggctactgagagcccactagagcctcgactgggggagctgacagttacagacgtgacgcccaacagcgtgggcctatcttggacggttccagagggacagtttgatagcttcatcgtgcagtataaagacaaagacggacagccccaagtggtccccgtcgccgctgatcagcgagaggtgacagtgtacaatctagagcccgagaggaagtataagatgaatatgtatggcctgcacgatgggcagcggatgggcccactgagcgtggtgatcgtcaccgctcctctgccccctgcccctgctactgaggccagcaagccacccctcgaacccagattgggggagttgacagtgactgatattaccccagatagcgtgggactatcctggacggtgccagagggcgaatttgatagctttgtcgtacagtataaagacagggacggtcagcctcaagtggttcctgtcgccgctgatcagagggaggtgaccattcctgatctggagccaagccgcaagtataaattcctgctatttggtattcaagatggcaagaggcggtcacccgttagtgtcgaagccaagacagtggctcgcggagacgcctcacctggtgcaccccctaggctaggcgaactgtgggtgactgaccctacaccagattcactccgcctgtcgtggacagtgcccgagggtcagtttgacagctttgtggtgcagttcaaggacaaagatgggccacaagtggtgcccgttgaaggccacgaaagatccgtgacagtcacgccgctggacgctggcaggaaataccgtttcctgctgtacgggctgctagggaagaagcggcacggacctttaaccgccgacggaacaaccgaggctcgctcagccatggacgatacaggaacaaagcgtccaccaaaaccaaggctcggcgaggagctccaggtgactacggtcactcagaattctgtaggtctgtcgtggacagttccagaagggcagttcgatagctttgtcgtgcagtataaggatagggatggtcagccccaggtcgtcccagtagagggatctcttcgcgaagtcagcgttccagggcttgatccagctcataggtacaaactcctgctgtatgggctgcaccatgggaagcgggtgggaccaattagtgccgtcgctatcaccgccggacgggaggaaacagagaccgagacgactgcgcctacacctcccgctcctgagccccacctgggtgaactcacagtggaggaggcgacctcccacaccctgcacctgagttggatggttacggagggggagtttgattccttcgaaattcaatataccgatagagatggccaactgcaaatggtaaggatcggcggtgatagaaacgacattacactgagtgggctggaatccgatcacaggtacctggtgaccttgtacgggttttcagatggaaaacatgtgggccctgtgcacgtggaggccctgactgtgccagaagaagaaaagccctctgaaccacctaccgcaacacctgaaccacccatcaagccgagattgggagaactcaccgtcacagacgctacacctgactccctcagcttgtcctggactgtccctgagggacagtttgaccatttcttagtccagtatagaaatggagatggccagcccaaagcagtgcgggttcctggccacgaggaaggtgtaaccatcagcggacttgaaccggatcataagtacaagatgaacctttatgggttccacggtggccagaggatggggcctgttagcgttgtgggggtgacggccgctgaggaggagacaccatccccaacggaacccagcatggaggcccctgagcccgcagaggaacctttgttaggtgagctgaccgtaaccggttcctctccagactctctgagcctgtcctggactgttccccaggggagatttgatagctttactgtccaatataaggacagggacgggagaccacaggtcgtgagggtgggcggtgaggaaagcgaagtaactgtggggggtttagagccgggacgaaagtacaagatgcacctctacggcctccacgaaggacgcagggtgggacccgtcagtgcagtgggcgttaccgcaccggaagaggagtccccagacgcgccactggcgaagttgcgactcggacagatgacagtccgggacatcacctccgatagtctgtccttgtcatggactgtgcccgagggccagtttgatcacttcctggttcaattcaaaaacggggacggacagccaaaagctgtgagggtgcctggtcatgaagacggggtgaccatctcgggcctagagcccgatcacaaatacaaaatgaacttgtacggcttccacggcggacagagagttggacccgtaagcgccgtgggcctgaccta

SEQ ID NO: 243728 - DNA, 2022 bp, synthetic construct
  misc_feature 1..2022: note = Description of Artificial Sequence: Synthetic coding sequence
  source 1..2022: mol_type = other DNA
atgaggctttcctggagtgtggctcaggggcctttcgattcgttcgtggttcagtacgaagacactaacggacagccacaggcccttctggttgacggagaccagtcaaagattctgattagcgggctggagccctctaccccttaccggtttctgctgtacggtctgcatgaggggaagaggctggggcctctttctgcggaaggaactactggccttgcaccagcaggacaaactagcgaagaaagcaggccgaggctgagccaactgagcgtcacggacgtgacgacaagctcgcttaggctgaactgggaggcacccccaggcgcttttgattctttcctgcttcgcttcggagtacctagcccgtccacccttgaacctcaccccagacctctgttgcagagggaacttatggtcccgggaaccagacattccgcagtgctgcgtgaccttcgttctggaactctgtactcactgaccttgtacggcttaaggggccctcacaaagctgactcgattcagggcactgctcgtactctgtcgccagtactcgaaagcccaagagacctacagtttagcgagattcgtgagactagtgcaaaagtcaattggatgccacctccttcacgcgcagattcctttaaggtgagctaccagctggccgacggtggagagcctcagagcgtgcaagtggacggtcaggccaggactcagaagctgcaaggcctcattcctggcgcaagatatgaagtgaccgtggtgtctgtaagaggatttgaggaaagcgaaccactcactgggtttctgacgactgtgccagatgggccaacacagctcagagctcttaacctgacggaaggatttgcggtgttgcactggaagccccctcagaaccccgtcgacacctatgacattcaagttactgccccaggtgcccctcccctgcaagcggagacacctggaagcgcagtcgactaccctttacatgacctggtgctccacacgaattatacagccaccgtgcgaggactccggggacccaacctcacatcaccagcgtccatcacctttaccactgggctggaggctcccagggatctagaagcgaaagaagttaccccaagaacagccctgctgacttggactgaaccacccgtgaggccagcaggctacctattaagtttccacactcccggtggacagacccaggaaatactgctacccggtggcataacaagtcaccagctgctcggcctcttcccatctacctcatacaatgcgaggctgcaggcaatgtgggggcaatcactccttccccctgtgagcacgagcttcacaactggcggtctcagaataccctttcccagggactgcggagaagaaatgcagaacggagccggagcctccagaaccagtactatcttcctcaatggcaaccgagaacggccactgatcgtgttctgtgacatggaaaccgacggtgggggatggctggtcttccagaggcgaatggacgggcagaccgacttttggcgcgactgggaggactacgcacatgggttcggtaacatatcaggagagttctggctcgggaacgaggcacttcacagtctgacgcaggcaggagactacagcatgcgtgtggatctgcgtgcaggagatgaagctgtttttgcacagtacgattcctttcacgtggactccgcagccgaatactacaggcttcatctcgaggggtaccacgggaccgctggagacagcatgtcctaccattcaggaagcgtgtttagcgccagggacagggacccaaattccttgctgatctcctgcgccgtgagctatcgcggagcctggtggtaccgaaattgccactacgccaatctgaacggtctgtacggctcaactgtcgaccaccagggagtctcctggtaccattggaagggatttgagttctccgtgcctttcacagagatgaagctcagacctagaaacttcaggtcaccggcaggcggaggctag

SEQ ID NO: 243729 - DNA, 654 bp, synthetic construct
  misc_feature 1..654: note = Description of Artificial Sequence: Synthetic coding sequence
  source 1..654: mol_type = other DNA
gcacctggcaaagatgaggagatggcgcctgcaagtacggagcccccaaccccagagccccctataaagcctagactggaggagttaacagtgaccgacgccactcccgatagtttatcactctcatggaccgtgcctgagggtcagtttgaccacttcctggtgcagtataagaatggggatgggcaacctaaggccaccagagtgcctgggcatgaagaccgcgtgaccatcagcggcctcgagccagacaacaaatataagatgaacctgtatggcttccacggaggacagcgagttgggcctgtctccgcgattggggtgaccgccgcagaagaggagaccccctccccaaccgagcccagcatggaagcccctgagccgccagaagagccactgttgggagagcttaccgtcaccggaagctcacctgacagcctgagcctgtcctggacagtgccccaaggaagattcgacagctttaccgtgcagtataaagatcgagatggacgccctcaggtcgtacgcgtgggaggcgaggagtctgaggtgacagtggggggtcttgaacccggaagaaagtacaagatgcatttgtacggcttgcatgagggtagaagggtaggtccggtaagcactgttggggtcacctag

SEQ ID NO: 243730 - DNA, 12729 bp, synthetic construct
  misc_feature 1..12729: note = Description of Artificial Sequence: Synthetic coding sequence
  source 1..12729: mol_type = other DNA
atgatgcccgctcagtacgcattaacttccagccttgtattgttggtactgttaagtacggccagggcgggtccatttagcagtagaagcaatgttacactaccagctcctagaccccctccccagccaggcggtcatacggtgggcgcaggcgtggggagcccatccagccagctctacgaacacacagtggagggcggagagaagcaggtggtctttactcaccggatcaatttgcctccaagcacaggatgcggctgcccccctggaacggaacccccagtgctggcgtcagaggtgcaagccttacgagtcaggttggaaattttagaagagctcgttaaaggattgaaggaacagtgcaccgggggatgttgtccagcctctgcacaagctgggactgggcagactgatgtccgaacactttgctccctgcacggagtctttgatctgagcagatgcacttgctcttgtgaaccagggtggggtggcccaacctgttctgatcccactgacgctgaaataccaccaagcagccctccctccgctagcggcagctgtcccgatgattgcaatgaccagggaagatgcgtgcgagggagatgcgtttgtttccctggttatacagggccatcttgcggctggccttcgtgtcctggcgactgccagggccgtggaagatgcgttcagggggtctgtgtctgcagagcaggcttttcagggcctgattgctctcagcggagctgtcctagagggtgttcacagcgcggacggtgcgagggcggaagatgtgtctgtgaccctggctataccggcgatgattgcggcatgaggtcatgccctagagggtgttcccagagggggaggtgtgagaatgggagatgtgtctgcaacccaggatataccggcgaggactgtggcgtcagatcctgtccacgtggatgcagtcaaaggggcagatgcaaggacggccgatgtgtttgcgatcccggatacacaggcgaggattgtggcacgaggtcctgtccctgggattgtggggaaggcggaaggtgcgtggacggccgatgtgtgtgctggcctgggtacaccggggaggactgttccacccgcacctgccccagggattgtcggggtcgcggacgatgcgaagatggagagtgcatctgcgacactggctattccggagacgattgcggcgtaagaagctgtccaggtgattgtaaccagaggggcaggtgcgaagacggcaggtgcgtgtgttggcccggttacaccggaaccgactgtggatcaagggcctgccccagggactgtagggggagaggaaggtgtgagaatggcgtgtgcgtctgtaacgcgggttattccggcgaggactgcggtgtgagaagctgccccggagattgtagggggagaggcaggtgtgaatctggaagatgtatgtgctggcctggatatacaggccgagactgcggaacgcgggcatgccccggagactgccggggacgaggtcggtgcgtggacggtagatgcgtctgtaaccctgggttcaccggcgaggactgcggcagtcgccgttgtcccggagactgccggggacacggtctctgcgaggacggcgtgtgcgtctgcgacgcagggtacagcggggaagactgctctacccggtcctgccctggagggtgcagaggacgcggacagtgcctggacgggaggtgtgtttgcgaagacggatactccggggaggattgtggggtgcgtcagtgccccaacgattgttcccagcacggagtctgtcaggacggcgtctgcatctgctgggagggttatgtcagcgaagactgcagcatcaggacttgtccatccaactgtcatgggagaggccgttgcgaagaagggaggtgcctctgtgaccctggatacactggccctacatgtgccacccgaatgtgcccagccgactgccgcggacgtggcaggtgtgtgcagggtgtgtgcctgtgtcacgtaggctacgggggagaagactgtggccaggaagaaccacccgcatcagcatgccctggcggatgcggcccacgggagttatgtcgcgctgggcaatgcgtgtgcgtggaaggtttcaggggaccagactgtgcaatacagacatgcccaggcgactgtcgcggtagaggggagtgtcacgacggcagttgtgtctgcaaggacggttatgctggcgaagactgtggagaggaggtgcccaccatcgaggggatgcgcatgcacctcctggaagaaacaactgtgcgaaccgaatggactcctgctcctggtccggtggatgcctacgagatacagttcattcctaccacagagggtgcatcccctccatttactgcaagagtccctagttctgcgagtgcatatgaccagaggggccttgcacccggacaggagtatcaggtgaccgtacgtgcactgagagggacctcctgggggctgccagcaagcaaaacaataacaactatgatcgatggaccccaggaccttcgagtggtagctgtgacacctactactctggaactgggttggctgagacctcaggcggaagttgaccggttcgtggtgtcttacgtgtccgctgggaaccagcgcgtccgcctggaggtccctccagaggctgatggcacactgttaactgatctgatgcctggcgtggagtacgttgtgaccgtgactgctgagagaggcagagctgtgagctacccagcaagtgtgagagcgaataccggcagttcaccactgggtttactaggcacaaccgacgagccgccaccaagcggcccttctacaacccaaggggcacaagccccacttttgcagcagcggcctcaagagctgggagaattacgcgtcctgggtcgtgatgagaccggccgattgcgtgtggtgtggacagcacagcctgacacgttcgcctattttcagctgcggatgcgggtgccagaaggtcctggggctcacgaggaagtgttaccgggagatgtcagacaggccttggtgccccctcctccgccaggaacaccgtacgagctcagcctgcacggggtgcctccgggtggcaagccatctgaccccatcatttaccaggggataatggacaaggatgaggaaaagcctgggaagtccagcggccctccccgtcttggcgaactcacagtgactgacaggaccagtgattcattgctgttgagatggacggtccccgaaggtgaattcgatagctttgtgatacagtacaaagatcgggacggccaaccccaggtggtacccgtagagggacctcaaagatccgccgtgatcacttccctagacccaggaaggaaatacaaattcgtgctgtatggcttcgtcggcaagaaaagacacggccctttggtcgcggaggctaagatcctacctcaaagcgatcccagtcccggaactcctcccagacttgggaatctgtgggtcaccgatcccacacctgattccctccatctgagctggacagttcccgaaggacaatttgacaccttcatggttcagtaccgcgatcgagatggaaggcctcaggtcgtcccggtggaaggacctgaacggtctttcgtcgtcagttcgttggatccagatcataaatacaggttcactctgttcggtatcgctaacaagaagaggtatggtcctctgacggcagacgggaccaccgcccctgagcgaaaagaggagcctcctcggcctgagtttctagagcagcccttactaggcgaacttacagtcacaggtgttacaccagacagcttaagactcagttggactgtggctcagggcccattcgacagcttcatggtacaatacaaggacgcccagggtcaaccgcaggccgtccccgtcgcaggggatgaaaacgaagtcacggtgcctggactggaccctgacagaaagtacaaaatgaacctctacgggctgcgcggaaggcagagagtcggccctgaatctgtggttgccaaaaccgccccacaggaagatgtggacgagacaccatcacctactgagctgggaaccgaggccccagaaagtcccgaggagccgctactgggggagctcactgtgactggcagctctcccgattctctgagcttgttttggaccgtcccacagggaagctttgattcatttaccgtgcaatataaagaccgcgatggccgtcccagagcagttagagttgggggaaaagagtctgaagtgacagttggtgggctggaacctgggcacaaatacaagatgcatttatatggtctccacgaaggccaacgcgtgggtccagtgtccgctgtgggcgtgactgcccctcagcaggaggagacaccccctgccaccgagagtccactggagcctaggctgggagagctgaccgtcactgatgtgacccctaattccgtgggcttgtcttggacggtgccagagggccagtttgattcctttattgtacaatacaaagacaaagacggccagcctcaggtcgtgccagtggcagcagaccagagggaagttaccgtgtataatttggagcctgagagaaaatataaaatgaacatgtatggactgcacgacgggcaacggatggggccattatccgtggtcatagtgaccgctcctctccctccagccccagctactgaggcctccaaaccgcctctggaacccaggttgggtgaattgacggtgaccgacatcactcccgactcggtgggactcagctggaccgtgcctgaaggtgagttcgacagtttcgtcgttcagtataaggaccgggacgggcagccgcaggtggtgcctgtggccgctgatcagcgggaagtgacgattcccgatctggagccttccaggaaatacaagttcctcctctttggcatccaggacgggaaaagacggagcccagtcagcgtcgaggccaaaactgtcgccagaggggatgccagccctggcgcacctccacgtctgggtgaactttgggtgactgatcccactcccgacagcttgagactttcttggactgttcctgaaggccaatttgactcttttgtggtgcaattcaaggacaaagacggaccacaagtcgtgcccgtggaaggtcacgagcgttccgtaaccgtgaccccattggatgcaggcaggaagtatcgcttccttctgtatggacttctgggtaaaaaacggcatgggccattgaccgcagatgggaccactgaagccagaagcgctatggacgacaccgggacgaaaaggccccctaaaccacggctgggggaggaactgcaagtaacaactgtcactcagaatagtgttggacttagctggacggtccctgagggtcagtttgatagctttgtggttcaatacaaggaccgggacgggcaaccccaagtagtgccggtggagggctcattacgagaagtatcggtacccggactcgaccctgcccatcgttataaattgctcctctacggtctgcatcatggtaaaagggtcgggccaatcagcgccgtggctatcaccgcgggtagagaagagacagagaccgaaacaactgctccgacacctcccgctcccgagcctcatctgggagagctgaccgtggaagaggccacctctcacactctgcacctgagctggatggtgaccgaaggcgagttcgacagttttgagatacagtataccgaccgcgatggtcagctccagatggtgaggatcgggggtgataggaacgacatcaccctcagcggccttgagagtgatcaccgatacctcgtaacactctacggcttttctgacggcaagcacgtgggacccgtacatgtggaagctctcaccgtccctgaagaggaaaagcccagtgaacctcccacagccacacctgagccaccgatcaaacccaggctaggggaattgacagtcacagacgcgactccagactctctgtccttgtcttggactgtgcccgaaggacagttcgatcacttcctagtgcagtatagaaatggcgacggacagcctaaagcagtcagggtgcccggacacgaggagggcgtcacaatcagcggcctagaaccggaccacaaatataaaatgaatctgtacggatttcatgggggacaacggatggggccagtgagtgtcgtcggcgtgacagccgcagaggaggagacccctagcccgacagaaccaagtatggaggcacccgagcctgctgaagagccgctgctaggagaattaacggtgactggttccagccctgattctctaagtctctcttggaccgtgccacaggggaggtttgactcctttacagtgcaatataaggacagggacggcagaccacaggtggtccgggttgggggtgaggaaagcgaggttacagttgggggactagagcccggaaggaaatacaaaatgcacttgtatggcctgcacgagggaagacgcgtcggccctgtctctgctgtgggcgtgaccgcaccggaagaggagtccccagacgcccctctcgcaaagctgagattggggcagatgacagtgcgcgatatcacatccgactcgttgagcttatcatggaccgtccccgaaggccagtttgaccatttcttagtgcagttcaagaatggcgatggacaaccgaaggctgtccgcgtcccaggtcatgaggacggggtgacaatcagcggccttgaacctgaccataaatacaagatgaatctgtatggctttcacggcggacagcgggtgggacccgtttcagcagtgggtctgaccgcacccggtaaggacgaggagatggccccagcctccacagaacccccaaccccggaacctccgatcaagccccgtctcgaggaactgaccgtcaccgacgcgactcccgattctctgagtctgtcttggacggtgcctgagggtcagtttgatcacttcctcgtccagtataagaacggggacgggcagcctaaagccaccagggttccgggacatgaggaccgcgtgactatcagcgggctggagcccgataacaagtacaaaatgaatctgtatgggtttcacggtggtcaaagggtggggcctgtgtcagccatcggagttaccgccgctgaggaagagacaccctccccaacggaaccttcgatggaggctcccgaaccaccagaggagcccctgctcggcgagctgaccgtgacagggtcatcgcccgattctctaagccttagctggactgtgcctcaaggacgttttgattccttcactgtgcagtataaggatcgcgacggcagaccccaggtcgtgcgggtcggcggagaggagagcgaggtgacagttgggggtttggagcccggtcggaaatacaaaatgcacctctacgggctgcacgagggtcgtagggtgggcccagttagcactgtgggtgtcacagcacctcaggaagatgtggacgaaacaccgagtccaaccgaaccgggtacggaagcgcctgaaccaccagaggagcctcttctaggcgaactcactgtcacaggctccagtccggactcactcagcctgagttggacagttccccaaggccgattcgactcatttaccgtccagtataaggacagagatgggagacctcaggccgtgcgagtgggtgggcaggaatcaaaagtgacagtgcgaggactagagccgggacgcaagtacaaaatgcacctgtacgggcttcacgaaggacggagactcgggccagtaagcgcagtaggcgtcactgaggatgaggccgagacgacacaggccgtgccgacaatgacccccgagcccccaatcaagcccagactgggtgaattaacaatgacagacgcaacccctgacagtttaagcctgagctggactgtgcccgagggccagtttgatcatttcttggtgcaatatcggaatggcgacgggcaacctaaagcggtcagagtgcctggccacgaggatggcgttacgatctctggactcgagcctgatcacaaatacaagatgaatctgtatggattccacggaggtcagagggtggggcctatctcagtgatcggtgtaactgcagccgaagaagaaactccgagcccaactgagctgtccactgaggcgcctgagcctcccgaggagcctttgctcggggagttgacggtgacagggtccagccctgattcattgtcattgtcctggactatcccccaagggcattttgatagtttcacagtgcagtacaaagatagagacggtcgccctcaagtgatgagagtccgaggtgaagaatcagaggtgaccgtgggagggttggaacccggacgcaaatataagatgcatctgtatgggctccatgaaggacgacgggtgggtccagtatccacagtgggagtgactgaagatgaggccgagaccacacaagcggttcctactacaaccccagagcccccaaacaaacctcgccttggcgaattgacagtgactgatgctacgcccgactcactctctctgagctggatggtgcctgagggccaattcgaccactttctcgtacagtatagaaatggagacggccagcctaaggtggtgcgtgtgccaggacatgaggatggagttacaatcagtgggctcgaaccggaccacaagtacaaaatgaacctctacgggttccacgggggtcagagagttggtccaatcagcgtcattggggtaaccgccgctgaagaggagacacctgcaccaacagaaccatccactgaggcccctgaaccgcctgaggaacctttgctgggtgaattgaccgttacagggtcttctcccgactctctctccctcagttggaccatcccgcaaggcaggttcgattcattcacagtccagtacaaagaccgcgacggtagacctcaggtggttcgggtgagaggagaagaatcggaggttactgtgggcggactcgaacctgggtgtaagtacaagatgcatctctacggcctgcacgagggtcagcgggtaggacccgtttccgccgtgggggtgacagctcctaaggatgaagccgaaacaacacaggccgtgcctaccatgacacccgaaccgcctataaaaccgcgacttggagagctcacagtgaccgatgcgacgccagactccctgtctttaagctggatggtgcccgagggccagtttgaccatttcttagtccagtatcgaaacggcgatggtcaacccaaagccgtgcgcgtcccaggtcacgaggatggcgtgacaatttccgggctggagcctgaccacaagtacaaaatgaacctgtacgggtttcacggtggccagagggtaggacctgtttcagcaatcggcgttaccgaggaagagaccccctcccccactgagcctagtaccgaggcacccgaagccccagaagagccactgctgggtgagctgaccgtgacagggtcatctcccgattctctttccctgtcttggacggtcccccaaggccgattcgacagttttactgtgcaatacaaggatcgggacgggcagccccaagttgtcagagtgcgcggagaggagtcagaagtcactgtggggggattggaacctggaaggaaatataagatgcatctgtacggactacatgaggggcagagagtaggacccgtgtcaacggtgggtatcacggcccctctcccaaccccactcccggtagagcctcggctgggggagctggccgtcgccgctgtgacttccgacagcgtaggtctcagttggaccgtggcccagggcccttttgatagcttccttgtacagtacagggatgcccagggacagccacaagccgtgccagtgtcaggagatctgcgcgctgtagctgtgtctggcctggatcctgctcgcaaatacaagtttttactgtttggtctacagaacggcaaacgccatggaccagtcccagtcgaggctcgcaccgctcctgataccaaaccgtccccaaggctcggggaactgaccgtcacagacgcaacccccgattccgtgggcctcagttggactgtgccagagggggagtttgatagcttcgttgtccagtataaagataaggatggcagactacaagttgtgccagtggctgccaaccaacgtgaagttactgtccagggtctggaacccagccgcaagtatcgatttctgttatatggtctgtcaggcagaaaacgtctgggacccataagcgccgactccactacggcaccgctggagaaggaactgcctcctcaccttggagagctcacagttgccgaggagacaagttccagcctgaggctgtcctggacagtggctcagggtcccttcgattcatttgtggtccagtacagggacaccgatggacaacctcgggctgtgcctgtggccgcagatcaacgcacagtgacagtagaagacctggagcccggaaagaagtacaagttcctgctctatggcctgctggggggaaagcggctaggtcctgtcagcgctctgggaatgacagccccagaggaagacactccggcaccagagctggctccagaagctcccgaacctccggaggaacctaggctgggcgtgcttaccgtcactgacaccacacctgactccatgagactctcttggtctgtggcgcaagggccattcgacagcttcgtggtacagtatgaggatactaatgggcagccccaggccctgttggtagacggagaccaaagtaaaatcctgatttccggactcgagccttcaacgccttatcgctttctcctctatgggctgcatgagggcaagcgcctggggcctctcagtgccgaagggacaacagggttggcaccggcaggtcagacctcagaggaatcacgtccccgtctgagccagctgtctgtgaccgacgtgaccacctcgtcattgaggctgaattgggaggcaccccctggggcattcgattcctttctcctccgcttcggtgtgccttccccctcaacactggaaccacaccctagacccctgctgcagagggagctcatggtgccaggaaccaggcacagcgctgtgttgcgagatcttaggtctggcacgttgtatagtttgaccctctatggccttagaggtccccacaaagccgattcgattcagggcaccgcaagaactctgtcccccgtcctggagagccctcgcgacctgcagttcagcgaaattagagagacaagcgccaaagtaaattggatgcctccaccctccagagctgactcttttaaagtctcgtaccagcttgccgatggaggggaacctcagagcgtgcaagtggatgggcaagcacgcacgcaaaagttgcagggactgattccaggtgcgcgttatgaggtcacagtggtctcggtgcggggttttgaggaaagcgagcccctgaccggatttttgaccacggtccctgacggaccgacgcagctgcgagccctgaacctgacggaagggttcgctgtactccattggaagccacctcagaatccagtggatacgtatgatattcaggtcacagctcccggtgccccacccctccaggccgagactccaggaagtgcagtcgactatcccctgcatgatttagtccttcatacaaactatactgccacggtcaggggtcttagaggcccaaatttaaccagtccagcctccattacctttaccacagggttagaagctcccagagacctagaggctaaagaagtcacccctagaactgcattgctcacctggactgaaccacccgtgcgaccagcagggtacctgctgtccttccacaccccaggaggtcagacccaagagatactcctgcctggcggaattacctcccaccaactgctggggctcttcccttcaacttcctacaatgcgaggctgcaggccatgtggggacagtctcttctcccgcctgtgtccacttcgttcaccacgggcggattgcggattccgtttcctagggactgtggagaggagatgcagaacggtgctggagcgtcccgaacatcaaccatcttccttaatgggaaccgggaacgtccgctaattgtgttctgcgatatggagaccgacggcggagggtggctcgttttccagaggcgcatggatggccagacggacttttggcgagactgggaggattatgctcatgggttcggaaacatctcaggagagttctggctcggcaacgaggccctccactccttgactcaggcgggagactattctatgcgcgtagatctcagagctggtgacgaggctgttttcgcccagtacgattcattccacgtggactctgcagcggaatattaccgactgcacctggagggataccacgggaccgctggagattctatgagctatcacagcggttcagtcttcagtgcgcgtgatagagacccaaacagtctcctgatttcctgcgctgtctcctatagaggcgcttggtggtatcgcaattgccattatgctaatctgaacggactctacgggtccactgtggatcaccagggcgttagttggtaccactggaaaggattcgaatttagtgtacctttcaccgaaatgaagctgagaccacgcaacttccggtcgcctgccggaggcggttat

SEQ ID NO: 243731 - DNA, 12729 bp, synthetic construct
  misc_feature 1..12729: note = Description of Artificial Sequence: Synthetic coding sequence
  source 1..12729: mol_type = other DNA
atgatgcctgctcagtatgcccttacgagtagccttgtactcctcgtattactctctacagcaagggccggaccattttcttcgcggagtaatgtaacactgcccgcaccgaggccgccaccccaaccaggcggtcacacagtcggggctggcgtgggctccccctcttcccagctgtacgagcacaccgtggaaggaggcgagaaacaggtggtgttcacgcaccgtattaacttgccgccttccactggctgtggctgtccacccggaacggagcctcccgttctcgccagcgaggttcaagccctgagggtccgtctggagatactggaggagctcgttaagggactaaaggaacagtgcactgggggatgctgccctgcctccgcccaggctggaactggccagaccgatgtacgcacactttgcagtctacacggggtgtttgacttgtcgcgatgtacttgttcctgtgagcccggatgggggggtccaacttgttcagatcctactgatgctgaaatccctccatcatccccgccttcagcctctggttcgtgtcccgacgattgcaatgaccaaggcaggtgcgttaggggcagatgtgtatgttttcccggatataccggtccttcttgcgggtggccaagttgtccgggtgattgtcagggaagagggaggtgtgtccaaggggtgtgcgtctgtcgagcgggattctcaggcccagactgttctcagcgctcgtgtccaagaggctgctcccaaagaggcaggtgcgagggcggaaggtgcgtatgcgatcctgggtacacaggcgacgactgcggcatgagatcttgccctagaggatgttcccaaaggggtcggtgcgaaaacgggcgttgtgtctgtaacccaggctatgctggcgaggactgcggggtgagaagctgtccacgtggctgttcacagcgaggtagatgtaaggacggcagatgcgtgtgtgatcccggttataccggagaggattgcggtacgcgctcctgtccttgggattgcggagaaggcggacggtgtgtggatggaaggtgtgtttgctggcccggttatactggtgaggattgctccaccagaacctgtccaagagattgtcgcggaaggggcaggtgcgaggacggcgagtgtatctgtgatactggatactctggggacgactgcggcgtcagatcctgtccaggagattgcaatcaaagagggcgatgtgaagacgggaggtgcgtgtgttggcccggttatacaggaactgactgtggatcccgggcatgcccgagggattgtagggggagaggcagatgcgaaaatggtgtgtgtgtgtgtaatgctggatattcgggggaggattgtggggttcgcagttgtcccggtgattgccgaggacggggtcgatgcgagtcaggtcgctgcatgtgttggcccggatatactggacgggattgtggtacaagagcatgtccaggagattgcagaggccgtggtcggtgtgttgatggtcgttgtgtttgtaacccaggcttcaccggcgaagactgtggcagcagacgctgtccaggggactgtagaggccacggactgtgtgaggacggcgtctgcgtctgcgatgcgggttattctggcgaggactgcagcacgcggtcgtgccccggaggatgtcggggacgcggacagtgtctggacggcaggtgcgtctgcgaggacgggtatagcggcgaggattgtggcgtccgtcagtgtcccaatgattgctcacagcatggagtttgccaggatggcgtctgcatttgttgggagggctatgtctcagaagactgttctataagaacctgtccttcaaactgtcacggcagggggcgatgcgaggaagggagatgcttgtgcgaccccggatacaccggtcctacgtgcgccactaggatgtgccctgccgattgcagaggcaggggcagatgcgtgcaaggtgtttgtctctgccatgtggggtatggcggtgaagattgtgggcaggaggagccacccgcaagcgcctgtcctggagggtgcggccctagggaattgtgccgagctggacagtgcgtttgcgttgagggatttcggggacccgattgcgcgatacaaacatgtccaggcgattgtagaggcagaggagagtgtcacgatggcagttgtgtgtgcaaagatgggtatgccggagaagactgtggtgaggaggtcccaaccatcgaaggtatgaggatgcacctgttagaagaaactactgtgagaactgaatggaccccagcccctggtcctgtggacgcctacgaaattcaatttattccaacaactgagggggctagcccaccctttaccgcacgcgtcccctcaagtgcgagcgcctacgaccagcggggtctggcaccaggccaggagtaccaggtcactgtgcgcgcactgcgaggcacctcctggggcctgccagcctctaagactatcacaaccatgatagacggtcctcaggacctacgggtggtggctgtgactcctacaacactggaattgggatggctgcggccacaagcggaggtggatcgattcgtcgtgagctatgtctctgccggaaaccagcgagtgcgcctggaggtaccaccagaagcagatggcaccctgctgaccgatttgatgccaggagtggagtacgtggtcactgtcacggccgaacgcggaagggccgtgagctacccagccagcgtgagagcaaacacaggaagctctcctcttggactgcttggcacaactgatgagccccctcccagcggcccaagcacaacccagggtgcccaggctcctttattgcagcagaggccccaggagctgggggaactgcgcgttctgggcagagacgagacaggacgattgagggtggtctggacggctcaaccagatacttttgcatactttcagctcagaatgcgcgttcccgaaggccctggcgcacacgaggaggtcctcccaggggacgtgcgtcaagccctggttcctcctcccccacccggtacaccatacgagctcagcttgcacggcgttccaccagggggaaaaccgagtgatcctatcatctaccaaggaattatggacaaggacgaagaaaagccgggtaaatcttctggtccacctcgtctaggggaactcacggtgacagacagaacatcagactcactgctcttgcggtggactgtgccagagggagagttcgatagtttcgttatccagtataaggatcgtgatgggcagccccaggtagtcccagttgagggtcctcagagaagtgcagtgatcacttcccttgatcctggcagaaaatataagtttgttctctacggattcgttggcaagaagagacacggtcccttggtggccgaagctaaaatcctgcctcagtctgacccatcccccggaacaccccctcacctgggaaatctgtgggtgacggatcccaccccagacagcttacacctgtcctggactgtcccggagggccagttcgatactttcatggtgcagtacagagacagggacggccgacctcaggttgttcccgtagaaggacccgagaggtctttcgtggtgtcttccctggaccctgatcacaagtatcgcttcaccttgtttggaatagcaaataaaaagagatatggacccctcactgcagatggcaccacagcccctgagcggaaggaggaaccccctagaccagaatttctggaacagcccctgttgggggagctgaccgtgaccggagtgaccccggactctctccgactgagctggacagtagctcagggcccatttgattcgtttatggtccagtataaggacgcccaggggcagcctcaagccgttcctgtcgcaggcgacgaaaacgaggtcacagtacctggcctggatcctgaccgaaagtacaagatgaatctttacggcttacgtggccgacagagagttggtccggagagcgtggttgccaaaacggctccacaagaagacgtggacgagactcccagccccactgaactgggcacagaagctccagaatctcctgaggagcccctccttggggaactcacagttaccgggtcctctcccgacagcttaagtctgttttggaccgttcctcagggctcttttgacagcttcacagtgcagtataaggaccgagatggacgtccacgtgcggttcgggtcggaggcaaagagagtgaggtgacggtcggcggtttggagcccggacacaagtacaaaatgcacctctacgggttacacgagggccaaagagtggggcctgtaagtgccgtgggggttactgcgccacagcaggaagagacccctcctgccaccgagtcaccactggagcccagactgggggagctgactgtgacagacgtgactccgaacagcgtcgggcttagttggactgtgccggagggccagtttgattcttttattgtgcagtataaagacaaagatgggcagccccaggtagtgccagtagccgctgaccagcgggaagtgaccgtctataacctggaaccagagagaaaatacaaaatgaacatgtacgggctccacgatggtcagagaatggggccattgtcagttgtcattgtgaccgcgccactacctcctgcacccgctacagaagcatccaaaccacccctggagcctagactcggggagctgacagtgaccgacatcactcccgattctgtgggtttgtcctggactgttccagagggggaattcgactctttcgtggtgcagtataaagaccgggacgggcaaccgcaagtggtgccagtggcagccgatcagagagaagtgaccattcccgatctcgagccatccagaaagtacaagtttctcttattcgggatccaggatggaaagcggcgaagtcctgtgtctgtcgaagcgaagaccgtcgcacgcggtgacgctagcccaggagcacccccacgattgggggaactttgggtgacggatcctacacccgactcactgcgactcagttggactgtgccggaaggccagttcgacagtttcgtggtacagttcaaggacaaggatggaccccaggtggtgcccgtcgaaggacacgaaaggagtgtcaccgtgactccactggatgcgggtagaaagtaccggttcttgctttatggattacttggtaaaaaacgccacggccctctgacagcagacggcaccactgaggccagatcagccatggacgacacggggacaaaacgaccacccaaaccacgcctgggggaggaacttcaggtgacaacagttacccaaaacagcgtgggtttgagctggactgttcctgaagggcagtttgacagttttgtggtacagtacaaggaccgtgatggccagccccaagtcgtgccagtggagggtagcctcagagaggttagcgtccctgggctggacccagcccaccggtacaaactgttactgtatggtctgcaccacggcaaaagggttggcccaatttctgcagtcgccataaccgcaggacgagaagagacagagactgagacaaccgcacctacacctccagcccctgaaccacaccttggagagctgaccgtggaggaggccacatcacatactctgcacctgtcttggatggtgaccgagggggaatttgatagcttcgaaattcaatacaccgacagggacgggcagttacagatggtacggataggtggcgacagaaatgatataacgctctcaggccttgaaagtgaccaccggtacctcgtaactctatacggtttctctgatggcaaacatgtgggcccagtacatgtcgaagcactcaccgtgcccgaggaggaaaagccatccgaacccccaaccgccactccagagccaccaattaagccaagacttggtgagctaacggtaacagacgccactcccgactcgctgtccctcagctggacagtcccagaaggccagtttgatcattttcttgtgcagtaccggaatggcgacggccagcccaaggccgtcagggtacccggacacgaggaaggggtgacaatctcgggccttgagcccgaccacaaatataaaatgaatctgtacggcttccacgggggacaacggatgggacccgtgtcagtcgtaggcgtgaccgccgcagaggaagaaacgcccagcccaaccgagcctagcatggaagctcctgaacctgcggaagaaccactccttggagaactgaccgtgactgggtcatcaccagactcactctccctcagttggaccgtgccacaaggtagatttgatagctttaccgtgcagtacaaggatagagatgggagacctcaggtcgtgcgagtgggcggagaggagtcagaggtcacggtcgggggactggaaccagggcgaaagtataaaatgcacctgtacggtttgcatgaaggaagacgcgttgggcctgttagcgccgtgggagtgacagccccagaagaagagtctccagacgccccactcgctaaactccgactgggccagatgactgtccgtgatataacctccgattccctcagtctcagttggacagtgcccgaaggacagtttgaccacttcctggtgcagttcaagaatggggacggccagcctaaggccgtaagagtgccagggcacgaagatggcgtgactatcagtggactagaacctgatcataagtacaaaatgaatttatacggtttccatgggggacagcgggtaggacctgtgagtgccgtggggttaaccgcgccaggtaaagacgaggagatggctcccgcaagtaccgagcctcctactccagagcctcctatcaagcccaggctggaggagctgactgtgaccgacgcaacaccagactctctgtctctgtcctggactgtgcccgaaggtcagttcgaccattttctggttcaatacaaaaacggggatggacagcctaaagctacgagggtgccaggccacgaggatcgagtgacaattagcgggttggaaccagataacaagtacaagatgaatctgtatggattccacgggggtcaaagggttggcccagtctccgccattggggtgactgcagctgaggaggagaccccatccccaacggagccgagcatggaggctcccgaaccccctgaagaacccctattgggagagctgacagttaccggatcaagccctgattctttatccctctcgtggactgtgcctcaaggcaggttcgatagctttacagtccagtataaggaccgcgacggccgaccacaggtggtgagagttggcggagaagaaagtgaagtcaccgtgggtggcctggagcctgggcgtaaatataaaatgcacctgtacggcctgcacgagggcagacgggtcggccctgtgtccactgtgggggtcaccgcaccacaggaagacgtagatgaaacaccatcccccaccgagcccggaaccgaagccccagaacccccagaggagccattgttgggcgagcttactgtgaccggcagctctcccgactcactgtctctctcatggacggttccgcaggggcgatttgactctttcacagtacagtataaggaccgtgatggacgcccacaggccgttcgagtggggggtcaggaatcaaaggttaccgtccgagggctggaaccgggaagaaaatataagatgcacctgtatgggctgcacgaaggcagacggctcgggccagtctccgctgtcggcgttactgaggatgaggcagagacaacccaggcagtacctactatgacgcccgaacctcccatcaagcctcgcctaggagagctcactatgacggacgcgactcccgactctctatcattgtcctggacggtgcccgaaggccaattcgaccatttcctggttcagtaccgcaacggggatggccagcccaaagcagtgcgggtgcctggccatgaggatggcgtgaccatcagcggccttgaaccggaccataaatataagatgaacctctatggatttcatgggggtcaacgtgttggcccaataagtgtgatcggggttacagcagccgaagaagagacaccttcgccgaccgagctcagcactgaggcccctgagccgccagaagagccgctcctgggggagctgactgtgaccggctcaagtcccgatagcctatccttgtcatggaccattccacagggtcatttcgacagttttacagttcagtataaggaccgggacggcagaccgcaagtgatgagggtgcgcggtgaggaaagcgaagtgacggttgggggactggagccagggaggaagtacaaaatgcacctgtatggattgcatgagggcagaagggtcggtcccgtgtcaaccgtgggtgtaacagaggacgaggcagaaaccacccaggctgtaccaacaaccaccccagaaccgccaaataagcctcgacttggggagctgactgtcacagacgccacacccgactcccttagccttagctggatggtgcctgaagggcagttcgatcatttcctggtgcagtataggaacggcgatggacagcccaaagtagtgcgcgtcccagggcacgaggacggtgtgacaatcagtgggctcgaacccgaccacaagtacaagatgaatctttatggatttcacggcggacagcgcgtgggaccaattagtgtaattggggtgacagcagcggaggaggagacccccgctcctactgagcccagcacagaggcccctgaaccacctgaagagcccctactgggcgagctgaccgtgaccgggagctcaccagattcattatctctcagctggactatacctcaggggcgattcgactccttcaccgtgcagtacaaagatcgggatggacgacctcaggtagttcgcgtcagaggcgaagagtccgaggtgacagtgggcggactcgagcccggttgcaagtacaaaatgcacctgtacggcctccatgagggccagcgggtcggacctgtgtccgcagtgggcgtcaccgccccaaaagacgaggctgagaccactcaagccgtacccactatgacgcccgaaccacccataaagcctagactgggcgagctgactgtcactgacgcaaccccggacagcctctctctgagctggatggtacccgaggggcaatttgatcattttctagtgcaataccgtaatggcgacgggcagcctaaggctgtcagggtccctggtcacgaggacggcgtgaccatatctggcttagagcctgatcacaaatacaagatgaacctgtatggatttcacggcggacagagagtgggtcccgtttcagcaatcggggtaacggaagaagagaccccttcacccactgaaccatccaccgaagcacctgaagctccagaagaaccccttcttggggagctgaccgtgacaggaagtagcccggatagtctttcactgagttggaccgtacctcaggggagatttgacagcttcacagtgcaatataaggatagagacgggcagccccaagtggtccgagtgcgcggagaagaaagtgaagtcacagttggaggactagaacctggacggaagtataaaatgcacctgtacggcctgcacgaagggcagcgggtgggtcccgtatcaacggtcgggatcacggcacccttgcccaccccactgccagtggaacctcggcttggagagctggcagtagccgcagtcactagtgattccgtggggcttagttggaccgtagcacaaggaccttttgattcgttcctcgttcaatatcgggacgcccaagggcagccacaagccgtgccagtttctggtgacctgagggccgtcgcggtgtcggggctagaccctgctaggaagtacaagttcctgctattcggactgcagaatggcaagcgccacggacctgtgcctgttgaagcccgaacagccccagatacaaaacccagcccgagactgggcgaattgacagtaaccgacgctacgcccgactcggtgggcctgtcttggactgtaccagagggggagttcgacagttttgtggtccaatacaaggataaagatggacgcctccaagtggtgccagttgccgctaatcagcgtgaagtcaccgttcagggcctcgagccttctagaaagtaccgcttcctgctgtatggattgagtggcaggaaaaggctcgggccaatcagtgctgactctacaactgccccactcgagaaagaactgcctccgcacttgggcgagttaactgtggctgaagaaacttcgtccagtctcagattgtcatggaccgtggcccaggggccattcgattctttcgtggtgcagtaccgagacacagatggccagcctcgggcagtgcctgtggctgctgaccagcgcactgtgaccgttgaagacctcgagcccggaaagaagtataagttcctgttatatggactgttaggtgggaagaggctcgggcctgtcagtgcccttggtatgactgcaccagaagaagacaccccagcccctgagttagcccctgaggcgccagagcctcctgaggagccaaggctgggggtactcactgtgaccgatacaacaccggattctatgaggcttagctggagcgtggctcaaggtccatttgattcctttgttgtgcagtatgaggatacgaacggacagcctcaagctctgttagttgatggagaccagagcaagattctcatctcaggtctggaaccaagcacaccctacagatttttgctttacgggttacatgaagggaaacggctgggccctctttcagccgaagggactacaggtctcgctccagctgggcaaacctccgaagagagcaggccgaggttgagccaactgtctgtcactgacgtaaccactagttctctcaggctgaattgggaggcacctccaggcgcattcgatagttttctgctccggttcggtgtgcctagtccatcaaccctggagccccatcctcggccactcctgcagagagaactgatggtaccaggaaccaggcacagcgcagtacttagagatcttaggtcgggcaccctatactctctcaccctttatgggctgcgtggcccacacaaagctgatagcatccaggggacagccagaaccttatccccagttctggagtctccaagggacttacaattctccgaaataagggaaacgagtgcaaaagtcaattggatgccccctccgagcagagcggatagcttcaaagtgtcttaccagttggcggatggaggtgagccccagagcgtgcaggtcgacggtcaagcgcgtacccagaagctgcaggggttgatccccggtgccaggtacgaggtgaccgtggtgagcgtgcgaggttttgaagagtctgagccactgactggattccttactacggtaccggatggcccaacccagttgcgcgctctcaatctgacagagggatttgctgtgctccattggaagccacctcaaaaccctgtggacacatatgacgtgcaggttaccgccccaggggctccgccacttcaagccgaaaccccaggaagtgcggtggattacccattgcacgatctggtgctgcatactaactacacggccactgttagggggctgcgcggtcccaatctaacctcacccgcatcaatcaccttcaccactggacttgaggctcctagagaccttgaagccaaggaggtgaccccccgaactgcgctgttgacctggacagaacctccagtgcggcctgctggttaccttctcagtttccatactcccggagggcaaaatcaggagattcttcttcccggaggaattaccagccatcagctccttgggcttttccccagcacgtcttacaacgcacggcttcaggccatgtgggggcagagtctgttgccacctgtgtccacctcctttactactgggggtctcagaatcccttttccacgggattgcggagaagaaatgcagaatggcgcaggggcttcgagaactagtaccatcttcttaaacggtaacagagaacggcctctgaatgttttctgcgacatggaaacagacggtggcggttggcttgtgttccagaggaggatggacggccaaacagatttttggagggactgggaagactacgctcatggatttggcaacatatccggcgaattttggctgggaaacgaggcattgcactctcttactcaggcaggcgactattcaatgcgggtggacttgcgggcaggagatgaggccgtctttgcccagtatgatagttttcatgtagatagcgcggctgagtactaccggctccacttagaaggctaccatggcactgcgggtgactcaatgtcctaccactcagggtcggtttttagcgcacgagacagagaccccaattctctgctgatctcctgcgccgtttcctaccgaggagcctggtggtaccgcaattgtcattacgccaatctgaacggcctttacggcagtactgtggatcaccagggggtttcctggtaccattggaagggatttgaattcagcgtgcccttcacagaaatgaagctgagaccgaggaacttccgatcgcccgctggaggtggttat

SEQ ID NO: 243732 - DNA, 843 bp, synthetic construct
  misc_feature 1..843: note = Description of Artificial Sequence: Synthetic coding sequence
  source 1..843: mol_type = other DNA
atggtcactgaaggtgaatttgactcattcgagatccagtataccgatcgcgatggtcaattacagatggtgagaatcggcggagatcgcaacgacatcactttgtctggccttgagtccgaccaccggtacctggtaaccctgtacggctttagcgacggcaaacacgtcggacccgtgcatgttgaagcactgactgttccggaagaggaaaagccttccgaaccaccaacggcgaccccagagccccctattaagccccgactcggggagctcactgtaaccgatgctacccctgattcactttcactgagttggacagtgcccgaaggacagtttgatcatttcctggttcagtatagaaatggcgacggtcaaccaaaggcagtgagagtcccgggtcacgaggagggagttacaataagtgggttggaacccgatcacaagtataagatgaacctctatggttttcacgggggtcaaagaatgggccctgttagtgtggtgggggtcacagcagcagaggaagaaacaccctcccccaccgagccctcaatggaagccccagaacctgcggaggaacccctgcttggtgagctgacagttacaggttcatcaccggattccctgtctctgagttggaccgtcccccagggacgttttgactcctttaccgttcagtataaggatagagatggaagaccgcaggtagttcgggttggtggtgaggagtccgaggtcacagtgggaggactcgagcctggcaggaaatataagatgcacctctatggattgcacgaaggcaggagggttgggcctgttagcgcagtgggcgtcacgtag

SEQ ID NO: 243733 - DNA, 12729 bp, synthetic construct
  misc_feature 1..12729: note = Description of Artificial Sequence: Synthetic coding sequence
  source 1..12729: mol_type = other DNA
atgatgcccgctcagtacgcgctaacgtccagtctggtgcttctggttctgttaagtacggctcgagccggtcccttttctagcagaagcaacgtaacgcttccagcccctagacctcccccacaaccaggcggtcacactgtaggggcaggcgtgggctctcctagctctcagttgtacgaacacacagttgaagggggtgagaaacaagtcgtttttacccaccgcatcaatttgccacccagtactggatgtgggtgtccaccgggaacagaaccacctgtgctggcttcggaggtgcaggccttgcgcgtgcgcctcgaaatactagaagaactggtgaaaggtctcaaggaacagtgcacagggggatgttgcccagctagcgcccaggccggaacaggacagactgatgttcgtacactctgctccctacatggcgtttttgacctaagcaggtgtacctgctcttgtgagccaggatggggtggccctacttgtagcgatcccacagacgctgagattcccccttctagcccgccaagtgcttctgggtcatgccccgacgattgtaacgaccagggaaggtgtgtacggggtcggtgcgtgtgttttcctggttacacgggcccaagctgcggttggcctagctgcccgggagactgccagggcaggggcagatgtgtgcagggggtatgcgtttgtagggccggtttttcaggtcccgattgctctcaaagaagctgtccacgcggttgctctcagaggggccgatgtgaaggtggaaggtgcgtgtgcgatcccggatacacaggcgatgattgtggcatgcgatcctgccctagggggtgcagccagcgcggacggtgcgagaacggccgttgcgtgtgcaacccgggttataccggtgaggactgcggagtaagatcgtgtccacgcggatgctcccaaaggggcagatgtaaggacggacgttgtgtgtgtgaccctgggtacacaggtgaggactgtgggacaagaagttgcccgtgggactgcggggagggtggtcgatgcgttgatgggagatgtgtttgctggcctggatatacgggagaagattgctccacacgcacgtgtcctagggattgccggggacgagggagatgcgaggatggagagtgtatctgtgataccggttatagcggagacgattgcggggtgcgcagctgtccaggagattgtaaccagcgaggcaggtgtgaggacggccgatgtgtctgctggcctgggtataccggcacagactgcggcagccgagcctgtccccgagactgccgcggaagagggaggtgcgagaacggagtttgtgtttgcaacgctggctactctggcgaggattgtggggtccggagttgtcccggtgactgtcggggacggggaagatgcgagagtggacggtgtatgtgttggccagggtatacaggccgtgattgtggtacaagggcttgtccaggggattgccgcggacgtggccgatgcgtagacgggagatgcgtttgtaacccgggatttactggagaagattgtggcagcaggcgttgtcccggagattgccgcggtcatggcttgtgtgaggatggcgtatgcgtctgtgatgctggctactccggcgaagactgctccactcggagctgccctggaggatgccgcggtcgagggcagtgcctggacggccgatgcgtctgcgaggatggctactcaggcgaagattgtggtgtacgccagtgccctaatgactgttctcaacacggggtttgccaagacggagtttgcatctgctgggaaggatacgtgtctgaggactgttctatacgcacttgtccgtctaattgtcacgggcgaggcaggtgcgaggaggggagatgtctttgtgaccccggatacaccggtcctacttgtgccactcgaatgtgtcccgcagactgccgcggtcgcggtaggtgcgtgcagggggtgtgcttgtgccacgtgggctacggcggagaagactgtggccaggaggagccgccagcatcagcctgcccaggcggttgtggcccaagggaactctgtagagccggtcagtgcgtttgcgtcgaaggattcagaggccctgactgcgccattcagacttgcccaggtgattgtagaggcagaggagagtgtcacgacgggtcctgtgtgtgcaaggatggctatgccggtgaagattgcggagaagaggtccctaccattgaagggatgcgtatgcacctgttggaggaaaccacggtgagaacggagtggaccccagcccctggccctgttgatgcatacgagattcagttcattcctaccacagaaggagcctcccccccattcactgctagggttccgtcatcggcctccgcctacgaccagcggggtctggcaccagggcaagagtaccaggtgactgtgagagccctgcgcggaacgtcttgggggttgccggcaagtaaaaccatcacaacaatgatcgatggcccacaggacctgcgcgtcgtagcggtcacccccacgacactggagctgggatggttgagacctcaggctgaggtcgatcgcttcgtcgtgtcctacgtgagcgcaggtaaccagcgtgtgaggctggaggttcctcccgaggccgacgggacactgctcactgatttgatgcccggagtggagtacgtggtgacagtcaccgccgagagaggccgtgcagtctcctatcccgcatcagtaagagctaacaccgggtcctctcctttagggttgctggggaccactgatgagcccccaccaagcggtcccagtacaactcagggagctcaggcaccccttctgcagcaacggcctcaggagcttggcgagttgcgagtgctcggcagagacgaaaccggacgcttaagggtcgtctggacagcccagcctgatacttttgcgtacttccagcttagaatgcgggtccccgaagggccaggtgcccatgaggaggtactgcccggagatgtgcgccaggctctggtccccccaccgcctccaggaacgccctacgagctttcgctgcatggcgtgcctcccggagggaaaccgagcgaccccattatctaccagggaattatggacaaagatgaggagaagccaggaaagtcctccggaccgcctcgacttggagagctgacagtgaccgatagaaccagtgatagcctgcttctgagatggaccgtgccagaaggggaattcgactccttcgtgatccagtacaaagacagagatggccaaccacaagtggttcccgtcgaagggcctcagcgctcagccgttatcacatcactggaccctggtcgcaagtacaagtttgtcctgtacggattcgtgggcaagaaacggcacggcccattggtggcagaagcaaagatcctccctcaatcagacccctctcccggaacgccgccaagactcggtaatctgtgggtgacagatcccactccagacagtctgcacctctcttggactgtcccagaggggcaattcgatacgtttatggtgcagtatcgggaccgcgatggaaggccccaggttgttccggtggaagggccagaaaggtcctttgtagtgtcatctctggacccagatcacaagtaccggttcacccttttcggaatcgccaacaagaaaaggtacggacccctaactgccgacggaactacagcgcctgagagaaaggaagagccacctcaccctgaatttctagaacagccgcttctgggcgaactgacagttacaggcgtgactcccgacagcctgagactgtcatggacagtggcccaaggaccattcgatagttttatggtccagtacaaggacgcgcagggtcaaccacaggccgtgcccgtggctggcgatgaaaatgaggtgacagtgcccggtctggatcctgaccgaaaatacaagatgaacctgtatgggctacggggtcggcagagagttggcccagagtcagtggttgctaaaactgcccctcaggaggatgttgatgagacaccctccccaaccgaactgggaactgaagcccctgagtctccagaggagccgctgttgggcgagcttactgttacaggctccagccctgattccctttctctcttctggacggtcccgcagggtagtttcgattctttcacagtgcaatacaaagacagagacgggaggccgagggcagtgagagtgggtggcaaagaaagcgaagttacagtgggtggcctggagcctggccacaagtacaagatgcacctgtatggactgcacgaaggccagcgcgtgggtccggtgtccgctgtgggagttaccgcaccacagcaggaggagactcctcccgcaacagagtctccacttgagccacgcctgggagagttgacggtgaccgatgttactcccaacagcgtgggcctgagctggaccgtgcctgagggacagtttgacagttttatagttcaatacaaagacaaagatggacagccccaggtcgttcccgtcgccgcagaccaaagggaagtcactgtttataatcttgagccagaaagaaagtataagatgaacatgtacggcctccacgacgggcagagaatgggcccactttccgtcgtgattgtcaccgcaccactgcccccagccccagccacagaggcatctaaaccgccactcgaaccccgactgggggagctgacagtcacggatatcacaccagactcagtgggcctctcctggaccgtgcccgagggcgagttcgactccttcgtggttcagtacaaagatagggacggccaacctcaggtcgttccagtcgctgcagaccaaagagaagtcacaatccccgatctggagccttcccgcaaatataagttcctgctgtttggaatccaggatggaaaacgcaggtcccctgtgagcgtggaggccaaaaccgtggctcggggagacgcctctcccggtgcgccacccaggctaggagaactgtgggttacggaccctactcctgactccctgcgactctcttggaccgtccctgaaggacagttcgacagctttgtcgtgcagttcaaggacaaggacggacctcaggtggtgcccgtcgaagggcatgagcgctcagttacagttacaccacttgacgcgggaagaaagtataggtttttgctgtacggcctcttaggaaagaaacgccacggaccactgactgcggatggcactacggaagcacggtccgctatggatgacaccgggactaagcggccaccaaagccacgactaggcgaagaattacaagtaactaccgtaactcagaatagtgtcggactgtcctggactgtacccgagggccagttcgactcttttgttgtacagtataaggatcgtgacggacagccccaggtagttccagtggagggcagtctgcgagaggtcagcgtgcccggacttgaccctgcgcacagatacaagctcctgctctacgggctgcatcacggaaaacgggtcggaccaatttccgcagtggccattacggctggacgcgaagagaccgaaactgaaactactgcaccgacacctccagcaccagagccacatttgggtgaactgactgtcgaggaagccacgtctcacactttgcatctctcatggatggtgactgaaggggagttcgattctttcgagattcaatacacagatagggatgggcagctccagatggtccgcatcggcggagatcgcaacgatattacactatcgggtctcgaatcggaccaccgttacctcgtcacgttgtatgggttcagcgatggaaagcacgtcggacccgtccacgtcgaagccctgactgtgcccgaagaagaaaagccttctgagccccctacagccactcctgagcctccaataaagccccgactaggagaattgacagtgaccgacgcaacacctgattccctgagtctaagctggacggttcctgaaggacagttcgaccattttttggtgcaatatcggaacggcgacgggcagccgaaggcagtgcgcgtgccaggacacgaggagggcgtcaccatctccggtcttgaacctgaccacaaatataagatgaacttatacggttttcatggcggtcagcgcatgggtcccgtctcagtggtgggcgtgactgcagccgaggaagagaccccatctcctacagaaccatctatggaggctcctgaacccgcagaagagcccctgcttggagaactgaccgtgaccggatcatcaccagattccctaagcctttcgtggactgtgcctcagggacggttcgatagctttacagtgcagtataaggatagagacggcaggccacaggtggtgagagtcgggggtgaggaaagtgaagtaacagtgggcggactggagccgggacggaaatataagatgcatctctacgggctgcacgaggggaggcgggtggggcctgttagcgccgtcggagtgacagctcccgaggaggaaagtcccgatgcacccctagccaagcttcgcctcggccagatgacagtgcgcgatatcacttcggattctctgagcctgtcttggacagtacctgaaggacagtttgatcattttttagtgcaattcaagaacggggatggtcagccaaaagccgtcagagtccccggtcacgaggacggtgtgactatctctgggttggagcctgaccacaagtataagatgaacctttacggattccatggcggtcagcgggtgggccctgtaagcgcagttggcttgacagcacctggaaaagatgaggaaatggctcctgcatccaccgaacctcctacaccagaaccacccatcaaacccagactcgaggaactgacggtaacagacgcgacccccgattctctgtctctgagttggactgtgcccgaaggacagtttgaccacttcttggtacagtataagaacggagatgggcagcctaaggctaccagagtgcctggccacgaagaccgggtgacgattagtggcctagagcccgataataagtataagatgaacctgtacggcttccacggaggccaacgcgtgggtcccgtttccgccatcggcgtaaccgccgctgaggaagagaccccaagccctacagagccatctatggaagctccggagcccccagaggagccactactcggtgagttaacagtgaccgggtcttccccggattctctgtctctctcttggacagtgccacagggacggttcgattcctttaccgtgcagtacaaagaccgggatggcagaccccaggtggtgagggtaggcggagaggagtctgaagtaacagtgggcggactggaacccggtcgcaagtacaagatgcatctgtatggcctgcatgaggggagacgtgtgggccctgtgagcactgttggcgtaaccgctccgcaagaagacgttgatgaaacaccctctcctacagaacctggaactgaggcccctgagcccccagaggagcccctgttgggagaactaaccgtgaccggaagctcgcctgattccctctctctatcttggacagtccctcaggggagattcgacagtttcaccgttcagtacaaggacagggacggtcgccctcaggccgttcgtgtcggcggacaggagagcaaagtcaccgtacgcggtcttgaaccagggaggaagtataaaatgcatttgtatggcttacacgaggggaggcgcttgggcccagtctctgctgtgggagtaacagaggatgaggcagagactacacaggctgtccccaccatgacaccggagcccccaatcaagcccaggctaggcgagctcaccatgacagacgcaacaccagactcccttagcctgtcctggacagtgcccgaagggcagtttgatcactttctggtacagtatcgcaacggtgatggacagccaaaggcagttcgggtccccggacatgaggatggcgtcaccatatctggcctcgagccagatcacaagtacaaaatgaatctttacggcttccacgggggtcagcgggtgggaccaatcagcgtgattggggtgaccgctgctgaggaggaaactccaagcccgacagaattgtccactgaagcgcctgagccgcctgaggagcccctcttaggggagctgacagtaaccggttcatctcctgactctctgtcactcagttggaccattccccagggacacttcgactccttcactgtccagtataaagacagggatggacggcctcaggttatgcgagtgaggggagaggaaagcgaagtcaccgtggggggtctcgaacccggacgaaaatacaagatgcacctctacggattacatgaaggccgacgcgtgggtcccgtcagtaccgttggtgtgacagaagatgaagccgaaactacccaggcagttcctaccaccacaccagaaccgccaaataaacccagactgggggagctgaccgtgaccgacgccacaccggatagtctgagcttgtcatggatggtgccagagggacagttcgaccacttcctggtacaataccgcaacggagacggacagccaaaggttgtgagagtgccaggtcatgaggacggtgtaaccatcagtggcctggaacccgaccacaagtataagatgaacctatatggatttcatggcggacagcgcgtagggcctatcagcgtgataggggtgaccgctgcagaggaggagactcccgcaccgaccgaaccctcgacagaggcgcctgagcctccagaggaacctttgcttggggaactgacagtcacaggttctagccccgactcactgagcctgagctggactatccctcagggaaggttcgactcatttactgtgcagtataaagaccgcgacggtagaccccaggttgttcgcgtccggggagaagagtcggaagtgacagtaggaggcctagagcctggctgcaaatacaagatgcacttgtacggtctgcatgaaggccaacgggttggcccagttagtgccgtgggagtgaccgcgccaaaagatgaagccgaaaccacccaggcagtccccaccatgacgcccgagccgccaataaaaccccgacttggtgagctgacggttacagatgcgactcccgattctctctcccttagttggatggttcccgaggggcagttcgaccactttctcgttcagtatagaaacggggatggtcagcctaaggctgtgcgggtaccaggccatgaggatggggtgactatcagcggcttagagccggatcacaaatacaagatgaacctgtacggtttccacggaggacagcgcgtcggaccggtatccgcgattggcgttacagaggaggagaccccctctcccactgagcctagcaccgaggcccctgaagcacccgaggaacctctcctcggcgaactcacagtaacgggatcttcccctgactccttgtccctgagctggaccataccccagggcagatttgattcttttactgtgcagtataaagaccgagacggacagccacaagtggtcagagtgcgtggggaggaatccgaggtgactgtagggggactggagccgggaagaaagtataagatgcacctgtacggcctgcatgaagggcagcgtgtaggtccagtcagcaccgtaggtatcaccgccccactgcccaccccactgccagtggaacctcgacttggagagctcgccgtggcagcagttacctccgattccgtcggcctgtcgtggactgtggcgcaaggtccattcgactccttcctggtgcagtaccgcgacgcccagggccagccccaggcagtgcccgtgtctggggatttgcgagccgtggcggtttccggtttggaccccgctcggaaatacaaattcttgctttttgggttacagaatggcaagcgacatgggcctgtgcctgttgaggcgcgtacagctcccgacaccaaaccgtcaccgagactcggggaattaacagtgaccgatgccactccagacagcgtgggcttaagctggacggtaccagaaggtgagtttgactcattcgtagtgcagtacaaagacaaggacggtcggttgcaggtcgtgcccgtggccgcaaatcaaagagaagtcactgtgcagggcctcgaaccaagccggaaatatagatttcttctttatggactgagtggcagaaaaaggctaggcccaattagcgctgattcaaccaccgcgcctctggagaaggaattgccaccccatctgggcgagctcactgtagcagaggagacatcaagttccctccgcttaagttggaccgtcgcacaggggccttttgattccttcgttgtccagtacagagacacagacggccaacccagagccgtgcctgtggccgctgatcagaggacggtaacagtcgaggatctagagccgggtaagaagtacaagtttctgttatacggtcttcttggcggaaagaggttgggtccggtatctgcactggggatgaccgcccctgaggaagatacccccgcaccagagctcgcccctgaagccccagagccaccggaggaacctagactcggggttctcacagtaaccgacacaacacctgattcaatgcgcctatcttggtccgttgcccaaggtccttttgattctttcgtcgtacagtatgaggatactaacggccagccccaggctttgctggtggacggtgatcaatctaaaatcctgataagtggtctggaaccttccacaccttaccgcttcctgttgtacggtctgcacgagggcaagcgcctcggccctctgtccgcggagggcactacaggcctggccccagccggacagactagcgaggaatctaggccacgactgtcacagctgagtgtcactgacgtgacgacgtccagtctgagactgaattgggaagcacctcccggtgcttttgactcttttctcctacgtttcggagtgcccagtcccagtaccctggagccacacccacgacccctgcttcagcgagagctgatggttcctggcacccgccatagtgctgttttacgagatctccgctcaggaaccttatatagtctcacgctgtacggtttacgtggaccacacaaagctgactcaatacaaggaacggcaagaacgctctctcctgttctggagtcccccagagacctgcagttcagtgaaattcgagaaacgagtgcgaaggtgaattggatgcccccaccgtcacgcgcagactcctttaaggtgagctatcagttggccgacgggggtgagccccaatcagtgcaggttgacggtcaagcgaggacacagaagctccagggtttaataccgggtgcgcgttatgaggtaacggtggtgtctgtgcgtggctttgaggaaagtgaacccctgacaggatttctgactaccgtgccagatggcccaacccaactacgtgccctgaatctcaccgaggggtttgccgtacttcattggaagcctccccagaatccagtcgacacgtacgacattcaagtcactgccccaggagctccgcctctccaagctgagacccccggttccgccgtagactatcccttgcacgatttggtgttgcataccaattacacggccaccgtacgcggactgcggggaccaaacctgactagtcctgcatcgattacatttacaacaggcttggaggcaccacgtgatctggaagctaaggaagtaacgcctcgtacagccttgctaacttggacagagcccccagtccgcccagcgggatacctcctctccttccacactccaggaggccagacgcaggagatcctgctcccagggggaatcactagtcatcagctcctcggcctttttccgagtacttcctacaacgctaggctccaggctacgtggggccagtcactgcttccacctgtgtctacatcctttaccaccggtgggctcaggatcccttttcccagagactgcggggaagagatgcagaatggcgctggcgcttcccggacatccaccatcttcctgaacggaaaccgggaacgaccccttaacgtgttctgtgacatggaaactgatggcggaggatggcttgtcttccagcggagaatggacggtcagactgatttctggcgggattgggaggactatgcacacggtttcggcaatatcagcggcgaattttggctgggcaatgaggctcttcactcactgacccaggctggcgactattccatgagagtggatttgcgcgctggggacgaagcagtctttgctcagtacgacagttttcacgtggattcagccgcagaatactaccgactccacctagagggataccacggcactgcgggagacagcatgtcatatcattctggtagcgtcttctctgccagggatcgcgatccaaacagcctccttatttcctgtgccgtcagttatcgaggtgcatggtggtaccgaaactgtcactatgccaacctcaacgggttatacgggtctacagtggaccaccaaggcgtgtcgtggtatcactggaagggcttcgaattttccgtgccgttcaccgagatgaaactgaggccccgaaatttccgttctcccgcagggggtgggtat

SEQ ID NO: 243734 - DNA, 2022 bp, synthetic construct
  misc_feature 1..2022: note = Description of Artificial Sequence: Synthetic coding sequence
  source 1..2022: mol_type = other DNA
atgcgcttatcttggagtgtggcgcagggcccattcgactcctttgtggttcagtacgaagacacgaacgggcagccacaggctctgctggtagatggcgaccagtcaaagatcctgataagcggcctagaaccaagcactccttaccgtttcttactatatggcctccacgagggcaagcggttgggaccactttcagctgaagggaccacaggcctggcccctgctggccaaactagtgaggaatctcgaccacgactttctcagctgtccgtcaccgatgtgacaacttcctctctgaggctcaactgggaggctccacccggtgcttttgactccttcttgttgcgattcggcgtgcccagcccttcgacattagaacctcatcccagaccactcctgcagcgagaactgatggtccccggtacaagacactctgcagtgttgcgtgatctgagaagtgggactctctactccctgacattgtacgggttacgcggacctcataaagccgacagcatccaaggcactgctcgaaccctgagtcccgtgctggaatccccacgggacctgcaatttagtgagattagggaaaccagtgcaaaagtgaactggatgcctcctccatccagggcagactcctttaaagtctcttatcaactcgcagacggcggtgaacctcagagcgttcaggtcgacggtcaagcaaggacacaaaagctacagggccttattccgggagccaggtatgaagtcacagttgtcagtgtgaggggttttgaggagagcgaaccgctaactggattcctcactactgtacccgatgggcctacacagttaagggcattgaacctaacagaaggattcgctgtattgcactggaagcctccccagaaccccgtcgatacgtacgacgtgcaggtgacagcaccaggcgctccgccacttcaagctgagacacctgggtcagctgtggactatcccttgcatgatctggttctccacaccaattatacagccaccgttagaggactgcggggacccaacctcacctctccggcaagcattacattcaccaccggcctggaagctcctagggatcttgaagccaaggaagtcaccccccgaactgcactgcttacatggaccgagcccccagtccgaccggctggttacctgctcagcttccatacacctggaggccaaaatcaggagatcctgttaccgggtggtatcacgtcccaccaactcctgggcctgttcccttccaccagttacaacgcgaggttgcaagctatgtggggtcagtccttgttaccacctgtttccacctcttttactaccggtggcctgagaatcccatttcccagggactgtggcgaagaaatgcaaaacggtgcaggtgcttcccggacaagcaccatatttcttaacggcaacagagagcgtccactcaacgtcttttgtgacatggaaaccgacggcggtggatggcttgtgttccagcggaggatggacggccaaactgatttctggagagactgggaggattatgcgcatggctttggcaatatttctggggagttctggttgggcaacgaagccttgcacagcctaacccaggcaggggattactccatgagggtggatctccgggcaggcgatgaggctgtgttcgctcagtacgactcttttcacgttgactcagccgcagagtattacagactgcacctggaaggctaccacggaactgcgggtgattcaatgagctatcacagcggatccgtgttctccgccagggacagagacccaaactcactgcttatttcctgtgccgtctcttaccgcggtgcctggtggtaccgcaactgccactacgcgaacttgaacggtctatacggatctacagtggaccaccagggcgtgtcgtggtaccattggaagggcttcgagttctctgtgcctttcacagagatgaaattgcgtcctcgcaatttcagatcccccgctggcggtggatag

SEQ ID NO: 243735 - DNA, 654 bp, synthetic construct
  misc_feature 1..654: note = Description of Artificial Sequence: Synthetic coding sequence
  source 1..654: mol_type = other DNA
gcaccgggaaaggacgaagagatggctcctgccagtaccgagccaccaacacccgaaccacctataaagcccaggctggaagagctgacagtgacagatgctacccccgacagtctgagcctgtcatggacagttcccgagggtcagttcgaccactttctggtccagtataagaacggggacggtcaacccaaggccacccgggtgccagggcacgaggaccgcgtgactatttctggcctggaacccgacaacaagtataagatgaacctgtacggctttcacggcggacagcgtgtcggccctgtctcagcgatcggcgtgacagccgctgaagaagaaacaccttcacctaccgagcccagcatggaggccccagaacccccagaggagcctctcctcggggagctgacagtcaccggctcaagcccagactcactctccttatcctggacggtcccacagggacggttcgattccttcactgttcagtacaaggaccgagacggcagacctcaagtagtgcgcgtcgggggagaagagtccgaggtcactgtcggcggattggagcccggtcgtaagtacaaaatgcacttgtacggcctccacgaagggcgtcgcgtcggacccgtatctacagtgggagttacatag

SEQ ID NO: 243736 - DNA, 942 bp, synthetic construct
  misc_feature 1..942: note = Description of Artificial Sequence: Synthetic coding sequence
  source 1..942: mol_type = other DNA
accgaaccaggcacagaagcccctggcccaccggaagaacccctgctcggggaactcacagtgacagggtcctcacctgattcactgtcgctgagctggactgtacctcaaggaagattcgactctttcactgtgcagtacaaggaccgagacggaaggcctcaagctgttagagttggcggtcaggaatcaaaggtgactgtgagaggtctcgaacccggaagaaagtacaaaatgcatctatacgggttgcatgagggtcgaaggttagggcctgtctcagccgtcggcgttactgaggatgaggctgagacaacacaggctgtgcctacaatgacaccagaaccgccaatcaagcccagacttggagagctcaccatgactgacgcaacaccggacagcctgtctctaagttggacagtcccggaggggcagtttgatcacttccttgtccagtatcgcaatggcgatggacagccgaaggccgtaagggtgcctgggcacgaggatggagtgaccataagtggtctggagccagaccacaaatataaaatgaatctttatggttttcacgggggacaacgggttgggccaatatcagtaatcggtgtcaccgccgctgaggaggagaccccttcgcccacggagttatccaccgaggccccagaacctcccgaagaacccctgttgggcgaactgaccgtgacaggcagttcccccgactctctcagtctcagctggaccattcctcaggggcactttgacagttttacagtgcagtacaaggatcgggatggtcggcctcaggtcatgagggtgaggggagaggaatccgaagtgaccgtgggtgggttggaacctggtcgcaagtacaagatgcatctgtatggtctccatgaaggcaggagagtgggccctgtgtctaccgtaggggtcacttag

SEQ ID NO: 243737 - DNA, 942 bp, synthetic construct
  misc_feature 1..942: note = Description of Artificial Sequence: Synthetic coding sequence
  source 1..942: mol_type = other DNA
atgaccccagaacccccaataaagcctcgtttgggcgaactgactatgacggacgctacaccggattcactctcactgtcttggactgtacctgaggggcagtttgaccactttttagttcaataccggaatggcgatggacagcctaaggcggtacgggtaccaggtcatgaggatggcgttactatctccgggctggagcctgaccacaagtacaagatgaatttgtacgggttccacggaggtcaaagagtgggtcccatatcggtgaccggggtcacagccgctgaagaggagacgccttccccgactgagctgtctacggaagctcctgaaccgccagaggaacctctgctgggtgagctgacagttaccgggagcagccctgacagcttgagcttgagttggacaattccccagggtcactttgactcctttaccgtgcaatataaggatcgagacggtagaccccaagttatgagagtaagaggtgaggaatccgaagtgacagtaggcggactcgagccaggtcgcaaatataaaatgcatttgtacggtttacatgagggtaggagagtgggacctgtttccaccgtgggcgtgaccgcccctgaggatgaagaggaggagaccccggctcctaccgagccttccaccgaagccccagaacccccagaggaacctttactgggcgagctcacggtgacaggcagctctcctgactctttaagtctttcatggaccataccccagggaaggtttgacagctttaccgtccagtacaaggatagagatggacgcccacaggtcgtacgggtaaggggcgaagaatccgaggttaccgtggggggattggaacctgggtgtaagtacaagatgcatctctatgggcttcacgagggccaacgagtgggacccgtctctgccgtgggtgtcacttag

SEQ ID NO: 243738 - DNA, 1281 bp, synthetic construct
  misc_feature 1..1281: note = Description of Artificial Sequence: Synthetic coding sequence
  source 1..1281: mol_type = other DNA
gcaggtgaggactgcggggaggaggtccccacaattgagggcatgaggatgcatctgctggaggagactacagtccggactgagtggactcctgccccaggtcctgtagacgcgtatgagatccagttcatacccaccaccgagggggcttctccacccttcaccgccagagttccgagctcagcttcagcatacgaccagcggggtttagccccagggcaagagtaccaggttacagtgcgcgcattgcgcggaaccagctggggtctgcccgcttctaagactatcactactatgatcgacggaccgcaagacttgagagttgtggctgtcacccccactacattggaattaggatggctgcgcccacaggccgaagtggatagattcgtggtgtcatacgtgtccgctggaaatcagagggtccggttagaggtccctcccgaggccgatgggacgttgctaacagatctcatgcccggagtagagtacgtggtgactgtgactgccgagagaggacgggctgtgtcatacccagcttcagtacgcgctaatactggtagctctccactgggccttctggggacgacggacgagcccccaccttcgggcccatctactacccaaggggcacaggctccgcttcttcagcagaggccccaggagctcggagaactgcgcgtgctgggcagggacgagaccggcagactgagagtggtctggacagctcagcccgacacatttgcctactttcaactgcggatgcgcgtgcctgagggcccaggtgcccatgaggaggttctgcccggtgatgtcagacaagcattggtcccccctccaccaccaggaaccccatatgagctctcactccacggagtgcctcccggaggcaagcctagtgatccaatcatttaccagggaattatggacaaagatgaagagaaaccaggaaagtctagcggcccaccacgcctgggagaactgacagtgaccgaccgcacgtcagactccctgctccttcgctggacagtgccagagggggaattcgattcatttgtaatacagtacaaagaccgcgacgggcagccccaggtggtccctgtggaagggccacagcgatcagcagtcataacatctctggatccagggcgtaaatataagtttgttctgtacggtttcgtgggtaagaagaggcatggaccactggtcgctgaagccaaaattttgcctcagagtgacccatcccccggaacccctccacatctcggaaatctatggtag

SEQ ID NO: 243739 - DNA, 2598 bp, synthetic construct
  misc_feature 1..2598: note = Description of Artificial Sequence: Synthetic coding sequence
  source 1..2598: mol_type = other DNA
ctgtatgggctgcggggtagacagagggtggggccagagtctgttgtggcgaagaccgctccccaagaagatgttgatgagactccttcccctaccgagctcgggactgaggcgcctgagtcccccgaggaacccctcctgggagagctcaccgtgactggatcttcccctgatagcctttccctgttttggacagtgccccagggatcattcgactcattcactgtgcaatataaagaccgcgacgggcgtcccagggcagttcgggtgggcggaaaggagagtgaggttacagtgggcggtttggaaccagggcataagtacaaaatgcacctatacggccttcacgaggggcagcgagtgggacctgtcagcgctgtcggtgtgaccgcaccccagcaagaggaaaccccgcctgccacagagagcccgctcgagccacgtttgggcgaattaacagtgacagatgtaacaccaaatagtgtgggcctttcttggacagtgccggaggggcagtttgacagttttatagtgcaatataaggataaagacggacagcctcaagtcgtacctgtggctgctgaccagcgtgaggttactgtctacaacctggagccagaacggaaatataagatgaacatgtatggcctacacgatggtcagcgtatgggtccactttcagttgttattgttacagcgccactgccccctgcccctgccacagaggctagcaagccccctctggagccaaggttgggggaactgaccgtgaccgatatcacgccagattccgtggggttgagttggacagtgcctgagggcgaatttgactccttcgtcgtccaatacaaggacagggatggtcaacctcaggtggtgcccgtcgcggcagaccaacgcgaagtgacaatccccgacctcgaaccgagtcgtaagtataaattccttctgttcggtatccaggatgggaagaggcgctcccccgtaagcgtggaagctaagactgtggccagaggagacgcctctcctggtgctcctcccaggttgggagagctgtgggtgacagatccaaccccggacagcttacggctgtcttggactgtgcccgaaggtcagttcgattccttcgtcgttcagttcaaagataaggatggtccacaagtggtgccagtggaaggacacgagcgaagcgtaaccgttaccccactggatgctggcaggaaataccgattcttactgtacggtctccttgggaagaaaagacacggacccctgaccgcggatggtacgacagaggctagatccgcgatggatgacaccggaacaaaaagaccaccgaagcctaggcttggtgaggaactgcaggtgaccacagtaacgcagaattccgtcgggctcagctggactgttcccgagggacaatttgatagcttcgtcgtccagtataaggatcgggacggtcaaccccaggtagtgcccgttgagggctctctccgggaagtctccgtccctggtctggatccggcacatcggtacaagctattgctctacgggctacaccatggcaagagggtcgggcctatcagcgcggtggctatcacagccggacgggaagagaccgaaaccgagaccacagcccctaccccacccgctcctgagccccatcttggggaactcactgtagaagaggccacctcacacacacttcacctgtcctggatggtgactgagggggagtttgattcatttgaaatccaatacacagatcgagatgggcaactacagatggttagaataggcggagacagaaacgatatcaccctgagcggactggaaagcgatcatcggtacctggttacattatatggtttctccgacggcaagcacgtggggcctgtgcatgtcgaggccctcacagtgcctgaggaagaaaagccctccgaaccgcctactgcaacccccgagcccccaatcaaacccagactgggcgaactgacagttaccgatgccacgcctgacagcctgtcactctcatggacagttcctgaaggtcagtttgaccatttcctcgtgcagtaccgaaatggtgacggccaacccaaggctgtcagggtgcccggtcatgaagagggcgtaactatcagtggcttggaacctgaccacaagtataaaatgaacctgtacgggttccacgggggtcagcgcatggggccagtatcagtggttggggtcacagcagctgaagaggaaactccatcccctacagaaccctccatggaagcacctgaacctgccgaagaacctctgctgggggaactcacagtgacaggaagctccccggatagcctgagcctatcctggaccgtgccacagggaagatttgacagtttcactgtacagtacaaggatagagatggaaggccacaagtggtcagagttgggggagaggagtctgaggtaacggttggagggctcgaacctgggagaaaatataaaatgcacttgtacggactgcacgaaggcaggcgcgtcggccctgtaagtgccgttggcgtgacagctccagaggaggaatcccccgatgcccctttggcatag

SEQ ID NO: 243740 - DNA, 5208 bp, synthetic construct
  misc_feature 1..5208: note = Description of Artificial Sequence: Synthetic coding sequence
  source 1..5208: mol_type = other DNA
atgtctgtgtcccgaactatggaggacagctgcgagctagatttggtctatgtgacggaacgaataatcgctgtaagttttcccagtactgccaatgaagaaaacttccgttctaacctgcgcgaggtcgcacagatgttgaagtccaagcacggcggaaactacctgcttttcaacttgtccgaaagaagacctgatatcaccaagctgcatgccaaagtgctggaattcggatggcccgatcttcacacaccagcactggaaaaaatctgctccatctgtaaagctatggacacctggttaaacgccgacccccacaatgtggtagtattacacaataagggcaatagaggtcgcattggtgtagtaattgccgcatatatgcattacagtaacatttccgcatccgccgaccaggccttagacaggtttgccatgaagaggttctacgaggataaaatcgtgcctatcggtcaaccgtctcagcgtcggtatgttcattacttttcgggactcctttccggttctatcaaaatgaataataagccccttttcttacatcatgtcatcatgcacggcataccaaacttcgagtccaagggcggttgcaggccattcctgcgtatataccaggccatgcagcctgtctatacctcaggcatctataatatccctggggattcccagactagtgtgtgtatcacaattgaacccggactgttactgaagggggatatactgcttaagtgctaccacaagaaattcagatcacccgcacgtgatgtaatcttccgagtgcagttccacacctgcgccatccatgacctcggcgtcgtttttgggaaggaggatctcgatgatgcttttaaagacgataggttccctgagtatgggaaagtcgagttcgttttctcctacggacccgaaaaaatccagggcatggagcaccttgaaaatgggccaagcgtgtccgtggattacaataccagcgacccactcatcaggtgggacagctatgataatttttcaggacatagggatgatgggatggaggaggtcgtgggccacacgcagggaccacttgacggatccttatatgcaaaagtcaagaaaaaagattctcttcacgggtctactggagccgtaaatgcgacaagacccaccctctcagccaccccaaaccacgtggaacatactctttctgttagctcagactccggcaactccactgcaagtacgaagactgataaaacagacgagccagttcccggtgcgagcagcgcgacagctgctctctcacctcaggaaaaacgggagttggatagactcctgtccggtttcggcctggagcgggaaaagcagggcgcaatgtaccatacgcagcacctgcgtagtcgtcctgctggaggtagtgccgtgccctcaagcggcagacacgtggttccagctcaggtccatgtcaatgggggagcactggcttcagagagggaaaccgacattcttgacgatgagctacctaatcaagatggacactccgccggaagtatgggcacgctgtcttccctcgacggcgtgactaatactagcgagggaggctatccagaggctctgtcccctttaacaaatgggctggataagagctatcctatggagcccatggtgaacggcggaggctatccctatgaaagcgcatcgcgagccggtccagcccatgctggtcacacagctcctatgaggccttcttatagtgcccaagaaggattagccggatatcaacgggaaggccctcatcccgcatggcctcagcctgtgacaacctcacactacgctcatgacccctcaggcatgttcaggagccagtcttttagcgaggccgagccacaactgcctccggctccagtacgcggtggcagctctcgggaggccgtccaacgaggactcaatagctggcagcagcagcagcaacagcaacaacagcctcgccctccaccacgccaacaggagagggcacacctcgagagtctggtcgcatctcgcccatctccccagcctctcgccgagacccctatcccgagcctgcccgaatttccacgtgcggcatctcagcaggaaatcgagcaatccattgagactctgaatatgctgatgctcgatctggagccggctagcgcggctgctcccttgcataagagtcagagcgtgcccggtgcatggcctggcgcttcccccctatccagccagcccctgagtggctcttcaaggcagtcccatccacttacgcagagcaggtccgggtacattccatctggccatagcctcggcacgcccgagccagccccaagggccagtctggaaagcgtcccacccggaagatcttactccccctacgattaccagccttgcctggccggacccaaccaggatttccatagtaagtcgcccgcaagctcttctcttccagcctttctgcccaccacccattcaccaccagggcctcagcaacctcccgcatcccttcctggactcactgcccaaccgctactgtcacccaaagaggccacgtctgatccctctagaacacccgaggaggagccgctgaatctggagggactagttgctcatcgagttgcaggcgtgcaggcccgagagaaacagccggcagaaccgccagcccctctccgacggagggccgcatccgacggccagtacgagaatcagtcgccagaggcgacttcccccaggagcccgggagtgagatctcctgttcaatgcgtgtcacccgagttggcacttacaatcgccttgaaccctggaggcaggcctaaagaaccacacttgcactcgtataaagaagcgtttgaagagatggaggggacatccccctccagcccccctccgtccggcgtcagatcacctcctggactcgctaaaacacccctgagcgctcttggactcaaaccgcacaacccagccgacatcctgttacaccccaccggggtgactcgccgaaggatccagccagaggaagacgaggggaaagtagtggtgcggctgtctgaggagcctagatcttacgttgagagcgtggctcggaccgcagttgccggtcccagagcgcaggacagcgaacctaagagttttagtgccccagcaacccaagcctacgggcatgagatccccctgcggaacggtactttaggcggttcttttgtgtccccttcaccactttcaactagctcgcctattctgagtgctgattctacttcagtgggaagctttccctctggggagtcctcagaccaggggccacgcactcccactcaaccgctgctggagagcggcttccgcagtggcagtctcggccagccatcacctagtgcccagaggaattaccagtctagcagcccactaccaacagtgggaagctcctatagtagccctgactattccctacaacacttcagtagtagccctgaatcacaagcacgggctcagttttcagttgccggtgtgcatactgtgcccggttcccctcaggcaagacataggacagtgggtacaaatacccctcctagtccaggcttcgggtggagagctataaatccatccatggctgctcctagcagtcctagtctatcccaccaccaaatgatgggtcctcctggaactggcttccatggatctacagtgtcctctccacaaagtagcgcagctaccacacctgggtccccctccttatgcagacaccctgccggtgtttaccaagtgtctggactgcataataaggtggccactactcctggctcgccttctctggggagacaccccggagcgcatcagggcaatctcgcgagtgggctccattctaatgccattgcatcaccgggatcgcccagcctcggtcggcacctggggggatcaggaagtgtggttccaggctcaccctgcctggatcgccacgtcgcctacgggggttattcaacgcccgaggatagaaggccgaccctctcacggcagtcctccgcaagcggctatcaagccccttcaactccctcgtttccggtgagccctgcctactatcccggattgagctctccagctacctccccctctcctgatagcgccgcatttcgacagggtagcccgacgccagcccttccagagaagcggcgaatgtctgtgggcgatcgggcaggaagcctcccaaactatgccacgattaacgggaaggtcagctcacctgtcgcgagcgggatgagctccccctctgggggatctaccgtctcctttagccacacactacctgatttttctaaatactccatgccagacaatagccccgaaacccgcgctaaggtgaagtttgtccaggacacaagcaagtattggtacaaacccgagatctctcgagaacaggcaatcgccctcctgaaggatcaggagcccggagccttcatcatcagggatagccatagcttcaggggggcttatggactcgcaatgaaggtctcctctccccctcctacaatcatgcagcagaacaagaagggcgacatgactcacgaattggtgagacactttcttatcgaaaccgggcctcggggagtgaagctcaaaggatgccccaacgaaccaaacttcggatctctgagtgcactagtctaccagcattcaattatcccactggcgcttccatgcaagctggtgatccccaacagagatcccacagatgaatcgaaagatagttccggaccagctaacagcaccgccgacctgttaaaacaaggtgcagcttgtaacgtactcttcgttaacagtgttgatatggagagcctcacggggcctcaggctatttccaaagccacctccgagaccttggccgcagatccaacccctgcagccaccatcgtgcattttaaagtcagcgctcagggaatcactctaactgacaaccagagaaagctgtttttccgcagacactaccctctgaatactgtaactttctgcgacttagacccccaggagcgtaagtggatgaagaccgagggcggtgcccctgccaagctgtttggcttcgtggcacggaaacaaggatcaaccacggataatgcatgccacctgtttgccgaactcgacccaaaccagccagcatccgccatcgtcaattttgtgtccaaggtaatgctgaatgcaggccagaaaagatac

SEQ ID NO: 243741 - DNA, 1251 bp, synthetic construct
  misc_feature 1..1251: note = Description of Artificial Sequence: Synthetic coding sequence
  source 1..1251: mol_type = other DNA
atggtgccctttcaacagcgcaaggattgtgtgttagagggttctactagagtgactccttctgtacagcctcatttacaacccatcaggaatatgtcggtgtcgagaacgatggaagacagttgtgagctagatttagtttacgtcaccgaacgcattatcgctgtcagcttcccatcgactgccaatgaagaaaacttcagatccaatttgagagaagttgcacaaatgcttaaatcaaaacacggtgggaactatcttctattcaatcttagtgagcggagacccgacattaccaagctgcacgctaaagttttggagttcgggtggccagatctgcatacaccagccctcgaaaaaatttgtagcatatgcaaggctatggatacttggttgaatgcagatccacataatgtggtcgtgcttcataataagggcaatagggggagaattggagtggttatcgccgcatatatgcattacagcaacatatccgcatcagccgaccaagccctggacagattcgccatgaagagattctacgaggataagatagtacccatcggccagccaagtcagcgtcgctatgtccactacttcagcgggctcttatctgggagcattaaaatgaataataaacccctcttccttcaccatgtaatcatgcacggaattcccaacttcgaaagcaaggggggttgccgccctttcctgaggatttaccaggccatgcagcctgtgtacacctctgggatatataatattcccggtgattctcagacctcagtgtgtataacaatcgaacccggactgctgctaaagggggatattttactgaaatgctatcataaaaaattccgctctcccgcacgggatgtgatcttccgagtgcagttccatacctgtgccatccacgacttgggtgttgtttttggtaaggaagatcttgatgacgctttcaaagacgaccgttttcctgaatacgggaaagttgagttcgtcttctcttacggccctgagaagatccagggcatggagcatcttgaaaacggccctagcgtgtcagttgactacaatacatcagacccactgattcgatgggatagttacgataatttcagtggccacagggacgacgggatggaggacggtaacaagcaaaacactaatagtcagagtatcgggtctatctccggaggtttagaagaccagtatacttggccagatacacattggccttctcaatcctag

SEQ ID NO: 243742 - DNA, 312 bp, synthetic construct
  misc_feature 1..312: note = Description of Artificial Sequence: Synthetic coding sequence
  source 1..312: mol_type = other DNA
atgtccgtgagccggaccatggaggattcctgtgagctggaccttgtgtatgtgacagaaagaattattgccgtgtcgtttccttccacagccaacgaggagaactttagaagcaacctgcgggaggtggcccagatgttgaaatctaaacacggcggtaactatcttctcttcaacttgagtgaacgccgacccgacattacaaagttacatgccaaggtgcttgagttcggatggcccgatttacacaccccagccctggagaaaatctgtagtatctgcaaggcaatggacacctggctgaacgcctag

SEQ ID NO: 243743 - DNA, 5144 bp, synthetic construct
  misc_feature 1..5144: note = Description of Artificial Sequence: Synthetic coding sequence
  source 1..5144: mol_type = other DNA
atgagcgtgagcagaacaatggaggacagctgcgaactggatcttgtttatgttaccgagcgtattattgcggtgagttttccatccactgcaaacgaagagaacttcagaagcaacttgcgagaagtggcacaaatgcttaagtccaaacacggcggtaactacctactgtttaatttgtctgaacgacggccagacattacaaagctgcacgccaaggttttagaatttggttggcctgaccttcacacccctgctcttgagaagatttgcagtatttgtaaagccatggatacctggctaaacgctgatccacataatgtggtggttctgcataacaaagggaatagaggccgaatcggggttgttatcgctgcttatatgcattacagcaacatctccgctagtgcagaccaagccctagatagatttgccatgaaacgtttttacgaggacaaaatcgttcctatcggccagccttcccaaaggcggtatgttcactacttcagcggactactgtccggcagcatcaagatgaataataagccacttttcctccaccacgtgattatgcacggtattcccaactttgagtcaaaaggaggatgtagaccattcctgcgcatctatcaggcaatgcagcctgtgtacacttctgggatttacaatatacccggtgatagccagactagtgtgtgtatcacaatcgaaccaggactgctactgaaaggagacatcctgctgaagtgttaccacaagaaattcaggtcacccgcacgcgacgtgatcttcagagtgcaattccacacctgtgccatccacgatctgggggtggtgttcggtaaagaagatttagacgacgccttcaaggatgacaggtttccagagtacggaaaagtggagtttgtcttttcctacggccctgaaaagatccaggggatggagcatctggagaacgggccaagcgtctccgtggactacaatacttccgatccactgattaggtgggattcctacgacaacttctccggacatagagatgacggtatggaagaggtggttggccacactcaggggcctttggacggctccctttacgctaaggtaaagaaaaaggacagcttgcacggcagcaccggggctgtaaacgctacacggcctaccctaagcgctaccccaaatcatgttgaacacacattgtcagttagtagtgacagcggcaattcaaccgcctccaccaagacagataaaactgatgaacccgtcccaggagcctcttccgcaaccgctgcattgtcaccgcaagaaaaaagggagctggacagattgttgagcggatttggcctcgagcgggaaaagcagggtgctatgtaccacactcagcacttgcgaagtcgcccagctggtgggagcgcagtcccatccagcggccgtcacgtagtgccggcacaggtccatgtcaatggcggagccctggccagtgagcgggaaacagacattctcgatgatgaattacctaatcaggacgggcactctgccggatctatgggcactctctccagcttggatggagtaaccaacacaagcgaagggggttaccctgaagcattatcgcctctgactaatggcctggacaaatcataccccatggaaccaatggtgaacggaggaggctacccttatgagtccgcatcccgcgcaggcccagcccatgctggacacacggcccctatgaggccatcctactcggcccaggaggggttggccggttaccagagggagggccctcatcccgcttggcctcaacctgtaactacttcacactatgcccatgaccccagcggcatgtttagatcccaatccttcagtgaagcagagccccaattgccccctgccccagttcggggaggcagctctagagaggccgtccagcgtgggttaaattcatggcagcagcagcagcagcaacaacagcaacccagacccccaccgaggcaacaggaaagggcccatttggagtctctggtggcatctagacctagtcctcagcccctcgcagaaaccccaatcccgtctctcccagagttcccaagagctgcatcccaacaggagatcgaacaatccattgagaccctaaatatgctaatgctcgatctcgagcctgcttctgcagctgccccacttcacaagagccaaagcgtccctggggcatggcctggcgcttctcctctttcttcgcaaccactttcagggtcctcacggcagtcacatcccctcacacagagccggtctggctacattccctccggccattctctgggaacacccgagcccgctccgagagcgagcctcgagtccgtgccgccagggaggagctacagcccatacgattatcagccatgtctcgcagggccaaatcaagatttccattcgaagtctccggcatcatcatcccttccagccttcctgccaactacccacagccctcccggaccccagcagcctcccgctagcctcccaggtctcaccgctcagccgttgctctccccaaaagaggcaacctctgaccccagtagaacacccgaggaggagccactgaacctcgagggactggtagctcaccgagtggccggtgtgcaagcacgcgaaaaacaaccagccgaacccccagcaccactgaggaggcgcgctgcaagtgacggccaatatgaaaatcagagtcccgaagccacctcccccagaagccctggggtgagaagtcctgtgcagtgcgttagccccgagctggccctgacaattgctcttaaccccggaggaaggcctaaagagcctcacctgcacagttataaagaggctttcgaggagatggagggcacgtcaccgagtagcccccctccttctggagttagatctccgcctggcctggctaagacacctctatctgccctcggattgaagccgcataacccagctgacatactcttgcatccgactggggagccgaggtcatatgtagaatcagtggctagaactgcagttgcgggtcctcgtgctcaggacagcgaaccaaaatccttctccgcgcctgccactcaagcctacggccacgagatccccctccgaaacgggacgctggggggatcttttgtctcaccatctcctctctctacttcatctccaatcttgtccgccgatagcaccagcgttgggagctttccaagcggggagtcctcggaccagggcccacgcaccccgacacaacccttactggagtcaggctttagatcaggttctctcgggcagccctccccttccgcacagcgaaactaccagagttcatccccactgcccactgtaggatcgtcctacagctcaccggattacagtcttcagcacttctccagcagcccggaatcacaggccagagcgcagtttagtgtggccggtgtgcacacggtccccggatcccctcaggctcggcaccgaaccgttggcacaaacaccccccctagcccgggatttggctggcgtgccattaatccaagcatggctgcaccgtctagcccttcattatcccatcaccagatgatggggccacccggtaccggctttcatggcagtaccgtttcctccccacagtcctcagccgctacgactcctggttccccctcactatgccgccacccggcaggcgtatatcaggttagcggcctccataacaaagttgctaccaccccaggatccccctcactcggacggcatcctggtgcccatcaggggaatctggcctctggactacactcaaatgccattgcatcaccaggatccccgtctctgggtaggcatctgggcggatctggctctgtcgtcccgggaagtccttgcctggaccggcacgtagcatacggtggctactctacacctgaagaccggaggccaaccctgtcgaggcagtcttcagccagtggctaccaagcccctagtacgcctagcttcccagtcagtccggcatactatcccggacttagtagtccagccacctcgcccagcccagatagcgctgcattccgccagggctctccaacccccgctctccccgaaaagaggcggatgtccgtgggtgatagggcgggaagcttgccaaactacgcgacaatcaacgggaaagtcagttcccctgtggcgagcggtatgagcagcccctcgggcggaagtacagtctctttctcccacaccctccccgacttttctaagtattcaatgccagacaattctcctgaaactcgtgcaaaagtaaagtttgtgcaggacacgagtaagtattggtacaaacctgagatcagtcgggagcaggctattgctctgctcaaggaccaggagccaggtgccttcattattagagattcacacagtttcagaggcgcttacggcctggcaatgaaggtgtctagtcctccacccaccattatgcagcaaaataaaaagggcgatatgacgcatgagcttgtgagacacttcctgattgaaacgggacctaggggcgtgaagctcaagggatgccctaatgaacctaactttggtagtttgtctgccttagtctaccaacattccattatccctctggcactcccttgtaaactcgtgattcctaatcgagatcctactgacgaatctaaggattcttccggacccgctaatagtacagcagatctgctcaaacagggggcagcctgcaacgttctgttcgtaaacagtgtcgacatggagtctctgactgggccacaagccatctccaaggcaacgagtgagacgctggcagctgatcccacacctgccgctacaattgttcatttcaaagtttccgcccagggtattactcttactgacaatcagcggaagctgtttttcagaagacactaccctctgaacacagtcaccttctgcgacctcgaccctcaggagcggaaatggatgaaaactgagggaggggcacccgcaaagctgttcggatttgtggccaggaagcaggggtcaaccaccgataacgcctgccacttgttcgcggaactcgaccccaaccaacccgcaagcgcaatcgttaatttcgttagcaaggttatgctgaacgcgggtcagaaacggta

SEQ ID NO: 243744 - DNA, 186 bp, synthetic construct
  misc_feature 1..186: note = Description of Artificial Sequence: Synthetic coding sequence
  source 1..186: mol_type = other DNA
atgtctgtctccagaaccatggaagacagctgcgagcttgacctcgtttatgtgaccgagcggattattgctgtgtcgtttccttccaccgcgaacgaggagaattttcgaagtaacctgcgcgaggtggctcagatgctgaagtctaaacacggcggaaattacctcttattcaatctgagttag

SEQ ID NO: 243745 - DNA, 75 bp, synthetic construct
  misc_feature 1..75: note = Description of Artificial Sequence: Synthetic coding sequence
  source 1..75: mol_type = other DNA
atgtcagtgtcccggacgatggaagactcgtgtgaattggatctcgtatacgttaccgagagaattatcgcttag

SEQ ID NO: 243746 - DNA, 4338 bp, synthetic construct
  misc_feature 1..4338: note = Description of Artificial Sequence: Synthetic coding sequence
  source 1..4338: mol_type = other DNA
atggaagaggggcacgggctagatttaacctacatcacggagagaataattgcagtgtcatttccagctgggtgtagcgaggagtcatatctccataatctccaggaggttacgagaatgctcaaatccaaacatggcgataattatctggttctcaaccttagtgagaagcggtatgacctcactaaactaaatcctaaaatcatggacgtaggctggccggagcttcatgccccaccgctcgacaaaatgtgcaccatctgcaaagcccaggaatcctggctcaactctaacctgcagcacgtggtggttatccactgtaggggcggaaagggccgaatcggcgtggtcattagctcatacatgcactttactaacgtatcagcatccgctgatcaggcactggatcgctttgctatgaagaagttctacgatgataaagtgtcagcccttatgcaacctagccagaagcgctatgtacaatttttgtctgggcttctgtcaggttcggtgaagatgaatgcctcaccactgtttctgcacttcgtcatcctgcatgggactcccaattttgataccgggggtgtgtgtcgccctttcctaaaactgtaccaggccatgcagcctgtgtatacctctggaatctataatgtgggccctgagaatccttctaggatctgtatcgtcatcgaacccgctcagctgctgaaaggcgacgtgatggttaagtgttaccataaaaaatataggagcgccacccgggatgttatcttcaggctgcaatttcacaccggggcagtccagggctatgggttggtgtttggcaaggaagacttggacaatgcttctaaagatgaccgatttccggattacgggaaagtagagctcgtattttctgctaccccagaaaaaatacagggaagtgaacacctctacaacgaccatggcgtgatcgtggattacaacaccaccgaccccctgataagatgggacagttacgaaaacttgtccgctgacggcgaggtgcttcacacccaaggacccgtggatgggagtctgtacgcgaaagtgcgtaaaaaatcatccagcgaccctggcatccctggcggaccacaggcaattcctgcaaccaattccccagaccacagcgaccacacactctccgtgtcgagcgactctggtcattctacagcttctgctcgaactgacaaaactgaggagagactagccccaggcactcgacgcggtctctcagcccaggaaaaggctgagctcgaccagctgttaagcggcttcggattggaagatccagggtctagccttaaggagatgaccgacgcgagatccaagtactctggaactcgccatgttgtccccgctcaagtgcacgtgaacggcgatgctgccctgaaggaccgcgagactgacatcctcgacgatgaaatgccgcatcacgacctgcacagtgtagactccctgggaaccttaagttcctctgagggtccgcagtctgctcatctcggtccctttacctgccacaaatcctcccagaatagtctgctgtctgacggctttggttccaatgtaggcgaagacccacagggcactctcgtccccgacctcggtttaggaatggatggcccttacgaacgcgagcgcacgttcggttccagagagcccaaacagcctcagccactgctgaggaaaccttctgtatccgcccagatgcaggcttacggacaatcatcatacagtacccagacttgggtgcgacagcaacaaatggtcgttgcccaccagtattctttcgcccctgatggcgaggctcgcctggtgagtcgctgtcctgctgacaacccgggactagtccaggcccagcccagagtacccctgacccccacccgcggtacctcttctcgggtcgcagtgcagagaggggtcggtagtgggcctcatccccctgatacccagcagccatcgccatccaaagcattcaaaccccgttttcctggcgatcaggtggtgaatggagccggacccgagctctctacagggcctagccccggatcacccacactagatatcgaccagtctatcgagcagctgaacaggcttatactggaactggatccgactttcgagccgattccgacccacatgaatgccctgggatcccaggctaacggaagtgtgagccccgatagcgtgggaggaggattgcgcgctagttcaagactgcctgataccggagaagggcctagcagggctacagggcgtcagggcagcagtgccgagcagcctctgggcggacgattaagaaagttatccctgggccaatatgataatgacgctggcggacagctccccttctccaagtgcgcatggggtaaagctggcgttgactacgcacctaatttgccccctttcccatcacctgccgacgttaaggagacaatgacaccaggatatccacaggaccttgacatcatcgacggtcggatcctgtcttctaaggaatccatgtgtagcaccccagcttttccggtgtcccccgagaccccctatgtaaaaaccgctctgagacatcctcccttcagtcctccagaacctcctctgtcttcacccgcatcacagcataagggagggagagagcccagatcctgtccagaaaccctgacccatgctgtcggaatgtctgagagtcctatcggacctaagagcaccatgctgcgggctgacgcctcttcaaccccttctttccagcaggccttcgcttcctcgtgcacaatatcatccaacggccctgggcagcggagggaatcatcgagtagcgctgaaagacagtgggtggagtccagccccaagccaatggtgagcctgctcggttctggccgtcccactgggtcccccctgagcgccgaattctctggcacgcgcaaggactcaccagtgcttagctgctttccaccttcagagctgcaagcaccgtttcactcacatgagctaagtctcgccgaacccccagatagcctggcaccaccaagcagtcaagctttcctcggcttcggcaccgccccagtcggttccggtctcccacccgaggaagaccttggagcactgttagccaatagccacggggcatcacctacaccaagtataccgctcaccgccacgggcgctgccgacaatggcttcttgtcccacaactttctgacagtggcccctggccacagctctcatcattctcccggattgcaagggcagggagtgaccctgcccggacagccacccttacccgaaaagaagagagcttccgaaggtgaccgcagcttaggctctgtgtcccccagcagttccggttttagcagtcctcatagcggctccaccatttccattccctttcctaatgtgctgcccgacttttcaaaagcctccgaggccgcatcgccactccccgattcgccgggagacaagctggtgattgtgaagttcgtgcaggacaccagtaagttttggtataaggccgacatttcccgcgaacaagctatcgctatgttaaaggataaggagccgggatcctttattgtaagggattcccattcctttagaggtgcctatggcttggcaatgaaagtcgcgactcctccaccttccgttctgcagctgaataagaaagcaggtgatctggcaaatgaactcgtccgccattttttaatcgagtgcactcccaaaggagtgcgtctcaaagggtgcagcaacgagccctacttcggcagcttaacggctctcgtctgccagcacagcataactccattagctctgccttgtaaattgctcattccagagagggatccattagaggaaattgccgagtcaagccctcagaccgccgctaacagcgcagccgaattattaaaacaaggcgctgcttgtaacgtgtggtatctaaattctgtcgagatggagagcctgacgggacaccaggctatccagaaggctctgtccatcactcttgttcaagagcctcccccagtgtctactgtcgtgcattttaaggtctctgcccagggtatcactctgacagacaaccagcgcaagctgttcttcaggcgccattatcctgtgaactccgtgattttttgcgcattagatccccaggatagaaagtggatcaaggacggaccttccagcaaagtgttcggttttgtcgcaagaaagcagggctctgcgactgataacgtgtgtcatctatttgccgaacatgatcctgaacaacctgccagtgctatagtgaactttgtcagtaaagttatgatcgggtcacccaagaaggtgtag

SEQ ID NO: 243747 - DNA, 3618 bp, synthetic construct
  misc_feature 1..3618: note = Description of Artificial Sequence: Synthetic coding sequence
  source 1..3618: mol_type = other DNA
atggaggagggacatgggctggatttaacctacattacagaaaggattatcgccgtctctttcccagccggatgttccgaagagtcttatcttcataatctacaagaggtcacgcgtatgctcaaaagcaaacacggtgataactacctggtcctcaatctgagtgagaaacgctacgatttgaccaagctcaatccaaagattatggacgtagggtggcctgaattgcacgcacccccactggataaaatgtgtacaatttgtaaggcccaagaaagctggctaaattctaatctgcagcatgttgtggtgatacactgccgtgggggtaaaggcaggattggagtcgtgatcagctcttatatgcactttaccaatgtgtccgcatcagccgatcaggcgctggatcggttcgcgatgaaaaagttctacgatgataaggtgagtgccctgatgcagccatcccagaaaaggtacgtccagttcctgagcgggttgcttagcggctcagtgaagatgaacgcaagtccactcttccttcactttgtgatactgcacggtacccctaatttcgacaccggcggagtgtgccgcccattcctcaaactttatcaggccatgcagccagtatatacgtccgggatatacaatgtgggacctgaaaacccctcaaggatctgcattgtcatagagcctgctcagctgctcaagggggatgtcatgatgccccaccacgacctgcacagcgtggatagccttgggactctctcatccagcgaggggcctcaatctgcccatctgggcccattcacctgtcataagtcaagtcaaaattctcttctgagcgacgggttcgggagtaacgtcggtgaggatcctcagggcaccctggtgcctgacttgggcctgggaatggatggcccatatgagagggagcggacgttcggttctcgggagcccaaacagcctcagcccctgctccgtaagccatccgtgagcgcccaaatgcaggcttacggccagtccagctactccactcagacatgggtcaggcagcagcaaatggttgtcgcacatcagtacagctttgcccctgacggagaggcacgcctagtctcccggtgccccgctgataaccctggactggttcaggcgcagcctagagtaccactaactcctacacgtggtaccagttcgcgagttgccgtccagcggggagtgggcagtgggcctcatcctccagacacccaacagccctcaccaagcaaggctttcaaacctcggttccccggagaccaggtcgttaatggggctggcccagaattgtctaccggaccttcacctggcagtccaaccctggacattgatcagagtatcgagcagctgaatagacttatcctggaattagacccaaccttcgaacccatacctactcacatgaacgcgctgggcagtcaggcaaatggatctgtatccccggatagcgtgggtggcggtctaagagccagttcaagacttccagataccggggagggccctagcagagccacaggtagacaaggatcaagcgccgagcagccacttgggggtcgcttgaggaaactgagtctgggacagtacgataacgacgccggtggacagctacctttctctaagtgcgcatggggtaaggcaggcgtcgactatgctcccaatctcccaccattccctagccccgctgatgtgaaggaaacaatgacacctgggtacccgcaggacctggatattatcgatggtcgtattctcagcagcaaagagtcaatgtgcagcacaccagcattccccgtttctcccgagacaccttatgtgaaaaccgcgctgcgacaccctcctttctctccacccgaaccaccactttcctcccctgcgtcacagcacaagggagggagggagccacgctcatgccctgagaccctgacccatgccgtgggaatgtcagaaagcccaatagggcctaagagcaccatgctgagagccgacgctagctccactcctagttttcagcaagcatttgcgagctcttgcacgatctcttcaaatggacctgggcagcgacgggagtctagttcatctgctgagcgacagtgggtcgagtcatctcctaagcctatggtttcattactcggatcgggcagaccaaccggatctcccttgtcagcggagttcagcggaacccgcaaggatagtcctgttctgtcatgtttccctccgtcagaactgcaggctccgttccattctcacgaattgtcactggctgaaccacccgactcccttgctcccccatcctcacaggccttcttaggttttggaaccgctccagtgggcagtggactgcccccagaagaagatctcggtgctctgctggccaattcccacggggctagtccaacgcccagtatccccctgaccgccaccggcgctgcagacaacggctttctatctcacaactttctcaccgtggcccctggccacagtagccatcactcccctggccttcaagggcagggcgtgaccctccccggacaacctcctctacccgaaaagaagcgtgccagtgagggcgacaggtctctcgggagtgtgtccccctctagcagtggatttagttcaccacatagcggaagcacgatttcaatccccttcccaaatgtgctccccgatttttctaaggcttccgaggccgcttccccattgccggacagccccggagataagctggtcatcgtcaagttcgttcaggacaccagcaaattctggtataaggcagatattagcagagaacaggcgatcgccatgctgaaggataaggagcccggatccttcattgtgagagactctcattccttccggggagcttacgggttggccatgaaggtggccacaccaccacccagtgtgctgcaactgaacaaaaaggccggtgaccttgcgaacgagctggtgagacacttcctcattgagtgcaccccgaagggagttcgcctgaagggatgctccaacgagccctactttggatctcttactgctcttgtctgccagcactctattacacccttggcgctgccatgtaagttactgattccagagagggacccgctcgaggagatagctgagtcctctcctcagacagcggctaactccgccgcagagttgttaaaacaaggggctgcgtgcaacgtgtggtatctcaattccgtcgaaatggagagtttgaccggacaccaggctatccagaaagcactgtctattactctagtccaggaacctcctcctgtttcaacagtcgttcatttcaaagtaagcgcccagggcattacactcacagacaaccagcgtaaactcttctttagacgccactatcctgtgaactccgtcattttctgtgcactggatcctcaggatcgcaagtggataaaggatggcccatcgtcaaaagtcttcggctttgtcgcccgaaaacaagggagtgccactgacaatgtgtgtcacctttttgcagagcacgatccggaacaaccagcctccgcaatcgtaaatttcgtctccaaggtgatgataggatcgcccaaaaaggtttag

SEQ ID NO: 243748 - DNA, 4338 bp, synthetic construct
  misc_feature 1..4338: note = Description of Artificial Sequence: Synthetic coding sequence
  source 1..4338: mol_type = other DNA
atggaagagggccatgggttagacttgacctacataaccgagcggatcatcgcggtatcttttcctgccggatgcagcgaagagtcttacctacataatctgcaggaagtcacccgtatgctgaagtccaaacacggcgataattacctcgtactgaatctcagcgagaaacgctacgatctgactaagttgaatcccaagatcatggatgtcggctggcccgaactccacgcaccgccactggacaagatgtgcaccatctgcaaggctcaggaatcctggctcaacagcaatctgcagcacgtggtggtcattcattgccgagggggaaaaggcagaataggggtggttatttcaagctacatgcacttcacaaacgtctcagccagtgccgaccaggcccttgaccgattcgcaatgaagaagttctatgacgacaaggtcagtgctcttatgcaaccgagtcagaaacgctacgtccagttcctgtcaggactcttgtccgggagcgtgaaaatgaacgccagtcctctattcttgcattttgtgattttacacggcaccccgaacttcgacactggaggcgtctgtaggccatttcttaagctgtatcaggccatgcaaccagtgtacaccagtggaatctacaacgttgggcctgaaaaccctagtcgcatctgtattgtgattgaaccagcgcaattgttgaagggcgacgtgatggtaaaatgttatcataagaaataccgcagtgcgactcgggacgtaattttcagacttcaatttcataccggtgcggtgcaaggctacgggttggtctttggcaaggaggatctcgacaacgcttccaaagatgacaggttcccagattatggtaaggttgaactcgtattttccgccacaccggagaaaatccaggggtcagaacatctgtataacgaccatggggtgattgtggattacaatactacggatcccctgatcaggtgggattcatacgagaatctcagcgcggatggcgaagttctccacacgcagggaccagtggacggctcactgtatgccaaagtaagaaaaaaaagctcctccgatcccggaattcccggaggccctcaagccatcccagccacgaatagccccgaccatagtgaccacacactcagtgtgagctccgattcaggtcattccaccgcgtccgctcgtaccgataagacagaggagcgcttggcccctgggacaaggcggggtctctccgcccaggagaaggccgagcttgaccagctactgtctggcttcggactcgaagaccctggttcttcgctcaaggagatgactgatgccagatccaagtactccgggacgagacatgtggtcccagcacaggtgcatgttaatggggacgccgctctgaaggatagagaaacggacattttggacgacgagatgccacatcacgatctccactctgtggacagcttaggcaccttgtctagcagtgagggcccacaatccgcccacttagggcctttcacatgccacaaatcgtctcagaacagtctattaagcgatgggttcggatccaacgtgggcgaagacccccaaggtacgctggtgccagatttaggacttgggatggatgggccttacgaaagagagaggacattcggtagtagggagcccaaacagcctcagccattactccggaaaccgagcgtgagcgcacaaatgcaggcctacgggcaaagttcttatagcacacaaacctgggtaaggcaacagcaaatggtcgtggctcatcagtactccttcgctccagacggggaagccaggctggtttccagatgccctgccgataaccccggtctggtgcaggcacaacctagagtgccactgactcctacaagaggtacatccagtagagtggccgtgcagcggggagtgggtagtggaccgcaccccccagatacacagcagccgtctccttctaaagcgtttaaacctaggttccctggagatcaagtcgtgaacggcgcagggccagagttatccaccgggccatctcccggaagtccaaccctagatatagatcagtctatcgaacagctgaatcgcttgatccttgagctcgatccaactttcgaaccgatcccaacacatatgaatgcactggggagtcaagccaatggatccgtctcccccgactctgtcggcggtggactccgcgctagctcccggttacctgatactggagaaggccctagtcgcgcaaccggccgtcaaggctccagcgctgagcaacctctgggcggtaggctacgcaagctatccctgggacagtatgataatgacgcgggtggacagctgcctttctcaaaatgtgcatggggaaaagctggagtggattatgctcccaacctccctcccttccctagtccagcagatgtgaaggaaacaatgacacctggctacccacaagacctggatattattgatggccgaattctgtcttcaaaggagagcatgtgctcaacccctgcctttcccgtcagccctgagaccccatacgtgaagaccgcattacgtcatcccccatttagcccaccggagccgccactttcaagcccagcaagtcagcacaaaggcggacgtgaacctcgatcctgccccgaaactctgactcatgctgtaggaatgtctgagtcaccaattggaccaaagtctaccatgttgagagccgacgcatcctcgacacccagctttcagcaggcttttgcctcttcctgcactatcagctccaacggaccaggccagcgtagggagagctctagcagcgccgaacggcagtgggtggaaagcagccccaaacccatggttagcttactcgggtcagggcgtcccaccggatcacctttgagcgccgagttcagcgggacccgcaaagattcccctgtgcttagttgttttccaccatcagaattgcaggccccattccattctcatgaactctccctggccgagccccctgacagcctagcccctccctccagtcaagcctttttgggtttcgggaccgcgcctgtcggttcagggctcccccctgaagaggatctaggagccctgctagccaacagccacggggcatcgcctactccatccatccctctcacagcaacgggagcagcggataacggctttctttctcataattttctcacggttgcaccgggtcatagctcacatcactctccagggcttcagggacagggagtcaccctgcctggccagcctcccctgcccgagaagaaacgcgcaagcgagggtgaccggtcactgggaagcgtgtctccctccagtagtggatttagctcgccacattccggtagtactatcagtatcccatttccaaatgtgttgcccgacttctcaaaagcatctgaagcggcttctcccctgcccgactcccctggagacaaactggtaattgtcaagtttgtccaggatacgagcaagttttggtataaggctgacattagtagagaacaggcaatcgccatgctgaaggataaggaaccaggatcgttcattgtccgagatagccacagcttccgcggagcctacggtttggcaatgaaagtggctaccccgcctccatccgttttgcagctaaataagaaagcaggcgatctcgccaatgagctggtgcggcattttctgatcgagtgtacgcctaaaggtgtccggctgaagggctgctcaaatgagccctatttcggatctctcacagctttagtatgccagcattcgatcacccccctggctctcccgtgcaaacttctcattcctgagcgcgaccccttagaagagatcgccgaaagctccccccagacggccgcaaatagcgcagcggaactacttaaacagggggcagcatgcaacgtgtggtacttaaattccgtagaaatggagtccctgacgggccaccaagctatccagaaggccctcagcatcactttggtgcaggagccaccaccggtttccactgttgtgcactttaaggtgtccgcccagggcattaccttgactgacaaccagcgtaagcttttttttagacgacactacccagtgaattccgtcatattttgcgcactggacccacaggataggaaatggataaaggatgggcctagcagtaaggtgttcgggttcgtagccagaaagcaaggctcagcaacagacaatgtgtgccatctttttgctgagcatgatccagagcagcctgctagcgccatcgttaactttgtctctaaagtgatgataggctcccccaagaaggtatag

SEQ ID NO: 243749 - DNA, 327 bp, synthetic construct
  misc_feature 1..327: note = Description of Artificial Sequence: Synthetic coding sequence
  source 1..327: mol_type = other DNA
atggaggagggtcacggcctggacctgacttacattaccgagaggattattgctgtatcgtttcccgctggatgcagcgaggagtcatacctccataacttacaagaggtaacacgcatgctgaaaagcaaacacggggacaactatctggtgctcaacctctcggaaaaacggtatgacctgacaaagctgaaccccaaaatcatggatgtgggctggccggaactgcacgcacccccactcgacaagatgtgcactatttgcaaagcccaggagagctggctaaactctaatctccagcatgtggtggtgatccactgtcgctag

SEQ ID NO: 243750 - DNA, 417 bp, synthetic construct
  misc_feature 1..417: note = Description of Artificial Sequence: Synthetic coding sequence
  source 1..417: mol_type = other DNA
atggaggaggggcacggtctggacctgacctacatcaccgagcgcataatcgctgtgtcattcccagcaggatgtagcgaagagtcttatttgcataacttacaggaggtgacacgcatgcttaagagtaagcacggtgataattacctggtacttaacctgtctgagaaacgatacgatctgacaaagctgaacccaaaaattatggatgtgggctggcctgagctgcatgccccacctctggacaaaatgtgtacgatctgcaaagcgcaggaatcatggttaaacagcaacttgcagcacgttgtggtcattcactgtaggggaggaaaaggcaggataggcgtggtgattagttcgtacatgcatttcaccaatgtgagcgcctctgcagaccaggcgctggatagattctag

SEQ ID NO: 243751 - DNA, 753 bp, synthetic construct
  misc_feature 1..753: note = Description of Artificial Sequence: Synthetic coding sequence
  source 1..753: mol_type = other DNA
atggaggaaggacatggcctcgacctcacctatattacagagcgtattatcgcagtgagcttccctgcaggatgcagcgaggagagctatcttcacaacctacaagaggtgacaagaatgctaaaaagtaagcacggagacaactacttggtgctaaacctaagcgagaagagatatgacctgaccaaattgaaccccaaaatcatggatgtcggctggcctgaactgcacgcccctcccctggacaagatgtgtactatttgtaaagctcaagagagctggctaaacagcaacctccagcacgtggtcgtgatccactgcagaggcggaaagggtcgcatcggtgtggtcatttcgagctacatgcacttcactaacgtgagcgcctcagccgatcaggcgttagatcgctttgccatgaagaagttttacgacgacaaggtgagtgccctcatgcagccgagtcagaaacggtatgtgcagtttttgagtggactgttgtccggctccgtgaaaatgaacgcatcccctctattcctgcattttgtaattcttcatggtacacctaatttcgataccgggggagtgtgtagacccttcctgaaactgtatcaggctatgcagcctgtatatacatcaggcatttataatgtgggtcccgagaatccaagccgaatctgtatcgtcattgaacccgcacagctactgaagggcgatgtgatggtgatgaattataatatcgccaacatttag

SEQ ID NO: 243752 - DNA, 753 bp, synthetic construct
  misc_feature 1..753: note = Description of Artificial Sequence: Synthetic coding sequence
  source 1..753: mol_type = other DNA
atggaagagggccacggcttggacctaacctatatcacagaaaggattatcgctgtgtcatttcccgcaggctgttctgaagaatcatacctgcacaatctgcaggaagtgacaagaatgttgaaaagtaagcatggagacaactacctggtcctcaatctcagtgagaagcgatatgacctgacaaagttaaaccctaaaatcatggatgttgggtggcctgaattgcacgcccctcccctggataagatgtgcacgatctgcaaggctcaggaaagctggctgaactcaaatttacagcacgtcgtggtgatccattgccggggaggaaagggaaggataggcgtggtgataagcagctatatgcacttcacgaatgtatcagcctccgccgaccaggccttggatagattcgctatgaagaagttctatgacgataaggtctccgcattgatgcagccgtctcagaaaagatacgttcagttcctcagtggattgttatcaggtagcgtgaagatgaatgctagcccactgttcctgcactttgtgatcctgcatggaacacccaactttgacaccgggggtgtgtgtaggccctttctgaaactctaccaggccatgcaacctgtgtatacaagtgggatttacaacgtcggacccgagaatccttccagaatttgtatagtgatagaaccagctcaactgctgaaaggagatgtgatggttatgaactacaacatcgccaatatctag

SEQ ID NO: 243753 - DNA, 3816 bp, synthetic construct
  misc_feature 1..3816: note = Description of Artificial Sequence: Synthetic coding sequence
  source 1..3816: mol_type = other DNA
agccaagcactcaacgagagaatgaactggctttgcagaaatcaggaccctaaccctccacctcagccagaagagctcactagttccttgcacgcctttaaaaacaaagccttcaagaagtcaaaggtttgcggggtttgtaaacagatcatcgatggtcaaggaatctcttgcagagcctgtaagtactcatgtcataaaaaatgtgaggcgaaagttgtgattccgtgtggtgtacaagtgcggctggagcaggccccagggagttctactctgagctctagcctgtgcagggacaaacccctgcgtcccgtgatcctttcgccaacaatggaggaggggcacgggctggatctgacgtatattacagagaggatcattgctgtcagttttccggctggctgtagcgaggagtcttacttgcacaaccttcaggaagtgactcgtatgttgaagtcgaagcacggcgataattatcttgtcttgaacctttctgagaagagatacgatctgactaagcttaaccccaaaatcatggatgtcggttggcctgagctacatgccccaccgctggacaagatgtgtactatatgcaaggcacaagagagctggctaaatagtaacctgcaacatgttgttgtaattcactgtcgtggtgggaaagggaggatcggtgtggtcatcagttcttacatgcattttacaaacgtgtccgcatccgctgatcaggcactcgacagatttgctatgaagaaattctatgacgacaaagtgtctgcgctcatgcagccgtctcagaagaggtacgtccagttcctgagcgggctgctgtccggctcagtgaaaatgaacgccagcccgttgtttctgcattttgtcattctgcatggcacgccaaactttgacactggcggagtgtgcagaccttttctgaaactctaccaggcaatgcagccagtctacaccagcggcatttataacgtgggccctgagaacccatcacgcatttgtatagtcattgagcccgctcaactcctcaaaggcgatgtcatggtgaaatgctatcacaaaaagtaccgatctgccacccgcgacgtcatatttagactgcagttccacactggcgctgtgcagggatatggccttgtgtttggtaaggaagacctggacaacgcctctaaagatgaccggttccccgattatggcaaggtcgaactcgtgttcagcgcaacgccagaaaagatacagggcagcgaacatctgtacaacgaccatggagtcatagtcgattataatactacagaccccctgatccgatgggacagctacgaaaacctctctgctgatggagaggtcctgcacacgcagggcccagtcgatggctcactctacgcaaaggtgcgaaaaaagtcttcatccgatcctggaatccctggaggaccgcaagccattccagcaacgaattcccctgatcactcagatcacaccttgtcagtgtcatccgattctggccactctaccgcctccgcaaggacggataaaactgaagagagactggcaccaggcacacggaggggcctctccgcccaggaaaaggctgagcttgatcagctgctatctgggtttggactggaggatcccggaagttctctgaaggagatgaccgacgctcggagtaagtattccgggactaggcatgttgtccctgcacaggtacacgtaaatggagatgccgcacttaaagacagagaaacagatattttagatgatgaaatgccccaccacgaccttcacagcgtggacagcctgggtacgctttccagcagtgagggcccacagtccgcccatctaggcccattcacttgccacaagtcctcccaaaattctctgctctccgatggattcggatccaacgtgggtgaagacccacaaggcactctcgtgcctgacctgggactcggtatggacggcccttacgagcgggaacggactttcggcagcagggagccaaagcagccacagcccctcctcaggaagccaagtgtcagcgcccaaatgcaggcctatggtcagtcctcttactcgacccagacttgggtgcgacagcagcaaatggtcgtggcacaccagtactccttcgcaccggatggtgaggcgcgtcttgtgtcacggtgtccggctgacaatcctggcctcgtgcaggcgcagccccgagtgccattgacccctacacggggtacgagctctcgagtggctgtgcagcgcggagttggctcaggccctcacccccctgacacgcagcaacctagtcccagcaaagcctttaagcccagatttcctggagaccaggtggtgaacggtgctgggccagaactatcaacaggaccttcgcccggaagcccaaccctggatatcgatcagagcattgagcagcttaaccggctgattctagagctcgatcccaccttcgaacccattccgactcatatgaacgcgttaggatcccaggctaatggttccgtgtccccagatagtgtcgggggaggactccgggcttcctcacgccttccggacactggtgagggtcctagccgggctaccggcaggcagggctctagtgcagaacagccgctgggcggaagactgaggaagctgtcgctcggccagtatgataacgacgcgggaggccagctcccattcagcaaatgcgcatggggaaaagctggtgtcgattatgccccaaatcttccaccctttccaagcccggctgatgtgaaagagactatgacccctgggtaccctcaggatctagacatcattgatgggagaatcctgagctcaaaggaatccatgtgctctaccccggctttccccgtcagcccggagacaccttatgtgaagaccgccttgcgccatcctcctttctcccctccagagccccctctgagcagtcctgcctctcagcataaaggaggacgcgagccgaggagctgcccagagacactgactcacgccgtcggcatgagtgaatcacctattggtccaaagtccactatgctaagagccgatgcgtcaagtaccccctcattccagcaggcttttgctagtagctgtaccatctctagcaacggccctggtcagcggagagaatcctctagcagtgccgaaagacagtgggtcgagagctcgcccaagcccatggtctcacttctcggcagtgggaggccaaccggctcaccgctgtccgctgagttcagtggaacacgaaaggattctccagtactgtcatgctttccacccagcgaactgcaggctccgtttcacagtcacgaactttctctcgccgagcccccagactccctagcgcctccatccagccaggcatttctgggattcggaacagctccagtcggtagcggactcccacctgaagaggacctgggagcccttcttgcaaatagtcacggggcttctcctacaccttctatacccctaacagctacaggcgcagccgacaacgggttcctcagccataactttttgactgtggccccagggcattcaagccatcactcccctgggttgcagggtcaaggcgtcacactgcctggccagccacctctcccagagaaaaaacgagccagcgaaggagatagatcgctcggatcagtttccccgagctccagcggcttctcctccccgcacagtgggagtacgatcagcatccctttcccaaacgtgttaccagacttctctaaagcatctgaagcccctaccttctatcagaccagtaaaccagacatcccaggcccttag

SEQ ID NO: 243754 - DNA, 2760 bp, synthetic construct
  misc_feature 1..2760: note = Description of Artificial Sequence: Synthetic coding sequence
  source 1..2760: mol_type = other DNA
atggacggcccatacgagcgggaacgaactttcggatcccgtgagcccaaacagcctcagccactgctgaggaaacccagtgtctcagcccagatgcaagcctatggccaaagtagctactctacccagacttgggtgcggcagcagcagatggtggtcgcccaccagtactcctttgctcccgatggcgaagcacgtctggtgagcaggtgcccagctgacaatcctggcctcgttcaggctcaaccccgagtccctctgaccccaacccgcggaacatcctctcgggttgccgtgcagaggggcgtcggatcaggaccccacccacccgacacacagcagccttcaccctccaaggcatttaaacccagatttccgggtgatcaggttgtgaacggggctgggcctgagctaagcacgggcccaagcccgggtagccctaccctggatatcgaccagagcattgaacaactgaacaggctgatccttgagctggatcctactttcgaacccatcccaactcatatgaatgccctcggaagccaggcgaacggctcagtcagtcccgactccgtgggtggcggactgcgcgcttccagccgactgccggacaccggtgaaggcccatcaagggcaactggtcggcagggttcgagcgccgagcagccactggggggacgcctgcgaaaactgagccttggccagtacgataatgacgccggtgggcagctgcccttctctaagtgcgcctggggcaaagccggagtggactacgcacctaatctaccccctttcccatcgccggcagacgtgaaagagactatgacccccggatacccccaggacctcgacatcattgacgggaggatcctgagtagtaaggagtctatgtgttctacccccgcttttccagtgtcacctgagactccttatgtgaagaccgcactgcgacatccccctttctctcctccagaacccccactatcctctcctgctagtcagcataaaggcggacgggagcccagaagctgtccagaaaccctcacacacgccgtgggaatgtctgagtcgccgatcggccctaaatcgaccatgttaagggccgacgcaagctccaccccgtcatttcagcaagcatttgcatcttcatgtactatttcctccaacggacctggacagcgtcgcgagtcctcttcctcagcagaacgccagtgggtcgagagctcccccaaaccaatggtctctctgctgggctctggtcggccaaccggttccccacttagcgcagagttcagtggcaccagaaaggattctcctgtcttatcctgcttccctccttcagaactccaggctccgttccattcccatgaattgagccttgctgagccaccagacagcctggctccccctagctcccaggcattcctgggctttggcacagcaccagtcggctcaggtctgcccccagaagaagacctcggcgcactcctggcgaactctcacggggcttcgccaacaccctctattcccctgaccgccaccggcgctgccgataatgggtttctcagtcataacttcctgacagtagctcctggccactcctctcaccactcacctgggcttcagggtcagggagtgaccctgccgggacagcctccattaccagagaagaaacgggcatctgagggtgatcggtccctggggtccgtctctcccagttcaagcggcttttcttccccacactccggaagcaccatctcaattccttttcccaatgtgctcccggatttctcaaaagcatcagaggccgctagtccactgccggactctccaggcgacaagctagtaatcgtgaagtttgttcaggatactagtaaattctggtataaggccgatatttcccgggagcaggctatcgccatgttgaaagacaaagaacctggatccttcatcgtgagggacagtcactctttcaggggcgcttacggcctcgctatgaaggttgccactccgccaccatcagtcctgcagctgaacaagaaggcgggtgacctggcaaacgaactggtgagacactttctcatagaatgcaccccaaagggggtcaggcttaaagggtgcagtaacgaaccttattttgggtccttgaccgccctggtttgtcagcacagtatcacacccttggccctcccatgtaagctgttaatccctgagagggatccactcgaagaaattgccgaaagttctcctcagacagcagcaaacagcgcagcagagcttctcaaacagggcgcagcttgcaatgtctggtatttgaattcagtcgagatggaatctctcaccggacaccaggccattcagaaagcactgagtattacgctcgtgcaagagccaccgcctgtgtcaaccgtcgtacactttaaggtgtccgcccaaggaattacactgacagacaaccagcggaagctgttttttcgacgccactaccctgtgaattcagtaatcttctgtgccctcgaccctcaggatagaaagtggatcaaggacggtccctcctcgaaagtgttcggatttgtggcccgaaagcagggcagtgcaacggacaacgtgtgtcacttgtttgctgaacacgacccggagcagcctgctcgggaaagtcaacgccataggggggctagagatgggcctcacgaggccatgcctcgacgccactctggctcacctgcaaacgtgctgttcgaactcatcggacaagtttag

SEQ ID NO: 243755 - DNA, 2148 bp, synthetic construct
  misc_feature 1..2148: note = Description of Artificial Sequence: Synthetic coding sequence
  source 1..2148: mol_type = other DNA
atgagccaagttatgtcttctccgctcctagccggaggacacgccgtgagtctcgcaccctgcgacgaaccgagacggacactacacccagctcccagccccagcctgccgccacagtgttcatattataccaccgaggggtggggggcacaggctctgatggccccagtgccatgtatggggcctccaggaagactccaacaggcccctcaggtcgaggctaaggccacatgcttcctgccgagtcccggagagaaggctctgggcactcctgaagatctcgacagttacatcgattttagtctggaatcactcaaccagatgattctggaattggacccgactttccagctcctcccccctggcacaggaggctctcaggcggagttggctcagtcgacaatgtctatgcggaaaaaggaggagagtgaggcactggacatcaaatatatcgaggtaactagtgccagaagtaggtgccacgatggcccacagcactgctcctctccctcagtgaccccaccattcggcagtctcaggtccggcggactgctgcttagtagggatgtgccacgtgagacccgatcctccagtgagagtctgatcttctcaggaaaccagggcaggggacaccagcgaccccttcccccttccgagggcctgtcacccaggcctccaaacagtccctctatttctataccctgcatgggttctaaagcctctagtccccacggcttagggtctccgctcgtggcgagccctagactcgagaagagattaggcggtctggctccacagagggggtcaaggatttcagtcctgagtgccagtcctgtctctgatgtaagctatatgtttggatcttcccagtcgctgctccatagctcaaattcctcccatcagtctagcagccggtccctggaatccccggctaactcatccagctccctgcattcgttgggcagtgtttctttatgtacacggccatccgatttccaggccccaagaaacccaacactgacgatgggccagcccagaactccccactctcctccccttgccaaagagcacgcctctagctgccccccttcaataacaaattccatggttgacatacccatagtgttgattaacggttgccctgagcccggatctagcccaccgcagcggaccccgggtcaccagaacagcgtccaacccggagcggcttcccccagcaatccttgtcccgcaacccgaagtaactcgcagacattgtccgacgctccttttaccacttgcccggaaggcccagctcgcgatatgcagccaaccatgaagtttgtgatggacacatcaaaatactggttcaaacctaatattacccgggaacaagcgatcgagttgttaaggaaggaggagccaggtgcatttgttatacgagactcttcttcctaccgcggatctttcggcctggctctcaaagttcaggaggtccccgcatccgctcagtctagaccaggagaggacagtaacgacctgattaggcattttttgattgagagtagtgccaagggtgtccacctgaagggcgctgacgaagagccttattttggttccctctcagcttttgtgtgccagcatagcatcatggctctggccctgccctgtaagttgactattcctcagcgcgagctgggaggcgcagacggagcctctgattctacagacagtccagcttcgtgccaaaagaagtccgccggttgccataccctatacctttcaagtgtgtcagtggagacattgactggcgcacttgccgtccagaaggccatctccacaactttcgaaagagacatcctcccaacccctactgttgttcacttcaaggtgacagaacaggggatcaccctcaccgacgtgcagcggaaggttttctttcgacggcattatcccctcaccactttgagattttgtggaatggacccggagcagcggaagtggcagaaatactgcaagccctcttggatctttggattcgtggcaaagtcccagaccgaaccccaagagaacgtgtgtcacctttttgcagaatacgatatggtgcaaccagcatctcaagtgattgggctagtgaccgctctccttcaggatgcagaaaggatgtag

SEQ ID NO: 243756 - DNA, 2148 bp, synthetic construct
  misc_feature 1..2148: note = Description of Artificial Sequence: Synthetic coding sequence
  source 1..2148: mol_type = other DNA
atgagccaagtcatgtcttctccactgctggctggcggtcatgccgtctctctggccccttgtgatgagccgagacggaccctccacccagccccatctccatctctacctccccagtgctcttactatactacggagggttggggcgcacaggcactgatggcccctgtcccttgtatgggcccacctgggcgtctccaacaggccccacaggtggaagctaaagctacctgctttctgccatcgcccggtgagaaagctctgggaactcctgaggatctggacagctatatcgatttttcactagagtcgttgaatcagatgatcctcgaactggaccctacttttcagctgctgcctccaggtactggcggaagtcaggccgaactggcacaaagcactatgtccatgcggaaaaaggaagagagtgaagccctagacatcaagtacattgaggtcacctccgctcggagtagatgccatgacgggcctcagcattgttcttccccctcggtgactccgccttttggttcactgcgatccggtgggctgctgttgagtagggacgtgccccgtgagactcggagtagttcagaaagtcttatttttagcgggaatcaggggaggggccatcagcgcccactcccacccagcgaggggctgagccctcggcctcctaactccccatcaatcagtatcccttgcatgggatccaaagcatcctccccacacggactgggctctccactggtggcctctcccaggctggagaaacgactgggaggactggcgcctcagcggggaagtagaataagcgtgctgagtgctagtccagtatctgatgtatcttacatgtttggctcaagtcagagcctgttgcatagcagtaactcttcccaccaatctagtagccgctccttagagtctcctgccaatagctctagctccctccatagcttaggctcggtgagtctgtgcactcgcccttccgattttcaagcgcctaggaatcccaccctgaccatggggcagccacggacgccgcactctccgcctcttgccaaggaacatgctagctcatgtccaccgtctatcacaaattcaatggtagacatccccatcgtgctgatcaacggctgtccagaacctggaagcagtccgcctcagcgcacacctgggcatcagaatagcgtccagccaggtgccgcatcaccttcaaacccttgccctgccacacggtctaatagccagaccctgagcgacgcgccttttacaacttgtcctgagggacccgctcgcgatatgcagccgaccatgaagtttgtgatggataccagcaagtattggttcaaacctaacatcacacgagaacaggcaatcgaattgcttcgcaaggaagaacccggagcgtttgtgattagagatagcagcagttaccgagggagcttcggtctagcactgaaagttcaggaggttcctgcttccgcccaatccaggcctggcgaagattcgaatgatctgatacgccattttctcattgagtcatccgccaaaggggttcatctgaaaggagccgacgaggagccttattttgggtcactatcggcatttgtgtgtcagcactcgatcatggcccttgcattgccatgtaaactgaccattccccaacgagagctcggaggagctgatggcgctagtgactccactgatagtccagcctcctgtcagaaaaagtccgcaggttgccacacattgtacctcagttcagtgtctgttgagactctgaccggggctcttgccgtgcagaaagccatttctaccacattcgaacgcgatatccttcctactcccacagttgtgcattttaaggtcactgagcaagggatcaccctcaccgatgtgcagcgcaaggtcttttttcgtaggcactacccactcaccaccctgcgtttttgtgggatggatccagaacagaggaagtggcaaaagtattgcaaaccaagttggatctttgggttcgtggcaaaatcacagacggaacctcaggaaaacgtgtgtcacctgttcgctgaatatgacatggttcaacctgccagccaagtgatcggcttggttaccgcactgcttcaagacgccgaacgcatgtag

SEQ ID NO: 243757 - DNA, 387 bp, synthetic construct
  misc_feature 1..387: note = Description of Artificial Sequence: Synthetic coding sequence
  source 1..387: mol_type = other DNA
atgcgccctgtccccgtgaggggggtacattctctccatcccagaccattcggtggaccagtctctttgccctggctgcgcacaggtcgctgccgctggggcctgggcctatacagacagcccagtctgctgccagaagagatttgcggagtctttttcagaagacattatcctttgacaactctgcgattctgcgggatggatccagagcaaagaaagtggcagaaatattgcaagccctcctggattttcggctttgtcgctaagtcccagacagagcctcaggagaacgtgtgccacctctttgcggaatacgacatggtccagcccgctagtcaggtcatcggactggttactgcgctactccaggatgctgaacgtatgtag

SEQ ID NO: 243758 - DNA, 4230 bp, synthetic construct
  misc_feature 1..4230: note = Description of Artificial Sequence: Synthetic coding sequence
  source 1..4230: mol_type = other DNA
atgaaatcttccggcccagttgagaggctgctgagggcgttgggccgtagggacagttccagagctgcttcgaggcctcggaaggccgaaccacacagtttcagggaaaaggtttttcggaaaaagccgcctgtgtgcgccgtctgtaaagttactatcgacggtacaggtgtttcatgtcgggtctgcaaagtcgctacgcaccgaaagtgtgaggccaaggtgaccagcgcttgccaggcactacccccagttgagcttcggcgaaacaccgcccctgtgcggcgtatcgaacacctgggaagtactaagagtttaaaccactcgaagcagagatcgactctgccgaggtcattctcactggacccacttatggagcgaagatgggatctcgatctgacatatgtgacggaaagaatcttagccgctgcatttccggctcgcccagatgaacagagacatagggggcacctccgcgagctggctcatgtactacagagtaaacaccgggataaatacctgctgttcaatttatccgaaaagcggcacgaccttactcgtctcaatcccaaagttcaagacttcgggtggccagagcttcacgccccaccacttgataaactgtgctcaatttgcaaagcaatggagacctggctcagtgccgatccgcaacacgttgtcgtcctgtactgcaaagggaataaggggaagctgggggttatcgtgtcagcctatatgcactactccaaaattagcgctggcgcagaccaggccctggcaaccctcacaatgcgcaagttttgtgaggacaaggtggctacggagcttcaaccttctcagcggagatacatctcttacttctccggcttgttgagcgggtcaatccgcatgaatagctcccctttgttcctgcattatgtcttaattccaatgctgcccgcatttgagcctggtacaggctttcaacccttcctcaagatttatcagtccatgcagttagtgtatacctctggagtttaccacatcgcgggaccgggtccgcagcaactttgtatctctctggagcctgccctcctgctgaaaggggacgtgatggtcacttgctaccataaagggggtcggggtacagaccgaactcttgtgtttcgggttcagtttcatacatgcactattcacgggccacagttaaccttccccaaagatcagctggacgaagcttggaccgacgagcggttcccatttcaggcctcagtcgagtttgtgttcagttcctcacctgagaagatcaagggcagcacaccaagaaacgacccctcggtgtccgtcgattataacactacagaacccgctgttaggtgggattcctatgaaaattttaatcagcatcacgaagacagtgtcgatggtagtctgacacacacaagaggccctcttgacggatccccatatgcacaagtgcaacgacctcccaggcaaacacccccagctccctctccagaacccccacctccacccatgctgtccgtctcttcagactccggccactcttcaaccctgaccacagagccagcggctgaatctccaggacgacccccacccacagccgcagagcggcaggagctagaccggcttttggggggatgcggcgtcgcttcgggcggacgcggagctggccgagaaacggccatactggatgacgaagagcagccaaccgtgggcggtggcccacaccttggggtatacccgggacatagaccgggattatcacggcactgctcttgccgccaaggttacagagagccatgtggcgtcccaaacggtggttactatagacctgaaggcaccttagaaagaaggcgcttagcatatgggggatacgaagggtccccccaaggatacgctgaggcatcaatggaaaaacggcgactgtgccggtcactgtctgaaggactgtatccctaccctcctgaaatgggcaagcccgctacaggagacttcgggtaccgcgcacccggataccgggaggtggttatccttgaggatcccggtctccctgcattgtacccatgtcctgcctgcgaagagaagctcgctctgccaacagccgcactctatggcctgcgtttggaacgagaggccggtgagggatgggcatcagaagctgggaagcctctcttacacccagtcaggcctggtcatccccttcctttgctgctgccagcctgtggccatcaccatgctcctatgcccgactactcctgcttgaagccacccaaggccggtgaggaaggccacgagggctgcagctacactatgtgtcccgagggtcgttatgggcatccaggatacccagccttagtgacctacagctatgggggtgctgtacccagctattgtccagcatatggtcgcgtcccacatagttgcggctctcccggagaaggcagaggctacccctctcctggagctcatagtcctcgggctggctccatctccccaggaagtcccccatacccacaatcaaggaagctgtcttatgagatacctaccgaggaaggtggggatcgatatcccctccctggacatctagccagcgccggtcctctggccagtgcggagagcttagagccggtgtcatggcgcgagggccctagcggacatagcacattgcctaggagcccaagggatgcgccttgcagcgcctcatcagaactgtctggaccatctactccactgcataccagctcaccagtgcagggcaaagagtccacacgccgtcaagacacccgcagccctaccagtgcacccactcagcgcctgagtcctggagaggccctgcctccagtgtctcaggctggtaccggcaaagcacccgagctacccagtgggagcgggccagagccgcttgcaccatccccagtttcccccacattcccaccatcatctccgtcagattggccgcaagagagatcccccggtggacactcagacggtgccagtcccagaagcccagtccccaccaccctgcccggactgcgccacgcgccatggcagggacccaggggaccacccgattctccggatggatcccctcttacaccggttccttctcagatgccgtggttggtggctagccctgaaccccctcagtcttcccccactccagcattcccccttgcagcgagttatgataccaacggacttagtcagccgcctttgcctgaaaagcggcacctcccgggtcctggccagcagccaggtccctggggtcccgagcaggcgtcttcccccgcacggggtataagccaccacgtgacattcgctccccttctcagcgacaacgttccccagactccagagccccctacccaagaatcgcagtccaacgtgaaattcgtccaggatacctcaaaattctggtacaagccccacctctcacgagaccaggccatagctctcctcaaggataaggatccgggagccttcctgattagagacagccatagcttccagggggcatacggcctggctttgaaagttgctactcctccgccatcagcacagccatggaagggggatccggtagaacaactggttaggcacttcctcatcgaaacaggccctaaaggagtcaaaattaagggatgtccctccgagccttattttggctctctgagcgccctggtatcccaacactccataagtcctatttcactgccttgttgcctccgcatcccctccaaagaccctttggaagagacaccggaggcccctgttcctaccaatatgtcgaccgccgcagaccttctaagacagggggcagcatgctcagttctgtacctgacctctgtggaaacagagagccttactggaccccaagccgtcgccagggcatctagcgctgccttgtcctgctcgcctaggccaacccccgcagtggtacacttcaaagtgtccgcccagggcattacactgaccgataatcagagaaaactcttctttcgtcgccactatccagtcaattcaatcacattttcatccaccgacccgcaagaccgtcggtggaccaacccagatgggaccactagtaagatatttggattcgtggctaagaagccaggatccccatgggagaacgtttgtcacttatttgctgaactggatcccgatcagcccgctggtgccatagtgacttttattactaaggtactgctgggccagaggaagtag

SEQ ID NO: 243759 - DNA, 4260 bp, synthetic construct
  misc_feature 1..4260: note = Description of Artificial Sequence: Synthetic coding sequence
  source 1..4260: mol_type = other DNA
atggatggagggggagtttgcgtgggcaggggagatctgttatcttctccccaggcccttggccagcttttgcgcaaggagagccgccctcgtagggccatgaagcccaggaaggctgaacctcacagtttcagggagaaggtgttccgcaaaaagccaccagtttgcgcagtgtgtaaggtaactatcgacggcactggggtgagctgcagagtctgtaaggtggccactcatcgcaagtgcgaggccaaggttacgtcagcgtgccaagcattaccaccagtggaactccgcaggaatactgccccagtgcggaggattgaacacctcggctctactaagtcactaaaccacagtaagcagcgctcaactttgcctaggtcattttctctggatccactgatggagcgcaggtgggatctcgatttgacatacgttactgagagaattctcgctgcagccttccctgccagacctgatgagcagaggcacaggggccatctcagagagcttgcccacgttttacagtccaagcaccgggacaagtatctgctctttaacctctcagaaaagcggcacgacttaacccgcctgaacccaaaggtgcaggacttcggttggcctgagttgcacgccccacccctcgataaactttgctccatatgcaaggctatggagacctggctcagcgccgacccacaacatgtagtggtgctatattgcaagggaaataaaggcaagctgggtgttatagtcagtgcctacatgcattactctaaaatcagcgctggtgccgatcaagccctggctacccttaccatgcgtaagttctgtgaggacaaggtggcaaccgaactccaacctagccagcgacggtatatatcttactttagcggactgctctccggatccattcgcatgaactcgagccctctgttcctgcactacgtgttgatccctatgctccctgcattcgaacccggtacaggattccagcctttcctgaagatctaccaatccatgcagcttgtttacactagcggggtgtatcacattgctggacccggacctcagcaactatgtattagcctggagccagcactgttacttaagggtgatgtgatggtgacttgttaccataagggcggacgcggtactgataggacgcttgtgtttcgcgtgcaattccacacatgtactatacacggccctcagttgacgtttccaaaagatcagctggatgaagcatggaccgatgagcggttccctttccaggcgtccgtggagttcgtcttcagctcctcaccagagaaaatcaaaggttccactccacggaacgatccaagtgtgtcagtggattacaatactacggaacctgctgtgaggtgggactcttacgagaatttcaatcagcaccatgaagatagcgtggacggaagcttgacccatactcggggaccactagacgggtcaccttacgcccaagtccagagaccacctagacagacccctccggctcccagtcctgaaccaccgcctccgccaatgctgtctgtgtcgagcgatagcggccattctagcactctcacaaccgagcctgcagctgaatctccaggaaggcctccccctaccgccgctgagcgtcaagagctggaccgcttactgggcggatgcggggtggccagtggtggcagaggtgctggtagagagacggcgatccttgacgatgaggaacagcctaccgtcggcggtggccctcaccttggcgtttaccctgggcaccgacccggactcagccgccactgtagttgtagacagggctatagggaaccttgtggcgtgccaaatggcggatactatcggccagagggcaccttagagcggaggcgccttgcgtatggtggatatgagggatctccccagggttacgcagaagctagcatggagaagcggagactgtgcagaagtctctcggaggggctctatccgtatcctccagagatgggaaagccagccacaggggacttcgggtatcgagccccaggctacagggaagtcgtgatccttgaggatcccggactgccagccctgtatccatgcccggcttgtgaggaaaaacttgctctgccaactgcagctctctatggtctgcggctggaacgcgaggcgggtgaaggctgggcctcagaagccggtaaacccctcctccatcccgtgcggcctggccaccctctgcctcttttgctgccagcttgtggccaccatcacgccccaatgcccgactactcctgtctaaaacccccaaaggccggtgaagagggccacgaagggtgctcttatactatgtgccctgagggcagatacgggcatccaggataccccgctttggtcacgtatagctacggtggagccgttccaagctactgcccagcatatggaagagttccccactcctgcggctcacccggtgaaggcagggggtaccccagccctggcgctcactctcctcgagccggttctatttcacccggaagccctccttatcctcagagccgtaagctaagttatgagatacctaccgaggaagggggagaccgatatcccttgcccggacacctggcaagtgcgggtccgctggccagtgccgagagtttggagccagtgtcatggagggaaggcccaagcggccattcaaccctacctcgctctccacgggacgccccatgttcggccagttcagaattgagtgggccttcaacgcccctgcacacgagttcccccgtccagggtaaggaaagcacacggagacaagatacgcgaagtcccacctccgcgccaacacagagattatctccaggagaggccttaccccctgtcagtcaagctggaaccggcaaagcaccagagctccccagtgggagcggacccgagccattggcgccttcccccgtgtccccaacctttcctccatccagtccttctgactggccccaggagcgcagtcccggtgggcactctgatggcgcttctccgagatccccagtgccaaccacattgcctggactgagacacgcgccatggcaggggccaagaggaccccctgactcccccgatggaagtcctttaacacccgtaccatctcaaatgccgtggctggttgcgtcaccagaacccccacagtcaagccccaccccagcattccctttggccgcttcttacgacacgaacgggttatcacagcctccactgccggaaaaacggcacctccccggtcccggacaacagcctggaccctggggtcctgagcaggcatcaagccccgcacgtgggatctcccaccacgtgacatttgcgcctctgcttagcgacaatgtgccccagacccctgaacctcctacccaagaatcccaatctaacgtcaagttcgtccaggatactagcaaattttggtataaaccccacctgtcccgggatcaggctatagcgttactcaaggataaagatcctggcgctttcctcatccgagactctcactcctttcagggggcttacggactggctctaaaggtagctaccccccctcccagcgcccagccctggaaaggcgatccagttgaacagctagtccgccacttcctgatcgaaacaggacctaaaggggtgaagatcaagggttgtccatcggagccttacttcgggagcctgtcggccctggtcagtcagcactcgatctcacccatctccctcccatgctgtttacggattccttcgaaggatcctttagaagaaacccctgaggcacccgtgcccacaaatatgagcacggccgctgaccttttgagacagggagccgcatgttcagtgctttatctaacatctgtagagaccgagtcgctgactggacctcaagccgttgctagggcctctagcgccgctctctcctgcagcccacgccctacccctgccgtcgttcacttcaaggtgtcagcccagggcatcaccctcacggacaatcagcgaaaactgttctttagaaggcattaccctgtgaacagcataacattttcttccaccgatccccaggatagacgatggacaaaccctgacgggactacttctaaaattttcggctttgtagcgaaaaagccgggttctccgtgggagaacgtatgtcatctgtttgcagaactggacccagatcaacctgcgggagcaatagtaacgttcattacgaaggtgctcctggggcaacgaaaatag

SEQ ID NO: 243760 - DNA, 3858 bp, synthetic construct
  misc_feature 1..3858: note = Description of Artificial Sequence: Synthetic coding sequence
  source 1..3858: mol_type = other DNA
atggagcgaagatgggaccttgatctgacctacgtcactgagaggattcttgcggcagcctttcccgctcggccagacgaacagaggcacagggggcatcttagagaactggcccacgtgcttcaatctaagcacagggacaaatatctgctgttcaacctgagtgaaaagcggcatgaccttacccgcctcaacccgaaggtgcaggatttcgggtggccagagctccacgcacccccattggacaaactttgcagtatttgcaaggctatggaaacctggctttcggccgacccccaacatgtggtggtcttatactgcaagggcaataaggggaagctaggcgtcatcgtgtctgcgtacatgcattatagcaaaatctccgctggagccgatcaggccctagcgacactgaccatgcgaaagttctgcgaggataaggtggcgactgaactgcagccatctcagagaagatatatttcctactttagcggtcttctatcaggatccataagaatgaacagctcaccgctgttcctgcactacgtgctcatcccaatgcttccagccttcgagcctggaactggctttcagccatttctgaaaatttaccaatctatgcagctggtttacacatccggagtctatcatatcgcaggccctggccctcagcaactttgcatctcactcgaacccgctctgctactgaagggcgacgtgatggtaacttgctatcacaaaggcggtaggggaacagatcgaaccctcgtcttcagagtacagttccatacttgcacaatacacggaccacaacttacattccctaaggatcaacttgacgaggcatggaccgatgagcgattcccttttcaggcttctgtggaatttgtcttcagtagcagccccgagaaaattaaaggatcgacaccacggaacgacccttccgtgtccgttgattataatacgaccgaacccgcagtccgctgggattcatacgagaatttcaatcagcaccatgaggacagcgttgacggaagtctgactcacactcgtgggcctcttgatggcagcccttacgcgcaagtgcagcgcccacctagacagactcccccagctcccagcccggaaccgccaccaccccctatgttgtcagtgtcctctgacagtggccatagtagcactttaaccacagaacccgctgcagaaagcccagggcgacctccgccaaccgctgctgagcggcaggaattggatcggctgttggggggatgcggcgtcgcatctgggggacgtggcgctgggagagagactgccatactggacgacgaggaacagcctaccgtcgggggtgggcctcatctgggcgtgtatcctggtcaccggccaggcttgtcgcgacactgttcctgccgtcagggctatcgagaaccctgcggggtccctaatggagggtactacagacctgaaggcaccctggaacggaggcgactggcatacggcggttatgagggcagtccacagggatatgcggaggcttctatggagaaaaggcgactgtgtagaagcctatccgaagggttatatccataccctcctgagatgggaaagcccgctaccggggacttcggttatagggctccaggataccgggaagtagtgatcctggaagaccccggattgcctgctctgtacccttgccctgcttgcgaggagaagcttgcactccccaccgccgcactgtacgggttacgtttagagagagaagccggtgagggctgggccagcgaggccggaaagccactgctccaccctgttcgaccaggccacccactacctttactgctgcccgcatgcgggcatcaccatgccccaatgcccgattatagctgcctgaaacctcccaaggccggagaagagggtcacgagggttgttcttacacaatgtgtccagaggggaggtatggacaccctgggtatcccgcactggtcacatattcatacggtggcgctgtaccaagttactgcccagcatacgggcgtgtgccacattcttgcggatcacccggagaaggtcgtggatatcctagtcccggagcccattcaccccgtgctggaagcatcagtcccggttcaccaccctacccacagagccggaaactgtcttacgaaatccccacagaagagggaggagataggtatcccctgcctggacatctcgcgagcgctgggccattggcttctgcagagagtctcgaaccggtgagctggcgcgaagggccatctggccactcaactctccctcgttcacctcgtgacgcaccttgttctgcttccagcgaactgagcggaccatccacccccttgcacacctcctcacccgttcagggtaaggagagtacaaggcgtcaggatactaggtcccctacatccgccccaacgcagcggttaagcccaggcgaagctctgcctcccgtgtctcaggccggaacggggaaggcccctgaactgccaagcggcagtggacccgagcctctggctccttcccccgtcagcccaacctttcccccatcctctcctagcgactggccacaggaacgctctccaggaggccacagcgacggtgccagccccaggagccccgtgccaactactctgcctgggctcagacatgccccatggcaagggccaagaggcccacccgacagcccagatgggtcgccactgactccagtcccaagtcaaatgccctggctggttgcttcccctgagccacctcaatctagccccacacctgcgttcccactggccgcatcatacgacacaaacgggctgagccagccacctctcccagagaaacggcacctccccggacctggacagcagcccggaccgtgggggcctgaacaagcttcgtcccccgctcggggtatctcacaccacgtgacatttgcacctctcctgagcgataacgtgccacaaacccccgaaccacctactcaggaatcccagtccaacgtgaagtttgtgcaggacacttccaaattctggtacaaaccacaccttagtagagatcaagcaatcgcccttcttaaggataaagacccgggtgcctttcttatcagggatagtcattccttccaaggagcttacggccttgctttgaaggtggccaccccacccccatccgctcagccatggaaaggtgatcctgtggaacagttggtgcgtcatttcctcatcgaaacgggacctaaaggggtcaagatcaaagggtgcccatctgagccctactttgggtctctaagcgctctggtgtcacaacacagtatctcacccatcagtctgccttgttgcctcaggatacccagtaaagaccccctggaggaaacacccgaggccccagtcccgacaaacatgtccaccgccgctgatttgctgcgccagggggctgcctgttccgtcctttacctgacgagcgtggaaacagagagcctgactggacctcaagccgtggcgcgagcaagcagtgctgcattgtcgtgttcgccacggcctacaccagccgtcgtccattttaaggtcagcgcacagggaatcacgcttactgacaatcaacggaaactctttttcaggagacactatccggttaattcaataaccttcagctctactgatccccaagaccggagatggacaaatccagatgggactactagcaagatttttggcttcgttgccaaaaagcctggctcaccatgggaaaacgtgtgtcacctctttgcagaattggacccggaccagccagccggtgctatcgtcacatttattaccaaagtcctgttagggcagcggaaatag

SEQ ID NO: 243761 - DNA, 2346 bp, synthetic construct
  misc_feature 1..2346: note = Description of Artificial Sequence: Synthetic coding sequence
  source 1..2346: mol_type = other DNA
atgaaatcatcagggcctgttgagcgccttctccgagccctcggcagaagagattccagtcgggctgcaagccgtccacgaaaagctgaaccccactcatttcgtgagaaggtatttaggaaaaagcctccagtttgtgctgtatgtaaggtcactatcgacggcacgggcgtgtcttgccgcgtgtgcaaggtggccacacaccgtaagtgtgaagcaaaggttacgtctgcctgtcaagctctcccccctgttgaactacggaggaatacagccccagttcgaagaattgaacatttaggatccacaaagtctctcaaccactccaagcagcggtcaacgctccctcggtcattctcgctcgaccctctcatggaacgaagatgggacctcgatctcacatacgtaaccgagcgtattctcgcagcagccttcccagcacggcctgacgaacagcggcacaggggccacctccgcgagctcgctcacgtgctccagtccaaacacagggacaagtatctcctgtttaacttgtctgagaagcgccacgatcttacccgattgaacccaaaggtgcaggatttcgggtggcctgagctgcacgctccgcctttggataaattatgctccatttgtaaggccatggagacatggctttctgctgacccgcagcacgtcgtcgtgctttactgtaaagggaacaaaggaaagctgggagttatcgtgagcgcttatatgcattactccaaaatcagtgcaggagccgatcaggctctggctactctgactatgcgaaaattctgcgaggacaaggttgctactgaactacagccaagccagaggcgctacatctcatacttttccggactgttgtccggcagcattagaatgaactcctccccacttttcctgcactacgtattgattccaatgctgcctgcgttcgagccgggtaccggttttcagccgttccttaagatctaccagagcatgcagctggtgtacactagcggcgtgtaccacattgccggacctggcccacagcagctgtgtatctcgctggagcccgcacttctgctgaaaggagacgtgatggtcacctgctatcacaagggagggaggggaacagaccgaaccctggtgttcagagttcagtttcatacatgtaccatccatggtccacagctgacatttccgaaggaccagctcgacgaggcgtggaccgacgagcgatttccatttcaggcctcggtcgaattcgtctttagcagttcaccggaaaagataaaaggcagtacccccaggaacgaccctagcgttagcgtggattataacactaccgagcctgcggttcggtgggattcctacgagaacttcaatcagcaccatgaagactctgtcgatggtagtctcacccacacacgcggtccactggatggtagtccctacgcacaggtccagaggccccctcgtcagactccccctgcaccaagccctgagccccctccacctcctatgctgtctgtcagtagcgactccgggcacagttcaaccctgactaccgagccagcagctgagagccctggaaggcccccacccactgctgccgaaagacaggaactcgatcgcctgcttggaggttgtggagtggcctccgggggaaggggcgcaggacgggaaaccgccatcctggacgacgaggagcagccaacagtaggcggaggcccacatttgggcgtctatcctggccacagaccagggttgtcaaggcactgctcttgtaggcagggatacagagaaccatgcggagtgcccaatggcggatactaccgacccgaagggacactggagaggcgacggctcgcctacgggggatacgagggctccccgcagggctacgctgaggcttcaatggagaaacggagattgtgccggtcgctgtccgaaggcctttatccatacccccctgaaatgggtaagccagccaccggcgactttggctacagggcctcgagcgccgcactatcatgcagcccgagacctactccggctgtcgtacatttcaaggtcagcgctcagggcattactcttacagataatcaacggaagctcttctttagaaggcactaccctgtgaattccattacttttagctcgaccgacccccaggataggcgatggaccaatccagatggaaccacctctaaaatcttcggctttgtggccaagaagccaggttccccatgggaaaatgtgtgtcatctgttcgctgagctggaccccgatcagccagctggcgcaatcgtgaccttcatcacaaaagtgttgctgggccaacggaagtag

SEQ ID NO: 243762 - DNA, 4200 bp, synthetic construct
  misc_feature 1..4200: note = Description of Artificial Sequence: Synthetic coding sequence
  source 1..4200: mol_type = other DNA
atgaagtcctcagggccagtagaacgcttgctgagagcactgggacgtagagactcctctcgtgccgcttcccgccctcgtaaagccgagcctcactcttttcgggagaaggtgttccggaaaaagccgccagtgtgtgccgtgtgcaaagttacgattgatggtactggggtttcatgccgtgtctgcaaggtggccacccatcgaaagtgcgaggcgaaagtcacatccgcatgtcaggcccttcctcctgtggagctccggaggaatactgccccagtcaggagaatcgagcacttgggttctaccaaaagcctaaaccacagcaaacaacggtcaactcttcctcgttctttcagtctagacccgctgatggagagaagatgggacctcgacctcacatatgtaacagagaggattctagctgcagcctttcctgcacgcccagatgaacagcggcacagaggccacctgagagagctggctcacgtgctgcagtctaagcatagggacaagtacctgctatttaatctgtcagagaagcggcacgaccttaccaggctaaatccgaaagtgcaggattttggatggcccgaactgcacgccccacctctggataaactgtgttcaatctgtaaggctatggagacctggcttagcgcggacccgcagcacgtggtagtgctgtactgtaaagggaataagggtaaactgggcgtcatagtatcggcatacatgcattattccaagattagtgccggagcagatcaggcacttgccacacttaccatgaggaagttctgtgaggataaggtggctacagaattacagccatcacaaagacgttatattagctatttctcagggctgttgtcaggctcaatccgaatgaactcctctcctctatttttacactacgtccttatcccaatgttacccgctttcgagccaggaaccggattccagccttttctcaagatctatcagtccatgcaactcgtgtacacgtctggtgtgtatcatatagcgggtcctggcccacagcaactctgcatctctctggaacccgctcttctccttaagggtgacgttatggtgacatgttatcataaaggaggtcggggaactgacagaacgcttgtgttcagagttcagtttcatacatgcactatacatgggcctcagctcaccttccccaaagaccagttggacgaggcgtggacggacgaaagatttccttttcaggcatcagtggagtttgttttctcaagttctcccgaaaaaatcaagggatctacgcccagaaacgacccatctgtgagcgtcgattataacaccaccgaaccggcagtgaggtgggactcatatgagaattttaaccagcatcatgaagatagcgttgacggctcactgactcacactcgtggccctttggacggtagtccatacgcccaggtgcagagacccccaaggcagacccccccagcaccgagccctgaaccgcctccaccacctatgctgagtgtgtcttccgactctggccatagttcaactttgacaactgaaccagccgctgaatcccccggacgaccaccccctacggcagcggaaaggcaggagctcgatcggcttctaggcggttgtggggtggcctccgggggtcgaggcgcaggacgcgaaaccgccatcctcgacgatgaggagcaaccgaccgtgggaggcggtcctcatctaggcgtgtacccgggacaccgccctgggctgagccgacactgcagctgcagacagggatatcgcgaaccttgtggggtccctaatggcggatattatcgtcccgagggaacactggaacgtcggagactcgcttatggcggatacgagggttcacctcaggggtatgcggaagcaagtatggagaaaagaaggctgtgccgttccctgtccgagggtctgtatccttacccacctgagatgggaaagccagcaacaggtgacttcggctaccgggctccagggtacagggaggtggtgattctggaggatcctggattaccggcactgtacccttgccccgcttctttgtacggcctgcggcttgaacgtgaggcaggcgagggatgggcctcagaagccggaaaacccctgctccaccctgttaggccgggtcatcctctccctctgttgctgcccgcttgcggacaccatcatgcccctatgcctgattacagttgtctaaagccaccgaaggccggtgaagaagggcacgagggctgctcgtacactatgtgtcctgagggcagatacggccatccgggatatccagccttagtgacatacagttacggaggagctgtaccatcttattgccccgcttatgggcgtgtcccacactcctgtggaagtccaggagaagggaggggatacccaagtccaggggctcactcaccgagggcaggtagcattagtccgggaagtccaccttatccccaatctaggaagcttagctacgaaatacccaccgaagaggggggtgaccggtatccgctcccaggccatctcgctagtgccggacccctggcctccgccgaaagtcttgagcctgtctcatggagagaaggacccagcgggcatagcacactgccgaggagtcctagggacgcaccttgttccgcctccagcgagctgtccggcccatctactcctctccacactagctctccagtccaggggaaagaaagcacccgtaggcaggacactcgttccccaactagcgctccaacgcaacgactatctccaggcgaagcgctgccacccgtgagccaagccggaaccggcaaagcccctgagctgccatcggggtcaggcccagagcctcttgcaccttcacccgtgtctcccaccttcccaccaagctcacctagcgattggccccaggaaaggtcacccggaggacactcagatggggcttcacctcgaagcccagtacccacgactctccccggactaagacacgccccatggcagggacccagggggcctccggattccccagacggctcacctttaacgccagttccaagccagatgccttggctggtcgcctcccccgagccaccacagagtagccctacccccgctttccctctcgctgccagctacgataccaacggcctgtcccagccaccactacctgaaaaacggcaccttcctggtcccggacaacagcctggcccttggggcccagaacaggcgagctcgccagcgcgtggaatctcccaccatgttacctttgcccctctgctttctgataatgttcctcagacaccagaaccgccaacccaggagtctcaaagcaatgtgaaatttgttcaggacacttccaagttttggtacaagccacatctatcgcgggaccaagctattgctttgttgaaggataaagaccctggggctttcctgatacgcgacagtcattccttccagggcgcttacggactggcactgaaggtcgcaactcctccaccttcagcgcagccttggaagggcgaccccgtggaacagttggtgcgtcactttctgattgagactgggccaaagggcgtgaaaatcaaaggatgcccgtccgaaccatacttcggtagtctttccgctttggtgtcccagcacagcatcagccccatcagcctgccatgttgccttagaattccaagtaaagatccactagaggagacaccggaggcaccagtccctacaaacatgagtacggccgctgacttgctgcgccagggcgctgcgtgttccgtgttgtatctcacaagcgtggaaactgagagcttaaccggaccgcaggcggtggcccgagcttcaagcgctgcattgtcctgttccccaaggcctacacccgcagtcgtacactttaaggtgagcgcccaagggatcacactgaccgacaatcagcgcaaattattttttcgtagacactatccagtgaacagcatcacattttcaagtaccgatccccaggatcgacgctggaccaacccagatgggactacatctaagattttcggattcgtggctaaaaaacccggatccccatgggagaatgtgtgtcacctctttgcagagctggacccagatcagcccgctggagctatagttacctttatcaccaaagtgcttctcggacagagaaaatag

SEQ ID NO: 243763 - DNA, 567 bp, synthetic construct
  misc_feature 1..567: note = Description of Artificial Sequence: Synthetic coding sequence
  source 1..567: mol_type = other DNA
atggattgccggaagatggctcggttttcctatagcgtgatctggataatggccatatctaaggtcttcgagctcggtttagtggccggactagggcaccaggagttcgcacggccaagtcggggttatttagcgtttagggatgattcaatttggcctcaggaggagccagcaattaggcctaggtcgtctcagcgcgtaccaccaatgggtatccagcactcaaaagaactgaacaggacctgttgcctgaacggtgggacatgcatgctgggctcattttgcgcctgcccccctagcttctatgggaggaattgcgagcacgacgtgcggaaagagaactgcggctctgtgccgcatgatacctggctccctaaaaaatgctcgctgtgtaaatgctggcacggccaacttagatgtttcccccaggcatttctcccgggatgcgatggacttgtgatggatgagcacctggtggctagtcggacccccgagcttcccccatctgccagaacgacaaccttcatgctcgtgggtatttgtctgtctatacagagctattactag

SEQ ID NO: 243764 - DNA, 519 bp, synthetic construct
  misc_feature 1..519: note = Description of Artificial Sequence: Synthetic coding sequence
  source 1..519: mol_type = other DNA
atggctatctcgaaggtgtttgagctgggtctcgtcgcaggcttagggcatcaggagttcgctcggcctagtcgcggatatttagcctttcgcgacgactctatatggcctcaggaggaacctgccattcgccctaggtcatctcagagagtgccgcctatgggtatccagcattctaaggaactgaacaggacatgctgtctcaacggcggaacttgcatgctagggagcttctgtgcgtgcccgccttcattttacggtcggaattgcgaacacgacgtgcgcaaagaaaattgcggatctgttccacatgacacttggctgccgaagaagtgctctctctgtaagtgttggcatggccagttgaggtgcttcccccaagccttccttcctggctgcgatggtctggtcatggacgagcacctagtggcctcccgcacccccgagcttccaccttccgctagaactacaacctttatgttagtgggcatctgcctctcgattcagtcttactactag

SEQ ID NO: 243765 - DNA, 645 bp, synthetic construct
  misc_feature 1..645: note = Description of Artificial Sequence: Synthetic coding sequence
  source 1..645: mol_type = other DNA
atgggtgcggctcactcagccagtgaggaggtgagagaactggaaggtaagactggcttctcgtcagatcaaatcgagcagcttcatcgaagattcaagcaactgagtggggaccagccgactatcagaaaggagaattttaataacgtgccagacctggagctgaatccgattcgaagtaaaattgtgcgggcattttttgacaaccggaacttgcgaaagggaccttccggtctagcagatgagattaacttcgaggatttcctgacaataatgtcatattttaggcctatcgataccacaatggatgaggagcaagttgagctctcccggaaagagaaactgaggttcctgtttcacatgtacgactctgactcagacgggcgtatcaccctcgaagaataccggaacgtggtcgaggagcttctgagcggcaacccccacatagaaaaggagagcgctcggtcaatcgctgacggagccatgatggaggcagcgagtgtttgtatgggacaaatggagcctgaccaagtatacgaaggcatcacttttgaggactttttgaaaatctggcagggaatagatatcgagacaaagatgcatgtgaggtttttgaatatggagacaatggccctgtgccactag

SEQ ID NO: 243766 - DNA, 804 bp, synthetic construct
  misc_feature 1..804: note = Description of Artificial Sequence: Synthetic coding sequence
  source 1..804: mol_type = other DNA
atgagacccagaagcggacctactcggaatcccaggttgagggcatttgctggggtgcctactcgcggacggactaggggccagtcacggagatgcgctgcggaagcatccgccggacccgagcgcgatgctcgtccgggtgctcctgccgcagggaccatgggtgccgcacatagcgcttcagaggaagtgcgcgagcttgaggggaaaaccggattcagttctgaccaaatcgaacagctccaccggagatttaaacagttgtcaggagaccagccaaccattcgtaaggagaattttaacaacgtgccagatttagagctgaatcccatcaggtcaaagatagtcagggccttctttgataatcgaaatctgcgcaagggcccttctggccttgcagacgagattaacttcgaggacttcctgactatcatgagctactttcgacccatcgataccacgatggacgaggagcaagttgagttatctcggaaagaaaaactcagatttctttttcacatgtatgactcagattccgacggacgcattaccctggaagaatacaggaacgtggtcgaagagctcctgtctggtaatccccacatcgagaaggagagtgcacgaagcatcgcagacggtgccatgatggaggccgcaagtgtgtgcatgggacagatggagcctgaccaggtatacgaaggcataacatttgaagacttcctgaaaatttggcaggggattgacattgagacgaaaatgcacgttaggttcttaaatatggagactatggcattgtgccactag

SEQ ID NO: 243767 - DNA, 564 bp, synthetic construct
  misc_feature 1..564: note = Description of Artificial Sequence: Synthetic coding sequence
  source 1..564: mol_type = other DNA
atgggggctgcccactctgccagcgaagaggtcagggagctggagggaaagactggcttcagttcagaccagatcgaacagttgcatagaagattcaaacagctcagtggggaccagcctaccattagaaatctgcggaaggggccatctggactggccgacgaaattaacttcgaggatttcttgacaatcatgagctatttcaggccaatcgatacgactatggatgaagaacaagttgaactgtcccgcaaggagaaactacgctttttatttcatatgtacgattcggattctgatggtaggatcactctcgaggaatataggaacgtggttgaggaactgctttccggcaacccacacatcgagaaagaaagcgcaagatccatcgccgatggcgctatgatggaggccgcatcagtgtgcatgggacaaatggagcccgatcaggtctatgagggtataactttcgaagacttcctaaaaatttggcagggaatcgatatagagaccaaaatgcacgtgaggtttctgaacatggaaaccatggctttgtgtcactag

SEQ ID NO: 243768 - DNA, 1266 bp, synthetic construct
  misc_feature 1..1266: note = Description of Artificial Sequence: Synthetic coding sequence
  source 1..1266: mol_type = other DNA
ttgaatctcgaagttaagtttaaaaaaatgggtctgggccatgagcaaggttttggagcgccatgcctgaagtgcaaagagaagtgcgagggtttcgagcttcacttctggcgaaagatttgtcgaaactgcaagtgcggtcaagaggagcacgatgttctgttaagtaacgaggaggaccgtaaggttggtaaactctttgaagacactaagtatacaacacttatagccaaactaaaatctgacggtatccctatgtacaagcgcaatgtgatgatccttaccaatcctgtcgctgctaaaaaaaatgtcagcattaacactgtgacgtatgaatgggccccaccagtgcagaaccaggccctggcacgccaatacatgcaaatgctacctaaagaaaagcagcccgtggcaggcagcgaaggggcacagtacaggaagaagcagcttgcaaagcagctgccagcccacgaccaagacccatctaaatgtcacgaactgtctccacgcgaagtgaaggagatggagcagtttgttaaaaaatataagtcggaggcattaggggttggggacgtgaagctgccttgcgaaatggatgctcaaggcccaaaacagatgaacatcccgggaggtgataggtctacccccgctgccgttggggctatggaagacaagtctgccgagcacaagcgcacacagtacagctgctattgctgtaagttgtctatgaaggaaggtgatccagccatttatgcggagcgcgctggatacgataaactgtggcatcccgcttgctttgtttgttctacgtgtcacgagctgctggtcgatatgatctacttctggaaaaatgaaaagctgtactgcgggcgacattactgcgattctgaaaaacccaggtgtgcagggtgcgacgaattaatttttagtaacgagtatacccaagcagagaaccagaactggcacttaaaacatttttgctgctttgattgcgactctattttggccggagagatctacgtgatggtcaacgacaaaccagtttgtaagccctgttatgttaaaaatcatgctgttgtatgtcagggctgtcataatgccatcgatccggaggtgcaaagggtcacttacaacaatttttcatggcatgcgtctacagagtgctttctttgctcatgttgtagcaagtgccttatcggacagaaattcatgcctgtagaggggatggtattttgctcggtcgagtgtaaaaagcggatgtcttag

SEQ ID NO: 243769 - DNA, 1266 bp, synthetic construct
  misc_feature 1..1266: note = Description of Artificial Sequence: Synthetic coding sequence
  source 1..1266: mol_type = other DNA
atggatttagaaaacaaggttaagaagatggggctcggacacgaacaggggtttggagctccttgcttgaagtgtaaagaaaaatgcgaaggcttcgagctgcacttctggagaaaaatttgccgaaactgtaagtgtggtcaggaggaacatgatgtacttctcagtaacgaggaagacagaaaagtaggcaagctgtttgaggacactaagtatacaacactgattgccaaacttaagtcggatggcattcccatgtacaaacggaacgttatgattttgacgaacccagtagcagccaagaagaacgtcagcataaacaccgtaacctacgaatgggcgcctccggtgcagaaccaagcgctggcacgccaatacatgcagatgctacccaaagaaaagcagcctgttgccggaagcgagggagcccagtatcgaaagaagcaactggcgaaacagctacccgcacacgaccaggacccctcaaaatgtcacgagctaagcccacgcgaggtgaaggagatggagcaattcgtaaagaagtacaaaagcgaggccttgggtgtcggtgatgtcaagctgccttgcgaaatggacgcccaaggtcccaagcagatgaacatccctggaggggatagaagcacccccgctgccgtcggagccatggaagacaaaagtgctgagcataaaaggacacagtattcttgctattgttgcaagctctccatgaaggaaggggaccccgcaatctatgccgaaagagccggatacgacaaactgtggcaccctgcctgcttcgtgtgcagcacttgccacgagctacttgtggatatgatctatttctggaagaatgaaaaactctactgcgggcgtcattattgcgatagcgagaaaccaaggtgtgcgggatgcgacgagctcatttttagcaacgaatacacccaagccgagaatcaaaactggcatctgaaacacttttgctgttttgactgtgacagcatcctggctggcgaaatctatgtcatggttaatgacaagccggtatgcaagccttgctatgtgaagaaccatgcagtggtgtgtcagggatgccataatgcgatcgatccggaggtacagcgggtcacctacaacaacttttcatggcacgcaagcactgagtgtttcctatgctcttgctgctctaagtgtttaattggccagaagtttatgccagtggagggcatggtattctgctccgtcgagtgcaaaaagcgaatgtcctag

SEQ ID NO: 243770 - DNA, 1239 bp, synthetic construct
  misc_feature 1..1239: note = Description of Artificial Sequence: Synthetic coding sequence
  source 1..1239: mol_type = other DNA
atggggctggggcatgagcagggctttggcgctccatgcctgaagtgtaaagaaaagtgcgagggattcgaattacatttctggcggaaaatttgtcggaactgtaaatgcggccaggaagaacatgacgttttgttgtctaatgaggaagatagaaaagttggcaagctgttcgaggacaccaagtacacgaccttaatagcgaaattaaaatccgatgggattccaatgtacaaaaggaacgtaatgattcttaccaacccagtggccgctaagaaaaatgtcagtataaatactgtcacctatgagtgggccccaccggtccagaaccaggcattggccagacagtacatgcagatgctgcccaaagagaagcaaccggtggctgggtccgagggagcacagtatcggaaaaagcagctggccaagcagttgccagcacacgatcaggatcccagcaagtgtcatgaactctcgccacgagaggtgaaggagatggagcagttcgtcaagaagtacaagtccgaggctctgggagtcggagacgtgaagttaccttgtgagatggacgcccagggcccaaaacaaatgaacataccgggtggggatcgttccacacccgcagccgttggtgctatggaagacaaaagcgccgagcataaacggacccagtacagctgctactgctgtaaacttagcatgaaggaaggggatcctgctatttacgccgaacgagccggttacgataaactgtggcacccggcttgtttcgtctgctctacctgccacgagctgttggttgatatgatttatttctggaagaatgaaaagctgtattgcggacgccactattgcgactcagagaaacctaggtgcgccggatgtgatgagcttatttttagcaatgagtacacccaggcagaaaatcagaattggcatctgaaacatttctgttgctttgattgcgatagtattctcgccggtgagatttatgtgatggtaaatgacaagcctgtgtgtaaaccctgctacgtgaaaaatcacgccgtcgtgtgtcagggctgtcataacgccatcgaccccgaagtgcaacgggttacgtataataatttctcctggcatgcctcaacggaatgcttcctgtgttcctgctgttccaagtgtctgatcgggcagaagtttatgcctgtggaaggtatggtgttctgcagtgtcgaatgtaaaaaaaggatgagctag

SEQ ID NO: 243771 - DNA, 540 bp, synthetic construct
  misc_feature 1..540: note = Description of Artificial Sequence: Synthetic coding sequence
  source 1..540: mol_type = other DNA
atgaaagaaggagatcctgccatttatgccgagcgcgcaggctacgataagttatggcacccagcctgctttgtatgtagcacctgccacgaattgctggtggacatgatctatttttggaaaaatgaaaagctctactgtggcaggcactattgcgacagcgagaaacccaggtgtgccggatgcgatgagctcatcttttcaaacgaatacacgcaggccgagaaccagaactggcatttgaagcatttttgctgttttgactgcgactccattctggcaggagagatctatgtaatggtgaacgacaagcctgtctgcaaaccatgttatgtgaagaatcatgccgtcgtgtgccagggctgccacaacgctatagatccggaggtgcagcgggttacctataacaacttcagctggcacgcatcaaccgagtgttttctctgcagctgttgttccaagtgtctgatcggacaaaagttcatgcctgtggaagggatggttttctgctccgtggagtgcaaaaaaaggatgtcctag

SEQ ID NO: 243772 - DNA, 804 bp, synthetic construct
  misc_feature 1..804: note = Description of Artificial Sequence: Synthetic coding sequence
  source 1..804: mol_type = other DNA
atgggtgccaggcaaatccagaccagctcgagtcaaacctcacccgaagaggctatgggcacacccaggatccagcacctgcttatcttgctggtgctgggcgctagtcttcttacatccggcttagagttatactgccagaagggcctctctatgaccgtcgaagcagaccctgcaaacatgttcaactggactaccgaagaagtggaaacctgcgacaagggcgctttgtgccaggagactatcttgattatcaaggcaggcaccgagaccgccattttggctaccaaaggatgcatcccagagggagaagaagctattacaatcgttcaacactcaagccctcccggtctgatcgtcacatcttactccaactattgtgaggactctttttgcaatgacaaagactctttgagccagttctgggagttttccgagaccaccgcctccaccgtaagcacaaccctgcactgccctacatgcgtggccctcggaacatgcttctctgccccaagtctcccatgtcccaacggcactaccagatgttatcaagggaagttggaaattactggcggaggcattgagagctcagtcgaagtgaagggatgtacagccatgatcggctgtcgactcatgtcaggaattctagccgtgggcccaatgttcgttcgggaagcctgcccccaccagttactgacacagccccgtaaaaccgaaaacggcgctacttgcctgcccattccagtgtggggcctgcaactcttgctgcctctgctgttgccatccttcatccatttctcatag

SEQ ID NO: 243773 - DNA, 789 bp, synthetic construct
  misc_feature 1..789: note = Description of Artificial Sequence: Synthetic coding sequence
  source 1..789: mol_type = other DNA
atacagacctcgtcttcccagacaagtccagaggaagcaatgggcacccccaggatccagcacctgctcatcctcttggtgttgggtgcttccctgcttacttcagggcttgagttgtactgtcaaaagggcctgagcatgaccgtggaggcagaccctgccaacatgttcaattggacgaccgaggaggttgagacttgcgacaagggcgctttgtgccaagaaacgattttgatcatcaaggccggaactgaaaccgcaatcctcgctaccaagggatgcatcccagagggagaagaagctatcacaatcgtgcagcactcatctcctcctggtctcatcgtgactagctactccaattactgtgaagattctttttgcaacgataaagatagccttagtcaattttgggagttctctgaaaccactgcaagcactgtatccacgacactacactgcccgacctgtgtagcacttggaacctgtttttctgctccctcattaccctgcccgaatggtacgacaagatgctaccagggaaaacttgaaatcacaggcggaggtatcgagagctctgttgaagtgaaagggtgcaccgccatgattggctgccggctaatgtccggtattctggcggtcgggcctatgttcgtgagagaggcttgtccccaccaactgctgacgcagccccgaaagacagaaaatggtgccacctgcctgccaataccagtgtggggcctgcagctcctgctgccattattactgcccagttttatccatttcagttag

SEQ ID NO: 243774 - DNA, 750 bp, synthetic construct
  misc_feature 1..750: note = Description of Artificial Sequence: Synthetic coding sequence
  source 1..750: mol_type = other DNA
atggggacccctagaatccagcacctgctcatccttttggtgctgggcgcttcgctgctgacttcaggactcgagttatattgccagaaggggttgagcatgacagtggaggctgatcctgccaacatgtttaactggacaacagaggaagtggaaacatgtgataaaggtgccctgtgtcaggagacaatcctgataataaaggctggcaccgagacagccatcctcgccactaagggatgcattccagagggagaagaagccattacgatagtgcagcattcgagtccgcctgggctcattgttacttcctattcgaactactgtgaagatagcttttgcaatgataaggattctctaagtcagttttgggagttttcagagacgactgcctcaaccgtgagtaccacgctccactgtccaacatgcgtggctctcggtacctgtttctctgctccatccctcccctgtcctaatgggacaaccaggtgttatcagggaaagttggagatcactgggggtggcattgagtcttccgtggaagtgaaaggttgcaccgccatgatcggctgtagactgatgagcggcattctcgctgtgggcccaatgtttgtccgcgaggcctgcccccaccagctgctcactcaaccacgcaagaccgaaaacggcgctacctgcttgcccattcccgtgtgggggctgcagctcctgcttcctctgctgttaccatcttttatacacttcagttag

SEQ ID NO: 243775 - DNA, 804 bp, synthetic construct
  misc_feature 1..804: note = Description of Artificial Sequence: Synthetic coding sequence
  source 1..804: mol_type = other DNA
atgggcgctcgccagattcagactagtagtagccagacaagccccgaagaggctatggggacacctcgcatccagcacttgctgatattactggtactcggcgcttcgctactgacatccggtctcgagctgtattgccagaaggggctcagtatgacagtggaagccgacccagcaaacatgtttaattggacaactgaagaggtggaaacatgtgataagggtgctctgtgccaggagaccatcctcattatcaaagcaggaacggagaccgcaattttagccaccaagggatgtatccccgagggagaggaggcgatcactatagtgcagcatagcagcccccctgggctaatcgttacatcttatagtaactactgcgaggattccttctgtaacgataaggatagcctttcccaattctgggagtttagtgagacaaccgcttctaccgtttctactactctgcattgtcccacctgcgtagccttgggcacctgtttcagtgccccatctctgccttgcccaaacggtactactcgctgctatcagggaaaactggagatcacagggggaggtatcgagtctagtgtggaggtgaaggggtgcactgccatgataggttgtagactgatgagcggcatactggcggtgggacccatgtttgtgagggaggcgtgcccccaccaactgcttacacagccacgcaaaaccgaaaacggcgcaacttgcctgcccatccctgtgtgggggctgcaactcctcctgcctttgctcctccccagctttattcacttctcctag

SEQ ID NO: 243776 - DNA, 2823 bp, synthetic construct
  misc_feature 1..2823: note = Description of Artificial Sequence: Synthetic coding sequence
  source 1..2823: mol_type = other DNA
atgattagtgcccactgtaacctacgtctgctttgttcttctgacagctcagcctcggcctcccaagtggctggaactacagaagtggtggaaaatcttgttactaacgataattctcctaacatccctgaggcaatcgaccgcctgttttctgatattgccaatataaaccgggagagtatggcagaaattacagatatccagattgaagagatggccgtgaacctctggaattgggcgttgaccattggaggcggatggctagtgaatgaagagcagaaaattcgcttacactatgtagcctgcaagctgttgtccatgtgcgaggctagtttcgctagcgagcagtccatccagaggctcatcatgatgaatatgagaatcgggaaggagtggctggatgccggaaacttcctgatagccgatgagtgttttcaggcagcggtagcttctctggagcagttatacgtcaagctcatacagcggagtagtccggaggccgacctaaccatggagaagattactgtggagtctgatcactttcgagtgctgtcataccaggccgaaagtgccgtggctcaaggggacttccagagagcctcaatgtgtgtgttacagtgcaaagatatgcttatgcgactgccgcagatgaccagcagtctgcatcatctttgctataatttcggcgtagaaacacagaaaaacaataaatatgaggaatcgtccttttggctgtcgcagagctacgatataggtaagatggacaagaagagcacgggcccagagatgttagcgaaggtgctccggttattagccacaaactacctggattgggacgacacaaagtactatgacaaggctcttaacgcagtaaatttagccaacaaggaacatctgtcaagccccggactattccttaaaatgaagattctactgaagggggaaacctccaatgaagaattacttgaggctgtcatggagatattgcacctggacatgcctctggacttttgtcttaacatcgccaaactgctgatggatcacgagagggaatctgtcggatttcattttctcaccattatccatgagcgattcaagagttctgaaaatatcggaaaggtgctgatccttcataccgatatgctattgcagcggaaagaagagctgttagcgaaagagaagatcgaggaaattttcctggctcaccagacaggtcgccaactgacagccgaatcgatgaattggctccataatattctgtggagacaggctgcaagcagcttcgaggttcagaattatacggacgctctacaatggtattactatagcctgcgcttttactcaacggacgagatggacctcgacttcaccaagctccagaggaatatggcatgctgctaccttaatttacaacagctagacaaagctaaggaggccgttgccgaagctgaacgccacgaccccagaaacgtgttcacgcagttttacatttttaaaattgcagtcatagagggaaattccgagagggctttgcaggcaattatcaccctggaaaatatcctgacggatgaagaatccgaggacaacgaccttgtggctgagaggggttctcccactatgttgctttctcttgctgcacagtttgctctcgaaaacgggcagcagattgtcgctgaaaaggccctggaatatctcgctcagcactcagaggaccaggaacaggtcctgacagctgttaagtgcctgctgcggttcctgttgcctaagatcgcggagatgccagaaagcgaagacaaaaaaaaagagatggataggctcctcacatgcctcaatagggcattcgttaaactctcccagcccttcggcgaagaggcactgagcttggaaagtagggccaacgaggcacaatggtttagaaagaccgcttggaacctggccgtgcagtgtgataaggatcccgttatgatgcgagagttcttcatcctgtcctataagatgagccagttttgccccagcgaccaagtgattctgatagctcggaaaacctgtctattaatggccgtggcggttgacctggagcaggggcgaaaagcttccaccgcattcgaacagactatgtttctgtctagagcactggaagaaatccagacttgtaatgacattcataactttttaaaacagacaggaacattctctaatgacagctgcgagaaactgctgctgctatatgaattcgaggtgcgggctaaactgaacgaccccctgttagaaagcttcctggagtcagtgtgggagctgcctcatctggagaccaagacctttgagactattgccattattgcgatggaaaagcccgctcactaccctctgatagcgctcaaggcacttaaaaaggctctgcttctctacaaaaaggaagagcctattgatatttctcaatatagtaaatgtatgcacaatctggtcaacctgagcgtccctgacggagcaagcaacgtggagctgtgccccctggaagaggtgtggggctactttgaagacgctctgagccacatctcacgaacaaaggactaccccgagatggagatcctttggctgatggtgaagtcttggaacacaggtgtcttgatgttcagtaggtcaaagtacgcctcagcagagaagtggtgtggactcgccctgaggttcctaaatcatctgacaagcttcaaggagagttatgaaacccaaatgaatatgctttattcgcagctagtcgaggcattgagcaacaataaaggccctgtatttcacgagcatggctattggagcaaaagcgactag

SEQ ID NO: 243777 - DNA, 1848 bp, synthetic construct
  misc_feature 1..1848: note = Description of Artificial Sequence: Synthetic coding sequence
  source 1..1848: mol_type = other DNA
atggagatcctgcacctagatatgccacttgacttttgtctgaatatcgctaagctgttgatggatcacgaacgggagagcgtgggcttccactttctgaccatcattcatgaaagattcaaaagctcagagaatattggcaaagtactgatccttcataccgacatgcttctccagagaaaggaggaattactggctaaagagaagatcgaagaaatcttcctcgcccaccagaccggtcggcagctgacagcagagtcaatgaactggctacacaacatactctggaggcaagctgcatccagtttcgaagtgcagaactatactgatgctctccagtggtactattattcactcagattctattcaaccgacgagatggacttggactttaccaagcttcagcgtaacatggcttgctgttaccttaatctccagcagctcgataaagcaaaggaggctgtagcagaagccgagcgccacgaccctcgtaacgtgtttactcagttttatatctttaaaatagccgtaatagaggggaatagcgaacgggcactacaggcaatcattactctggagaatatcttgaccgatgaagagtctgaggataacgacctggttgccgaacgcggaagtcctaccatgctgctgtccttggcagcccagttcgcattggagaacggacagcagatagtggcagaaaaggctctcgagtatttagcccagcacagtgaggaccaggagcaggtgctgaccgccgtcaagtgcctgctccggttcttgctgcctaaaatagcagaaatgccggaaagtgaagacaagaagaaggagatggacaggttgctgacatgtctgaaccgggcatttgtgaaacttagccaacccttcggtgaggaagccctgagcttggagtctcgggcaaacgaggctcagtggttccgcaagaccgcctggaatctggctgtgcagtgtgacaaagaccctgtgatgatgcgggagttcttcatacttagctataaaatgtcccaattctgccctagtgaccaagtgattcttatcgcgaggaaaacctgcctgttgatggcagtcgccgtggacctggaacaaggtcgcaaggctagcactgccttcgaacagacgatgttcctcagtcgcgcattggaagaaatccaaacctgcaacgatatacacaattttcttaaacagaccggcactttctccaatgacagttgtgagaagcttctgcttctctatgagtttgaggtccgggctaaactaaacgacccccttctggagagtttccttgagtccgtgtgggagttgccccatctggagaccaaaacattcgagactatagcaatcatcgcgatggagaagccagcccactatcccttgattgccttaaaggcgctgaagaaagccttgctgctttacaaaaaggaagagcctatcgatatctcacagtattcaaagtgcatgcataatctcgttaacttgtcggttccagacggtgcttcaaatgtggagctgtgcccgttagaggaagtgtggggctattttgaagatgcactgagtcatattagtcgcaccaaggattacccagaaatggagatactgtggctgatggtcaagagctggaataccggagtcttgatgttttcacgctcgaagtatgccagcgccgaaaaatggtgtggactggctctgcgcttccttaatcatcttactagcttcaaagagtcttatgaaacccagatgaacatgctgtacagtcagctggtcgaggcactgtctaacaacaaaggcccagtttttcatgaacatgggtactggtctaagagcgactag

SEQ ID NO: 243778 - DNA, 2778 bp, synthetic construct
  misc_feature 1..2778: note = Description of Artificial Sequence: Synthetic coding sequence
  source 1..2778: mol_type = other DNA
atggacaatgatgacttcttcagcatggactttaaggaggtggtggagaacttagttactaacgacaactctcccaacattcctgaagcgatagaccggttattctccgatatcgcaaatattaatcgcgagagcatggccgaaatcacggacattcagatagaggaaatggctgtgaacctgtggaattgggcattaaccattgggggaggttggttggtcaacgaggagcaaaaaatacggctgcattatgtcgcctgtaagctgctgtcaatgtgcgaggccagttttgctagtgaacaaagcattcagaggctgatcatgatgaatatgagaatcgggaaagagtggttggacgcaggaaattttctgatcgccgacgagtgttttcaagccgctgtcgccagcctggagcaactctatgtcaagctgattcagagaagttcacctgaagcagatctgaccatggaaaagataaccgttgagagcgaccacttcagggtcctgtcatatcaagccgaatcagctgtggcacagggggactttcagagagcctctatgtgtgtgttgcagtgtaaagacatgctgatgcgcttgcctcagatgacaagctctctgcatcacttgtgttataacttcggggtcgagacacagaaaaataataagtatgaggagtctagtttctggttgtctcaaagctatgatatcggaaaaatggataaaaagtctacaggccctgagatgctagcaaaagtactgagactcctggcaacaaactatcttgactgggacgataccaaatactacgataaggcactcaatgcagtgaacctcgcgaacaaggaacacctgtccagccccggactctttctgaagatgaagatcctgctcaaaggcgaaacctcaaacgaggagctactggaagcagtgatggaaattctccatctggatatgcccctagacttttgcctcaacatcgcaaaactgttgatggaccacgaaagggaaagcgtgggatttcacttcctgactattatccatgagagattcaaatccagcgagaatatcggtaaagtcttgattctgcacacagacatgctattacagcgcaaagaagagctcctcgcaaaggagaaaatcgaggagatcttcctggcccatcagacaggcaggcagttaacagccgaatccatgaactggctgcataacatcctttggcgtcaggccgcttcttcattcgaggtgcaaaactacacggatgccttgcaatggtattattactccctcagattttactcaaccgacgagatggacttagatttcactaagctccagcggaacatggcctgctgctatctaaacctacaacagcttgacaaagccaaggaggccgttgcggaggcggagcgtcacgatcccagaaacgtgttcacccagttctacatttttaagatagccgtcattgaggggaactctgagagagccctgcaggctataatcaccctggaaaacattcttactgatgaagaatcagaagacaatgacctcgtcgcagagagagggtctcctactatgcttttgagtctcgcagcacagttcgcccttgagaatggacagcagatcgtggcagagaaagccctggaatacctggctcagcatagcgaagatcaggagcaggtgttgaccgccgtcaaatgcttgcttcgctttttgctccctaagatagctgaaatgcccgaatcagaagataaaaaaaaagaaatggacaggctgcttacttgtctaaaccgggcattcgtgaagcttagtcagccttttggcgaggaggcgctttcactcgagtccagggccaatgaagctcagtggtttaggaaaacggcttggaacctagcagtccagtgtgacaaggatcccgttatgatgcgagagtttttcatactttcttataagatgtcccagttctgcccatcagatcaggtgattctgatcgcgaggaagacttgcctgttaatggctgtcgccgtcgacttagaacagggccgaaaggccagcacagctttcgagcaaaccatgtttctgtccagagcactggaggaaatacagacatgtaacgatatccataacttcctcaagcagactgggaccttttccaacgactcttgcgagaaactccttctcctgtacgaatttgaggtccgagccaaactcaatgatccgctgttggaatcttttcttgaaagcgtctgggagttacctcatctagagaccaagaccttcgagacgatcgcgatcatagccatggaaaagcctgcccactacccacttattgccttgaaggctttaaagaaggccctgcttctgtacaagaaagaggagccaatagacatcagccagtactcgaagtgtatgcataacctcgtgaacctctctgtcccagatggggctagcaatgtggagctgtgccctctggaagaggtctggggctactttgaggatgcgttgtcccacatttcaagaacaaaagactaccccgagatggagatattgtggctgatggtcaaaagttggaataccggtgttttaatgttctctcgatctaaatatgcctctgcagaaaagtggtgtggcctcgcgttaagattcctgaaccacttaacatccttcaaagagtcctacgagacccagatgaatatgctctatagccagctggtggaagcactgtcgaacaataaggggcctgtcttccacgagcacggctactggtctaagtcggactag

SEQ ID NO: 243779 - DNA, 2823 bp, synthetic construct
  misc_feature 1..2823: note = Description of Artificial Sequence: Synthetic coding sequence
  source 1..2823: mol_type = other DNA
atgattagcgcacactgcaatttgaggctcctgtgctcttccgacagctcagccagcgcctcccaggttgccggaacaacagaggttgtagagaacctggttacgaatgataactcccccaatatacccgaagctatcgaccggctgtttagcgacatagccaatattaatagagagtctatggctgaaattaccgacattcagattgaggagatggctgtcaacctgtggaactgggccttgacgattggaggcggatggctggtcaacgaggaacagaaaatcaggttgcactatgtggcttgtaaattattgagcatgtgcgaggcaagctttgccagcgaacagtccatccagcgattgatcatgatgaatatgagaattggcaaagagtggctggatgccggaaactttctcattgcggacgagtgcttccaggccgctgtggcaagtctcgagcagctgtatgtaaagctgatccagcgaagttcccccgaagccgatctgactatggaaaaaatcaccgtagagagcgaccatttcagggtgctctcatatcaggcagaatccgccgtggcacaaggagacttccagagggcatctatgtgcgtcttgcagtgcaaagatatgctaatgcgccttcctcaaatgacgtcctctctgcaccatttgtgctataattttggcgttgagacacagaaaaacaacaagtatgaagagagttctttctggctgagccaatcatacgatatcggaaagatggacaaaaagagtacaggccctgaaatgctggccaaggtgcttcgtttgctggccacaaactacctggattgggacgataccaaatactatgacaaagcccttaacgccgtgaacctggcaaacaaggagcacctgagcagccccggtctcttcctgaaaatgaagatccttctgaagggggagacatctaatgaggaactgctggaagcagtgatggagattctgcacttggacatgcctctcgatttttgcctcaatatcgccaaacttctgatggatcatgaacgggaatcagtcggatttcatttcctcaccattatccacgaacggtttaaaagctctgaaaacattgggaaagttttaatattgcatacagacatgctgctgcaacgtaaagaggagttgcttgccaaagaaaaaatcgaggaaatttttctcgcccaccagaccggacgccagcttacagctgaatccatgaattggctccataacattctctggaggcaggccgcaagcagttttgaagtgcagaactacacggatgccttgcaatggtactattatagcctgaggttttattcaaccgacgagatggacttggattttaccaaactgcagagaaacatggcctgctgttatctgaaccttcaacagctggacaaagccaaggaggccgttgcagaggccgagcgacacgatccccgtaacgtcttcacccagttttacattttcaagatcgcagttatcgaggggaatagtgaacgggcactccaggctatcatcacattggaaaacattctgaccgatgaggagagcgaagataacgatctggttgcggaacggggatctccaaccatgttgctctctctggccgcacagtttgcactcgagaatgggcagcagattgttgctgaaaaggctttggaatatttggcacaacattctgaggaccaagaacaagtgttgactgccgtaaaatgcctcctgcgtttcctgctgccaaaaatcgctgaaatgcccgagtcagaggataagaaaaaagagatggataggctgttgacttgcctaaatcgcgcttttgtgaagctcagtcagccttttggcgaggaggcactctctctggagagccgcgctaacgaggctcaatggtttcggaagacagcctggaatttggcggtgcaatgcgataaagacccagtaatgatgcgggaattctttatccttagctacaagatgagccagttttgcccatccgaccaagtgatactgattgcccgaaagacttgtctgctgatggcagtcgctgttgaccttgaacagggcagaaaagcctctaccgctttcgagcagacaatgttcttatcacgagctctggaggaaatccagacttgtaacgacatacataacttcctgaagcagacagggaccttttcaaatgacagctgcgaaaaattactccttctgtacgagtttgaagtgagagctaaattaaacgacccactattggaaagctttcttgaatccgtctgggaactcccccacctggaaaccaaaacctttgagaccatagctatcatcgccatggagaagcccgctcattatccccttattgccctgaaggccctgaaaaaggccttactactgtacaagaaggaggagccaattgacatcagccagtattcgaaatgcatgcataacttggtcaatctgagcgtgccggatggcgcaagcaacgtcgaactgtgtccactggaggaggtctggggttactttgaagacgcactgagccacatcagtaggactaaagattacccagagatggaaatcctgtggttgatggtgaagagctggaacactggcgttcttatgtttagcaggagcaaatacgcctctgccgagaaatggtgcggtttggcgctgcgattcctgaatcaccttactagttttaaggagtcctatgagacccagatgaacatgctgtactcccagctcgtggaagcgctctctaataacaagggccctgttttccatgagcatgggtattggtccaaatctgactag

SEQ ID NO: 243780 - DNA, 372 bp, synthetic construct
  misc_feature 1..372: note = Description of Artificial Sequence: Synthetic coding sequence
  source 1..372: mol_type = other DNA
atgatggcaaatcacctggttaagcccgacaacaggaattgcaaacggcctcgcgagttggaaagtccagtgcccgatagcccacaactgagtagcctaggtaaatccgacagctcttttagcgagatcagcggcctcttctacaaagatgaagccttggaaaaggatcttaacgatgtctcaaaagagattaacctgatgctgtctacctacgccaagctcctcagcgaacgcgctgctgtggatgccagctatattgatgagattgatgaactcttcaaagaagcaaacgctatcgagaattttctgatccaaaagagggaatttctgagacagcgcttcactgtcatcgcaaacaccctgcacagatag

SEQ ID NO: 243781 - DNA, 372 bp, synthetic construct
  misc_feature 1..372: note = Description of Artificial Sequence: Synthetic coding sequence
  source 1..372: mol_type = other DNA
atgatggcgaaccacttagtcaaacccgacaataggaactgcaagcgccctcgagagctagaaagcccggtgcccgactcaccacagctgtcaagcttaggtaaatcagactcctcgttcagcgagatttctggcctgttctataaggacgaggctcttgaaaaggacctcaacgatgtttcgaaagagataaatctgatgttatccacatatgctaagctgctcagcgaacgcgctgcagtggacgcctcttatattgacgagatcgacgagcttttcaaggaagctaacgccatcgaaaatttcctcatccagaagagagaatttctccggcaacgattcacagtcatcgctaataccttacatcgatag

SEQ ID NO: 243782 - DNA, 1059 bp, synthetic construct
  misc_feature 1..1059: note = Description of Artificial Sequence: Synthetic coding sequence
  source 1..1059: mol_type = other DNA
atggcgctcaggccggaagacccctcctctggattccgtcatagtaatgtcgtggcctttatcaatgagaaaatggccaggcataccaaggggccagagttctaccttgagaatatcagtctgtcatgggagaaggtagaggacaagttgcgggctatactggaggacagtgaagtgccctcggaagtgaaagaggcttgcacgtggggatccctggccctgggcgtacggttcgctcataggcaagctcagcttcagagacaccgcgtcaggtggctacatggattcgcgaaattgcataagagcgcagcccaggcccttgcttcagacttgaaaaaactacgagaacaacaggagaccgaacgaaaggaggccgcaagccgccttcgcatggctcagacatcattagttgaggttcagaaagagagggataaagagctggtgtccccccacgagtgggaacaaggcgcaggatggccaggactggctaccgctggaggggtgtgcacggaaggcgcagctgaggaggaagaagaggcagctgtcgcagccgctggcgctgcgggtgggaaaggggctgaagaagagcagcgaggctgctggcgtctttggctacccttgtggcgaccctggttgccactctggcgtcttggccttcctccttggagacccagcagcccaacctggaggccaggtctgccaccatggaggcctcagcgaagctggcgggaatcttcatgcagctccctcgagatgttaatccgcaagtccacccccatcggcggaagacgtagagagatcagcggacgttcaaaacagccccatctcatttccctcgagcctagaaccccaggaccggagcctcaccagaacctctttcttagcagctccctgcctcacactcatacacacactcaagccctgtttccaccatctcaaacctatcctctgtatcctctgcacaagcaacaatcgcaacaccagtttcggctgtcttgcctgcccacgggccgtcctcttattctggcctgtggtcttatgggcggacctaccgagtag

SEQ ID NO: 243783 - DNA, 1059 bp, synthetic construct
  misc_feature 1..1059: note = Description of Artificial Sequence: Synthetic coding sequence
  source 1..1059: mol_type = other DNA
atggccctccgcccagaagatccttcctctggattcagacactccaacgttgtggccttcatcaatgagaagatggcccgtcacacgaaaggaccggaattctacctggagaatatctctctgtcctgggagaaagtggaggataagctgcgtgccatcttggaggatagcgaggtaccgtctgaggtgaaggaagcctgcacctgggggagcctagcactgggtgtgcggttcgcacacagacaggcccaactacaacgccacagagtcagatggctgcacggctttgcgaagttgcacaaatcagccgcacaggccttggcgtccgatttgaagaaactgcgggagcagcaagagacagagcgcaaggaggccgctagccgactaagaatggcccaaacatccttagtcgaagtccagaaggagagagacaaggagctcgtgtcccctcacgagtgggagcagggcgctgggtggcctggattggcgactgctggcggtgtgtgcacggaaggtgctgccgaagaagaagaagaggcagctgtggccgcagctggagccgcaggcggaaagggggctgaggaggaacaacgaggttgctggcggctgtggctcccattatggcgaccttggcttcccttgtggagactgggactgcccccatggcggccaagcagtccgacctggaggcctggtctgccaccctggcgtcctcagaggagctggagagagtcatcatgttcatcacttgaaatgctgattcgcaaaagtacgcctattgggggacgtcgcagagaaatcagcggtagatccaagcagcctcatctgatatcactggagcctaggacccctggtccagagccgcatcaaaatctgttcctctcaagtagtcttccacacacccacacccacactcaggctttatttccacctagccagacctaccctttatatcctctgcataagcagcagagtcagcaccagttccggctgtcctgcctgccaaccggacgcccattaatccttgcctgcggcctgatgggtggcccaactgaatag

SEQ ID NO: 243784 - DNA, 1230 bp, synthetic construct
  misc_feature 1..1230: note = Description of Artificial Sequence: Synthetic coding sequence
  source 1..1230: mol_type = other DNA
atggccctcaggcctgaggatccctctagtggattccgccacagcaacgtggtagcttttattaacgagaagatggccagacatactaaaggtccagaattctacctggagaatatttctctgagctgggagaaggtggaggataagctccgggctatcctcgaggatagtgaggttccttctgaggtgaaggaggcttgcacttgggggtctctggccctgggcgtacgttttgcacaccggcaggctcaactgcagagacaccgtgtcaggtggttgcatgggtttgccaagctgcacaagagtgcagcccaggccctcgcctcggacctaaagaaacttagagagcagcaggagacggagcgcaaagaggcggcatccagattaagaatggcacagacatccctggtggaagttcagaaggagagagacaaggagctggtctctccacacgaatgggagcagggggcagggtggccgggattggcaacggccggtggggtttgcaccgagggtgcggctgaggaggaagaggaggcagctgtggccgctgcaggagctgccggaggcaaaggtgccgaggaagagcagcgcgacgtggaggtggtggccgctccagtggaggcgatggccccacccgtggaggcaggcgctgcccctatggaaacccagtttccgcacgtggaggctcgggcagcctcaatggaaacaactgagaaattggagcggatcttgctacaactactgggagacgctgatcaggaaaaatacacctactggggccaaaaagaaggtgatctccggtctgtggagacagccacatcttacttttccggaaccaccaatccctggtctcgggctagctctgagccactccctgtccagctccctgcgagttactcttattcatattctagcccgttttcatctttttctgacattccaacgatttcacctccccaggccacagttaccgcacctgtgcctccacagttaccctctgactgggaggccttcgacacgtccctgtggtcagacggcggacctcatcgaatcgatcatcaggagcacccaagggatcgcagatactcggagccacatcaacagcgcccacctgtatataggagacccggtgattgggattgcccatggtgcaacgctgtcaacttcagccgcagggatacctgttttgactgcggcaagggaatctggctgcagaagccacattag

SEQ ID NO: 243785 - DNA, 939 bp, synthetic construct
  misc_feature 1..939: note = Description of Artificial Sequence: Synthetic coding sequence
  source 1..939: mol_type = other DNA
atggcactgaggccggaggatcctagctctgggtttcggcacggcaacgttgtcgcgtttatcattgaaaagatggcgaggcacactaagggacccgaattttactttgagaacatatccctctcatgggaggaggttgaggataagctcagggcgatcctggaggactccgaggtaccatccgaggtgaaggaagcctgcacctgggggtccttggccctgggcgtgcgttttgcccacagacaaggacagctgcagaatagacgcgttcaatggctgcagggatttgccaaactccataggtcagcggcactcgtcctggcctcgaacctgaccgaactaaaggaacagcaggagatggagtgtaatgaggccacgtttcaacttcagttgactgagacatctctggccgaagtgcagcgggaacgagacatgttgaggtggaagttattccatgccgagttagcacccccacagggccaagggcaggccaccgtctttcctggtctcgccaccgccggtggggactggactgagggggctggagaacaggaaaaggaagccgtggccgctgccggagccgctggcggtaagggcgaggaacgatatgctgaagcagggcctgcaccagccgaggtgctccagggccttggcggaggtttcagacagcccctgggggcaattgtcgcaggcaagttgcacctttgcggagctgagggagagcgtagtcaggtgtccacgaattcccatgtgtgcctgctgtgggcctgggtccattccttaacgggggcttcatcatgccctgccccatatctcatacacatcctgattccaatgccttttgttaggcttttgagccacacgcaatatacacccttcacctcaaaaggacacaggactgggtccaattcggacgcattccaattaggcggactgtag

SEQ ID NO: 243786 - DNA, 4494 bp, synthetic construct
  misc_feature 1..4494: note = Description of Artificial Sequence: Synthetic coding sequence
  source 1..4494: mol_type = other DNA
atgtcccgggctgtgcgccttcccgtgccctgtcctgtgcagctcgggacattgcgcaatgattcactggaggcccaactgcatgaatatgttaagcaagggaactacgtcaaagtgaaaaagattcttaagaaggggatctacgtggacgcggtaaacagcctggggcaaacagctctgttcgtggccgcacttttaggactgagaaagtttgttgacgtgctggtggactacggaagtgatcctaaccacaggtgttttgacggctctacgcctgtacacgcagcagcattcagcggaaaccagtggatcctgtctaagttacttgacgctgggggagatttgcggcttcacgacgaacgtggacagaacccaaagacctgggcactgaccgccggtaaggagaggtctactcagatcgtggagttcatgcagcgctgcgcttcacatatgcaagccataatccagggatttagctacgacctgctgaaaaaaatcgacagcccacaacgactggtctattcccccagctggtgtggtgggctcgtgcagggtaacccaaacggatcccccaaccggctcttgaaggccggtgtcatcagcgcccagaacatttacagctttggtttcgggaaggcaatgccatggtttcaattctacctgaccggggctacgcagatggcctatctcggcagtcttcccgtgatcggcgaaaaagaggtgattcaggctgacgacgagcctacgttctcattcttcagcggcccttatatggttatgacaaatttagtgtggaatgggtcaagagtaaccgtaaaagaactcaacctgcccacccatcctcactgtagtcgattgaggctggcggatctactgatcgccgagcaggagcattcttctaagctgcgacatccgtacttgcttcagctgatggccgtgtgtctgtcacaggacctggagaaaactcgcctcgtgtacgaacgcattacaattggcaccttgtttagcgtgctccacgaacgtcggtcgcaattccctgtgctgcatatggaggtgatcgtacacctgttgcttcagatttctgacgcactgcgatacctccacttccagggcttcatacaccggtctctgtccagttacgcggtgcacattatctcacctggcgaggctaggctgactaacctcgaatacatgctggagtcagaggaccgcggagtccaacgtgatcttacccgcgtacccctgccgacacagctgtacaattgggccgcacccgaggttattctccagaaagccgcaactgttaagtctgatatctacagcttctcaatgattatgcaggagattctcacggatgatattccctggaaaggacttgacggttctgtggtcaagaaggctgtagtgagcggaaactacctagaggcggacgtcaggctaccaaagccttattacgatatcgtcaaatccgggatccatgtgaaacagaaggaccgcactatgaaccttcaggatatcagatatatcctcaagaacgatctcaaagatttcacaggtgcccagagaacccagcctaccgagtcgccacgcgtgcagagatacggactacaccctgacgtgaacgtgtatctgggccttacctccgaacacccccgtgaaactcctgacatggagataatcgaactaaaggaaatggggagtcagcctcattcgccgcgtgtgcattccctgttcacagaagggaccctggacccgcaggcccctgatccctgcctcatggctagagagacccaaaatcaggatgccccatgccctgcgccattcatggccgaggaggcgagctcaccctccacaggtcagcctagtctgtgttccttcgaaattaatgagatctatagcggttgcttaatacttgaggacgatattgaggaaccacccggtgccgcaagcagtctagaggcagatggacctaatcaggtggacgaattgaagtcgatggaagaggaactagacaaaatggagagagaggcttgctgtttcggcagcgaagacgaatccagcagtaaagccgaaacagagtattcatttgacgactgggattggcaaaatggttccctgagcagtctgtccctcccagagagcacgagggaagccaaatctaacctcaacaacatgtcgaccaccgaggagtatctgatcagcaagtgcgtgctggatctcaaaataatgcagacaatcatgcacgagaatgacgacaggttgcggaatattgaacaaattctcgacgaagtggagatgaaacagaaggagcaggaggagcgaatgtctctctgggccacctccagggaatttacaaacgcttacaaattgccactcgccgtcgggccaccttctctcaattacattccaccggtgttacaactttcaggcggacaaaaaccagacacaagcggtaactaccctaccctccccaggtttcctcgaatgcttccaacactttgtgatccagggaagcaaaacaccgacgagcagtttcagtgtacccagggagctaaggattccttggagacatccaggatacagaacacatcttcccagggaaggcctcgggagtccaccgcacaggccaaggctactcagtttaactccgctctcttcacactgagctcacatcgccaaggaccgtccgcgagtccatcttgtcactgggattcaacccggatgagcgtcgagcctgtttcttccgagatttataacgccgagtctaggaacaaggacgacggcaaggtccatttaaaatggaagatggaggtgaaggagatggcaaaaaaggcagcaaccggtcaactgacagtgccaccatggcacccacagtcttccttgacactggagtccgaggccgaaaacgagcctgatgctttattgcagccgccaatccgttctccagagaacacagactggcagagagtgatcgagtatcaccgtgagaacgatgaaccgcgaggcaatggaaaatttgataagaccgggaacaacgattgcgattccgatcaacacggccgacaaccccgacttggaagcttcacatcaattcggcatccatcccctagacagaaagaacagcccgagcactcggaagcttttcaggcttcctctgacacgcttgtggcagtcgaaaagagctactcccaccagtcgatgcaatcaacctgcagcccagaaagctcagaagatattacagatgagtttctgacacctgacggcgaatatttttacagctctactgctcaggagaacctggccctcgaaacgagtagccccatagaggaggattttgagggcatccagggcgcatttgcacagcctcaggtgagcggcgaggagaaatttcagatgcggaagattcttggcaaaaatgccgagatcctaccacgctcccaatttcaaccagttagaagcactgaggacgagcaggaagagacctccaaggagagcccgaaggagttaaaggagaaggatattagtctaacagatatacaagacctctcaagcatatcgtacgagcccgattcttcttttaaagaagcctcctgtaaaacccccaagattaatcatgcccctacatcggtgagtacccctctgtcccccggaagcgtctcctccgccgctagtcagtataaagactgtctggaatcgatcacatttcaggtcaaaaccgagtttgcttcatgttggaactcccaagagttcatccagactttgtctgacgacttcatctccgtccgggagcgggctaagaagcttgactccttattaaccagcagcgaaacgcccccatctagactgaccggactcaaacgcctatcgagcttcattggagccggatccccttctctggtgaaggcttgcgatagcagcccgccacatgcaacacagagaagatcgttacctaaggtagaagcgttctctcagcaccatatcgacgagctcccaccaccttcccaagagttactggacgacattgagctgttgaaacaacagcagggctcatctactgtgcttcatgaaaacacggcctctgacggcggaggaactgcaaatgaccaacggcatttggaagaacaggagacggattccaagaaagaagactcaagcatgcttctgtcaaaggagaccgaggacttaggtgaagatacggaacgggcacattctacgttagacgaggacctggagcggtggcttcagccacccgaagagtcagtggaactgcaagatcttccaaagggaagcgagcgcgagactaatatcaaagaccagaaggtgggcgaagaaaagagaaagagggaagacagtataacacccgagagacggaagtccgagggtgtgttgggtacctccgaagaggacgaactgaagtcctgtttttggaagcggctgggctggagcgagtcttctaggatcattgtgctagatcagtcagacctgtcggactag

SEQ ID NO: 243787 - DNA, 4356 bp, synthetic construct
  misc_feature 1..4356: note = Description of Artificial Sequence: Synthetic coding sequence
  source 1..4356: mol_type = other DNA
atgagtcgggctgtccggttgcccgtgccctgtccagtgcagctggggactctcagaaacgattccctggaagcacagctgcacgaatatgttaaacaggggaactacgtgaaggtcaagaagattctgaagaaagggatctatgtggacgcagtgaactctttgggccaaaccgccctgttcgtggctgccttgctcgggcttaggaagttcgtcgacgtgttggtagattacggctctgatcctaaccacaggtgcttcgatggcagcacccccgtgcacgccgcagcattctcggggaatcagtggattttgagcaagttactggatgctggtggagatcttaggttgcatgatgaacgaggccaaaaccctaaaacatgggctctgaccgcagggaaagaaaggtcaactcagatcgtggaatttatgcaaagatgtgcttcacatatgcaggcaatcatccagggctttagctatgatctgctgaagaagatcgacagccctcagcgtctcgtctacagcccttcatggtgtggcggactcgtccaaggtaaccccaatggctcccctaaccgactcctgaaggcaggggtcatatctgctcagaacatttacagcttcggctttggtaaattttacttgactggcgcaacgcaaatggcctacctggggtctttgccagtcattggagagaaagaggtgatacaagccgacgatgagccgacattcagtttctttagcggcccttacatggtgatgacaaacctcgtgtggaacggttcccgcgtgaccgtgaaggagctaaatttgcctacacatccacattgtagtcgtcttcgcctcgctgacctacttatcgccgaacaagagcactcttcgaagctgaggcacccctaccttttacagctcatggccgtctgcctgtcacaagatctcgagaaaaccagactcgtgtatgaaaggatcaccatcggaaccctattcagtgttcttcacgaaagacgctcacagtttcccgtgttgcatatggaagtgatcgtccacttgctgctgcagatttcagacgcactgaggtacctgcactttcagggcttcatccatagatccctctcatcatacgccgtccacataatttctcctggagaagcacgcctgactaacctggaatacatgctggagagcgaggacagaggagtgcagagggaccttacgagggtcccattgccaacacaactgtacaactgggccgctcctgaggttatcctccaaaaagcagctacagtgaagagtgacatttacagcttttcaatgataatgcaagagatccttaccgatgatatcccatggaagggcttagacggatctgtggttaaaaaagccgttgtctctggcaattatctcgaagccgacgtgcgcctgccaaagccctactatgacattgtcaagagtggtattcatgtcaagcagaaagatagaactatgaatctgcaagatatccgctatatcctgaaaaacgatcttaaagactttaccggagcacagagaacccagcctaccgagtctcccagggtccagaggtatgggctccaccccgacgttaatgtctatctcggacttacaagtgaacaccctcgggagacaccagatatggagataattgagcttaaagaaatggggagccaaccccattcccccagagtccattctctgttcactgagggaacgttagacccacaagcccctgacccctgtctgatggctcgtgagactcagaaccaagatgcaccctgtcccgcacccttcatggctgaggaagcttcgagtccctccaccggccagccctccctttgctcatttgagatcaatgaaatttactcaggatgtctgatcctggaggatgacatagaagaaccacccggtgccgctagcagtttggaagccgacggccctaaccaagtagatgaacttaagagcatggaggaggagttggacaaaatggagagggaggcgtgctgcttcggaagtgaagacgagtcatcgtcaaaggctgagacagaatattccttcgacgactgggattggcagaacggtagcctttctagcctatccctgccagaaagtacacgggaagcgaaaagtaacctcaataatatgtccaccactgaagagtatctaatctccaaatgcgtgctcgatctgaaaataatgcagacaatcatgcatgagaacgacgataggctgagaaatatcgagcagatcctggacgaggtggagatgaaacagaaggagcaagaagaaaggatgagtctctgggccaccagcagggaatttaccaacgcctacaaactccccttggctgtggggcctcctagcctgaactacatcccaccagtgctgcagctctcaggcggacaaaagcctgatacctcggggaattacccaactcttccaagatttcctcgcatgctaccaaccctctgtgaccccggtaagcagaacaccgacgaacaatttcaatgtacacagggtgctaaggactcacttgaaacctctcggatccagaacacatcctcacagggcagacccagagaatcgacagcccaggccaaggcaacacagttcaactctgccctcttcacgctttccagccaccgccaaggaccgtcagcgagtccttcctgccactgggactctacgagaatgagcgttgaacctgtgtcttctgagatctacaatgctgagagtagaaataaagatgacgggaaagtacacctgaagtggaagatggaggttaaggagatggcaaagaaggccgcaaccggacagctaactgtgcctccatggcatccacagtcgtccctgactctggagagcgaggccgagaacgaacctgacgccctgctccagccacccattaggagtcctgagaacaccgattggcaacgtgtgatcgagtatcaccgggaaaacgacgagcctcgcggaaatgggaaatttgacaaaactggcaataacgactgtgactcagatcaacacggaagacagccaaggttgggcagtttcacatccatacgacacccgtccccgagacagaaagagcaacccgaacatagcgaagccttccaggcatcttctgacaccctcgtagctgtcgagaagagctattccacgagctctccgatcgaagaggactttgagggaattcagggtgcatttgcgcagccccaggtttcaggcgaggagaaatttcagatgagaaagatcctgggaaagaatgccgaaatactacctagatctcagttccagcccgtgaggtctactgaagatgaacaggaggaaacatccaaagagagtcccaaggagctcaaggagaaggatatttctctcacagatatacaggatctcagctccatctcatacgagcctgattccagtttcaaggaagcctcctgcaagacgccgaagatcaatcatgcccctacctcggtttcaacgcccctttcccccggttcagtgtccagtgccgctagccagtacaaagactgtttggaatctattacttttcaggtcaagaccgaattcgcctcttgctggaatagccaggaatttatacagacactgtccgacgattttataagcgtaagggaaagggctaaaaagcttgattcccttttgacatcttccgaaacgccaccaagccgacttaccggtctcaagaggttgtccagttttataggggcaggctctccttcacttgttaaggcctgcgactcctccccaccccatgcaacacagcgcagatcccttccaaaggttgaggcattcagtcagcaccacatcgacgagttaccccctccgtcccaagaattactggacgacattgaattactcaagcagcagcagggctccagcacagtgctgcatgagaacactgcctccgacggcggaggtacagctaatgatcagaggcacctcgaggagcaagaaaccgatagcaaaaaagaagacagcagcatgcttctgtcaaaagaaactgaggacctcggagaggacacagagcgagctcactccacgttagatgaagatctggaacggtggcttcagccaccagaagaatccgtcgagctccaggatctgccaaagggcagtgagcgcgagaccaatattaaagatcagaaagtcggagaggaaaaacgaaaacgcgaagactccataacccctgaaaggaggaagtctgaaggagtgcttgggacgtcagaggaggatgaactcaaaagctgcttctggaagcggctcggatggagcgagtcaagccggattatcgttctggaccagagcgatctatcagattag

SEQ ID NO: 243788 - DNA, 4476 bp, synthetic construct
  misc_feature 1..4476: note = Description of Artificial Sequence: Synthetic coding sequence
  source 1..4476: mol_type = other DNA
atgagcagggccgtgcgcctgcctgtgccctgtcccgtgcaactgggcactctccgaaatgactctcttgaagcccagctccacgagtacgtgaaacaaggcaactatgtaaaggtcaagaaaatcctgaaaaaaggaatctacgttgacgctgtcaattcgctcgggcagaccgctctgtttgttgctgccctgctgggactccggaaatttgttgatgtgctggtggactacgggtcagatcctaatcataggtgcttcgatggttcgactcctgtccatgctgcagccttcagcggcaatcagtggatacttagcaagctgctggacgcgggaggcgatttgagacttcatgatgaacgcggacagaatccaaagacttgggcattgaccgctggaaaggaaagatcaactcagatcgtagaatttatgcagcgctgcgcaagccacatgcaggcaatcatacaggggttcagctatgatttgctcaagaaaatcgattctcctcagcgacttgtttacagtcctagctggtgtggcggtctggtgcagggcaatcctaacggatcccctaacaggcttctcaaggccggtgtaatctccgcccagaatatctactcatttggattcggcaaattctatctgactggtgccacacagatggcctacctggggagcttaccagtaatcggagaaaaggaggtgatccaggcggatgatgaacccactttctcgtttttctctggtccatatatggtgatgaccaacttggtgtggaacggaagccgcgtaacagtgaaggagctaaaccttcccactcatcctcattgttcacggctgcgtctggccgacctgttgatcgcggagcaagagcacagcagtaaactgcgtcacccatatctcttgcagctaatggcagtttgtttaagccaggacctagagaagactagactcgtctacgaacgcatcaccattggaaccctgttttcagtgcttcacgaaaggcgctctcaatttcccgtcctgcatatggaggtcatcgttcatctgttactgcagatttctgatgccctacgttatctgcacttccagggctttatacacagatctctgtccagctacgctgtgcacattatttcgcccggagaagcccgactgaccaatctggaatatatgctcgagtctgaggaccgaggcgtgcaaagggacctgacaagggtgccactgcccacccagctgtataattgggcagccccagaggtcattttgcagaaggccgctactgtaaaatccgatatatactcattctctatgattatgcaagaaatccttaccgacgatattccttggaagggactggacggcagcgtggtcaagaaagctgttgtaagcgggaactatctcgaggccgatgtgagactgccgaagccctactatgatattgtcaaatctgggatccacgtaaagcagaaagatcggaccatgaaccttcaagacattagatatattctcaaaaacgacctgaaagatttcactggcgcacagaggactcagccaacggagagcccgcgtgttcagaggtacggccttcaccccgacgtgaatgtctatctgggtcttacttccgaacatccccgagaaactccagatatggaaatcatcgagctgaaggagatgggatctcagccacactctcctcgcgttcatagtctgtttactgaagggacactggatccccaagctcccgacccctgcctgatggccagagagacacaaaaccaggacgctccatgcccagcaccctttatggctgaggaagcatcttcgccttcgactggacagccgtctctgtgttcgtttgaaatcaatgaaatctacagtggctgtcttatcttagaggatgatatcgaggaaccacctggcgcagccagctctctcgaagccgacggtccaaaccaggttgacgagctgaaatctatggaggaagaactggataaaatggaacgcgaagcatgttgtttcggttcagaggacgagtcttcatctaaggccgaaaccgagtacagcttcgatgattgggactggcagaacggctctctgagctccttgagtctaccggaatcaacccgggaggccaaatctaatctcaataatatgagcactacggaagagtatctgatcagtaaatgtgtgctcgacttgaagatcatgcagactatcatgcacgagaatgatgatcggctcagaaatattgagcagatcctggatgaagtcgaaatgaaacagaaggagcaggaggaacggatgtctttgtgggcgacaagccgcgagttcaccaatgcgtataagctgcctttggccgtggggccaccctctctgaactatatcccaccagtcctccaactttctgggggacagaagccagatacaagcgggaattaccccacactaccccgattccccaggatgctacctaccctgtgtgatccaggcaagcaaaataccgatgagcagttccagtgcacacagggggcaaaggattctcttgaaacttccagaattcagaacacctcttcccagggcagacccagagaaagcacagcccaagcaaaggctacacagttcaatagcgcccttttcactttgtcttctcaccgccagggccctagtgcttctccaagttgtcattgggattcaacaaggatgtcagtagagcccgtctccagtgagatctacaacgcagagtccagaaacaaagatgacggaaaggttcatctgaagtggaaaatggaggtgaaggagatggctaagaaagccgctaccggccagctgacagtcccaccttggcatcctcagagttccctgacactcgaatccgaggcagagaacgagccggacgcactactgcaacctccgatcagatcacctgagaacacagattggcagagggtgatcgagtaccacagagaaaatgacgaaccaaggggcaatggcaagttcgataagaccgggaataacgattgcgatagcgatcaacacggacgacagccgcgtctcggctcctttacttctattaggcaccccagcccacgacagaaagagcagcctgagcacagcgaggctttccaggcctcctccgacactttggtggccgtggaaaagtcctattcacatcagtcaatgcagtctacctgcagccctgagtctagtgaggatatcaccgacgagtttctgacaccagacggagagtacttttactcctccactgcgcaagaaaacctggccctagagaccagctcaccaattgaggaggactttgagggcattcagggggctttcgcccagccgcaggtcagcggcgaagagaaattccagatgcggaagatcctgggaaagaacgccgaaatcctaccccgtagccaattccagccagtgcggtcaacagaagacgagcaagaggagacttctaaggagtcaccaaaggagcttaaagaaaaggatatttctttgacagatatccaagacctgtcttccatctcttacgagcctgatagtagcttcaaagaagccagctgtaaaacgcccaaaatcaaccatgcaccaacgtctgttagcacacccctctcgcctggctcggtctcctccgctgcatcccagtataaggattgcctagagtctatcacctttcaggttaaaaccgaatttgcttcttgttggaactctcaggagttcatccaaactttgagcgatgattttatctcggtccgggagagagccaaaaagctggattctttgctgacaagttctgaaactccacctagtcggctgaccgggctgaagcgcctgtcgagcttcattggagctggcagccccagtctggtcaaagcctgcgacagttcaccacctcacgccacccagagacgcagcctgcctaaggtggaagcttttagtcagcaccacatcgacgaactgccacccccatctcaagaattattagatgacatagaacttcttaagcagcagcaaggctcttccaccgtgctgcatgagaatacagcatccgacggaggaggtaccgcgaatgaccaacgtcacctagaggagcaagagaccgactccaaaaaggaagattcctccatgttactgagcaaggagactgaggatttaggagaagacaccgagcgggcacacagcacattggacgaggatctggagagatggttgcagccaccagaagaatcagtggaattgcaagatctgccgaaggggagcgaaagagagacaaatatcaaagaccagaaggtgggagaggaaaagaggaaacgggaagactccattacacccgaacggaggaagtccgagggcgttcttgggacgtcggaagaggatgaattgaagagttgcttttggaaacggcttggctggagcgagagcagccggatcatcgtgctggaccaatcggacctctctgactag

SEQ ID NO: 243789 - DNA, 8370 bp, synthetic construct
  misc_feature 1..8370: note = Description of Artificial Sequence: Synthetic coding sequence
  source 1..8370: mol_type = other DNA
atgcccagcgatgccaaggactcagtcaatggagacctgctacttaactggacgtctctgaagaacatactgagcggcctcaacgcttccttcccactccacaacaatacgggctcaagtacggtgaccacatctaagtccataaaagaccccaggttgatgagaagggaggagtcaatgggcgagcaatcttctactgccggactgaacgaagtgctgcagttcgagaaatcgtctgacaatgtgaactcggagataaagagtaccccaagtaatagcgcctcatcctcggaagttgtgcctggtgactgcgcggtcctgaccaacgggcttgacaccccttgtttcaaaactagcgtaaacgacagtcagtcctgggcacataacatgggcagtgaagactacgactgcatccctccgaataaggtgacaatggctggccaatgcaaagatcagggaaacttctccttccccatcagtgtgtctaacgtagtctctgaagtggagaaccagaaccactccgaggaaaaagctcagagggctcagcaggagtctggaaacgcctacacgaaggaatattcaagccatatcttccaggacagccaatcatcagatctgaagacgatctatcagactggatgccagacgtcaaccgtgttccccctaaaaaaaaaagtgtctatcgatgaatatctccagaacacgggcaaaatgaagaatttcgcggatctcgaggacagctcaaagcatgaagaaaaacagacttcatggaaggaaatcgataacgattttacaaacgagaccaagatatcacctattgacaactacatcgtgttacaccaggagtacaaggagtccgaaagccacaatagtttcggtaaatcctgcgacaaaatccttataacacaggaactggaaatcactaagtcctctacaagcactataaaagacaaggacgagttagatcaccttgccctggagtggcagattacaccgtctttcgagtccctttcgcagaaacatcctcagcacagtgtcgagtacgagggaaacatccatacatcactggctattgctcaaaaactgatggaactaaagcttggcaaaatcaaccagaactatgcttctattatcactgaagccttccctaaacctaaggacattcctcaggccaaggaaatgtttatcgatacagtgatcagctcgtacaacatcgaaaccgctcatgattcttcaaattgcagcatcacaagagaacacatatgtgtccatcgtaaaaacgagaacgagcctgtgagcctggaaaatattcagagagactataaggaaactgcttacgtggaggacagagggcaggaccacaatttgttctgcaattcacagctttctaacgacatttggttaaacgtgaactttaagaagcagactgaccgtgagaaccagaatgaggccaaggaaaacagtgcttcttgcgttgagaataatattgagaatatatacggcgataaaaaacaagactcgcataccaacgagaactttagcaacattgatgaaaaagaggataagaattaccataacatcgaaatcttaagttccgaggaattttctaccaaatttaatctgatctgcagggaagacaacgcagtgtccgccgctaccgcacttctagagtcagaggaagatacaatctctgcagtgaagcaaaaggacaccgaaaatactgggcgttccgtggaacaccttgcttcgactacattccctaagacagcgagtagcagcgtttgcgtcgcctcaaatgcggcaatccaaatagcatcggccaccatgcctgccctttcccttaataatgacgaccaccaaatttaccagttcaaggagacatgcagctccgagagtcccgattttggattgttggtcaaacatcgagtgtcagattgcgaaatcgataccgataaaaataagagtcaggagtccttccaccagtcgataaatgagaacctcgtcttgcaaagcatagagctagaatcagaaattgaaatcgaactggaggactgcgacgatgcctttattttccaacaggatacccacagtcatgaaaatatgctttgcgaagaattcgtgacttcatataaggctcttaagagtcgaattagctgggaaggattgttagccttggacaatggggagatggaggtcctggaatcaacaaccggaagagaaaactcagaccagcattactccaaggagtccaattacttttactccagtacccagaacaacgagaccgaactgacaagccctatactcctaccagacctgcagatcaaaatcaccaatatcttccggcctgggttctctcccaccgccgactctcttgccctgaaagacagtttctgcacccacgtcaccgaagccaccaagccagagattaacaaggaggacggggaaattctggggttcgatatctatagccagcctttcggggagaacgcagactacccatgcgaggataaagttgataatattaggcaggagtcaggtccagtgagcaacagtgaaatcagccttagctttgacttgtccagaaataccgatgtaaatcacactagcgagaaccagaatagcgagtccttattcactgaacctagcaacgtgaccactatcgatgacggatcccgatgtttttttaccaagtcaaaaacggactacaatgacaccaaaaacaaaaaagaagtggagtccaggatttctaagagaaaactccatatctcttcgcgggaccaaaacatcccacataaggacctccgacgacacaaaatctatggccgaaaacgcagactgacttcccaagacagctcagagtgcttttccagccttagtcagggcagaatcaagactttttcacagtctgaaaaacacattaaatctgtgctcaacattctgagcgacgaagcaagtctatgtaagtctaaatgcttgtcccggaaactagacaaagctgtcgtccacctgaagaaagctcacaggagggtgcatacatctctacagttgattacgaaggtcggcgaagagcgtaagggtcctctccctaagagctatgcaattatctgcaacaatttttgggagagttgcgacttgcaggggtatagcagcgtctcccaaaggaaatattactcaaccaagcattttagcagcaagcgtaaatacgacaaacggaggaaaaagagggcccctaaagccgacatctccaagtctctcactcacgtatccaaacataagtcctacaagactagcggtgaaaaaaagtgtcttagccggaaaagcatggccagcagcgtttccaaatcccaccccacaacatcacacatgggtgagttttgtaatcaggagcacccagaatcacagttgcctgtgtcttctacatctcagagcacctcacagagcgtgtactacaattcttccgtgagtaacccctccctttctgaggagcaccaaccattttctggtaaaactgcctacttgtttagtccggaccattctgacgagaagctaatcgaaaaagagaatcagatcgacacagcctttctgtcaagcacctcaaaatatgagaaactggagaagcacagcgcgaatcataatgtaaaagatgctacaaaagaaaacagttgtgacgctaacgaagtaatcaacgagtccaactctgtcagcttgtcatgcattaaggagaatattaatagttctacaggtaacgactgcgacgctacgtgtatcggccacactaaggctaagacggacgtgcttatttccgtattggactccaacgttaaacactttctcaatgacctgtaccagcagggaaatctcatcctttctgattgtaaaagaaatctcgaagtaaaatggacggatcccatcgagcgccctaaacaaaacattataaccggcaactttctaatgggccctttaaatctcacacttattgccagcaagaagtatagcattccacagttgtctgctgccgctgtgacagactcagagggggagtcttccaaatcctatctggacaagcagcggatcttaaccgtagactcctttgcggcaagcagcacagttccacattgcgagcaaagctgtagggaaaaggagctgctgaagaccgagcagtgctcctctggaaactgccttcacaccgatggcaatgagaccaatgtgacagagaattacgaactcgatgttgcatccggtacagaggaggataagagttatggagagaacatcgttgaactgagcagcagtgacagttccctactcctgaaggataacgtgaagggctctagctctgaaacttgtatcgtaaagaaagataccgaagaccgcataacatggaaggttaaacaggccgaaaaggctaaagattccgtctataagcgatcaatgacggaagggtcaaccgtcaacacagaatataagaatcagaagaatcagatttctgaagagagctgcctaaatgagaagatcattactacgaatctgattgatagccatctttctacaaaaaacacaactacagagtcggtacccctaaagaacaccgtaagcaaccccttgaacaagcgggagaaaaagggagagataaaagtaagcaaggactcacagtcagatttgactctgcactccgagatcgcttacatatccaaacccggtatcctcggcgtgaatcatacccccatcctgccggcacactctgagacgtgtaaagtccctacacttctgaagaagcccgcttcatatgttagcgattttaaagaaaaacactgcagcgctaatcatactgccctgatcgctaacctaagtcagattctgcagcgcgctgatgaagcctcgtcccttcagatactgcaggaggagaccaaggtttgtctgaacattttgccactattcgtggaggcttttgagcgtaagcaggaatgctcagtggagcaaatcctcatctcacgggagctgcttgtggatcagaatctgtggaacaactgtaaacacaccctgaagccatgtgctgtggacaccctcgtggaactgcaaatgatgatggaaacaatacaatttatcgagaacaaaaagcggcatctggagggggaaccaacactccgcagcctactgtggtacgacgagacattatacgccgagctactcggcaagcctcggggtttccagcaacagtctaatttttatcccggattccaagggagactcaaatataatgccttctgtgagctgcaaacctatcacgaccagctcgtggagctgctcgaagagaccaaaagagagaaaaacagttattatgtctttctaaaatacaagcggcaggtaaatgagtgcgaggcgattatggaacactgctcagactgtttcgattttagcttgtccgtgccatttacttgtggagtaaacttcggagattccttggaggacctggagatcttgaggaaatcaacacttaagctcattaacgtgtgcggtgacagtccaaaagttcactcctacccaggaaagcaggatcacctctggatcataatcgaaatgattagttccaaggttaacttcatcaagaataacgaggccgtcagggtgaagatctctctatatggcctcgagcacattttcttcgatgccgctaaaaatctcgtctggaaagagagaacccagtcctttagtaaaaagtacagccagaagaaagatgaagaacgtctgcttagggtcaataagtgtgcctttagtaaactccagaagatttacgacactctctcaaaagacctgaacaacgagcccattagcccaatagggctcgaggaggacaccattatcgcaagccgcaaaagcgatcaccccataaatgaagccaccataagtattgagaacagtaagtttaactcaaatttactcgctcaccccgatatttgctgtatcagcgaaattttggatcaagcagaatttgctgacctgaagaaattacaagatttgacccttcgctgtacagaccatttagaaattctgaaaaaatatttccaaatgctccaggacaataatatggacaacatttttatcacagaagaaaatgtcctggatgtggtgatcaatcacagtcacgaagccataatactgaagccagaggccattgagatgtatatagaaattgtgatggtttccgaaaccatacacttcctcaaaaacagcatcgccaagaagctggataagcagcgcttcaggggtatgttgtggttcgatctgtccctcctgcccgaactggtgcagtgccaggagaagatggcatcattcagcttcctgaaggataatagcaccgatgtgtgcctgtggaaggtgatcgaaaccgctgtatccgagctgaagaaggatctggacataatatgcaagtataacgaagccgtcaactgctcctacgccatccacctgctctcgcgggaactgcaggaactgtcagaaatcaaaaaactgctgaaaaaatctaaatatttcatcagcacctacatcgactttgtcccatacatcgcgagcatcaattatggttcaactgtcaccgaacttgagtataactacaaccaattttcaacgctgctgaaaaacgtgatgagtgctccaagaaaagatttgggcaagatggctcacatcagaaaggtaatgaaaacgatcgagcacatgaaaatgatctgcacaaaaaacgctgagctcacaatcagcttttttctctgccagatgctgtacaacaggaggaagatactgcaactgaagagaaaagagaaaatgaacatacacatagtgaaaccaggggagaacaataataaattcagtatatctacaatgttaccgcctgtgtccgaatgcataaataaaaatatcagtaattcttctaaaaaacgccctagtaccgtggacaagtgcgaggatagccaggagcagcagcaggacactaccgttagctcttgtaagaagctgaaagtagatatgaaggatgtcacaaagatcaacagggagaaggccacatttaaacaccctcgtacaacaggatcacacccaaagtccgagaataagatcgtgccctcaagctgtgattctctgaaaaggaaccacttgacccctaaaaaagtagaaatgcagagatctcttccgggaagcctgttaccactggagaaccccaaagacacttgcgccagcaagagtgagtcgaagattgacttaactgtgagcagcgatcactttagtggtcagcaggaaaacctgaacagtatgaaaaaacgcaacgtcaatttttctgcagcggagaccaagagcgacaagaaggattgcgccgctttcgctatctgtgatcaaaagagtgtgcatggcactttcagtccagatcacgggacgttactccagaagttcctcaaaaatagcccagatcctactcagaaatcctgcctgtctgacattaaccctgaaacagatgtgtccctcgtgcctgatgcctccgtgcttagcaagcctattttttgtttcgtgaaggacgtccatccagacttggagatgaatgacaccgtcttcgagctccaggataatgacatcgtcaatagctctatcaaaaacagttcgtgtatgacctctcctgagccaatctgtatccagaacaagattcccacactccagatcaacaagctccaacctactgagaccgagtccgaagacaagtacatgaaggacacattgaaccctaacaccgtccatacatttggcgcttcaggacatatcacactgaacgttaaccagggggcagagtacagcctctccgagcagcagaatgacaagaattcaaaagttctgatgcaaaatgccgctacctactggaacgaacttccacaatccgcgtgcaatccaacctacaacagcagtgagcacctctttggaacctcttatccatacagcgcatggtgcgtgtaccaatatagcaattccaatggaaacgcaattacccagacttatcaggggataactagctatgaggtgcagcctagtccctctgggctcctcactacggtggcatcaactgcgcagggtacccactccaaccttctctactcccaatacttcacttactttgcaggtgagccccaggctaatgggttcgtgcccgtaaacggatactttcagagtcagattcccgcatccaactttaggcagcccatattttcacaatatgcctcacaccagcctctgccccaggcaacttacccatatctccctaaccgctttgtgccccctgaagtgccgtgggtgtatgccccttggcatcaggagagctttcacccaggccattaa

SEQ ID NO: 243790 - DNA, 1233 bp, synthetic construct
  misc_feature 1..1233: note = Description of Artificial Sequence: Synthetic coding sequence
  source 1..1233: mol_type = other DNA
atggttcttaaagccgaacatactagatctccttccgccactctgccgtccaatgtgccaagttgtcgatctctgtcatcctctgaggacggaccttctgggccatcgtcactggccgacggtggtctcgcacacaacctgcaggactccgttagacacagaatcctctacctgagtgagcagttacgcgttgagaaagctagcagggatggaaacaccgtgtcgtacctgaagctggtcagcaaggccgatcgacaccaggttccgcacattcagcaggcctttgaaaaagtgaaccaacgggcttctgccactattgcccagatcgagcacagactgcatcaatgccaccagcagctgcaggagctggaggaaggatgcagacctgagggactgctcctcatggccgaatccgatccagcaaactgcgagcctccaagtgagaaagcattgctctccgagccccctgagcccggtggagaagatggacccgtgaatctgcctcatgcaagtcgtccatttatccttgagagcagatttcagtctttgcagcaaggcacctgtctagagactgaagacgttgcccagcaacaaaatttgttgctccaaaaagttaaagctgaactggaagaggctaagcggttccacatctcgctgcaagagtcctaccatagtcttaaagagcgaagtcttacagacctacagctgctgctggagagcctccaggaagagaagtgccggcaagccttaatggaagagcaggtgaatgggaggctgcagggccaactaaacgagatctataacttgaagcacaacttagcgtgttccgaagagcgaatggcatatttaagctacgaacgcgcaaaggaaatttgggaaatcacggagacattcaagtcccggatttcaaaacttgaaatgctgcagcaggtgacccaactcgaggcagccgagcacttacagagtcggccacctcaaatgctgttcaagttcctttccccaagactttctctggccacagtcctactcgtattcgtttccacgctgtgtgcctgtccctcaagcctaatctcatccaggctgtgtacttgtactatgctgatgttaattggcttgggggtcctggcatggcaacgctggagagcgatccccgcaactgattggcaggaatgggtccccagccgatgcagactctacagtaaagactctggacctcctgcagacggaccttag

SEQ ID NO: 243791 - DNA, 1233 bp, synthetic construct
  misc_feature 1..1233: note = Description of Artificial Sequence: Synthetic coding sequence
  source 1..1233: mol_type = other DNA
atggtactcaaggccgaacatacacgcagccccagtgccacacttcccagcaacgtcccttcttgcagaagtttgagtagcagcgaggacgggccatccggaccctcttcgctagctgatgggggactggctcacaacctgcaagacagcgttcgccatcgtattctgtatttgtctgagcagttgagggtcgagaaagctagtcgcgatggaaatacggtttcctatctgaagttagtgtcaaaggcagaccggcatcaggtgccccacatccagcaggcctttgagaaagtaaatcagcgcgcttcagctaccattgctcaaatcgaacaccgattacaccaatgtcatcagcaactgcaggagctggaggagggctgtcggccagaggggctgttgctgatggctgagagcgatccggctaactgcgagcccccttccgagaaggccctgcttagtgaaccccctgagcccggtggcgaagacggtccagtcaatttgccacacgcctctcggccattcattttggaaagccgatttcagagcctacaacagggcacatgcctggagactgaggatgtggctcagcagcagaatctcctgctgcaaaaggtaaaggcggagctggaggaggctaaacggtttcacattagtctccaagaaagctatcactccctgaaagaacggagcctgacggatctccagctgctgctggagtcgctgcaggaggagaagtgccggcaggctctgatggaagagcaagtgaatggacgtctgcaggggcagctgaacgaaatatacaacttgaaacacaatcttgcttgtagtgaagagagaatggcttatctgtcatatgagcgggctaaggaaatttgggagatcacagaaactttcaagagcaggatctcaaaattggagatgctgcaacaggtgacccagctagaggccgctgaacatctacaatcacgtcccccacagatgttgttcaagttcctgtcccccagactttcattggcaacggtcctgctggtgtttgtgtctacactgtgtgcctgcccctcttcattaattagctcccggctgtgcacctgcacaatgctgatgttgatcggcctcggggtgctggcttggcagcgctggagagcgatcccagctaccgattggcaagagtgggtcccctccaggtgtcgcctgtattctaaggatagtggtccacccgctgatggcccatag

SEQ ID NO: 243792 - DNA, 945 bp, synthetic construct
  misc_feature 1..945: note = Description of Artificial Sequence: Synthetic coding sequence
  source 1..945: mol_type = other DNA
atgcggccagagggctcattaacgtatagagtgccagagcggctaaggcagggattctgtggcgtgggaagggctgcccaagccctggtctgcgcatccgctaaagagggcactgcttttagaatggaagcagttcaggaaggcgctgctggtgtggaatccgagcaagccgctctcggagaagaggcagtgctactgctggatgacatcatggccgaagtcgaggttgtggctgaagtggaggtggtggccgaggaggagggcctagttgagagaagggaggaggcccagagagcccagcaggccgtacctggcccaggcccaatgacacctgagtcggccccagaagaacttctggctgtgcaggtggaactcgaacctgtaaacgctcaggcgcgtaaggccttcagccggcagcgcgagaagatggaacgacgccgaaaaccccacctagacagaagaggggcagtcatccagtctgtgcccggtttttgggccaacgttattgctaaccatcctcagatgtcagcattaatcaccgacgaggacgaggacatgctgtcttacatggtctccctagaggtgggggaagagaagcacccagtccacctgtgcaagattatgctgtttttccgttctaacccctatttccagaataaggtgatcacaaaggaatacctcgtgaacattacggagtatagagccagtcacagtacgcccatagagtggtatccagattatgaagttgaagcgtatcgacggaggcatcacaattcttctctgaacttcttcaactggttctcagatcacaactttgccggatcaaacaagattgccgagatcctgtgcaaggatttgtggaggaaccccctgcagtattacaagcggatgaaaccccctgaggagggaactgaaacatcaggtgactcccagctgctgagctag

SEQ ID NO: 243793 - DNA, 927 bp, synthetic construct
  misc_feature 1..927: note = Description of Artificial Sequence: Synthetic coding sequence
  source 1..927: mol_type = other DNA
atgaggccagagggaagcctgacctacagggtgcccgagcgcctgagacaggggttctgcggagtgggcagagctgcacaggctctcgtgtgcgcgagtgccaaagaaggcacagctttcaggatggaagcggtgcaggaaggcgcagccggagtcgaatcagagcaggcggctcttggcgaagaggccgttctactcctggatgacatcatggccgaggtggaggtggtcgctgaggaggagggcctcgttgaaagaagggaggaggcacagagggcacagcaagccgtgcctgggccaggtccgatgacccctgaaagcgctccggaagagctcttggccgtccaggtagagctcgaacctgtgaacgctcaggccaggaaggcattcagtaggcagcgcgaaaaaatggaaagacgccgtaagccacatttagaccgaagaggcgctgtgatacagtcagtgccgggattctgggccaacgtaattgccaaccacccacagatgtctgctctgatcaccgacgaagacgaggacatgctgtcttacatggtttctctggaagtcggcgaagagaaacacccagtccacctgtgtaagattatgctgttctttcggtcgaacccatacttccagaataaggtcattaccaaggagtacttagtgaatatcacggaatatagagcttctcattcaacgcctattgaatggtacccggactatgaggtggaggcctatcgcaggcggcatcacaactcatctctgaattttttcaattggttctccgaccacaatttcgcaggttccaataaaattgcagaaattctgtgcaaggatctatggagaaatccccttcagtattacaaacgaatgaagcctcctgaagaaggaaccgagacttctggcgacagccaactcctatcttag

SEQ ID NO: 243794 - DNA, 2097 bp, synthetic construct
  misc_feature 1..2097: note = Description of Artificial Sequence: Synthetic coding sequence
  source 1..2097: mol_type = other DNA
atgatgcgcagccgctccaagagcccgagacggcctagccccaccgctcggggtgctaattgcgacgtggaactgctcaagaccacgaccagggaccgggaggagctaaagtgtatgctggaaaagtatgagagacacctcgctgagatacaggggaacgtgaaagtcctgaaatcggaacgggacaagatattcctcttgtacgagcaggctcaggaagagataacccggcttcgcagagagatgatgaaatcatgcaagtcccccaagagcaccacagcacacgccattctgcggagggtggaaactgagcgggatgtggccttcaccgacctgagacgcatgaccactgagcgggatagcctccgggagcgactgaaaatcgcccaggaaaccgcctttaacgaaaaagctcaccttgaacagcgtattgaggagcttgaatgcacagtccataatctggatgacgagcgaatggaacaaatgagcaacatgacccttatgaaagagacaatttcaacagtggaaaaggagatgaaaagcctggcgaggaaggctatggataccgagtcggagctgggcaggcagaaagctgagaacaacagtttgagactgctgtatgagaacacagaaaaggatctgtcggatacacagagacatctagcgaagaaaaagtatgagttgcaactaactcaagaaaagatcatgtgtttggatgaaaagatagacaacttcacaagacagaacattgctcagcgggaggaaattagtatactgggaggcaccctgaatgatttggccaaggaaaaagaatgcctgcaggcttgcttggacaaaaagtcagagaacattgccagcctgggagaatccctggctatgaaggagaaaaccatttccggtatgaagaacattatcgccgaaatggaacaagcctcacgccaatgtaccgaggcccttatcgtctgtgaacaggatgtcagcagaatgagacggcagcttgatgagaccaatgatgaactggcacaaattgcacgcgaacgggacatcctggcgcatgataacgataatctccaggaacagttcgctaaggcaaaacaggagaatcaggccctcagtaaaaagttgaacgacacacataatgaactgaatgatatcaaacaaaaggttcaggacactaaccttgaggtcaataagctgaagaatatccttaagtccgaagaaagtgagaataggcaaatgatggagcagctccgtaaagccaatgaagacgctgagaattgggagaacaaggcccgacagtcagaagcggataacaacacactcaagctcgagttgataactgctgaggctgaaggaaatcggctgaaggagaaagtggacagtctgaaccgggaagtggaacaacaccttaacgccgagcgcagctataaaagtcagatctcaaccttgcacaaatcagtggtaaagatggaagaagaacttcagaaggtgcagttcgagaaggtcagtgcactcgctgatctgtcaagcactcgcgaactgtgtattaaactcgacagctcaaaagaactgctgaacaggcagctggttgccaaagatcaggagatcgagatgcgggaaaacgagttagattccgcccacagcgaaattgaacttctgcgcagccagatggccaacgagcgcatttcgatgcagaacttggaggcacttctggtggcaaatcgggacaaggagtaccagagccagattgcgctgcaggaaaaagagtcagagatacagctcttgaaggagcacctctgtctcgctgagaacaaaatggcgatccaatccagagatgttgcccagttccggaatgtagtgacccagcttgaggctgacttagacatcaccaagcgtcagctcgggacggaaagattcgagcgggagcgagccgtgcaagagctacgcaggcagaactacagtagcaacgcatatcatatgtcttccactatgaaaccaaacactaaatgccacagccccgaaagagctcaccaccgctcacctgatagggggctggaccgctctctagaagaaaacctttgctatcgggacttttag

SEQ ID NO: 243795 - DNA, 2073 bp, synthetic construct
  misc_feature 1..2073: note = Description of Artificial Sequence: Synthetic coding sequence
  source 1..2073: mol_type = other DNA
atgatgagaagccgctccaaatctcctaggcgaccatctcctaccgcccgtggggcaaattgcgacgtggaactcttgaagacaaccactagagaccgagaagaactgaagtgcatgttggagaagtatgagcggcatctagctgagatacagggaaatgtaaaggtgctgaaatctgagagggataagattttcctgctgtacgagcaggctcaggaagagatcaccagactccgcagggagatgatgaagtcctgcaagtccccaaagtccactacggcacacgcaatcctccgacgggtcgaaacggagagagatgtggcatttaccgacctgagaagaatgactaccgaaagggactcactgcgcgagcgattaaagatcgcacaggagacggccttcaatgaaaaggcccatctggaacagaggatagaggaactggagtgtactgttcacaacctggacgatgaacgcatggagcagatgtcaaatatgacactaatgaaggaaaccatttcgactgttgagaaagagatgaagagcctggctcggaaggccatggacactgaatcagagctaggacgacagaaggcagaaaacaacagtcttaggctgctatacgaaaataccgaaaaggatttgagtgacactcagagacacttagccaagaagaagtacgagctgcagttgacccaagagaaaattatgtgtctcgacgagaagatcgataattttaccagacagaatatcgcacaaagagaagagatttcaatacttgggggaacactcaatgacttggccaaagaaaaggagtgtctccaggcctgcttggataagaaaagcgaaaatatagcgagtcttggagaaagcctcgctatgaaggagaaaacgatttctggcatgaagaatatcattgctgagatggagcaagcatcaaggcagtgtactgaggctctgatcgtgtgtgaacaggatgtttcccggatgcggaggcaactggatgagacaaacgatgagctggctcagatcgccagagaacgcgatatattagcccacgacaatgacaacctgcaggaacaatttgctaaggccaagcaggagaaccaggcactgtcaaaaaagcttaatgacacccacaacgaactgaatgacataaaacagaaagtccaggacacaaacctcgaagtgaataagctgaaaaatatacttaaaagcgaggaaagcgagaacagacagatgatggaacagcttcgaaaggcgaacgaggatgcagaaaactgggagaacaaagccaggcagagcgaggccgataataataccttaaagctcgaactgattaccgctgaggccgaggggaaccggctgaaggagaaggtcgatagtctcaacagagaagttgaacagcaccttaacgccgagaggagttacaaaagccagatttctaccctgcataagagcgtggtcaagatggaagaggaattgcagaaggtacaatttgagaaggtcagcgccttggctgacctgtcctccacccgggagttgtgtattaagctggactcctcaaaagaactgttgaacagacagctcgttgccaaagatcaggagattgagatgcgtgagaacgaactcgattctgcccacagcgagatcgagctgcttcggagccagatggcgaatgaacgcatttctatgcaaaatttggaagcattactcgtcgctaacagagacaaagaataccagtctcagattgcattacaggaaaaagagagcgagatccagcttttgaaagagcacctttgcctggccgagaacaagatggcaattcagtcaagagacgtggcccagttccgtaacgtcgtcactcagctggaggctgatctcgacattactaagagacagctcggaacagaacgattcgagcgcgagagagcggtgcaggagctaagacgacaaaattactcttctaacgcctatcacatgtcatctaccatgaagcccaatactaaatgtcactcaccagaacgcgctcaccatcggtcccccgatcgcggtctggatcgcagtttggagtag

SEQ ID NO: 243796 - DNA, 2097 bp, synthetic construct
  misc_feature 1..2097: note = Description of Artificial Sequence: Synthetic coding sequence
  source 1..2097: mol_type = other DNA
atgatgaggagtagatcaaagtctcctcgtagaccatcacccactgcacgcggtgccaactgcgacgtggagcttctcaaaacgacaacccgagacagggaggagctcaagtgcatgctggaaaagtacgagaggcacctcgccgaaatccaggggaacgtaaaagtcctaaaatcagaacgtgacaaaatttttcttctgtacgagcaagcgcaggaagagatcaccaggctgcgcagggaaatgatgaaaagttgtaagagtcccaagtccactaccgcgcatgccattctgcggagggtggaaaccgagcgggatgtggcttttacggatcttcgcaggatgaccaccgaaagggattctctgcgggagcgtttgaagatcgctcaagagaccgcttttaacgagaaagcgcatctagaacaaaggatcgaggaactggaatgcaccgtccataatctggatgacgagaggatggagcagatgagtaacatgaccctaatgaaggagaccatttcgactgtagagaaggagatgaaaagcctggccaggaaagccatggacaccgagagcgagctgggccgacagaaggctgagaacaactccctccgactgctctatgagaatacagaaaaagacctcagcgacactcagcgtcatttggctaagaagaagtacgaattgcagttgacacaagaaaagattatgtgcctggacgagaaaatcgacaactttaccagacaaaacatcgcacagcgggaagaaatctccatactaggtggcactctgaatgatctggctaaagagaaggaatgcttgcaggcctgcctggacaagaaaagcgagaacatcgcaagtttgggcgaaagcctggccatgaaggagaaaacgatcagcggtatgaagaacatcatcgccgagatggaacaggcgagccgacagtgcaccgaggccttaattgtttgcgagcaggatgtttcacggatgcgcagacagctggatgagactaatgatgagctcgcgcagatagccagggagagggacatcctcgctcacgataatgacaacctgcaggaacaatttgccaaagctaaacaagaaaaccaggcgctgagtaagaagcttaacgacacccataatgagctcaatgacatcaagcagaaagtccaggatactaatctggaagtcaacaaactcaaaaatatcctgaaatcagaggaaagcgagaaccgacagatgatggagcagttgaggaaagcaaatgaagacgccgaaaattgggaaaataaggcaagacagagtgaagcagacaacaacacactaaagctagaactgatcaccgcggaagcagagggcaacaggctgaaagaaaaggtcgatagcctaaaccgtgaggttgaacagcacctgaatgccgaaaggagctacaagagccagatttcaacactacacaagagcgtcgtgaagatggaagaagaactccagaaggttcagttcgaaaaggtgtccgctctcgccgatctgtcaagcactagagaactttgcatcaagttggattccagcaaagaactgctaaaccgccaactggtagccaaagaccaggaaatcgagatgagggagaatgaactcgattcagcccatagcgaaatagagctgttgcgctcacaaatggcgaatgagcgcatttccatgcagaatcttgaagccctactcgtagcaaatagagacaaagaatatcaaagccagatagccctgcaggaaaaagagagcgagatccagttacttaaggaacacctgtgcctggccgagaacaagatggccatccagtccagagatgtggctcaattccgcaatgtggtgactcagctcgaagccgatcttgacataacaaaaagacagctcgggactgaacgatttgagcgggagcgggcagtacaagagctgaggcggcagaattactcctcgaacgcttatcacatgtcctcaacaatgaagcccaataccaaatgtcactccccggagagagcacatcatagatctccggacaggggcttagatcgctctctggaggaaaatttgtgctatcgcgacttttag

SEQ ID NO: 243797 - DNA, 2097 bp, synthetic construct
  misc_feature 1..2097: note = Description of Artificial Sequence: Synthetic coding sequence
  source 1..2097: mol_type = other DNA
atgatgcgcagtcggtctaagtctcccaggaggccttctcctacggcaagaggtgccaattgcgatgtcgagcttttgaaaaccacaaccagggacagagaagaattaaagtgcatgctcgagaaatacgaaagacacctggccgagatccaaggtaacgttaaagtacttaaatctgaaagggataagatctttctgctgtacgaacaagcccaggaagagattacgcgtttacgacgtgaaatgatgaagagttgtaagtcacctaagtcaactaccgcccacgccatcctgcgccgagtggagaccgagcgggacgtggcttttactgacctcagacgcatgaccacagaacgagattcacttcgggagcggctcaaaatagctcaggaaacagcgttcaatgaaaaggcccatctggaacaaagaatcgaagagctggaatgcactgtccataacctcgacgacgaaaggatggagcagatgtccaacatgacactgatgaaagaaaccattagtaccgttgagaaagagatgaagtccctggccagaaaggccatggatacagaatccgagctggggcgtcagaaagcagagaataacagtctgcgactactgtacgaaaacacagaaaaagacctctctgacactcagcggcacctggccaaaaagaaatatgagttacaactcacacaggagaagatcatgtgccttgatgagaagatcgataattttactcgtcagaatatcgcgcagagggaggaaattagcattttgggcggtacacttaacgatttggctaaggagaaggaatgccttcaggcgtgtctagacaagaaaagcgagaacattgcctcattaggcgagagtttggcaatgaaggaaaagaccatctcaggaatgaagaacattattgctgagatggaacaggcttcacggcaatgtactgaggccctcattgtgtgtgagcaggatgtctcccgcatgcggaggcagctggatgaaacaaacgacgaattggctcagatcgctagagagcgtgacatcctggcccacgacaatgacaaccttcaagaacagtttgctaaggcaaagcaggagaatcaagcattatcaaagaagttaaacgacacccacaacgagttaaatgatattaaacagaaagttcaagataccaatttggaagtgaacaaactgaaaaacatactgaaatccgaagaatcggagaatcggcagatgatggagcagctccgcaaggctaacgaggatgcagagaattgggaaaataaggccagacagtcagaagcagataataatactcttaagctcgagctgatcactgctgaggcagagggaaacaggctcaaagaaaaggtggacagtctgaatagggaggtcgagcagcatctgaacgcagaaaggtcgtacaagtcccaaatttcaacacttcataagagcgtcgtgaagatggaagaggagctgcagaaggtgcaatttgagaaagtatccgcactagctgatctctcatccacgagggaattatgtattaagctagattcgtccaaagagttgcttaacaggcaacttgtggccaaagatcaagagattgagatgcgggagaacgaactcgactccgcgcactccgagatagagctgctgcgctcccagatggctaatgagcggatcagcatgcagaacttagaggccctgctggttgctaatcgcgacaaagaatatcagagccagattgcactgcaagaaaaggaatcagaaattcaactgttgaaggagcatctctgcctggccgaaaataagatggcaattcagtccagggatgttgcccaattcaggaacgtggtcacccagcttgaggcggatctagatattacgaaacgtcaactcggcacagagaggttcgagagagagagggcagtccaagagttgagacggcagaattactcgtcaaatgcctatcacatgtccagtacaatgaagccaaataccaagtgtcactccccggaacgcgctcaccatcgaagcccagataggggactggataggagcttggaagagaacctctgctatagagatttttag

SEQ ID NO: 243798 - DNA, 2097 bp, synthetic construct
  misc_feature 1..2097: note = Description of Artificial Sequence: Synthetic coding sequence
  source 1..2097: mol_type = other DNA
atgatgcgctcgagatccaaatcacctcgtcgcccttcaccaaccgctcgtggcgctaactgcgacgtggaactcctaaaaaccaccaccagggaccgggaggagctgaagtgcatgttagaaaagtacgagcggcatctagccgagatccaggggaatgtgaaggttttgaaatccgaaagggacaaaatcttcctgttgtatgaacaggcgcaggaggagattacaaggctgagaagagagatgatgaaaagctgtaagagccccaagtcaacgacagcccatgccatcctgcggagggttgagacagaacgagacgtagcgttcaccgacctgcgacgaatgacaaccgagagggatagcctacgggaacgcctcaagattgcgcaggagaccgcattcaatgagaaggctcatctggaacaacggatcgaggagctggaatgcactgttcacaaccttgacgatgaacgcatggaacaaatgtctaatatgaccttaatgaaggagaccatctctaccgtagagaaggaaatgaagtctctcgcgaggaaggccatggacaccgaatcagagctcgggagacagaaggcagagaacaatagtctgagactcctgtatgagaatacagaaaaagacctgtctgacacccaacggcatctggcaaagaaaaagtacgaactgcagctgacacaggagaagatcatgtgtctagacgaaaagatagacaatttcacaaggcagaatattgcacagagggaggaaatcagtatcctcggtggaacactgaacgatctggcaaaggagaaagaatgccttcaggcctgcttggacaaaaagtccgaaaatattgccagccttggggagagtcttgctatgaaagagaagactattagtggtatgaagaacattatcgccgagatggagcaggccagccggcagtgcacagaggccctcatagtctgtgagcaggatgtgagccgaatgcgacgccagttagacgaaaccaatgacgagctggcccagatagccagagagagggatatcctcgcccacgacaacgataaccttcaggagcaatttgcaaaagccaagcaggaaaaccaagcgctatctaagaaactcaacgacacacacaacgagctgaacgatatcaaacagaaagtgcaagacacgaacttagaggtaaacaagctcaagaacatcctcaagagcgaggaaagtgagaatagacagatgatggagcagctgagaaaggccaatgaagatgccgagaattgggagaataaagctcgacaaagcgaagcggataacaacaccttaaagttagagctcattactgctgaagccgagggcaaccgccttaaagagaaggtggattccttgaacagggaggttgaacaacacctcaacgctgaacgcagttataaatcccaaatctctacgctgcacaaatctgtggtcaagatggaggaagagctgcaaaaagtgcagttcgagaaggtgtcagctctggcagacctcagttccacccgggaactctgcattaaattagactcaagcaaagagctgctgaatcgtcaactggtggctaaggaccaagaaatcgagatgagagagaacgaactagactcggctcactctgagatcgagctcctgcggtcacagatggcaaacgagagaatttccatgcagaatttagaggcattgctggtggccaaccgggacaaggaatatcagagccagatcgctttgcaggagaaagagagcgagatccagctgctcaaggagcatctgtgcctcgctgagaataagatggcaattcagagtcgggatgtggctcagttccggaatgtagtcacccagctggaggcggacttggacatcacaaagcggcaactcggcacagagcgtttcgagcgcgagagggcggtccaagagctgaggaggcagaattactccagcaatgcatatcacatgtcctcaacaatgaaacccaatacaaaatgccactctccggagagggcccaccatcgttctccagaccgagggctggacagatccctggaggagaatttatgctatagggacttttag

SEQ ID NO: 243799 - DNA, 894 bp, synthetic construct
  misc_feature 1..894: note = Description of Artificial Sequence: Synthetic coding sequence
  source 1..894: mol_type = other DNA
atgatgagatcacggtccaaaagcccacgcagaccctcccctacagccagaggcgctaactgcgatgttgagctgttgaagacaactacacgcgatcgcgaggagctgaagtgtatgctggagaaatatgagcggcacctagcagaaatccaggggaacgtcaaggtcctgaagtctgagcgtgataagatcttcttactctacgagcaggcacaggaggagatcacccgattgcggagggaaatgatgaaatcttgtaagtctcccaagtccacgacggcccacgccatccttagacgcgtggagaccgagcgagatgtcgcctttactgatcttcggagaatgaccaccgaaagagattcacttagagaacggctgaaaatagcccaggaaacagcatttaacgaaaaagcacacctggagcagcggatcgaagagctggaatgtacagtccacaacctcgacgatgagaggatggagcagatgagtaatatgacgttgatgaaggagaccatctcaacagtcgagaaggaaatgaagagcctagctcgaaaagccatggatactgagagcgagctgggacggcagaaggctgaaaacaatagtcttaggctgctctatgagaacactgaaaaggacttgtcagacacacagaggcacctcgcgaagaagaagtacgagctccagttaactcaggagaaaattatgtgtttggatgagaagatagacaacttcacacggcagaacattgcccagcgcgaggaaatctcgatcctgggcggaacgctgaatgatttggccaaagaaaaagaatgtctccaggcttgccttgataagaagagcgaaaacatcgcgtcactgggagagtccttggccatgaaaaccgtatattag

SEQ ID NO: 243800 - DNA, 1881 bp, synthetic construct
  misc_feature 1..1881: note = Description of Artificial Sequence: Synthetic coding sequence
  source 1..1881: mol_type = other DNA
atggcaggcgaacggccacctcttaggggccctggccctggacctggtgaggttcctggggaaggacctccgggaccagggggaacgggtgggggacccggtagaggcaggcccagttcctatcgcgcacttcggtccgctgtgtcatccttggctcgcgtagatgatttccactgtgctgagaaaatcggtgccggatttttttctgaagtctacaaggttcgacacaggcagtcaggccaggtgatggtgctgaagatgaataagctccccagcaaccgcggaaacactctgagagaagtccagctgatgaacagactgcggcaccccaacatcctgcggtttatgggagtgtgtgtccaccagggacagctgcacgccttgactgagtatatgaatggaggcacacttgagcagctgctttcatcccccgaacctcttagctggcccgtgaggctgcacttggccctggacatcgcacggggactccgatacctccacagtaagggtgtcttccaccgagacctgacgagcaagaactgtctggtgcgcagggaagatcggggatttacagcggtcgtcggggattttgggcttgctgagaaaattcctgtgtatagggagggtgccagaaaagaaccactggccgtggtgggctccccttactggatggcccctgaggttcttaggggtgagctctatgatgaaaaggcggatgtgttcgcatttggaatcgtgctgtgcgaattgatcgccagagtgccagccgatcccgattatttgcccaggacagaagactttggcctggacgtcccagcattccggaccctggttggagatgactgtcctctaccctttctgctcctcgcgattcactgttgcaatcttgagcccagtacccgcgctcctttcactgagattacccaacatctagagtggatactcgaacagctgcccgagcctgctccactcacccgtactgccctgacccataaccaaggatcagtggcccgagggggtccaagcgcgaccttacccaggccggaccccagactcagtaggagtaggtcagacctgttccttccaccttctcccgagtcaccaccgaactggggcgacaatttgacccgggtcaatccattctcgttacgtgaggacctgcggggaggaaaaattaaactgctcgacaccccttcgaagcctgtacttccactcgtgccaccctcccccttcccttctacacagctgccacttgtgactacgccggagacattggtccaacccggaacgcctgccagacgatgccgcagtcttccctctagtcccgagctgccccgtcgtatggaaacggccctgcccggacctggcccaccagccgttggtcctagcgcagaagagaagatggagtgcgagggcagcagtccagagccggaaccacctggtcctgcacctcagctgcctctggccgtggcgactgataactttatatccacatgcagttctgcctcacagccatggtctcctcgctccgggccagtgttgaataataatccaccagcagtagtggtgaatagcccacaaggttgggctggggaaccgtggaatcgagctcaacattcactgcctcgcgctgctgcccttgaacgcactgagccgtcccctccccctagcgctccacgcgagcccgatgagggccttccctgccctggctgctgcctgggcccattcagcttcggtttcctgtctatgtgtccaaggccaacccccgcagtggcgcgatacaggaacctcaattgcgaagctgggagcctgttatgccatagggggcatcatgcgaaaccgcctacacctagcttgcagctgcctggggcacgcagctag

SEQ ID NO: 243801 - DNA, 474 bp, synthetic construct
  misc_feature 1..474: note = Description of Artificial Sequence: Synthetic coding sequence
  source 1..474: mol_type = other DNA
agcgcccgagctgcggctctttctagaaacctgcagggtcagagacctctcccactcgctgtcgcgacagataactttatcagcacctgttcctcagcctcacaaccttggtcacctaggagcgggcctgtcctaaataacaacccgcctgccgtggtggttaactcccctcagggatgggctggggagccttggaatcgcgctcagcacagtctcccgagagcggctgcattagagcggaccgaacctagtccaccaccctcagccccaagagagcccgacgaaggcttgccgtgcccagggtgctgcttaggcccattcagttttggattcctgtccatgtgccctcgcccaacccccgctgtggccaggtacaggaatctgaattgtgaggcaggatccctgctttgccacaggggccaccacgctaagccacccaccccaagcctgcagctcccaggtgccaggtcttag

SEQ ID NO: 243802 - DNA, 1077 bp, synthetic construct
  misc_feature 1..1077: note = Description of Artificial Sequence: Synthetic coding sequence
  source 1..1077: mol_type = other DNA
atggatgatgccacagtacttaggaagaaagggtatatcgtgggaatcaatctggggaagggcagttacgccaaggtgaagagtgcatactcagagagactgaagtttaacgtggctgtcaagatcatcgataggaagaaaacaccaactgactttgtcgaacggtttcttcccagagagatggatatactggcgaccgtcaaccatggctctatcatcaagacatacgaaattttcgaaacaagtgatggcagaatttatattatcatggagctgggagtccagggggacctattggagttcatcaagtgtcagggggcactgcacgaggatgtggctcgtaagatgttcagacaactgtcctccgccgtcaagtattgtcacgatctggacatcgtgcatagagatctgaagtgtgaaaacctgctgctggacaaggactttaatatcaaactatccgactttggtttcagcaagcggtgtctcagggactccaacggtcgtattatactaagcaaaacattctgtggtagtgcagcatacgccgctcccgaagtgctgcagtctattccataccagcctaaagtgtacgatatatggagtttaggtgtaatactgtacattatggtttgcggatccatgccctatgatgactctgatattagaaagatgctgcgcattcagaaagagcacagggtggatttcccgcgatccaaaaacctgacgtgtgagtgtaaagatctaatatatagaatgcttcagcctgatgtgtcccagcgactgcatatagacgagatcctcagccactcgtggctccaacctccgaaacctaaagccacctcctcagcatcattcaagagagagggtgaaggcaaataccgggcagagtgtaagctggatacaaagactggattgagaccagatcaccgccctgaccacaagttgggcgctaaaacacagcacagactacttgtagtgccagagaatgagaatcgcatggaggaccggctagccgaaactagtcgggcaaaagaccatcacatcagtggggctgaagtgggcaaagctagcacttag

SEQ ID NO: 243803 - DNA, 807 bp, synthetic construct
  misc_feature 1..807: note = Description of Artificial Sequence: Synthetic coding sequence
  source 1..807: mol_type = other DNA
atggaggatttccttctttctaatggctaccaattggggaagaccattggggaagggacctactccaaagtgaaggaggcattcagtaagaagcatcagcgcaaagtcgctattaaagtgattgacaaaatgggcggacccgaggagttcattcagagattcctgcctagagaactccagattgtacgcaccctggaccataaaaacattatccaggtctacgaaatgttggaatccgcagatgggaagatttgcctagtgatggagctggccgaaggaggagatgtgtttgactgcgtcttgaatggcggacccctcccagaatctcgcgctaaagccctgttcagacagatggtagaagcaatccgttactgtcacgggtgcggagtcgcacatcgcgatctgaagtgtgaaaatgctctgctgcagggctttaatcttaagctgacggacttcggcttcgcgaaagtgctccccaagtctcacagggaactttctcagacgttttgcggctctactgcttacgcagcacctgaagttctgcagggcattccccatgactctaagaaaggcgatgtgtggagcatgggagtggtcctctatgtgatgctgtgcgcgtccctgcctttcgacgatactgacatccccaaaatgctgtggcagcagcaaaaaggcgtgtccttcccaactcatctgtcgattagtgctgattgccaggatctcctgaagagactattggaacctgacatgatccttagaccaagcatcgaagaggtctcctggcacccgtggctggccagcacatag

SEQ ID NO: 243804 - DNA, 987 bp, synthetic construct
  misc_feature 1..987: note = Description of Artificial Sequence: Synthetic coding sequence
  source 1..987: mol_type = other DNA
atgggaaagggtgacgtgctggaggccgcacccacaactactgcctatcactctcttatggacgagtatggatatgaggtgggaaaagcaatagggcacggaagttacgggagcgtttatgaagctttctataccaaacagaaagtaatggtggctgtcaaaatcatttccaaaaaaaaagcatctgacgactacctcaacaaattcctccctagggagatacaagttatgaaggtgcttcgacataaatacctcataaatttctatcgggctatcgagagcactagtagagtgtatatcatcctggaactcgcacagggcggtgatgttcttgaatggatccagcggtatggcgcatgtagcgagccccttgccggaaagtggttcagtcagctgactctgggcatagcataccttcactctaagtctattgtccaccgagacctcaagctggaaaatctgctgctggacaaatgggagaacgtgaagatttcagacttcgggttcgccaaaatggttcccagcaatcagccagttgggtgctccccttcttatagacaggtcaactgtttctcacatctctcacagacatactgtgggtcattcgcctacgcttgccctgaaattctgcggggattgccttataaccccttcctcagcgacacatggtccatgggtgtgatactgtacacccttgtggtggctcacctaccatttgatgacaccaacctgaaaaagcttctccgagaaacccaaaaagaggttactttcccagctaatcacaccatcagccaggagtgcaagaatctcatactccagatgctgcggcaggccaccaaaagagccacgatactagatataatcaaagattcttgggtgctgaagtttcaacccgagcaacccacccacgaaatccgactcctggaagcaatgtgtcaactgcataacaccacaaagcagcatcagtccttgcagatcaccacatag

SEQ ID NO: 243805 - DNA, 1017 bp, synthetic construct
  misc_feature 1..1017: note = Description of Artificial Sequence: Synthetic coding sequence
  source 1..1017: mol_type = other DNA
atgggtaaaggcgatgtgttggaggctgcccctaccaccaccgcgtaccactcgctaatggacgagtatggatatgaggtgggcaaggccattggccacggaagttatgggagtgtctacgaggcattctacacgaagcagaaagtcatggtggccgtgaagattatcagtaaaaagaaagccagcgatgattacctcaacaagttcctccctagagaaatccaggtcatgaaagtcctgagacacaagtacctaatcaatttttacagagcgatagagtccactagcagggtgtatattattctagaactcgctcagggaggcgacgtccttgaatggatccaaagatacggagcttgtagtgagcctcttgctggcaagtggttctcccagttgaccctgggtatagcgtatctgcacagtaaatctatagtgcatcggctgatgccctccctctcagccgcaggtagggacctcaaattggagaatttactgctagacaaatgggaaaatgtgaagatcagcgatttcggattcgcaaagatggtcccatcgaaccaacctgtagggtgctctccatcctatagacaggttaattgcttcagccatttgtcgcagacctactgtggaagctttgcttatgcgtgccctgaaatccttcgtggcttgccctacaacccttttctgagtgatacctggtctatgggggtgatcctctacactttagtagttgctcatcttcctttcgatgatacaaacctgaaaaagctgctgcgcgaaactcagaaggaagtcacctttcccgctaaccataccattagccaggagtgcaaaaacctcattctccagatgctaaggcaggccaccaagcgagcaaccattcttgacatcattaaagattcctgggtgctcaagtttcagccagagcagccaactcatgaaataaggctccttgaagccatgtgccagcttcataatacaactaaacaacaccagtcactgcagataaccacttag

SEQ ID NO: 243806 - DNA, 759 bp, synthetic construct
  misc_feature 1..759: note = Description of Artificial Sequence: Synthetic coding sequence
  source 1..759: mol_type = other DNA
atgaaagttctgcgccacaaatatctgattaatttttacagagccatcgagagcacaagtcgtgtgtatattatcctcgagcttgcgcaaggcggtgacgtgctcgaatggattcagagatatggggcttgcagtgaacctttggctggtaagtggttcagtcagctgacactaggcatcgcttacctccacagtaagagcatcgtgcaccgcgacctcaagctggagaatctgctacttgataaatgggagaacgtgaaaatctccgatttcggctttgctaagatggtgccatccaatcaacctgtaggctgtagcccttcatacaggcaggttaactgcttctctcacctgtctcagacctactgtggctcctttgcatatgcttgcccagagatccttcggggtcttccttacaaccccttcctgtccgacacgtggagcatgggcgtaatactgtatacacttgtagtcgctcatctcccgttcgacgataccaatcttaaaaaattgctgcgggaaacccagaaagaagtgacgttccccgcaaaccatactatatcccaggaatgtaagaatttgattttgcagatgctacggcaagccaccaagcgtgctacaatcctggacatcatcaaggattcgtgggttttgaagttccaaccagaacagcccacccacgagatacggctgctcgaagcgatgtgccaactgcacaacaccaccaagcagcatcagagtttgcaaatcactacatag

SEQ ID NO: 243807 - DNA, 822 bp, synthetic construct
  misc_feature 1..822: note = Description of Artificial Sequence: Synthetic coding sequence
  source 1..822: mol_type = other DNA
atgagcggagataaactgctctctgaactgggttataagctcggaaggactataggtgagggttcatattctaaagtcaaggtagcgacctcaaaaaaatacaaaggaaccgtggctattaaggtggtggaccgacgacgggctccacccgactttgtcaataagttcctccctcgcgagctgtctattctcaggggcgtgcgccatccccacatcgtgcatgtgtttgaattcatcgaagtgtgcaatggcaagctgtatatcgtaatggaagcagccgctaccgatctgctccaagctgttcagagaaatggtcgcattcctggtgttcaagctagagatctctttgcccagatcgctggcgcagttcggtacctccatgaccatcacctcgtccacagagacctgaaatgcgaaaacgtcttgctttcaccagacgagagacgggttaagctaacagattttggattcggaagacaggcgcacggttaccccgacctgagtaccacgtattgcgggtctgctgcctatgctagcccagaagttctgctcggcatcccttacgacccaaagaaatacgatgtgtggagtatgggggtggtgttatatgtaatggtcacagggtgcatgcccttcgatgactccgacattgctggtctgcctaggaggcaaaagagaggggtcctgtatcctgaaggtctcgagcttagtgagagatgcaaagcattgattgcggaactcttgcaattttcaccatcggcacgaccttctgccggacaagttgcccgtaattgctggttgagggcaggagactcaggatag

SEQ ID NO: 243808 - DNA, 822 bp, synthetic construct
  misc_feature 1..822: note = Description of Artificial Sequence: Synthetic coding sequence
  source 1..822: mol_type = other DNA
atgtccggtgataagctcctctctgagttgggatacaaacttgggaggactatcggtgaggggagttacagtaaagttaaggtggccacctcaaagaagtacaagggcacagtggcaataaaggtagtggatagacgacgggctccacccgacttcgtgaataaattccttcctcgagaactgtccatcctgaggggggtccggcaccctcacattgttcacgtttttgaattcatcgaagtctgcaacgggaagttgtatattgttatggaagcagcagctacggacctcctgcaagctgtacagcgcaacggcaggatcccgggagtacaggcgagagatctttttgcccagatcgcaggcgctgtcaggtatttacatgaccatcatctggttcatcgggacctgaagtgtgaaaatgtgctgctctctcccgacgagagacgggtcaagcttaccgacttcggcttcgggcgtcaggcacacgggtatcctgacctctcgaccacatattgcgggtctgcggcttacgcctccccggaggtactgctgggcatcccgtacgaccctaaaaaatacgatgtctggagcatgggagtggttctgtacgtcatggtcacaggatgtatgccttttgacgactcagacatagctggattaccacggagacaaaaaagaggcgttctataccctgaagggctcgaattgtcagagagatgcaaagcattgatagctgagctcctgcagttctctccgtcagccaggcccagcgcagggcaggtggcgcgaaattgttggcttcgtgctggcgactctggctag

SEQ ID NO: 243809 - DNA, 6410 bp, synthetic construct
  misc_feature 1..6410: note = Description of Artificial Sequence: Synthetic coding sequence
  source 1..6410: mol_type = other DNA
atgagtaggtcccggcatgctcgcccaagtcgtcttgtcagaaaggaagatgtgaacaagaagaaaaagaatagtcagctgcgtaagacaaccaaaggggcaaataaaaacgtggcatccgtgaagaccctgtccccaggcaaactaaaacaactgatccaggagcgcgatgtgaagaaaaagacggagcctaagccaccagtgccagtacgaagcctgctcactcgggcaggtgccgcaaggatgaacctggaccgcactgaagtcctttttcaaaacccagaatcgctgacctgcaacggcttcacaatggctctgagaagtacaagtctgtccaggcgtctgtcacagccaccacttgttgtggcaaagtccaagaaggtgcccctctctaaggggctagagaaacagcacgattgcgattataagatcctcccagcccttggggttaaacactctgaaaacgattcggtaccgatgcaggacactcaggtactgccggacattgagactctaatcggtgttcagaacccatccctcttgaagggcaagtcccaagagactacacagttttggagtcaacgagtcgaagactctaagataaacatccctacccattctggccctgcggcagaaatcctccccggacccttagagggtacacggtgtggagagggtcttttcagcgaggaaaccctgaacgacacctccggctcgcctaaaatgtttgcccaggacacagtttgtgccccttttccacagcgggctacacccaaagtgactagtcagggaaacccatctatccagctcgaggaactgggatccagggtggagagcttgaagttgagcgactcttacttagatcctatcaaatctgaacacgattgctacccgactagtagcctgaataaagtcatccctgatctaaacttacgcaactgtcttgcactcggcggttccacctctcccacctcagtgattaagtttctgcttgccggttcaaagcaggccacactcggcgcaaaacctgatcaccaggaagcctttgaggcgaccgccaatcaacaggaggtctctgacacaacaagttttctgggccaggccttcggggctatccctcatcaatgggagctccctggtgctgaccccgtgcacggggaggcgctcggagaaaccccagacctgcctgaaattcccggtgctatccctgttcaaggcgaagtattcggtactatcctggaccagcaggagacgctcggtatgtcgggcagcgtcgtacccgatctccctgtttttctgccagtgccccctaacccaatcgccaccttcaacgcaccatcaaagtggccggagccgcagagcactgtgagctacggactggccgttcaaggtgccattcagattctgcctttaggaagcggccatacccctcaaagctccagcaatagcgaaaaaaactcactgccacctgtgatggctatttcaaatgttgagaatgagaaacaagtgcatatctccttcctgcctgctaatactcaagggttccccctagctccagaaaggggactgttccatgcaagtttaggcatcgcccaactgtcccaggctggtccaagcaagtcagatcgcggatcttcacaggtcagcgtgaccagcacggtgcacgttgtcaacacaactgttgtcacgatgcccgtgcctatggtgagcacctctagcagttcttatacgaccctgctgcctacgcttgagaaaaaaaagcgcaagaggtgtggagtttgtgaaccctgccagcaaaagacaaactgtggagagtgcacatactgcaagaaccggaaaaactcacatcagatctgtaagaagaggaaatgtgaggagctcaaaaagaagccttccgtcgtggttcccctggaagtgatcaaggagaataaacggccacagagggagaaaaaacccaaggttctcaaggctgattttgataacaagccagtgaacggccctaagtcggagtctatggattacagccgctgcgggcacggggaagagcaaaagcttgaactgaatccacacaccgtcgaaaacgtgaccaagaatgaagactccatgacgggcattgaggtcgagaaatggactcaaaacaaaaaatctcagcttaccgatcatgtgaagggcgacttcagtgccaacgtgcccgaggcagagaagagcaagaatagtgaagtagacaagaagagaaccaagtctcccaagctgttcgtgcaaaccgtgcgaaacggaataaaacacgttcattgcctcccagccgagaccaacgtgagtttcaaaaaattcaacattgaagaattcggaaaaaccctggaaaacaatagctataagtttctgaaagacactgctaatcacaaaaatgcaatgagttcagttgccacagatatgagctgtgaccatctgaaaggccgtagtaacgtgctggtctttcagcaacccggttttaactgcagctccattccccattccagccactctatcataaaccatcatgcctctattcacaacgagggagatcagccgaagacacccgagaatatcccatccaaagagcctaaggatggtagccccgtgcagccatctctgctctccttgatgaaggatagaagattgacactggagcaagtggtggctatagaggcattgacccaattgtcagaagcaccatctgagaatagtagcccatctaaatccgaaaaggacgaggagagcgaacagaggacggcttccctcctcaactcctgcaaggcgattctgtacactgtgcgaaaggatctacaggaccccaacctgcaaggcgaaccacctaaactgaatcattgccctagcctggaaaagcagtcatcttgcaacaccgttgtattcaatggtcagaccacaacccttagcaattcacatatcaatagtgccacaaaccaagccagcaccaaaagccatgaatattctaaggtgaccaactcactgagcctcttcatcccgaaaagcaactccagtaagatcgatactaacaagagcattgcccagggaattatcacattggataattgctccaacgacctgcaccagttgcccccacgaaacaatgaggtcgagtactgtaaccaactgctggactctagcaagaaattggatagcgacgacctctcttgccaagacgccacccacactcagatcgaggaagatgtggcgacacaactgacacagctcgcgtcgatcattaaaattaactatataaaaccagaggataagaaagttgagtccacccctacatccttagtgacttgtaatgttcagcaaaaatataatcaggagaagggaacaattcagcagaagcctcctagctctgtgcataacaaccatggttcttctcttactaagcagaagaatccaacccagaagaaaactaaaagtacgccctcccgggatcgacggaagaagaagcccaccgtggtgtcttaccaagagaacgatagacagaagtgggagaagctgagctacatgtacgggaccatatgtgacatttggattgcctcaaagtttcagaactttggtcagttttgtccacacgacttccccacagtcttcgggaagatcagctcatccaccaaaatttggaagccactggcacagactcgctcaataatgcagcctaaaactgtgtttcctcctctgacccagatcaaattgcagagatatccagaaagtgccgaagagaaggtgaaggtcgaaccattggactctctgagtctgtttcatttgaagacagaatccaatggcaaggcattcaccgataaggcttacaacagccaggtgcagctcacggtcaatgcaaatcagaaggcccacccattgacacagccttcttcccctcctaaccagtgtgctaacgttatggcaggggacgatcagattcgtttccaacaggtggtaaaggaacagcttatgcaccagcgcttacccaccctgccaggcatctcacacgaaactccactccccgaatctgcattaacgttacgcaacgtgaacgtggtatgctccggcggtatcacagttgtgagcacaaagtccgaggaagaggtttgctcttccagctttggcaccagcgagttttctaccgtggacagcgcgcagaagaacttcaatgactacgccatgaatttctttaccaacccgacaaaaaacttggtatcgatcacaaaagatagtgagctgccaacctgcagctgcctagaccgcgtgatacagaaggataagggaccttactacactcacctcggtgctggacccagcgttgcagctgtcagggagattatggaaaacaggtacggccagaaggggaatgcgattcgcatcgagatcgtggtgtacacaggaaaggagggaaaaagctcgcatgggtgtccaatagcaaaatgggtgctgagacgctcctccgacgaagagaaggtgctttgtctggtgaggcaaaggaccggccaccactgtcccaccgccgtgatggttgtcctgataatggtttgggatggtatacctttgccgatggcggaccgcttatatacagagctgaccgaaaatctcaagagttacaacggccaccccacagacaggcgctgtaccctcaacgagaatagaacttgtacctgccaagggatagaccctgagacatgcggggcatccttttcttttggatgctcttggtctatgtacttcaatggctgtaagttcggtcggagccccagtccacgcaggtttaggattgatccatcatccccactccacgagaaaaacctcgaagacaacctacagagcttggcgaccagattggcccctatttacaagcaatatgcacccgttgcttaccagaatcaggtcgaatacgagaacgtcgcgagggagtgtaggttagggagtaaagagggcaggcccttctctggggtgacggcttgtcttgatttctgtgcccacccccaccgcgacattcataacatgaacaatggaagtaccgtggtgtgcacgctgacacgggaggataaccggtccctgggtgtgatacctcaggatgagcagctgcatgtgcttcccttatacaaactgtcagataccgacgagttcggttctaaggagggcatggaggccaagatcaaatccggagctattgaggtgctagctcccaggcgcaagaaacgaacatgtttcactcagcccgtgccccgtagcggcaagaagcgcgcagccatgatgactgaagtgcttgcacacaagattcgggctgtggaaaagaagccaatacctagaatcaagaggaagaataattcaacgaccacaaataattcaaaaccctcctcactgccaacgctgggcagcaacaccgaaacagtgcagcctgaggtgaaaagcgaaacagaaccacactttatactgaaatccagcgacaatacaaagacctactccctcatgccaagcgcccctcaccctgttaaggaagctagtccgggtttcagctggtctcccaagacagcctctgcaacgccagctccactgaaaaatgatgccaccgcgtcctgcggcttcagtgagaggagttcaacaccccactgtacaatgccgtctgggcgtctgtccggtgccaacgctgctgctgccgatgggcctggaataagccaactgggtgaggtggcccctcttcccactctgagcgccccagtaatggaaccccttattaattccgagccctcaactggagtaaccgaacccctcactccacaccagccaaaccaccaaccctctttcctgacaagtccacaggatctggctagttcaccaatggaggaagacgagcagcactctgaggccgacgagccacctagtgatgaaccactgtctgatgacccactaagcccagctgaagagaaactgccacacatcgacgagtattggtctgattcggagcacatcttcttagacgcaaatatcggcggtgttgccattgcaccggctcacggttctgtccttattgagtgtgcccgaagagagcttcacgccacgacccctgttgaacaccctaaccgtaatcaccctacccgcttgtctcttgtgttttatcagcacaagaatctcaataagcctcaacatggctttgaactgaacaaaattaaattcgaagctaaggaggccaaaaacaagaaaatgaaggcctctgagcagaaagatcaggccgctaacgaggggccagaacagagtagcgaggttaatgagctgaaccaaataccctcccataaggccctgactctgacccatgacaacgtggtaactgtctctccgtacgcactgacccatgttgcaggaccatacaatcactgggtcta

SEQ ID NO: 243810 - DNA, 330 bp, synthetic construct
  misc_feature 1..330: note = Description of Artificial Sequence: Synthetic coding sequence
  source 1..330: mol_type = other DNA
atggctgaccgcctgtatacagagctgaccgagaacttgaaaagttataacggtcaccccacagatcgccgatgtacactcaacgagaatcgaacatgcacatgccagggcattgatcccgagacgtgtggggcaagtttcagcttcggttgtagctggtccatgtatttcaacggctgcaaattcggaaggagtccatctcccagacgcttcagaatcgatccctcatcccccctgcatacctactacgagcgcattaccaaaggtcggaacccagaaagacggtacatgaagcctgaacgcatcagcccgggacacgaagcgatgtag

SEQ ID NO: 243811 - DNA, 726 bp, synthetic construct
  misc_feature 1..726: note = Description of Artificial Sequence: Synthetic coding sequence
  source 1..726: mol_type = other DNA
atgcagtgtttctcttttatcaagacaatgatgatactgtttaatctgttaatcttcctctgcggtgcagctctcctggctgttggtatctgggtgtccattgacggcgcatccttcctgaagatcttcggcccactgagtagctccgctatgcaatttgtgaacgtgggctattttctcatcgccgctggagtggtggtctttgcactgggctttctcgggtgttacggggcaaagaccgaatccaaatgcgccctggtcacctttttttttatcctgttgctcattttcatcgcggaggtggccgctgcagtagtggcactggtatacactaccatggcagagcactttctcaccctgcttgtcgtccccgcaataaagaaagattacgggtcgcaggaggactttactcaggtgtggaacacaactatgaagggcttaaaatgctgcgggttcacaaattatacagactttgaagattctccatattttaaggagaattctgcatttcctcccttttgttgcaacgataatgtgacgaatacagctaacgagacatgtacaaaacagaaggcccacgaccagaaagttgaaggatgttttaaccaactgctgtacgatattcgcaccaacgccgtcacagttgggggagtggcagcaggcatcggtggcctggagcttgcagctatgattgtgtcaatgtacttgtattgtaacctgcagtag

SEQ ID NO: 243812 - DNA, 702 bp, synthetic construct
  misc_feature 1..702: note = Description of Artificial Sequence: Synthetic coding sequence
  source 1..702: mol_type = other DNA
atgtcatcatactttgtcaatcctactttccccggttccctaccctccggacaagacagttttctaggccagctgcccttgtaccaggcaggctatgacgctttaagaccctttccagccagttatggcgcttcttcgctgcccgataaaacttacacatcaccatgcttttaccagcagtccaatagcgtcttagcttgtaatcgagcctcttacgagtatggcgcttcttgtttctattctgacaaagatctctctggggcttcaccatcgggaagcgggaaacagcgcggacccggtgactacctgcacttttctccagagcagcagtacaagccagactctagctccggccagggtaaagccctgcacgacgagggcgctgatcggaagtatacaagtcctgtgtatccttggatgcaacgtatgaattcctgcgccggtgctgtctacggttcacatggcagaagaggcaggcagacgtatacacggtaccaaacattagagctggaaaaggaattccattttaacagatacctgacacgtagacggagaattgaaattgcgaatgcactctgtttgactgaaaggcagatcaagatttggttccagaataggcggatgaagtggaaaaaagagaacaaacttataaatagcacccaacccagcggcgaagattctgaggcgaaagcaggcgagtag

SEQ ID NO: 243813 - DNA, 918 bp, synthetic construct
  misc_feature 1..918: note = Description of Artificial Sequence: Synthetic coding sequence
  source 1..918: mol_type = other DNA
atggccagggaggactcagtgaagtgtttgcgttgcctactctacgctctgaacctgctcttctggctgatgtccatctcagtactggcagtgtccgcatggatgcgcgattatttaaataatgtgctgacacttaccgccgagaccagggtcgaagaggcagtcattctcacttattttcccgtcgtccacccagtcatgatcgcagtgtgttgcttcctgatcatcgtgggtatgctgggatactgcggaaccgtgaaacgcaatctcctgctccttgcctggtactttggatccctgctcgtaattttctgtgtggagctggcttgcggagtgtggacttacgagcaagaactgatggtcccagtacaatggtctgacatggttacactgaaagcacgaatgaccaactacggcctgcctcgctatcgttggctgacccatgcatggaatttcttccagagggaatttaaatgctgcggggttgtttactttaccgattggctggaaatgacagaaatggactggcccccagactcttgctgcgtgagggaattcccaggatgcagcaagcaggcccaccaggaggacctcagcgacctgtatcaggagggctgtggtaagaagatgtacagttttctgagaggcacaaaacaattacaggtgctccgcttccttggtatcagtatcggcgtaacacagattctcgccatgatcctcacaatcaccctgttatgggcactatactatgaccgaagggaacccggaaccgatcagatgatgagtctgaagaacgacaactcccaacacttgtcctgtccgtcggtggagctcctcaaaccttctctgtcccgcatcttcgagcatacaagcatggccaactctttcaacacccattttgaaatggaggaactgtag

SEQ ID NO: 243814 - DNA, 339 bp, synthetic construct
  misc_feature 1..339: note = Description of Artificial Sequence: Synthetic coding sequence
  source 1..339: mol_type = other DNA
atggccagggaggacagcgtgaaatgccttcggtgcctcctttacgcgctgaatcttcttttctggctcatgtctatctcggtgctggctgtctcagcgtggatgagggattacctgaacaatgtgttaacgctaaccgccgagactagagttgaagaggcagtgatactgacctacttcccagtcgttcaccctgtaatgatagcagtgtgttgttttcttattatcgttggtatgttaggctactgcggcactgtcaagcggaatctcctgctgctcgcctggtacttcggaagtctgctggtcatcttttgtgttgagcttgcttgtggtgtttag

SEQ ID NO: 243815 - DNA, 288 bp, synthetic construct
  misc_feature 1..288: note = Description of Artificial Sequence: Synthetic coding sequence
  source 1..288: mol_type = other DNA
atggccagagaagattccgtgaagtgtctccgatgtctgctatatgccctgaacctgttgttttggctgatgtctattagcgtactcgctgtcagcgcctggatgcgcgactacctcaataacgtattgaccctaaccgcagaaactcgcgttgaggaagctgttatcctgacttattttcctgtggtacacccggttatgatcgcagtgtgttgcttccttataatagtggggatgctgggatactgcggaacagtgaagcgcaatctcctcctgttggcctggtag

SEQ ID NO: 243816 - DNA, 363 bp, synthetic construct
  misc_feature 1..363: note = Description of Artificial Sequence: Synthetic coding sequence
  source 1..363: mol_type = other DNA
atggcccgagaggacagcgtaaagtgcctgagatgcctgctgtatgcactgaatttgctcttctggttgatgagtatatccgtcctggctgtctccgcgtggatgcgagattacctcaataacgtgctgacactgactgctgaaacacgagtggaggaggctgtgattctgacttactttcctgttgttcatcccgtgatgatcgctgtctgttgcttcctgataatcgtgggcatgctgggctactgcggcactgtcaagcggaacctgctgctgctggcatggtactttggttctctacttgtgattttttgcgtcgagctggcctgcggcgtgtggacatacgaacaggagctcatgtag

SEQ ID NO: 243817 - DNA, 444 bp, synthetic construct
  misc_feature 1..444: note = Description of Artificial Sequence: Synthetic coding sequence
  source 1..444: mol_type = other DNA
atggccagggaagacagcgtaaaatgtttaaggtgcttactgtacgccctcaacttattgttctggctcatgtccatttccgtgctcgctgtctccgcctggatgcgtgactacctgaacaacgtgctgacccttacagccgaaactcgcgtggaggaagccgttatcctcacctactttcctgtggtgcaccccgtcatgatagctgtctgctgctttctcattatcgtcggcatgctcggttattgcgggacagtgaaaaggaatttactcctcctggcctggtatttcggctcattgctggtgattttttgcgttgagttagcgtgcggcgtctggacttacgagcaagagcttatggtccctgtgcagtggagcgatatggtgacactgaaagcccgtatgacaaattacggacttccaagataccggtggcttacttag

SEQ ID NO: 243818 - DNA, 885 bp, synthetic construct
  misc_feature 1..885: note = Description of Artificial Sequence: Synthetic coding sequence
  source 1..885: mol_type = other DNA
atgccccgtggcgattctgaacaggtgcgctactgcgcccgtttctcgtacctgtggctcaagttctccttgatcatttattcaacggtattttggttgatcggcgctctcgttctgtctgttggcatctacgccgaagtagagcggcagaagtacaaaacacttgagtctgccttcctggcacctgccatcattctcattctgctcggggtcgtgatgtttatggtgtccttcatcggggtcctggcaagccttcgggacaacttatacctgctgcaggcgttcatgtacatattaggtatctgtctgataatggaactaatcggcggtgtggtggccctgacattccgcaatcagacaattgatttcctcaacgacaatatccgccgaggaatagagaactactacgacgacttagatttcaagaatataatggactttgtgcagaagaagtttaaatgctgtggtggcgaagactaccgtgactggagtaaaaaccagtaccacgactgctctgctccaggccctctagcttgtggcgtcccatacacatgctgtatcaggaacacaacggaagtagttaataccatgtgtggctacaagactatcgacaaagaaagatttagcgtgcaggatgtaatctatgtcagagggtgcactaacgcggttattatatggttcatggataattatactataatggccggaatcctcctggggatcttgctacctcagttcctaggggtcctcctgacactgttatacattacaagagttgaagacattatcatggaacattccgtcaccgatggtcttttaggccctggtgccaaacccagtgttgaagctgcagggacggggtgttgcctatgttaccccaactag

SEQ ID NO: 243819 - DNA, 582 bp, synthetic construct
  misc_feature 1..582: note = Description of Artificial Sequence: Synthetic coding sequence
  source 1..582: mol_type = other DNA
atgggcagatttcgaggtggcttgagatgtataaaatacctgcttctgggtttcaacctgcttttttggttggcaggctctgccgtaattgccttcgggctgtggttccgatttggaggagctattaaagagctctcatcagaggataagtctccggagtacttctatgtagggctgtatgtactggttggagctggggctctgatgatggcagttggattctttggctgttgtggcgctatgcgagagagccagtgcgtgttgggatctttctttacctgtttgcttgtgatcttcgcggcagaggtgaccacaggggtgtttgctttcatcgggaaaggggtggctatccgccacgtgcagactatgtatgaagaggcctataacgattatctgaaggaccggggtaagggaaacgggactctgatcacctttcacagtaccttccagtgttgcggcaaggagtcttcagagcaagtccagccaacgtgcccaaaagagttgctggggcataagattttcggcatgatattctccatggtgttatgttgtgccatcagaaactcacgggatgtgatctag

SEQ ID NO: 243820 - DNA, 591 bp, synthetic construct
  misc_feature 1..591: note = Description of Artificial Sequence: Synthetic coding sequence
  source 1..591: mol_type = other DNA
atgggtcgctttagggggggactacgctgcatcaagtacttactgctgggttttaacctactcttctggctggcaggatccgctgttatcgcgttcggtctgtggttcaggttcggcggtgcgattaaggaactgtccagcgaggataaaagtcccgagtacttttatgtagggctctacgttttggtcggagcgggagcactgatgatggctgtgggattcttcgggtgttgcggcgctatgcgggagtcccagtgtgtacttggttcggcaatcagacacgtccagacaatgtacgaagaagcatacaacgactacctgaaggatcgtggaaaggggaacggaacgctgatcacatttcattccaccttccagtgttgcggaaaagagtcctctgagcaggtccagccaacatgtccgaaggagttgctgggccacaagaattgcatcgatgaaatcgagactataatctccgtgaagcttcagctgattgggattgtcgggataggaatcgccggtctcaccatctttggaatgattttttccatggtgttgtgctgcgcaattaggaactctcgggatgtcatttag

SEQ ID NO: 243821 - DNA, 666 bp, synthetic construct
  misc_feature 1..666: note = Description of Artificial Sequence: Synthetic coding sequence
  source 1..666: mol_type = other DNA
atggggaggtttcgcggtggtcttcgttgcatcaaatatctgctgcttggtttcaacctgctcttctggctggctggctcggccgtgatcgcgttcggactctggttccgttttggaggcgctatcaaagagctctccagcgaggacaagtctccggaatacttctatgtcggactttatgttcttgtgggggctggcgcactaatgatggctgtgggattcttcggttgctgtggcgcaatgcgagagagccagtgcgttttgggctcgttttttacatgtttgctggtgatctttgccgcagaggtgacaacaggggtgttcgcatttattggtaaaggcgtcgccattcggcacgtgcagaccatgtacgaagaagcatacaatgactacttgaaagaccggggaaagggaaatgggactctgatcaccttccactcaaccttccagtgttgcggcaaagagtctagcgagcaggtccagcctacttgtccaaaggagcttctagggcacaaaaattgcattgacgagatcgaaacgattatttccgtcaaactccagctaatcggtatcgtgggtataggaatcgctggcctgactatcttcggcatgatctttagtatggtgctgtgctgcgctattagaaacagcagggacgtcatatag

SEQ ID NO: 243822 - DNA, 564 bp, synthetic construct
  misc_feature 1..564: note = Description of Artificial Sequence: Synthetic coding sequence
  source 1..564: mol_type = other DNA
ggtctacgttgtattaagtacctgctcttaggtttcaatctgcttttttggctggccggatctgcagttattgccttcgggctgtggttccgctttgggggagccataaaggagctttcctcggaagacaagagccctgaatatttctatgtgggtctgtatgtgctcgtcggcgcaggagccttgatgatggccgtaggcttctttggctgttgtggggctatgcgcgagtcgcagtgcgtcctgggaagcttcttcacatgcctccttgtcatctttgcggctgaggtcaccactggcgtctttgcattcatcggtaaaggggtggcaattcgtcatgttcaaacaatgtacgaggaggcttataacgattaccttaaggaccggggaaagggtaatggaacattgatcacctttcactccacctttcagtgctgtggcaaggagtcaagcgaacaggtacagcccacctgtccaaaagaacttctcggacacaagattttcggaatgatattttctatggtgctgtgttgcgccataaggaattccagggacgtcatctag

SEQ ID NO: 243823 - DNA, 762 bp, synthetic construct
  misc_feature 1..762: note = Description of Artificial Sequence: Synthetic coding sequence
  source 1..762: mol_type = other DNA
atggggcagtgcggaattacctcctcgaaaaccgtgttggtcttcttgaatctgatattttggggcgcagctggaatattatgctacgtaggggcatacgtttttattacatatgacgactatgatcactttttcgaagacgtctacaccctgattcccgctgtggtaatcatcgcagtgggcgctctcctctttatcattgggcttatcgggtgttgtgccaccataagagagtcacggtgtggtctagccacattcgtgattattcttctgctcgtttttgtgacagaggtggtcgtagttgtgctggggtacgtgtaccgggctaaggtggaaaacgaagtcgatcgcagcattcagaaagtatacaagacttacaacggaactaaccccgatgccgcatcaagggctattgattatgtacagagacagctccactgttgcgggatccacaattattccgactgggagaatactgattggttcaaggagactaaaaaccagtcagtacccctaagctgctgccgggaaaccgccagtaattgcaacggatcccttgcccacccctctgatctgtacgccgagggatgcgaggcgctggtggttaagaagcttcaggaaataatgatgcacgtcatatgggcagccctcgcatttgcagcaatacagttgctcggaatgttatgtgcctgcatcgtgctctgtagacgatcccgtgatccagcttacgagttactgattacaggcggaacttacgcttag

SEQ ID NO: 243824 - DNA, 687 bp, synthetic construct
  misc_feature 1..687: note = Description of Artificial Sequence: Synthetic coding sequence
  source 1..687: mol_type = other DNA
atggggcagtgcggcataacctcctcaaagactgtcctggttttcctgaacctcattttttggggggcagccggaattctgtgttacgtgggagcttacgtgtttattacatacgacgattatgatcatttcttcgaagacgtatacaccttgatccccgctgtcgttattatcgctgtgggcgcacttttgttcatcattgggcttatcggttgctgcgcaaccattcgcgaaagcagatgtgggctggcgaccgtggagaatgaagtcgatcgttcgattcagaaagtgtacaaaacatataacggcactaatcccgacgccgcttctagggccatcgactacgtgcagcggcagctccactgctgtggtatccacaactactccgattgggaaaacactgattggtttaaagaaacaaaaaatcagtccgtccctctttcctgttgcagagagacagcctccaactgtaacggctcattagctcacccctcggacttgtacgcggaagggtgcgaagcactggtggtgaagaagctgcaggagattatgatgcacgtgatatgggctgcgctggcattcgccgctatccagctgctcgggatgctgtgtgcctgtatcgttctatgtcgcaggtcaagagacccagcatacgagctgctgatcaccggcggaacctacgcatag

SEQ ID NO: 243825 - DNA, 651 bp, synthetic construct
  misc_feature 1..651: note = Description of Artificial Sequence: Synthetic coding sequence
  source 1..651: mol_type = other DNA
atgtgggaaccaatgtcctccagcctgatgatgactatgaccacaagtctcaagatgtgtacaaggtcttccctattgttcattataggcttgattgggtgttgcgcgaccataagggaatccaggtgtggcttggctacctttgtaattatcctgttgctggtcttcgtgacggaggtcgtggtggtcgtcctgggatacgtgtatcgagccaaagtcgagaacgaagtggacaggagtatacaaaaagtttacaaaacctataacgggacgaatccggacgctgctagtcgcgctatagattatgtccagagacagctccactgctgcggaatccacaactactctgactgggaaaacacagactggtttaaagaaactaaaaatcaatccgtccccctaagttgttgcagagagaccgcttcaaactgcaatgggagccttgcccatccaagtgacctgtatgccgagggttgcgaggccctggtggtgaaaaagctccaggaaatcatgatgcacgtaatctgggcagccctggcctttgccgcaatccagcaactgctggggatgctctgcgcctgtattgtgctgtgcaggcgctctcgcgaccctgcctacgagttgctgatcacgggaggaacctacgcttag

SEQ ID NO: 243826 - DNA, 570 bp, synthetic construct
  misc_feature 1..570: note = Description of Artificial Sequence: Synthetic coding sequence
  source 1..570: mol_type = other DNA
atgggacagtgtggcattactagttcaaaaacagtcttggttttcctgaaccttatcttttggttcgtgattattcttctgttagtgtttgttacagaggtagtggtggtcgtgttgggatacgtgtacagggctaaggtcgagaacgaagtcgacaggtctatccagaaggtgtataagacgtacaatggcacaaatcctgatgcagcctcacgggctattgactacgtgcagcgccagttgcactgctgtggcattcataactatagcgactgggaaaatacagattggttcaaagagactaagaaccagtccgtgcccttgtcttgttgccgcgagacagcatccaactgtaatgggtctctcgctcatccttcagacttatacgctgagggatgcgaagctctggtggttaaaaaactacaagaaattatgatgcacgtgatctgggcggctctcgcatttgctgcaatccagctgctgggaatgctgtgcgcctgtatcgtgctgtgcagaaggtccagagatcctgcctatgaacttcttatcactggaggcacatatgcctag

SEQ ID NO: 243827 - DNA, 633 bp, synthetic construct
  misc_feature 1..633: note = Description of Artificial Sequence: Synthetic coding sequence
  source 1..633: mol_type = other DNA
atggtgtgcggaggctttgcatgttcaaaaaatgccttgtgcgctctgaatgtcgtctacatgcttgttagtctactgctgattggagtagctgcatggggaaaggggttgggactagtttcgagcatccacatcattggcggtgttatcgcagtgggcgtgttcttactgctgattgccgtagctggtctcgtgggagcggtcaaccaccatcaagtgcttctgttcttttacatgattattctgggactggtgtttatctttcagttcgtcatttcttgtagctgcctcgccataaatcgctccaaacagacagacgtgataaatgcctcctggtgggtgatgagcaacaagacccgggacgagctggagcggagctttgactgttgcggactgtttaatctcaccaccctatatcagcaggattacgacttttgcacagcaatctgtaagtcccagtctccgacttgccaaatgtgcggagagaagtttctcaagcattccgacgaggccttaaagatcttaggtggtgtgggactgtttttttcttttacagagatactcggagtatggctcgcgatgcgttttcgtaaccaaaaggaccctcgagccaatcctagcgccttcctgtag

SEQ ID NO: 243828 - DNA, 963 bp, synthetic construct
  misc_feature 1..963: note = Description of Artificial Sequence: Synthetic coding sequence
  source 1..963: mol_type = other DNA
atgggtccctggagcagagtacgagttgccaaatgccagatgctggtgacttgcttctttatattactgctgggcctgtctgtggccactatggttactctcacttactttggtgcccattttgcggtgatcaggcgcgcatctctcgagaaaaacccctatcaagccgtgcatcagtgggctttttcagccggtctcagcctcgtcggactgttgacccttggagcggtgctcagtgccgctgccacggtccgagaggcccaggggctgatggccggtgggtttctgtgcttttcgttagcattttgtgcccaggtgcaggttgtcttctggaggttgcactccccaacacaggtcgaggacgctatgctggatacttatgatcttgtgtatgaacaggcaatgaagggcacatcacatgtgcgtcgccaggaactagccgcaatacaggacgtgtttttatgctgcggcaaaaaatcacccttctcccgtctggggagtactgaagcggatttgtgccagggcgaggaagcagcaagggaagactgtctccagggcatcagaagcttcctgagaacccatcaacaagtcgcgtcatcccttacatcgataggcctggcattaaccgtcagtgcgctcttattctccagctttctctggttcgctatccggtgtggctgctcactggataggaaagggaaatacacattgactcccagggcttgtgggcgacagcctcaggagcccagcctgctgcgttgcagtcagggcggaccaacgcactgcttacactcagaagcagtcgccatcggccctcgtggctgttcaggatctttgagatggctccaggaatctgacgctgcaccactcccactctcttgccaccttgctgcacaccgcgctcttcagggtcgctctcgaggcggattatctggatgtcccgagagggggctgagcgattag

SEQ ID NO: 243829 - DNA, 762 bp, synthetic construct
  misc_feature 1..762: note = Description of Artificial Sequence: Synthetic coding sequence
  source 1..762: mol_type = other DNA
atgggaccttggtcaagggtgcgcgtggccaagtgtcagatgcttgttacatgctttttcattctgctcttgggcctgagtgttgctacgatggtgacactgacatactttggcgctcactttgccgtgattcgcagggcaagcctagagaaaaacccgtaccaagctgtacatcagtgggccttttcggctggattgtccctagttggccttctgaccctgggcgcagtactcagtgcagctgctacagtgcgtgaagcccagggcttgatggccggtggattcctgtgctttagtcttgcattctgtgctcaggtacaagtggtattctggcggctgcactctcctactcaggtggaagacgctatgctggacacttatgatctcgtgtatgagcaggcaatgaaaggaacgtctcatgtgcgccgacaagagttagcagctatccaggacgtgttcctgtgctgcggaaaaaagagtccgtttagtaggttggggtccaccgaggctgatctgtgtcagggcgaggaggccgcacgcgaagactgcctgcagggaatacggagttttctgcgtactcatcagcaggtggcgagttccctgacctcaattggcctcgctttaaccgtgtcggctctactcttttcttcgtttctctggttcgccattcggtgtggctgcagcctggatcgcaagggtaagtatacgctcactccacggtccccgggacagaagagcagatgggcacagtgggtaccttag

SEQ ID NO: 243830 - DNA, 525 bp, synthetic construct
  misc_feature 1..525: note = Description of Artificial Sequence: Synthetic coding sequence
  source 1..525: mol_type = other DNA
atggcaatcggatttgttggctgcctcggcgcaattaaggaaaataagtgcttgctcctgacttttttcctgcttctgctgttagtgttcctcctggaggccacaattgcaatcttgtttttcgcctatactgacaaaattgaccgctacgcccagcaagatttgaaaaagggtcttcatctgtacggcacccagggaaacgtgggattgaccaacgcctggtccatcatccagacagactttcgttgttgcggggtgagcaactatactgattggttcgaggtgtacaatgctacacgagtccccgacagctgctgcctggagttcagcgagtcttgcggcctgcatgccccaggtacctggtggaaagcaccgtgttatgagacggtgaaggtgtggctgcaggaaaacttactggctgttggcatatttggcttgtgcaccgctctcgtccaaatcttgggattgacattcgctatgacaatgtactgccaggtcgtaaaagccgatacatactgcgcgtag

SEQ ID NO: 243831 - DNA, 717 bp, synthetic construct
  misc_feature 1..717: note = Description of Artificial Sequence: Synthetic coding sequence
  source 1..717: mol_type = other DNA
atggccagagcttgcctgcaggccgtaaagtacctgatgtttgcttttaacctgctcttctggctcggaggatgtggggtgctgggcgttggtatctggttggctgccacccagggtagtttcgcaacattaagctccagctttccctctctgtcagcagccaatctgttaattattacaggtgcgtttgtgatggccattggattcgtcgggtgcctcggagccatcaaggagaacaagtgtttactgctgacgttcttcctgctccttctgttggtgtttctcttagaggctaccatcgccatactattctttgcgtacactgacaaaattgacagatacgctcagcaggacctgaagaaaggcctccatctttatgggacccagggcaatgtgggtctgactaatgcctggagcatcatccagacggacttcaggtgttgtggcgtcagcaactataccgactggttcgaggtgtataatgctactcgcgttcccgattcctgctgtttggagttttctgagtcttgtggcctacacgcacctggcacctggtggaaagcaccctgctatgagaccgtgaaggtctggttacaggaaaatctcctggccgtcggaattttcggcctgtgcacggcgttagtgcagattctgggactgacctttgctatgacaatgtactgtcaggtggtgaaagcagatacctattgcgcctag

SEQ ID NO: 243832 - DNA, 717 bp, synthetic construct
  misc_feature 1..717: note = Description of Artificial Sequence: Synthetic coding sequence
  source 1..717: mol_type = other DNA
atggcgagggcatgtcttcaagccgtgaagtatttgatgtttgcttttaacctactattctggttaggcggttgcggcgtactgggggtaggcatctggctggccgctactcaaggttcattcgctacactttcatcaagcttcccttctctttcagccgctaatctgctgattataacaggtgctttcgtcatggccattgggtttgtcggttgtctgggagcaattaaggaaaataagtgccttctcctcacattttttcttcttctgctgcttgtcttccttctggaggcgaccattgccattctgtttttcgcgtacactgacaagatcgatcggtatgcccaacaggaccttaagaaaggcctgcacctctacggcactcagggtaacgtgggccttactaatgcctggtcgataattcagacagacttccggtgctgcggggtgtcaaactatacagattggttcgaagtttataacgccacccgcgtgcccgacagttgctgtttggaattttcagaatcttgtggattgcacgccccaggaacctggtggaaggctccatgctatgagacagtaaaagtctggctgcaggaaaatctattggctgtgggcattttcgggctctgtaccgccctggtgcaaattttggggctgacctttgccatgaccatgtactgtcaggtcgtgaaggctgacacctactgcgcttag

SEQ ID NO: 243833 - DNA, 717 bp, synthetic construct
  misc_feature 1..717: note = Description of Artificial Sequence: Synthetic coding sequence
  source 1..717: mol_type = other DNA
atggccagggcttgtctgcaggccgttaagtacttaatgttcgcctttaacctacttttctggctgggcggttgcggcgtgcttggagtgggcatctggcttgccgctactcagggctcttttgcaactttgtctagctcctttccttctctaagtgccgcaaatctgctcattataactggagcattcgtcatggctattggatttgttggttgcctcggcgctattaaggagaataaatgcctgcttctcacgtttttcctcctcctgttacttgtgttcctgctggaggctactattgctatcctctttttcgcgtacactgacaaaatcgataggtatgcccaacaggatctcaagaagggcctgcatctgtatggaacacaggggaacgtggggttaacaaacgcttggtctatcatccagaccgatttccgatgttgcggggtgtctaactacacagattggttcgaagtctacaacgccaccagggtgcctgacagttgctgtttggagttctcagaatcatgtggtctacacgcaccaggaacatggtggaaggcaccctgctacgaaacggtcaaggtgtggctccaggagaatctgctcgcagtgggcattttcgggctctgtactgcactggttcagattcttgggctcacgtttgccatgactatgtattgtcaggtagtaaaagcggacacttactgtgcatag

SEQ ID NO: 243834 - DNA, 717 bp, synthetic construct
  misc_feature 1..717: note = Description of Artificial Sequence: Synthetic coding sequence
  source 1..717: mol_type = other DNA
atggctagggcctgcctgcaggccgtcaaatacctcatgttcgcgtttaatctgctcttctggctcggcggatgtggagtactgggagtgggcatttggctcgccgcaacgcagggctctttcgcgacgctgtcttcttcatttccaagtctctcagctgccaacctgctcatcattaccggcgcatttgtcatggctatcggcttcgtcggctgtctgggagcaatcaaagagaacaagtgtttactactaactttctttctcctgctgctgcttgtgttcttacttgaagctacaatcgctatcctgttctttgcttataccgacaaaatcgaccggtatgcccagcaggacctcaaaaagggcctgcatctgtacggcactcagggcaacgtggggctgacaaacgcttggagtatcatacaaaccgacttccgttgctgtggagtgtctaattataccgactggttcgaagtctacaatgccacccgcgtccccgacagctgttgcctcgaattttcagagtcgtgcggccttcacgcaccaggtacctggtggaaggccccttgttatgagactgtgaaggtgtggctgcaggaaaatttgctggccgtgggcattttcgggctgtgcaccgctctggtgcagatcctgggcttgacctttgcgatgacaatgtactgccaagtggtgaaggcagatacctattgcgcgtag

SEQ ID NO: 243835 - DNA, 717 bp, synthetic construct
  misc_feature 1..717: note = Description of Artificial Sequence: Synthetic coding sequence
  source 1..717: mol_type = other DNA
atggcaagagcatgcctgcaggcggtgaagtatctgatgttcgcctttaatttactattctggctaggcggatgcggcgtactgggtgtagggatttggctcgcggctacacaaggttccttcgccacgctctctagttccttcccctctctttctgcggcaaatctcctaattataacaggtgcatttgttatggccattggatttgttggctgtttgggggctatcaaggaaaacaaatgcctcctcctgacatttttcctgctgctgttactggtgttcctgttagaagccaccatagccattctgtttttcgcctacacggacaaaatcgatcggtacgctcagcaggatctcaaaaagggcctgcacttatacgggactcaaggcaacgtgggtctgacaaacgcctggtcaattattcagaccgacttcagatgctgtggcgttagcaattacacagattggttcgaagtgtataatgcaacaagagttccggattcatgttgcctcgagttcagtgagtcttgcgggttgcatgctcccggtacatggtggaaggccccatgctacgaaactgtgaaggtgtggctgcaggaaaatctgctcgccgtaggcatttttggtttgtgcactgcattggtccagattttagggcttacgttcgcaatgacgatgtactgccaggttgtcaaagccgacacctactgtgcttag

SEQ ID NO: 243836 - DNA, 774 bp, synthetic construct
  misc_feature 1..774: note = Description of Artificial Sequence: Synthetic coding sequence
  source 1..774: mol_type = other DNA
atgacaccaagatccgccggaacttctgcgcacggcgctgagctgaaacgttgcggcatggcgcgagcctgcctccaggccgttaagtatctgatgtttgcctttaatctcctgttctggctgggcggatgcggagtcctcggcgtcggcatatggctcgcagccacacaggggtcgtttgctacactgagctcttctttcccctcgctaagtgcggcaaatctgcttatcatcactggcgcattcgtgatggccattgggtttgtcggctgtctgggagctatcaaggaaaacaaatgtctgttacttaccttttttttactgcttttactggtcttcctcttggaggcaactatcgctatcctgttcttcgcctataccgataagattgatagatacgcccagcaggatttgaaaaagggtctgcatctatatggtacccaggggaatgtcgggctcacaaacgcttggagtataattcagactgatttcaggtgctgtggggttagtaactacaccgactggttcgaggtttacaatgcaactagagttccggactcgtgctgcttagagttttcagaaagttgcggactccacgcacccggaacatggtggaaagctccctgctacgaaactgttaaggtgtggctccaggagaatctcctcgctgttgggatttttggtctctgcactgcgttagtccaaatcttgggacttacctttgccatgaccatgtactgccaggtggttaaggccgacacgtactgcgcctag

SEQ ID NO: 243837 - DNA, 717 bp, synthetic construct
  misc_feature 1..717: note = Description of Artificial Sequence: Synthetic coding sequence
  source 1..717: mol_type = other DNA
atggcacgcgcttgtctacaggcagtcaaatacctgatgttcgcatttaatctcctcttttggctaggtggatgtggagttctgggcgtggggatttggctggccgcaacccaggggagtttcgcaactctctcttcaagtttcccatcacttagtgccgcaaacctgctgattattacaggagccttcgtgatggccataggctttgtcggatgccttggagccatcaaggagaacaagtgtctcctactgactttttttctcctgcttctcctggtcttcctgctcgaagctactatcgccatcttattttttgcctacactgacaaaatcgataggtatgcgcagcaggaccttaaaaaagggctacatttgtatggtacccagggtaacgttggcctgacgaacgcttggtccattatccagaccgactttcggtgttgtggggtctccaactacacggattggttcgaggtgtataatgccactagagttcccgactcctgctgtctggaattttctgagagctgcggcctccacgccccaggcacctggtggaaagccccatgctacgagactgtgaaagtttggctgcaggagaatcttttggctgttgggattttcggactgtgtacagcccttgtgcagatacttggcttaactttcgctatgacaatgtactgtcaggtggtgaaggcagatacatactgcgcctag

SEQ ID NO: 243838 - DNA, 525 bp, synthetic construct
  misc_feature 1..525: note = Description of Artificial Sequence: Synthetic coding sequence
  source 1..525: mol_type = other DNA
atggccattggctttgtagggtgcctgggggcaattaaagagaataaatgcctactgttgacatttttccttttattattgctggtgttcctgttggaagccacaatagccattcttttttttgcctataccgataagatcgatcgctatgctcaacaagatctgaaaaagggcctccacttatacggaacccaaggcaatgtgggcctcaccaatgcatggtctataattcaaaccgattttagatgttgcggcgtgagcaattatactgactggttcgaagtgtataatgccacgagggtccccgactcctgttgcttagaattcagcgagtcttgtggcctgcatgcacccggaacatggtggaaagccccttgctatgagaccgtaaaggtgtggctgcaggagaatttacttgcagtgggcatctttggcctgtgcaccgctttagtgcaaatccttggtcttacattcgccatgaccatgtattgccaagtggtgaaagcagatacctattgcgcctag

SEQ ID NO: 243839 - DNA, 303 bp, synthetic construct
  misc_feature 1..303: note = Description of Artificial Sequence: Synthetic coding sequence
  source 1..303: mol_type = other DNA
atggccattggtttcgtgggctgcttaggggcaatcaaggaaaataagtgcctgctgctcactttctttttgctgttgctgctggtttttctgctggaagcaaccatcgcaatcttgttcttcgcctatacagacaagatcgaccgttatgctcagcaggacctgaaaaagggattacacctgtatggtacccaaggaaacgtcgggctaacaaatgcctggagtatcatacagacggatttccgctgttgtggtgtctcgaactataccgactggtttgaagtatataacgccacccgttag

SEQ ID NO: 243840 - DNA, 480 bp, synthetic construct
  misc_feature 1..480: note = Description of Artificial Sequence: Synthetic coding sequence
  source 1..480: mol_type = other DNA
atggcacgagcgtgtctacaagccgtcaaatacttgatgtttgccttcaatctgttgttctggctgggcggatgtggggtgctgggggtgggaatctggctcgctgctacccaaggaagcttcgctaccctgagctctagttttccttcactgtctgccgctaacctgctcattatcactggcgcttttgttatggctattgggtttgtgggctgcctgggagcgataaaggagaacaaatgtcttctgttgaccttctttctcttactgctactggtgttcctgttagaagccaccattgctatcctttttttcgcttatacagacaaaatcgataggtacgctcagcaggatctcaagaagggacttcatctgtacgggacgcaaggaaatgtaggcctgactaatgcctggtcaataatacagactgattttagatgctgtggtgtatctaattatacggactggtttgaggtgtag

SEQ ID NO: 243841 - DNA, 258 bp, synthetic construct
  misc_feature 1..258: note = Description of Artificial Sequence: Synthetic coding sequence
  source 1..258: mol_type = other DNA
atggctcgcgcatgccttcaggccgttaaatacctcatgttcgctttcaatctcctgttctggctcggcggttgcggcgtgttaggagtggggatctggttggcagccacacagggttcattcgctacactgtcctctagctttccctctctcagcgctgccaacttactaattatcaccggcgcattcgtaatggctattggcttcgtggggtgtctgggtgcgataaaggagaataaatgtttactgctaacctag

SEQ ID NO: 243842 - DNA, 807 bp, synthetic construct
  misc_feature 1..807: note = Description of Artificial Sequence: Synthetic coding sequence
  source 1..807: mol_type = other DNA
atgagtggcaaacattacaagggccctgaagtctcgtgttgtattaaatacttcattttcggctttaacgttatcttctggttcctggggattacgttccttgggatagggctttgggcctggaatgaaaaaggcgttctgtcaaacatttcctcgatcacagacctgggcggtttcgatccggtgtggctcttcctggtagtggggggagtgatgttcattctggggttcgccggttgtatcggagcccttagagaaaatacattcctgctcaaatttttctcagttttcctgggtatcatcttcttcctggaacttacagccggtgtgctcgccttcgtatttaaggactggattaaagaccagctgtatttctttattaacaataatatcagggcttatcgggacgatattgacctgcagaaccttattgatttcacacaagaatactggcagtgctgcggggcttttggggcagatgactggaacctgaatatctacttcaattgtacagattctaatgctagccgtgagcgttgcggcgtgccattctcttgctgtaccaaagacccagccgaggacgtaatcaatacccaatgtggttacgacgctagacaaaaaccggaagttgatcaacagatcgtgatttacaccaaggggtgcgtcccacagtttgagaagtggctgcaggacaacctaacgattgtggcgggaatctttattggcatcgccctcctacagatctttggaatctgcctcgcccagaacctggtctctgatatagaggctgtgcgggcaagttggtag

SEQ ID NO: 243843 - DNA, 594 bp, synthetic construct
  misc_feature 1..594: note = Description of Artificial Sequence: Synthetic coding sequence
  source 1..594: mol_type = other DNA
atgtttatcttaggatttgccggatgcattggagcacttcgagaaaacacatttctactgaagtttttttccgtgtttcttgggataatcttttttcttgagctgactgccggagtcctggcatttgtctttaaggactggataaaggatcagttatatttttttatcaacaataacatcagagcataccgagatgatatcgacctgcagaacctcatcgacttcacacaggagtactggcagtgctgcggcgcttttggcgctgatgactggaatctcaacatttactttaattgcaccgacagcaatgccagccgggaacgatgcggcgtgccgttttcttgttgtaccaaagatcctgcggaagacgtgattaatacacagtgcggatatgacgcaaggcagaagcccgaggtggaccagcagatagtcatatatacgaaaggttgtgtgccccaatttgagaagtggctgcaagataacctgaccattgtcgcaggaatttttatcggcatcgccctccttcagatctttgggatctgtctggcccaaaacttggtaagtgatatagaggccgtcagagccagctggtag

SEQ ID NO: 243844 - DNA, 801 bp, synthetic construct
  misc_feature 1..801: note = Description of Artificial Sequence: Synthetic coding sequence
  source 1..801: mol_type = other DNA
atggcaagccgtaggatggagactaagcccgtgataacctgcctcaaaaccttgctgattatctatagcttcgtgttttggaaagagaaggccgctggtttttgtggccgtcaggacgtggcaatggccctcattactggcgttattttactcgcagtgggtgtctggggcaaattgacattaggaacctacatctcgctcatcgctgaaaattcaacaaacgcgccatacgtgctaattggtacgggcacaacaattgtggtgttcggtttgtttggctgttttgccacttgccgaggctcgccctggatgcttaagctgtatgcaatgtttttgagcctggtgttcctcgcagaactggtggcaggtatatcaggttttgtcttcagacacgagattaaagatactttcttacgtacatacaccgacgcaatgcagacgtacaatggaaatgatgagagatcccgggcagtggaccatgtccagcggagtctgtcctgttgtggagtgcagaattatacgaactggtccacatctccatatttcctggaacacgggatccccccttcttgttgcatgaatgaaacagactgcaatccccaggacttgcataacctgactgtggccgcaaccaaggttaaccagaagggctgttacgacctagtcacgagttttatggagacaaacatgggtattatagcaggagtggcttttggtattgcttttagccagcttatcggcatgttgctcgcttgctgcctttctcgctttatcaccgccaatcagtacgaaatggtctag

SEQ ID NO: 243845 - DNA, 750 bp, synthetic construct
  misc_feature 1..750: note = Description of Artificial Sequence: Synthetic coding sequence
  source 1..750: mol_type = other DNA
atggcctctagaagaatggaaacaaagcctgtgattacttgtttgaaaaccctgttgattatttactccttcgtgttctggattactggagtgatcctgttggcagtgggcgtgtggggtaaactcacgttgggtacgtatatctccttgattgctgagaactcgacaaacgctccctacgtgttgatcgggaccggtaccaccatcgtcgtatttgggttgttcggctgtttcgcaacatgtcggggatctccatggatgttaaaactgtatgcaatgttcctgagcctcgtgttcctggccgaattagtagcagggataagtgggtttgtgttccgccacgagataaaggacacattcctccgcacttacacggacgccatgcagacctataatggtaatgatgagagatcacgcgcagtcgaccatgtacagagatctcttagctgctgcggtgtgcaaaactatactaactggtccacaagtccttatttcttggaacacgggattcccccttcttgttgcatgaatgaaaccgactgtaatccacaggacctgcataacctgacggttgccgctacaaaagttaaccaaaagggttgttatgatttggttacgtcatttatggaaaccaatatgggcattattgcaggcgtggcgtttggcatcgccttctctcagcttatcgggatgttgctcgcctgctgtctgtcacggtttattaccgccaaccagtacgaaatggtgtag

SEQ ID NO: 243846 - DNA, 828 bp, synthetic construct
  misc_feature 1..828: note = Description of Artificial Sequence: Synthetic coding sequence
  source 1..828: mol_type = other DNA
atggctaataggacagtctgtaacggccagggcagaagtcgcgacctcctccgcatcaagaatatcccgaacgcccctgggcatttcctcattgcgggtgtgggcggttcctcgagtcagggcagatctattgaggaggaagggaagactcacctgggaataacaggggtaattctattagccgtgggagtgtggggcaaactaacactgggaacctatattagcctgatagcagaaaattcaacaaacgcgccttatgtcttgatcgggacaggcacgacaatcgtggtgtttgggttatttggctgtttcgcaacctgccgaggttccccttggatgctgaaactgtatgcaatgttcttatctctggtgtttctagccgaattggtggctggtatttcagggttcgtcttcagacatgagatcaaggatacgtttctacggacttacactgatgctatgcaaacctacaatggtaatgacgaacgcagcagggctgtggaccacgtacaacggtccctgtcctgctgtggggtgcaaaactacaccaattggtctaccagcccatacttcctggagcatggcatacctccaagttgttgtatgaatgaaaccgactgtaatcctcaagacttacacaacctgacggtggcagctaccaaggtgaaccagaagggctgctatgatcttgtaacctctttcatggaaacaaatatgggaatcatagctggggtcgcttttgggatcgcgttctcccaactgatcggcatgctactcgcctgttgtctgagcaggtttatcacagcaaaccagtacgagatggtgtag

SEQ ID NO: 243847 - DNA, 672 bp, synthetic construct
  misc_feature 1..672: note = Description of Artificial Sequence: Synthetic coding sequence
  source 1..672: mol_type = other DNA
atgataacaggcgtgattctactcgcggttggtgtttggggaaagcttacactgggcacatatatttctttaatcgccgaaaacagtaccaatgcgccttacgtactgattggaacgggaacaaccattgtcgtgtttggtctgtttggatgttttgccacatgtcgaggaagcccctggatgctgaaactatacgcgatgtttctatcactcgtgttcctggctgaacttgtggccggaatcagtggattcgtgttcaggcatgagatcaaagacacctttcttcggacctatacagacgccatgcagacttacaacggaaatgacgagagatcccgcgctgtagaccacgtccaacggagcctgtcttgctgtggagttcagaactataccaactggtcgactagcccgtatttcctagagcacggaattcctccaagctgttgcatgaatgaaacagattgtaatccccaagatcttcacaacctgaccgtggccgctacaaaggtcaaccagaaggggtgttatgacctggtgacaagcttcatggaaacgaatatgggcatcatcgctggggtggcttttggaatcgccttctcccagctgatcggtatgctgttggcctgttgcctgagccgcttcattactgcaaaccagtacgagatggtgtag

SEQ ID NO: 243848 - DNA, 714 bp, synthetic construct
  misc_feature 1..714: note = Description of Artificial Sequence: Synthetic coding sequence
  source 1..714: mol_type = other DNA
atggcaggagtcagcgcctgtattaagtactcgatgttcacatttaactttctgttctggctgtgtgggattctcatcctggccctggcaatatgggtgcgggtgtccaacgacagtcaggctattttcggatctgaagacgtgggtagtagctcttacgtcgctgtggacattctgatcgccgttggggctatcataatgattcttggcttcttaggctgttgtggcgctataaaagaaagcagatgtatgctccttctgtttttcatagggctcctgctcatactgctactacaggtcgccactggcattcttggagcagtgttcaaatctaagtccgatcgcatagttaatgagactctctacgaaaatactaagctgctgagcgctacaggagaatctgaaaaacagtttcaggaggcgatcatagttttccaggaagaattcaagtgctgcggcctggtgaacggagccgcagactgggggaacaattttcagcactaccctgagctttgcgcctgcctcgacaaacagagaccttgccaatcctataacggaaagcaggtgtataaagaaacctgtataagcttcattaaggacttcctagctaagaatctgattatagttattgggatctctttcggactcgccgtaatcgagatcttgggcttggtgttcagtatggtgctgtactgtcaaatcggaaataagtag

SEQ ID NO: 243849 - DNA, 714 bp, synthetic construct
  misc_feature 1..714: note = Description of Artificial Sequence: Synthetic coding sequence
  source 1..714: mol_type = other DNA
atggctggagtgagcgcttgtataaagtattccatgttcaccttcaattttctattctggttatgtgggattctgatcctggctctcgctatatgggtgagggtgagcaacgactcccaggccattttcggtagtgaggacgtgggaagcagctcatatgtggcagtcgatatcctgattgccgtgggggctattattatgatcctgggctttctgggctgctgtggggctatcaaagaatccagatgtatgctgctgctgttcttcattggacttctgttaatcctgctcttacaggtggccaccggtatacttggtgctgtgtttaagagcaagtccgacaggattgtcaatgagaccctctatgagaataccaagctgctttcggccacgggggagtcggagaaacagtttcaggaggccattatcgtgtttcaggaagaattcaagtgctgcggactcgtcaacggtgcggctgactgggggaataatttccagcactaccctgagctttgcgcttgtctcgataaacagcggccatgtcaatcttataacgggaaacaggtctacaaagagacctgcatctcattcataaaggacttcctcgctaagaacctgattattgtgattggcatctcatttgggctggcagttatcgaaatcttgggtctcgtgtttagtatggtcctatattgtcagatagggaataaatag

SEQ ID NO: 243850 - DNA, 714 bp, synthetic construct
  misc_feature 1..714: note = Description of Artificial Sequence: Synthetic coding sequence
  source 1..714: mol_type = other DNA
atggccggagtgagcgcctgcattaaatacagtatgtttaccttcaattttctcttttggctatgtggcatcctcatcttagctctggcgatatgggtacgcgtttcgaatgattcacaggcaatcttcggatcagaggatgttggatcctcctcttacgtagctgtggacattcttatagctgttggagcaattattatgattctgggcttcctcggatgctgcggcgctattaaggagtctcgttgcatgttgctcttgttctttattggcctccttctgattctcctgctgcaggtggctaccggcatcttaggggcagtgtttaaaagtaaatcagaccggatcgtcaacgagactttatacgagaacactaagctcctctctgccacaggtgaatccgagaaacaattccaggaggctatcatagtgtttcaggaagaattcaaatgttgcggactcgtgaacggagccgcagactggggaaacaacttccaacattatccagaattatgcgcctgtctggataaacaacgaccttgtcagtcatataatggcaagcaggtgtacaaagagacctgcatttccttcataaaagatttcttagccaagaacttgattatagtgattggcatctctttcgggcttgccgtcatcgagattctcgggctggtcttcagcatggttctttattgccagattggtaacaagtag

SEQ ID NO: 243851 - DNA, 720 bp, synthetic construct
  misc_feature 1..720: note = Description of Artificial Sequence: Synthetic coding sequence
  source 1..720: mol_type = other DNA
atggccaggggatgtctctgttgcctcaaatacatgatgttcctgttcaaccttatcttctggctttgtggatgcggcctgctcggagtgggaatttggctcagcgtgtcccaaggcaacttcgcaacattctccccatcgtttcccagcctcagcgctgccaacttagttatcgcaatcggcaccatcgttatggttacagggttcctgggatgcctgggtgcaattaaggagaacaagtgcttacttttatcattctttattgtccttctggtaatcctactcgcagaactgattttgctgatcctgttcttcgtatatatggacaaagtcaatgagaatgccaagaaagacctgaaagagggactgcttctgtatcataccgaaaacaatgtggggttaaagaacgcgtggaacattatccaggcggagatgcgttgctgcggggtgaccgattatacggattggtatcctgtgctcggggagaataccgtgcccgacagatgctgtatggaaaattctcagggttgcggcaggaatgcgacaacccctctctggagaaccgggtgctatgaaaaggtgaagatgtggtttgatgacaacaaacatgtgctgggcaccgtgggcatgtgcattcttattatgcagatcctgggcatggccttcagtatgacactctttcagcatatacatagaaccggcaaaaaatacgacgcgtag

SEQ ID NO: 243852 - DNA, 720 bp, synthetic construct
  misc_feature 1..720: note = Description of Artificial Sequence: Synthetic coding sequence
  source 1..720: mol_type = other DNA
atggctagaggttgcttgtgttgcttaaaatatatgatgtttttatttaatcttattttttggctctgcggctgcggactcctaggagtcggcatatggctctcggtttcacaagggaatttcgccaccttctcgcccagttttccaagtctgagcgctgctaacctggtgatcgccatcggtacaattgtaatggtaaccgggtttctggggtgtcttggcgctatcaaggaaaacaagtgtctgctgttgtctttctttatagttttacttgtgatcctgctagctgaattaattttactgatacttttcttcgtctacatggacaaggtaaatgagaacgccaaaaaagatctcaaagagggcctcctgctctaccataccgagaacaatgtggggctcaaaaacgcctggaacatcattcaggcagaaatgaggtgttgcggagtgaccgattacactgactggtaccctgtcctgggcgaaaatacagtgccagatagatgctgcatggagaactcccaggggtgcggcaggaacgccacaactcctctgtggaggacaggttgctatgagaaagtaaaaatgtggtttgatgacaataagcacgtgcttgggactgttggcatgtgcatcttgataatgcagatattaggtatggcattctctatgacactatttcagcacattcaccggacaggaaagaaatatgatgcctag

SEQ ID NO: 243853 - DNA, 1044 bp, synthetic construct
  misc_feature 1..1044: note = Description of Artificial Sequence: Synthetic coding sequence
  source 1..1044: mol_type = other DNA
atggcattgatgctgagtcttgttctgtcattgctgaaattgggcagtggacagtggcaggttttcgggcctgacaagcccgtgcaggccctggtcggagaagacgctgccttttcctgcttcctaagccctaagaccaacgccgaagctatggaggtccgcttctttcgaggtcagttcagctcagttgtgcacctgtatcgagacggaaaagaccagcctttcatgcagatgccgcaatatcagggtcgaactaagttagtcaaggattcaatcgccgagggtagaatctccttacgactcgagaatatcaccgtgctggatgccggactgtacggatgcagaataagctcacagtcctactaccagaaggcaatatgggagttgcaggtgagtgccctgggaagcgtccccctgatcagcatcaccgggtacgtggatcgagatatccagctcctgtgccagagttctgggtggttccccagaccaactgccaagtggaaaggacctcagggtcaggacttatcgacagacagtcggaccaatcgcgatatgcatgggctgtttgacgtggaaataagtctcaccgtccaggagaacgctggctccatcagttgttctatgcggcacgcacatctctcacgtgaagtagaatctcgcgtccagatcggagatacctttttcgaacctattagttggcatttggcgaccaaagtcttgggcatactctgctgcggcctgttcttcggcatcgttgggttgaagatcttctttagcaagttccagtgcaagcgcgaaagagaggcctgggccggagcactgttcatggtgccagcgggaaccgggtccgaaatgcttccacaccccgcagcatctttgctcctcgtcctggcctctagggggcctggcccaaagaaagagaaccctggtggaaccgggttggagaagaaggctcgcacaggaagaatcgagagacgcccagagacaaggtctggcggagattccggatcgagagacggatcacccgaggccttgaggttctag

SEQ ID NO: 243854 - DNA, 879 bp, synthetic construct
  misc_feature 1..879: note = Description of Artificial Sequence: Synthetic coding sequence
  source 1..879: mol_type = other DNA
atgggggaaaagtccgagaactgcggcgtgccggaagacctgctcaatggtcttaaagtgacagacactcaggaggctgagtgcgcaggtccacctgtgccagatcctaaaaaccagcactcacagagcaaactactgcgggacgacgaagcccaccttcaggaggatcagggagaagaagaatgttttcatgattgctctgcgtcgtttgaggaagaaccaggcgcagacaaagtcgaaaacaagtcaaacgaggatgtgaactcaagtgagctggatgaagaatacttgatcgaactggagaaaaacatgagcgacgaagagaaacagaaaaggcgcgaggagtcaacccgcctgaaagaggaggggaatgagcagttcaaaaagggcgactacattgaagcggagtcttcttacagcagggctctggaaatgtgtcccagttgctttcagaaggagaggagcattctgttcagtaacagggccgctgctcgcatgaaacaggataaaaaggaaatggccatcaacgactgtagcaaggccatacaattgaacccgtcctacatccgcgctattctccgtagagccgagctttatgagaaaacggataagttagatgaagccctggaagattataagtcaattctggagaaggacccttccattcatcaagcgagagaagcatgtatgagactgcccaagcaaatcgaggagcggaacgaacggctgaaggaagagatgctgggtaaactgaaagacctgggaaatttagttttgaggccctttggactgtcaacagagaactttcaaatcaaacaggactctagcacaggttcatacagtattaacttcgtccagaaccccaataacaatcggtag

SEQ ID NO: 243855 - DNA, 2199 bp, synthetic construct
  misc_feature 1..2199: note = Description of Artificial Sequence: Synthetic coding sequence
  source 1..2199: mol_type = other DNA
atggatgccgacaaagagaaggacttgcagaagtttctgaaaaacgtagatgaaatatccaacctgattcaggaaatgaatagcgacgatcctgttgtccagcagaaggcggtattagagaccgaaaagcgcctgttgttaatggaagaagatcaggaggaagatgagtgtcgtaccaccctgaataagaccatgatttcacctccccaaacagcaatgaagagcgctgaggagattaatagcgaagctttccttgccagtgtggaaaaggatgcaaaagaacgggctaagagaagaagggaaaacaaggtattggctgatgccctgaaagaaaagggaaatgaggcatttgcagaaggtaactatgaaactgcgattctccgctatagcgaggggttggagaagctcaaggacatgaaagtgctctacacgaaccgcgcacaggcatacatgaagctcgaggattatgagaaagccctggtggactgtgaatgggccctgaaatgcgatgaaaagtgtactaaggcctactttcatatggggaaggccaacctagcactgaagaactacagcgtgagccgggagtgttataagaaaatccttgagattaaccctaagttacagacgcaggtgaaaggctatttgaatcaggtcgatctgcaggagaaggcagatctgcaggaaaaggaggcacatgagctcctggacagcgggaaaaataccgcggtgacgactaaaaacctgctggaaaccctgagtaagcctgaccaaatccccctgttctatgccggaggcatcgagattctcaccgaaatgattaacgagtgcacagagcagaccctcttccgaatgcacaacggtttttccattatcagtgataacgaggtcatccgacgttgcttttcaaccgccggaaacgatgctgtcgaggagatggtgtgtgtgagcgttctgaaactttggcaggccgtgtgttccagaaatgaagagaaccagcgggtgcttgtcatccaccatgacagagccagactactggcagccctgctgtctagtaaagttctggctatccgccagcagtcatttgccctgctgctgcatttagcccaaacggaaagcggaagatctcttatcattaatcaccttgatcttacaagactgctggaagcgttagtgtcgtttctggatttttccgataaagaggccaacaccgcaatgggccttttcacagatctcgcactcgaggagagatttcaggtttggtttcaggctaatctgcccggtgttctgcccgcactgacaggtgtgctgaagaccgatcccaaagttagtagctcctcagccctctgccagtgtattgccatcatgggtaacctgtcagctgagcccactacacggcgacacatggccgcttgtgaagagttcggagatggctgcctttccctgttagccagatgcgaggaagacgtggatctcttccgagaggtgatatatactctgcttggcctgatgatgaatctgtgtctgcaagccccttttgttagcgaagtgtgggctgtggaggtgtcaagacgctgtctctcgctcctgaactctcaggatggcggtatcttgactcgggctgccggagttctgtctaggaccctcagttcttcattaaagatagtggaggaagccctgcgagctggcgtcgtcaaaaagatgatgaagtttctgaagactggcggagagacggcaagtagatacgcgatcaagattctcgctatctgcaccaacagctaccacgaagcaagggaggaagtcatcaggctagacaagaagctgagcgtgatgatgaaacttttaagcagcgaggatgaggtgttagtgggcaacgcggctctatgcctgggcaattgcatggaagtaccaaacgtggcatcatccctcctgaaaaccgatctcttgcaagtcttactgaagttagcaggctccgatacgcagaaaactgccgtgcaggtgaacgcgggtatcgctttaggcaaactgtgcaccgcagagccaagggtacctgccgagtccagccacctccaattcggcagagaatcagccgctcccgaggctctttcgcctaggagatgggaagagatgttccatatgttggtgttctccttgtcatccgttgatccacctccccctcctccccagacttgctatccatag

SEQ ID NO: 243856 - DNA, 324 bp, synthetic construct
  misc_feature 1..324: note = Description of Artificial Sequence: Synthetic coding sequence
  source 1..324: mol_type = other DNA
atggacgcagataaggagaaggatcttcagaaattccttaaaaatgtcgacgaaatctccaatcttatccaggagatgaacagcgacgatcccgttgtacaacagaaagcagtattggagaccgaaaaaagactgctgttgatggaggaggaccaggaggaagatgagtgccgtacaaccctgaataaaacaatgatctctccgcctcagaccgccatgaagagtgccgaggagatcaactccgaggccttcctggcctccgtcgagaaggacgctaaagaacgtgctaagcgtcgtagggagaataaggtgctcgccgactag

SEQ ID NO: 243857 - DNA, 609 bp, synthetic construct
  misc_feature 1..609: note = Description of Artificial Sequence: Synthetic coding sequence
  source 1..609: mol_type = other DNA
atggatgcggataaagagaaggacttacagaaattcctgaaaaatgtcgatgaaattagcaacctgatccaggaaatgaacagtgatgaccccgtggtgcaacagaaggccgtcttagagacagaaaaacgccttctcctgatggaggaagaccaggaggaggacgagtgcaggaccacattgaacaagaccatgatatctccaccacagactgctatgaagtcagccgaggaaatcaactcggaggcttttctggcctctgtggagaaagacgctaaggagagggccaagagacggcgagagaacaaggtgctggcagatgctttgaaggagaagggtaacgaggcttttgccgagggaaactacgaaaccgcaattttgcggtacagcgaagggctggagaaactcaaagatatgaaggtcctctacaccaatagagctcaggcctacatgaagctggaagactatgaaaaggcattagtggattgcgaatgggcattaaagtgcgacgagaagtgtacgaaagcctacttccacatggggaaagccaacctggctcttaagaactattctgtctccagagaatgttataagaagattctggaatag

SEQ ID NO: 243858 - DNA, 504 bp, synthetic construct
  misc_feature 1..504: note = Description of Artificial Sequence: Synthetic coding sequence
  source 1..504: mol_type = other DNA
atggatgcggacaaagagaaggacttgcaaaagtttctcaagaatgttgacgagatcagtaaccttatccaggaaatgaatagtgatgacccagtggtgcagcagaaggccgttttagagacagagaagcgcctgcttctgatggaagaggatcaggaagaggatgaatgtcggaccacactgaataaaactatgatcagtcctccacaaaccgccatgaagagtgccgaggagattaatagcgaggcatttttagcatcagttgagaaggacgctaaggagagggctaaaagacgccgagaaaacaaggtgctcgcagacgcactgaaagagaaaggcaatgaggcatttgctgaaggaaactacgagacggcaatactccgctatagcgagggcctagagaagctgaaagacatgaaagtgctgtatacgaacagggcacaggcatacatgaaactggaagactatgagaaagctcttgtcgattgtgaatgggccttgtag

SEQ ID NO: 243859 - DNA, 2118 bp, synthetic construct
  misc_feature 1..2118: note = Description of Artificial Sequence: Synthetic coding sequence
  source 1..2118: mol_type = other DNA
atggacgccgataaagagaaggatttgcaaaagttcttaaagaacgtggacgagatctccaatctcatccaggaaatgaatagtgatgatcctgtcgtgcagcagaaagcagttctggaaaccgagaaacgactgctgttaatggaggaagaccaggaggaggatgagtgcagaactacactaaataaaaccatgatctctccaccccagacagccatgaagagcgccgaggagatcaacagcgaggcttttttagcctcggtggagaaagatgcaaaggagagggccaagagacgcagagagaacaaggtcctggctgatgccctgaaagagaaaggcaatgaggcctttgcggagggcaattacgagactgcgattttaaggtacagtgaaggcctggagaaactcaaggatatgaaggtcctgtataccaatagggcacaggcttacatgaaattggaggattatgagaaagctctcgtggattgcgagtgggctttaaagtgtgatgagaagtgcacaaaggcgtatttccatatggggaaggctaatctcgccctcaaaaactattccgttagcagagagtgttacaaaaaaattcttgagattaacccgaagctgcaaacccaagtaaagggttacctgaatcaggtggacctgcaggagaaagctgacttacaagagaaggaggcacacgagttgctggacagcgggaagaatacagccgtaacgactaagaatctcttggagaccttatctaagcctgatcagattccacttttctatgctggagggatcgagatactgacggagatgattaatgagtgcaccgaacagaccctgttccgaatgcataacggattcagcattatcagtgacaacgaagtcattcggaggtgcttctcaactgccggaaacgacgccgtggaggaaatggtgtgtgtctccgtacttaagctgtggcaggcagtgtgcagccggaatgaagagaaccagcgtgtcctagtaatacaccatgatcgggcaagactcctcgccgctctgttatcttccaaggttctggccatcaggcagcaatcattcgcactgctgctgcatctggcccagacagagagtggcagatctctcattattaatcacctggatttaacccgcttgcttgaggccctcgttagctttctcgactttagcgataaggaggccaatactgcaatgggcctgttcactgacctggctctagaggagcgcttccaggtctggttccaggccaatctgcccggtgtgctgccagcactgacgggagtactcaagacagaccccaaagtaagcagctcctccgccttgtgccagtgcatagccataatggggaatctcagcgccgagcccaccacgagacggcacatggccgcatgcgaggagttcggagatggatgcttgtccctactcgccaggtgtgaggaagatgtcgaccttttccgcgaagtaatctacacactgctcggactgatgatgaacctctgtctgcaggcaccatttgtgtccgaggtctgggcagttgaggtctcacgtagatgtttgtcactgctgaactctcaagatggaggcatcttaactagggcagcaggggttctcagccgcacactatcttcttccctaaaaattgtcgaagaagctcttcgtgctggcgtggtgaaaaagatgatgaaattcctcaagacaggaggtgagaccgcctcacgatacgctattaagattcttgcaatatgcactaacagttatcacgaggcaagagaggaggtcatacggctcgacaagaagttatctgttatgatgaagttgctttcatcggaagacgaggtactagtcggcaacgctgctctctgtctcggcaattgcatggaagtccccaacgtggcgtcctctcttctcaagactgacctgttgcaggttctgctgaaactggcaggctcggacacccagaaaacggctgtccaggtgaacgccggaatcgcccttggaaaactgtgtaccgccgaacccaggttcgccgcacagctcagaaaactgcacggactcgaaattttgaatagcacaatgaaatacatatccgattcctag

SEQ ID NO: 243860 - DNA, 1143 bp, synthetic construct
  misc_feature 1..1143: note = Description of Artificial Sequence: Synthetic coding sequence
  source 1..1143: mol_type = other DNA
atgttccgtctactctcatggagcttgggtagaggcttcctgcgtgctgcagggaggcgctgccgcggttgttcggcacgtttgctccctggactcgccggaggccctggaccagaagtacaggtccctccatctcgggtagcaccacacggcaggggcccaggcctgctgcctctgctcgccgcactcgcttggttttcacgccctgccgctgcggaggaagaagaacagcaaggagctgacggtgcggcagccgaagatggggcagacgaagccgaggctgaaattatacagctgctcaagcgcgcaaagctcagtatcatgaaagacgagcctgaggaagcagagctcatcctgcatgatgctttacggttagcctaccagacagataataaaaaagccatcacttatacctatgaccttatggccaaccttgccttcattcgcggacaactggagaatgcagagcaactattcaaggcaacaatgtcatacctccttgggggaggcatgaagcaagaagataatgctatcatcgaaatcagcttgaagcttgcgtccatatatgctgcacagaacaggcaggaattcgccgtcgcaggatatgaattttgtattagtacacttgaagagaaaatcgaacgtgaaaaagagttagccgaggatattatgtctgtcgaggaaaaggcaaatacacacctgctcctcggtatgtgcctcgacgcctgcgcaagatatttactgttcagcaagcaacctagccaggcccagcggatgtatgagaaggcactgcaaatctccgaggagatccaaggggagaggcatccccagaccattgtactgatgagcgatctcgccactactctggacgcccagggcaggtttgacgaggcatacatctacatgcaacgcgcaagcgacctggcgcgacagatcaaccaccctgagctccacatggttctgtccaacctcgccgctgtgctcatgcatagagagcgctacacccaagcaaaagaaatttaccaggaggcactgaaacaggctaagctcaaaaaggatgaaatctcagttcagcatatacgcgaggaactggccgaattgtccaagaagagcagacccctaaccaactctgtgaagttatag

SEQ ID NO: 243861 - DNA, 1143 bp, synthetic construct
  misc_feature 1..1143: note = Description of Artificial Sequence: Synthetic coding sequence
  source 1..1143: mol_type = other DNA
atgttcagacttctgtcctggtccctgggccgtggatttttgcgcgctgccggaagacgatgtcgtggatgctccgcaagactccttcccggactggccggaggtccaggccctgaagtgcaggtccctccttcgcgtgtggccccacatggtcggggacctggccttctccctctcctggctgcgctggcctggttctctagacctgccgcagctgaggaggaggagcagcagggagctgatggcgctgcggctgaagacggcgctgatgaggccgaagctgagataatccagttgctcaaacgggctaaattgagcattatgaaggacgagcctgaggaggcagaactcattttgcatgacgcgctccgactggcctaccagaccgacaacaaaaaagccataacctatacctatgacctcatggcaaatctggccttcattaggggacagctcgaaaacgcagaacagctattcaaagctactatgtcctacctgctgggcggaggcatgaagcaagaagataatgccattattgaaatctccttaaaacttgcttccatttatgccgcacagaatagacaagagtttgccgtagccggatacgaattttgtatctcaacactggaggaaaagatcgagcgggagaaagagctggcagaggatataatgagtgtggaggaaaaggctaacacacacctgttactggggatgtgcttagatgcatgcgctaggtacttgttgttttcaaagcaaccttctcaggcgcagcggatgtacgagaaagccctgcagatttctgaggaaatccagggggaaaggcacccgcagactattgtcctcatgtcagaccttgccactaccctggatgcccaggggaggtttgacgaggcctacatttacatgcagcgagcatctgatttagccagacagatcaaccatcctgagttgcacatggtgctcagcaatttagccgctgtgctgatgcatcgggagagatatacacaggccaaggaaatatatcaggaggccctgaagcaggcaaaactaaaaaaggacgagattagcgtgcagcacattagggaagagctggcagagttgagcaaaaaatcgcgcccactgaccaattctgttaagctctag

SEQ ID NO: 243862 - DNA, 1506 bp, synthetic construct
  misc_feature 1..1506: note = Description of Artificial Sequence: Synthetic coding sequence
  source 1..1506: mol_type = other DNA
atggcacagccccacacgaccagcgtaccttattttgcccgatcacccgcaccacccccacctagcaggagtggtgcccctcctcagccaccggctaccttgaggccaagcaggcgcaggaccaggccaccccgtccggctgaccgacgggatgcccctgccgactgtgcctacctgtggcggattctgactccaagaagggggagagccaggaggagcgacgttggtgccaggcatcgggcttgtgggagacgcgatgtgctgctctcccggcagggtccagctaaccctgagggagcgcgaagggtggttggcggtcaagaaagagtgtggccagctgtgcggcgaggccgaggcggttcaatgttcagactgctgagttggagcctgggaaggggattcctgagagccgctggccgtcgctgtcggggatgttctgccagactccttccaggtctcgccggaggtcccggacctgaagtgcaggttcctccttcccgggtggcaccccatgggagggggcctggactgctgcctctcctggccgcattagcgtggttttcccgccctgctgcggcagaggaagaagagcagcagggagctgatggagcagccgctgaagatggcgcagacgaagctgaagcggaaattatccagctgctgaagagggcaaaattatctatcatgaaggatgagcctgaggaagcagagctgatcttgcacgacgctttgcggctggcttatcagacggacaataaaaaagcaatcacctacacatatgatcttatggctaatctcgcgttcatccggggacagttggaaaacgccgaacagctgttcaaggcaaccatgagctacctgttggggggagggatgaaacaggaggataatgccattatcgagattagtctgaaactggctagcatctacgccgcacaaaataggcaggagtttgccgtggcgggttacgaattctgcattagtaccctggaggaaaagatcgagagagaaaaagagctggccgaagatatcatgtcagtcgaagagaaagcaaacactcacctgctgctcgggatgtgtctggatgcctgcgccaggtacctgctgttcagcaaacaacctagtcaagctcaaaggatgtacgaaaaggccttgcagattagtgaggagatccaaggcgagcggcatcctcaaactatagtgctcatgtctgatctggcaaccactctggacgcacagggcagatttgacgaagcctacatctatatgcagagggcctccgaccttgcacgccagatcaaccatccagagcttcatatggtgctcagtaacctggccgcagttttgatgcatcgcgaacgctacactcaggccaaagagatttatcaggaagccctgaagcaggctaaactcaaaaaagacgagatttccgtccagcatattcgcgaagaattggccgagctgagtaagaagtcaaggcccctgacaaatagcgtgaagctttag

SEQ ID NO: 243863 - DNA, 501 bp, synthetic construct
  misc_feature 1..501: note = Description of Artificial Sequence: Synthetic coding sequence
  source 1..501: mol_type = other DNA
tgacaagaacgggtgtggcccgctgtgagacgcggtaggggcggaagtatgtttaggctcttgagctggtcccttggacggggatttctgagagcggcaggaaggcgttgtagaggttgctcggccagactgcttcccggactggctggtggtcccggtccagaggtacaggtgccacccagcagagtcgcccctcacggccgtggcccaggattgttgcctctcctcgccgcactggcctggttcagcagacccgcagccgctgaggaggaggaacagcagggagcagatggcgctgctgcagaggacggtgctgacgaggccgaggcggagatcatacagctccttaagagggctaaagtgcggaggctgagggctctgcgaccagctgagagaggtagcttatgtgagaggggtttgggcgtggcagcccactactccctcaggctggccgaagagtggatggaagcccctcgagtcaagctcccaagaatgtcctag

SEQ ID NO: 243864 - DNA, 3951 bp, synthetic construct
  misc_feature 1..3951: note = Description of Artificial Sequence: Synthetic coding sequence
  source 1..3951: mol_type = other DNA
atggactctcaagaactgaaaactctgataaattattactgccaggaacggtactttcatcacgttttgctggtggccagcgagggcatcaaacggtacggaagtgatcccgtcttcagattctatcacgcgtatggaacgctgatggaagggaagacacaggaggccctccgggagttcgaggccattaagaataagcaggacgtgtccctttgctcactgctcgctttaatctacgcgcataaaatgtccccgaatcccgaccgggaggctatcctggagtccgacgccagagtgaaagagcagcggaaaggcgctggcgaaaaggccctgtatcatgcaggcctcttcctctggcatatcggacgtcacgacaaggccagagaatatatcgaccgaatgatcaagataagtgacggttccaaacaaggacatgtccttaaagcctggctcgacatcacccggggtaaggaaccgtatactaaaaaagctcttaagtatttcgaggaaggcctccaagatggcaatgatacattcgcgctgctgggaaaggcccagtgtctggagatgcgacagaactactctggggctttagaaactgttaaccagataatagtcaatttcccttctttcctgcctgcgtttgtaaagaagatgaagctgcagcttgccctccaggactgggaccagactgtagaaacagctcaaaggctactgctgcaggatagccagaatgtggaagcactcaggatgcaggctctctactacgtgtgtagagaaggtgatatcgaaaaagcctctaccaaactcgagaatctcggtaataccctggacgctatggagccgcagaacgcccagctcttctacaatattacgctggcttttagcagaacatgcggaaggtcccagcttatcctacaaaagatccagacacttcttgagcgcgcattctcactgaatcctcagcagtcagagtttgcgaccgaattggggtatcagatgattctgcagggacgtgtgaaagaagccttaaagtggtataaaacagcgatgaccctggacgagaccagtgtcagtgctctggtggggtttatccaatgccaactgatcgagggacagttgcaggacgccgaccagcagctggaatttttgaacgaaattcagcaatctattggcaagtccgccgagctgatctatcttcatgctgtgctggccatgaagaagaataagaggcaggaagaggtaattaatctcctgaacgacgttttagatactcacttcagtcagctcgaagggctgcctctcggcattcaatatttcgagaagctcaaccccgactttttgctggaaatcgtaatggagtacctttcattctgccccatgcagccagccagtccgggtcagcccctgtgtcccttattacgtcgttgcatttcagtgctggagaccgtggtaagaacagtaccgggacttctccaaaccgtgtttttaattgcaaaggtcaagtatttaagtggtgacatcgaagccgcattcaacaacctccagcattgtctggaacataacccctcatatgctgatgcccatcttctgctggctcaggtatacctgagtcaagagaaagtgaaactgtgctctcaaagccttgagctgtgcctcagctacgacttcaaggttcgcgattacccactctaccatctcataaaagcccagtctcaaaagaagatgggagagattgccgacgccattaagaccctgcatatggcaatgtccctccccggaatgaagcggattggcgcttcgactaagagtaaagataggaaaaccgaggttgacacctcacaccggctgagtatttttctcgaactaatcgatgtgcatcgtttaaatggagaacagcatgaggccacaaaggtcctgcaggacgctatccatgagttttcagggacgtccgaagaggtgcgtgtcacgatcgccaacgctgacttggcgctcgcccaaggcgatatcgagcgcgcattatcaatactgcagaatgttacggccgaacaaccctacttcattgaggcacgagagaagatggcggatatctatctgaagcaccgcaaggataagatgctatacattacttgctttcgcgagattgcagaacgaatggccaatccccgaagtttcctgctgctgggggatgcatatatgaacatcctcgaaccagaagaggctatcgtggcctacgaacaggctttgaaccagaacccaaaggatgggacccttgcttccaagatgggaaaggccctcattaagacccataactattccatggccatcacatactatgaagccgctctgaaaacagggcagaagaattatctatgctatgacctggctgagctgctcctcaagctgaagtggtacgataaggcggaaaaggtgttacagcacgcacttgcgcacgagcctgtgaacgagttaagcgcattaatggaggatggacggtgtcaggtcctgctggctaaggtttacagcaaaatggagaagcttggcgatgccatcaccgcactccagcaggcgcgtgagcttcaggctagggttctaaagagagtgcagatggagcagccagatgcggtgcccgcacagaagcatttagccgctgagatttgcgcagagatagcgaagcactctgtggcacagcgggattacgaaaaagctattaagttctacagggaggctctggtgcattgcgaaaccgataataagattatgctggagctcgccagactgtatttagcccaggacgaccctgattcatgcctgcggcagtgtgcgctcctgctgcaatcagaccaggataacgaagctgctacaatgatgatggcagacctcatgttcaggaagcaggattatgagcaggctgtatttcacttgcagcagctgctcgagaggaagcccgacaattatatgacgctgtcaaggctgatagatctgctgaggaggtgcgggaaacttgaggatgtcccaaggtttttctcaatggcggagaaaagaaatagccgagccaagctggaacccggattccagtattgtaaaggactctacctgtggtacactggtgagcccaacgacgctctgaggcattttaataaggccagaaaagaccgcgattgggggcaaaacgctctctataacatgattgaaatctgcctcaatccggacaacgagaccgtgggaggcgaagtctttgagaacctggatggtgatctgggcaatagtacagagaagcaggagtctgtgcagctggccgtgcggacagcagagaagctactaaaggagttgaagccacaaactgtgcagggacatgtgcaattacgtatcatggagaattactgtctgatggccactaaacaaaaatctaacgtggaacaggcacttaatacctttacagagatcgctgcttccgaaaaggagcacatccccgcacttctgggcatggccacagcctacatgattctcaaacagactccccgtgccagaaaccagctgaagagaatcgcgaaaatgaactggaatgcgatagacgctgaggaattcgagaaatcatggcttttgttggccgacatttacatacagtcagccaaatacgacatggccgaggatctgctcaagagatgtcttagacataatcggagttgctgtaaagcatacgaatatatgggctacataatggagaaagagcaagcatacactgatgctgccttgaattatgagatggcctggaagtacagtaatcgcactaatccagcagtaggttacaagctggcatttaattacctgaaagctaagcgctacgtcgattcaattgacatctgtcatcaggtattagaagcgcacccgacctatccgaaaatccggaaagacatcctagataaggccagagcgagtctgagaccctag

SEQ ID NO: 243865 - DNA, 765 bp, synthetic construct
  misc_feature 1..765: note = Description of Artificial Sequence: Synthetic coding sequence
  source 1..765: mol_type = other DNA
atgatcgagatctgcctcaacccagataacgaaaccgtgggcggtgaagttttcgaaaacttagacggcgacctgggcaacagcaccgaaaagcaggagagcgtccaactggccgtgaggactgcagaaaagctcctgaaagaacttaagccacagacagtgcaaggacacgtgcagcttcgcattatggaaaattactgtctgatggctaccaaacagaaatcaaatgtagagcaagctcttaataccttcaccgagatagcagctagtgaaaaagagcatattcccgctctgttaggtatggctacagcctatatgatcctcaaacagaccccccgagccaggaatcaactcaaacgtattgccaaaatgaactggaatgcaatcgatgccgaggagttcgagaaatcgtggctactgctagctgacatttatatccagtccgcaaaatatgacatggccgaggacctcctgaaacggtgtctgcggcacaaccggtcctgttgtaaggcttatgaatatatgggatacataatggaaaaggaacaggcctataccgatgcagcgctgaactacgaaatggcttggaagtacagtaatcgcaccaaccccgcagtgggttataaactggccttcaattatctgaaggccaagcggtatgtggacagcattgatatctgccaccaggttttggaagcccaccccacctacccgaagatccgcaaagatatcttagataaagctagagcaagtttaaggccatag

SEQ ID NO: 243866 - DNA, 6077 bp, synthetic construct
  misc_feature 1..6077: note = Description of Artificial Sequence: Synthetic coding sequence
  source 1..6077: mol_type = other DNA
atggacaatttcgccgaaggcgacttcaccgttgctgactatgccctgttagaggactgcccacacgtcgacgattgcgtctttgccgcagagttcatgtccaatgattatgtgagggtgacgcagctctattgtgatggagtcggcgtgcagtacaaggactatattcagagcgaaaggaacttggagttcgatatatgttcaatctggtgttccaaacccataagcgtgctgcaagactactgcgacgccattaagatcaacattttctggccccttctgttccagcatcagaattccagcgttatctctcgcctgcatccctgcgtggacgcgaacaattcgcgcgcttctgaaataaacctgaagaagctgcagcaccttgaacttatggaggatattgtcgatctcgccaaaaaagtagccaacgattcgtttctcataggaggcctactccggatcggttgcaagatcgagaacaaaattctcgctatggaggaagcgctaaattggattaaatatgctggagacgtgacgattctgaccaagttgggctccatcgacaactgctggcccatgctctcaatttttttcaccgagtacaaataccatatcacaaagatcgtgatggaagactgcaacctgcttgaggagctcaagacgcagtcttgcatggattgtatagaggagggggaattaatgaaaatgaagggaaacgaggaattctctaaagagagatttgacatcgcaattatctactatactagggccattgaatatcgccctgagaactatcttctgtatggcaatagagcactatgcttcttgaggactggacagtttagaaatgcccttggagacggcaagagagctactatcttaaagaacacatggcctaaagggcactatcgctattgtgacgcgctgtccatgctgggtgagtacgactgggcgttgcaggccaacattaaggcacagaagctgtgcaagaatgaccccgaaggtattaaggatctgatccagcagcatgtcaagttgcagaagcagatcgaagacctccagggccgaacggccaataaagatccaataaaggctttctatgagaatcgcgcttacacacctcgctccctgtccgcaccgatctttacaacttccctgaacttcgtggaaaaagagcgggacttccgaaagatcaatcacgaaatggcgaacggcggtaaccaaaatctaaaggtcgctgatgaggcgctgaaggtggatgattgcgattgccatcctgaattttctcctccaagctcccagcctccaaaacataaggggaaacaaaagtctcgcaataacgaatctgagaaattttctagtagcagcccgctgacgttgcctgcagatttaaagaatattctggagaagcagttctcaaagagcagtagggccgcacaccaagatttcgctaacatcatgaaaatgcttaggtctttaatccaggacggctacatggcactgctcgagcagagatgccgcagcgcagcccaggcctttactgagttgctgaacgggcttgacccccagaaaatcaaacagctgaatctggccatgattaactacgtgctggtcgtctacggactggccatctccctcttggggatcggccagcctgaggagctgagtgaggcagaaaatcagttcaagaggatcatcgaacattatcctagtgaaggcctggactgcctggcctattgtggaatcggcaaggtctatcttaagaagaaccggttcctggaagccttaaaccatttcgaaaaagctcgcacgctgatctatcggctgcccggagtgcttacatggccgacaagtaacgtgattattgaggaatcacagcctcaaaaaataaaaatgctcctggaaaagtttgtggaggaatgcaagtttcccccagtcccagatgccatttgttgctaccagaaatgccacggttattccaagatccagatctatatcaccgaccctgatttcaagggcttcatccggatcagctgctgccagtattgtaaaattgaattccatatgaactgctggaaaaagctaaagactacgacattcaatgataaaatagacaaggattttctgcaggggatttgcctgacaccagattgcgagggggtgatttctaagatcatcatcttttcgtccgggggagaggtcaagtgtgaattcgagcataaagtgatcaaagagaaggttcctcccaggccaatattaaagcaaaagtgtagcagtctggaaaaattacgactcaaggaggacaaaaaactgaagcgtaaaatacagaaaaaagaagcaaagaaactcgcccaagaacgaatggaggaggacctgcgggagagcaatccacccaagaatgaagaacaaaaggagacagtggacaatgtgcagaggtgccagttccttgacgatcggatccttcagtgtattaagcagtatgccgacaaaatcaaaagcggcattcagaatacagccatgttgttaaaggagttgttatcatggaaagttctgagcactgaagattatacaacatgcttttcttcgcggaatttcctgaacgaggcagtggactatgttatcagacatctgattcaggagaacaacagggtgaagacccggatctttctgcacgtgctctccgagctcaaagaggtcgagccgaaactggccgcttggatccagaaattaaattcattcggattagacgcaactggcacatttttctccagatatggcgcttcactcaagctattggacttttccattatgacttttctctggaacgagaaatacggacataagctcgacagtattgagggcaagcaacttgactacttcagcgagccagcttcactcaaggaagccagatgtttaatttggctcttggaagagcatcgcgataaattcccggcactgcatagcgctctggacgagttctttgacatcatggacagccgctgcacggttctgaggaagcaggactccggggaagcacccttcagttctacaaaagttaaaaacaagtctaaaaaaaagaagccaaaagactcaaaaccgatgctcgtgggaagcggcactacatctgtaacctcaaacaacgaaattatcacatcaagcgaggatcattcaaatcgtaattcagacagcgcagggccttttgccgtgccggatcatctgcggcaggacgtagaggagttcgaggcactgtatgaccagcattctaatgaatacgtggtgagaaacaagaagctgtgggatatgaatcccaagcagaaatgttcgaccctgtatgattacttttcgcagttccttgaagaacacggtcccctggatatgagcaacaaaatgtttagcgccgagtacgagttttttccagaggagacgaggcagatcctggagaaggccggaggactcaagcctttcctgctgggatgtcccaggttcgtcgtgattgacaactgtatcgcacttaagaaggttgcgtccaggcttaagaaaaagaggaagaaaaagaacatcaagactaaagttgaagagatcagcaaggctggcgaatatgtgagggtaaagttgcaactgaatcccgctgccagagagtttaaacctgatgtaaaatctaagcccgtgtctgattcatcatccgcaccagctttcgaaaacgtcaagcctaaaccggtttccgcaaatagcccaaagcccgcttgtgaggatgtcaaggccaagccagtcagtgataattcgtctcgccaggtctcagaggatggccagccgaagggtgtgtcctccaactcacctaagcccggatcagaagacgcaaattataagcgtgtgagctgcaattcacccaagcccgttctggaggatgtgaagcccacatactgggctcagtcccacctcgtgacaggttactgtacttatctgcctttccagaggttcgacatcacccagacacccccagcctacattaatgttcttcccggtctgccccagtacaccagtatttatacacctttagccagtctgagccctgagtatcagcttcccaggagtgtacctgtggtgcccagtttcgtggccaatgaccgggcagataagaatgctgccgcatatttcgaggggcaccacctgaatgcagagaacgttgccggacatcaaatcgccagtgagacacagattttagagggctctttgggcatcagtgtgaaatcacattgcagtactggcgacgcccatacggtcctgtcagagagcaaccggaacgatgagcactgcggaaacagcaataataaatgcgaggtgatcccagaaagcacctcggcggttacaaatattcctcacgtccaaatggtggctattcaggtctcatggaacatcatacatcaagaggtaaatacggaaccatataatccatttgaagagcggcaaggcgaaatctctagaatcgagaaagagcaccaagtattacaggaccagctgcaggaagtgtacgagaattacgaacagatcaaactgaaagggttggaagaaacacgagatctagaggaaaagcttaaacgccacctggaagaaaataagattagcaagacagaactcgactggttcctgcaagacttggaacgcgagataaaaaagtggcaacaggagaagaaagagatccaggagaggctgaagtcgctgaagaagaaaatcaagaaggtgtcaaatgcgagtgagatgtacactcagaagaatgatggaaaggagaaagaacatgagctacatttagaccagtccctagagatctcaaatacactcactaatgaaaagatgaagatcgaagaatacattaagaaaggtaaagaagactatgaagaatcccaccagcgcgcagtggccgctgaagtatcggtgcttgaaaactggaaggagtccgaggtgtacaagctacagatcatggagtctcaggccgaggccttcctgaaaaaacttggcctgatcagccgcgatcccgctgcatatcctgatatggagtctgacatacgcagctgggagctgttcctgtcaaacgttactaaagagatcgaaaaagcaaagtcacagtttgaggagcagattaaagcaataaagaacggctcacgtctttcagagttatctaaagtgcagatcagcgaacttagttttccagcttgtaacaccgtacatcccgagttactcccggaaagcagcggtgacgacggacaaggcctcgttacctcagcctctgatgttactggcaaccacgcagcactccaccgagacccctccgtgttctcggcaggggattccccaggagaggccccatcagccctcctgcctggtccccctcccggtcagcctgaggccacgcaactcacaggacccaaaagggcaggacaggccgcactgagcgagagatcccccgtagctgatcgtaaacaaccggtgccccctggaagagcagccaggagcagccagtctcccaaaaagccattcaactctataatcgagcatctctctgtcgtgtttccctgctacaattccaccgaacttgcagggttcattaagaaggtgcgctctaaaaacaagaactcactgagcgggctctctatcgatgagattgttcagagagtgactgaacacattttagatgaacagaagaagaagaagccgaacccaggcaaggataaaaggacttatgagccgtcatcagcaacaccagttacaaggagctcccaaggtagcccaagcgtggtagtggccccttcgcccaagaccaagggtcaaaaagccgaagacgtccccgtccgaattgccctaggcgcaagcagctgtgagatatgtcacgaagtcttcaagagcaagaatgttcgcgtgctgaagtgcggtcacaaataccataaaggctgctttaaacagtggctgaaaggccaaagtgcttgccccgcttgccagggcagggacctgctgaccgaggagagtcccagtgggagaggctggccttctcagaatcaggagctgccttcatgtagttccagata

SEQ ID NO: 243867 - DNA, 6077 bp, synthetic construct
  misc_feature 1..6077: note = Description of Artificial Sequence: Synthetic coding sequence
  source 1..6077: mol_type = other DNA
atggacaacttcgctgagggcgacttcaccgttgcagactatgccctgttagaggactgcccacacgtggatgattgcgtctttgccgctgaattcatgtcaaacgactatgtcagagtcacgcaactgtattgcgatggggtgggagttcagtataaagactatatccaaagtgaacgcaatctggagttcgacatttgctcgatctggtgtagcaagcccattagtgtgttacaagattactgcgatgctataaagatcaacattttttggcccctcctgttccagcaccagaactcttcggtgatctcgagactgcatccatgcgtcgacgccaacaactctagagcatctgaaattaatctgaaaaaactgcagcatttagagttaatggaggacattgtggacctagcaaaaaaggtggcgaatgattcatttttgattggcggattgctgagaattggatgtaagatcgaaaataagatccttgccatggaggaggcactgaattggattaagtacgccggagacgtcaccatcctgacgaagttaggaagcattgacaattgctggcctatgctgtccatattctttacggagtacaaataccacatcactaaaatcgtgatggaagattgcaatctcctcgaggaactcaagacccagtcctgcatggactgtattgaggagggtgagctaatgaaaatgaaaggaaatgaagaattctccaaggagaggttcgacatcgctattatttactacaccagggctattgagtacagacccgaaaattacctcctctacggtaatagggccctgtgctttcttcggacaggccagttcaggaatgctttgggagacggaaagagagcgaccatactaaagaacacttggcccaaaggccactatagatactgtgatgctctgtccatgcttggcgagtacgactgggctctgcaggcaaacattaaagcccagaagctttgtaagaacgaccctgaaggcattaaagatctgatccaacagcacgtcaaacttcagaagcaaattgaggacctgcagggacgcactgccaataaagacccgataaaagcattctacgagaaccgcgcatatactccaagaagcttgagcgcgcctatcttcactacgagcctaaacttcgtcgaaaaggagcgggattttcgcaaaatcaatcacgagatggccaacgggggaaatcaaaaccttaaagtagcagacgaggcgctaaaagtagatgactgcgactgtcacccagaattttcccccccaagttcccagcccccaaaacataagggtaagcagaaatcgcgaaacaacgagtctgagaaattttccagcagcagcccgttaacgctgccagctgacctcaaaaatatcctggaaaaacagttttccaaaagctctagggcagctcaccaggatttcgcaaacattatgaaaatgcttcggagccttatccaggatggttacatggctttgctggagcaacgctgccggagcgccgctcaagcgtttactgaactccttaacggactggatccgcagaaaattaaacagctgaacctcgcgatgattaactatgtgctggttgtttacggattggccatcagcttgctgggtattgggcaaccagaggagctctctgaagccgagaaccaattcaagcggatcatcgagcattatccctctgaggggctagattgcctggcttactgcggcattgggaaagtgtacctgaaaaagaataggttcctggaggccctaaatcacttcgaaaaagccaggactttgatctatcgtcttccaggagtgctgacctggccgacatctaacgtcatcatcgaggagtcacaaccacagaagatcaaaatgttgctggagaagttcgtggaggagtgcaaattcccacctgtcccggatgcgatatgctgctatcaaaagtgtcacggatactctaagatacagatctacatcacagatccggatttcaaaggattcataagaatttcctgctgtcagtattgcaaaatcgaatttcacatgaactgttggaaaaaactcaagactactacctttaatgataagattgataaagactttcttcaagggatctgtctgacacccgactgcgaaggtgtcattagcaagattataatatttagctccggaggtgaggttaagtgtgagtttgaacataaagttatcaaagaaaaggtgccccctagaccgatcctgaagcagaagtgctcctccctagaaaagctcaggctcaaagaagacaagaagctgaaaagaaagatccagaaaaaggaggccaagaaacttgcccaagaaaggatggaagaagatctgcgcgagagtaaccccccaaaaaatgaagagcagaaagaaaccgtggataacgtgcaacgatgtcagtttctggacgataggatactgcagtgcatcaagcagtatgcagataagattaagtcagggatccagaataccgcaatgcttctaaaagagctgctttcatggaaggttttgtctacagaggattacaccacttgcttctcttccagaaactttctgaatgaagccgtcgactatgtgatccgccacctgatccaagagaacaaccgcgtgaaaaccaggatatttttacatgtcctttcagagctgaaagaggttgaacctaagctcgccgcatggattcagaaactcaattctttcgggctggacgccactggaacctttttttctagatatggcgcttcactgaaactcctggatttcagtataatgacatttctgtggaatgagaagtacggtcataaactcgactctatcgaaggcaagcaactcgattacttctcagagcctgccagtctgaaggaggctagatgcttgatttggctccttgaggagcacagagataaatttcctgctctgcactcagctctggatgagttttttgacattatggattctagatgtactgtgctccgcaaacaagatagcggagaagcgccattcagctctacgaaagtgaaaaacaagtcaaagaagaagaagcctaaagattccaagcctatgctagtgggcagtggcacaacctcggtgacctccaataacgaaatcattacatcctccgaggaccactctaaccggaatagtgattcagcgggaccttttgcagtgcccgatcatcttcgccaagacgtggaagagttcgaagctctctatgatcagcatagcaacgagtacgtggtgagaaataagaagctgtgggatatgaaccctaaacaaaagtgctctaccctttatgactacttttctcagtttttggaggagcatggtccactggatatgtcaaacaaaatgttcagcgccgagtacgagttctttcccgaagaaacgagacaaatacttgagaaggccggaggccttaagccatttctcctgggctgtccaaggttcgtggtcattgataattgtatcgcattaaagaaggtggcatcccggctgaagaagaagaggaagaaaaagaacataaagaccaaagtggaggagatcagcaaggcaggggagtatgtcagagtgaaactccaactgaatcctgccgctagggaattcaagcccgacgtgaaaagcaagccggtgtccgactcttcctccgcgcctgcgtttgaaaacgttaaaccaaaacctgttagcgctaattcacccaagcccgcttgcgaggacgtcaaagctaaaccagtgtccgataatagctcacgccaggtatctgaggatggccaaccaaagggtgtcagctccaacagccctaaacctgggtctgaagatgccaactacaagagggtctcttgtaatagcccaaaaccagtgctggaggatgtcaaacccacttactgggcacagagtcatctcgtgactggctattgcacctacctccctttccaacgctttgatattacgcagacaccccctgcatatattaacgtgctgccaggcctccctcagtatactagcatttacaccccccttgcatctctgagtcccgagtaccagctgccccgtagcgtgccggtcgtgccttcctttgttgctaatgaccgtgccgataaaaatgcagccgcttatttcgaaggtcaccacctgaacgcagagaatgtagccggtcatcagatcgcctctgagacccagattctggaaggatcactggggatcagcgttaaatcgcattgctcaacgggggacgcccatacagtcctctccgagagtaaccggaatgatgaacattgtggtaattccaataacaaatgtgaggttatacccgaatcaaccagcgccgtgactaatataccgcatgtgcagatggtggcaattcaggtatcatggaacattatccaccaagaggtcaatactgagccatataacccttttgaggagcggcagggggaaattagtaggatcgagaaggagcatcaggttttgcaggaccagcttcaagaggtttacgaaaactacgagcagataaaactgaaaggtctggaggagaccagggatcttgaggagaaacttaaaagacatctggaagaaaataagatctccaaaacagagttggactggtttcttcaggacctggagcgtgagatcaagaaatggcaacaggaaaaaaaagagattcaggaacgactcaaatcattgaagaagaagattaaaaaggtatccaatgccagtgaaatgtacacgcaaaagaacgacggcaaagagaaagagcacgagctacacctagaccaatcactcgaaatttcaaacacactgacgaatgagaaaatgaaaattgaggagtatatcaaaaagggcaaagaggactatgaggagtcccatcaacgcgctgtcgccgctgaggtgagcgtgttggaaaattggaaagaatccgaggtgtacaaattgcagatcatggaatcccaagccgaagcctttttgaaaaaactgggcctgatcagtagggacccagcagcctatccggacatggagtctgacatccgctcctgggagctgtttctgagtaacgtaacaaaggagatcgaaaaagcaaagtcacagtttgaggagcagatcaaagccatcaagaacggaagtagactgagcgaactgtctaaggtgcagatcagcgagctgtccttcccagcgtgtaataccgtgcatcccgaattgctcccagagtccagtggcgacgatgggcagggtcttgtaaccagtgctagtgacgtgacaggaaatcacgccgcactgcaccgcgatccaagcgtgtttagcgcaggagactctccaggggaggctccttctgcattattgccaggccctccacctggtcagcctgaggcaactcagctgacaggaccaaaaagggcaggacaggcagctctgagcgagcgctctcctgtggctgacaggaagcagcccgttcctccagggagggcagctcggtcatcacagagtcccaagaagccttttaatagtattatcgaacatctgagcgtggtcttcccctgttacaactccaccgagttggccggattcatcaaaaaggtccgctccaaaaacaaaaattccctgagcgggctgagcatcgacgagattgtacagcgggtgactgagcacatcttggatgagcaaaaaaagaagaagccaaaccccggaaaggacaaacgcacctatgagcccagctccgcgaccccagtaacgcggagcagtcaaggaagtcctagcgtcgtggtggcccctagcccaaagaccaaaggccagaaagcagaagacgtccctgtgaggatcgccttgggcgctagttcatgtgagatttgtcacgaggtctttaagtccaaaaatgtgagggtgctgaaatgtggccataagtaccacaagggttgcttcaaacagtggctgaagggacagtctgcctgtcccgcttgccaaggcagagatctgttaacagaagaaagtccctctgggagagggtggccgagtcagaaccaggagctgccctcgtgctcctctagata

SEQ ID NO: 243868 - DNA, 6077 bp, synthetic construct
  misc_feature 1..6077: note = Description of Artificial Sequence: Synthetic coding sequence
  source 1..6077: mol_type = other DNA
atggataacttcgccgaaggagactttaccgtggcggactacgctttattagaggactgtccacacgtcgacgactgcgtctttgcagctgagtttatgtctaacgactacgtgagagtaacccagctgtattgcgatggcgtaggagtccagtacaaggactacatacagagtgagcgtaatttggagtttgatatttgttctatctggtgttctaaaccgatcagcgtgcttcaggattattgcgatgcaatcaaaatcaacattttctggcctctgcttttccagcaccagaactcatccgtcatctccagactccacccctgcgtagatgcaaacaatagccgtgcgtctgaaatcaatctgaagaagctgcagcacctggaattaatggaagacattgttgacttagccaagaaggtcgcaaatgacagttttcttatcgggggtctgctgaggattggatgtaaaatcgagaacaaaatcctagccatggaggaggcactcaattggatcaagtacgccggagatgttaccatcctgactaagctgggatcaattgataattgctggccaatgctgtctattttcttcacggagtacaaatatcacatcacaaaaatagtcatggaggactgtaatctgttagaggagctgaagacccagagttgtatggactgcatagaggaaggcgaattgatgaaaatgaaaggaaacgaagaatttagtaaggaacgatttgatatcgcaattatttattatacgcgggctatcgagtacagaccagagaactatctcttatacgggaacagagccctgtgtttccttaggactggccaatttcgtaacgccttgggcgacggcaagagagcgactattcttaagaatacttggcctaaaggccactacaggtattgcgacgcacttagcatgttaggagaatacgactgggctctgcaggctaacatcaaggcacagaaactgtgcaagaacgaccccgagggtattaaggacctcattcagcaacatgtcaagcttcagaagcagatcgaagatctgcagggtcggaccgccaataaggaccctatcaaagcattttacgagaatcgagcatataccccccgatcactgagcgcccctattttcacaacaagcttgaatttcgtcgagaaagaacgcgacttccggaagatcaatcacgagatggcaaacgggggaaaccagaatctgaaagtggcggatgaggccctaaaggtggatgattgtgattgtcacccggagttcagccccccaagctcgcaacccccaaaacataagggcaagcagaaaagccgaaataatgagagcgagaaattcagctcttccagccctctcaccctaccggcagacttaaaaaacatcctggaaaagcaattctccaaatcttcacgggcagcacatcaggactttgctaacattatgaaaatgctaagaagtctgatacaagatggctatatggcactgcttgaacagcgctgtcggagtgccgcacaagcctttaccgagcttctaaacggtttggatccccaaaagattaagcagctcaacctcgctatgatcaactacgtacttgttgtgtacggactcgccatttctctgcttgggattggccagcctgaagagctgtcagaagccgagaaccaattcaagaggatcatcgagcactaccccagcgagggtctggactgtctggcctactgtggcatcggcaaggtctatctgaagaagaatagatttctggaagccttgaaccactttgagaaggccagaacgttaatttatcgcctgcctggtgtgttaacttggcccacctccaatgtcattatcgaggagagccagcctcaaaagattaagatgttgctggagaaattcgttgaggagtgcaagtttcctcctgtgccagatgccatttgctgttaccagaagtgtcatggttattccaagatccagatctacatcactgatcctgacttcaaaggttttatccgcatctcttgttgccaatattgtaagatcgagttccatatgaactgttggaagaagctgaagacaacgacctttaacgataagatcgataaggactttctccaaggtatctgtctgactcctgattgtgagggtgttatctccaaaatcatcatcttctcctccgggggtgaagttaagtgtgaattcgagcacaaagtgattaaggagaaggttcctcccagaccgattttaaaacagaagtgttcgtcactggaaaagctgcggctgaaggaggataagaaactgaaaagaaagatccagaagaaagaggctaaaaagctcgcccaggaaagaatggaagaggaccttcgagagtccaaccctccgaaaaacgaggaacaaaaggaaactgttgataacgtgcagaggtgccagttcttggacgacaggattctgcagtgcatcaagcagtacgctgataaaattaaaagcggaatccagaatactgccatgctcctcaaagaactgctgtcgtggaaagtgttgtcaacggaggattacactacatgcttcagctcgcgaaatttcctcaacgaagcagtcgactacgtgatcagacacttaattcaagaaaacaacagagtaaagaccagaatcttcctgcacgttctgagcgagctcaaggaagttgagcctaagctggctgcctggattcagaaactgaacagctttgggctggacgccaccggtaccttcttctcgagatacggcgcatcgctgaagcttcttgatttctcaatcatgacattcctgtggaacgaaaagtacggccataagctggactctatagaaggaaaacaactggattactttagtgaacctgcatcattaaaggaggcaagatgcctaatctggctcctggaggaacacagggataaatttcccgctctccattcggcactggacgagttttttgacatcatggattcaagatgtactgttctgcggaagcaggactctggcgaggctcccttctccagcacaaaggtcaagaacaagtccaagaagaagaagcccaaggactctaagcctatgctcgtggggtcgggcaccacaagtgtcacaagtaacaatgagatcatcacttcttctgaggatcattcaaatcgtaactctgacagcgctggcccttttgctgttcctgatcaccttcggcaagatgtggaagagttcgaagcactgtacgaccagcactccaatgaatatgttgtccggaataaaaagctctgggatatgaacccaaagcagaagtgttccaccttgtatgattacttctctcaattcttggaggagcacggccctcttgacatgagcaataagatgtttagtgctgagtatgagttctttcccgaagagacccgccagatacttgagaaggcaggcggactgaagcccttcctcctgggatgcccaagatttgtggtgattgacaattgcatcgcgctgaagaaggttgcctccagattgaaaaaaaaaagaaaaaaaaagaatatcaaaaccaaggtggaagaaatttctaaggccggtgaatatgtgcgcgtgaagctccaattgaaccccgcagccagagagttcaaaccagacgtcaagtcgaaacccgtgtctgattcgtccagtgcccctgcattcgagaacgtgaagcctaagccagtctctgctaattcaccaaaacccgcatgcgaggatgtgaaggctaagcccgtcagcgataattcctcacggcaggtgagcgaggacgggcaacccaaaggagtgtcttctaactcgcccaagccagggagcgaggatgctaactataagagagtgtcctgcaactcccccaaacctgttctggaagacgttaagccgacctactgggcacaaagccatctggtgacgggatattgcacatatctgcctttccagcgcttcgatatcacacagactccccctgcctacattaacgtcctgccgggactgccccaatatacatccatctatacccctttggctagcctcagcccggaatatcagctcccccgaagcgtccccgtggtcccatcatttgtcgccaatgatcgtgcagataaaaatgctgctgcctacttcgaaggtcaccatctgaatgctgagaatgttgccggtcaccagatagcctccgagacccagattctggaaggttctctcggcatttctgtcaagtcacattgcagcaccggggacgcccataccgtcctatcagaaagcaacagaaacgatgaacactgcgggaattccaacaacaagtgcgaagtgattcctgagagcacgtctgcggtcactaatatcccacatgtccagatggtggccattcaggtctcctggaacatcattcaccaggaggtcaataccgagccatacaatccattcgaggaacgccagggggaaatatcaaggatcgaaaaagaacatcaggtcctgcaggatcagcttcaagaagtgtatgagaactacgagcagattaaactaaaaggactggaggagacacgggacttagaggagaaactgaagcgtcatcttgaggaaaataagattagtaaaaccgagcttgattggtttctccaggatctggaaagggagatcaagaaatggcagcaggagaagaaggagattcaggagagactcaaatctctgaagaaaaaaatcaaaaaagtgagcaatgcgtctgagatgtatacacagaaaaacgatggaaaagagaaagagcacgagctgcacctcgatcagtccctggaaattagcaataccctaactaacgaaaagatgaagattgaggagtatataaagaaaggcaaggaggactacgaggagagccaccagagggcggtggcagcagaagtgagcgtgctggaaaactggaaagagagcgaggtgtataagttgcagatcatggaaagccaggcggaagcatttctgaagaaacttggcctgatcagtcgcgaccccgctgcgtaccccgatatggagtcagacatccggagctgggaattgtttcttagcaacgtgacgaaggagatagaaaaagctaagagtcagttcgaggagcagattaaggccataaagaatggttcacggctgtccgagctgagcaaggtccagatctctgagctcagcttccctgcttgtaatacagtccaccccgagctgttacccgagagctccggcgacgacggtcagggactggtcacaagcgcatcggacgtgactggaaaccacgctgctttgcaccgtgatccttctgtcttctcagcaggcgattctcccggagaagcaccgagcgccctcctgcccggaccgcctcctggtcagccagaggctacacagctgactggtccaaagcgtgccggtcaggcagcgcttagtgaacgtagcccagtggcggatagaaagcaacctgtgcctcccggaagagctgctcgttccagccagtccccaaagaagcccttcaacagcatcattgaacatctgtcagtcgtctttccctgttataattccacagagcttgcgggattcatcaaaaaggtgaggagtaagaataagaactccctatccgggctatctattgatgagattgttcagcgcgtcacagagcacatcctggacgaacagaaaaagaaaaaaccaaaccccggtaaggataaaaggacctacgaaccatctagcgccaccccagtgacgagatcgagccagggtagtcctagcgtcgttgtggctccgtcacccaagaccaaagggcagaaggctgaagacgtgcctgttaggattgcccttggcgcaagctcatgcgaaatctgccacgaggtgttcaaaagcaagaatgtgcgagtactgaaatgtgggcacaagtaccacaagggctgtttcaaacagtggttgaaaggacagagcgcatgcccggcttgtcagggcagagatctactcacggaggaaagtcccagtggtcggggttggcctagccagaatcaggagttaccttcctgcagctcgagata

SEQ ID NO: 243869 - DNA, 3540 bp, synthetic construct
  misc_feature 1..3540: note = Description of Artificial Sequence: Synthetic coding sequence
  source 1..3540: mol_type = other DNA
atggataactttgccgaaggtgatttcacagtggcagattacgccctcctggaagattgtccacatgttgacgactgcgtatttgctgcagaatttatgtccaatgattacgtgagagttacacaactctactgtgacggcgtcggtgtgcagtacaaggactacatccagagtgagcgcaatttagaattcgacatatgctctatctggtgttcgaagcctatctctgtcctgcaggactattgcgatgcaataaagatcaacatcttctggccactgttgtttcaacaccaaaacagttcggtcatcagccggcttcacccatgcgtggacgcgaataactctcgcgcttcagagatcaacctcaagaagctgcaacacctggagttgatggaggatatagtggacctggcgaagaaggtcgccaacgacagcttccttattgggggactcctaagaattgggtgtaagattgagaataagatattggccatggaagaagccctcaattggatcaaatatgccggtgatgtgaccattcttaccaagttagggagcattgacaactgctggccaatgctcagcatcttcttcacagaatacaagtatcacattactaaaattgtgatggaggattgcaacttgctggaagaactgaagacccagagttgcatggactgcatcgaggagggcgagttgatgaagatgaagggtaatgaggagtttagcaaagagagatttgatattgccataatctattacacaagagcgatcgagtatagaccagagaactaccttctgtacgggaatcgtgccctgtgtttcttgcgtacggggcagtttagaaatgccctcggagatggaaaacgcgcaacgattctgaagaatacctggccgaagggccattaccgctattgcgacgctttatctatgttgggcgagtatgattgggcactacaagctaacatcaaagcacagaagctatgcaagaacgatcccgaagggatcaaagatctaatccaacagcacgttaaactgcaaaagcagattgaggatctgcaggggagaaccgcgaacaaagaccccattaaggctttttacgagaaccgtgcatacacgcctcggtctctgagcgcaccgatatttactacatctctcaattttgttgagaaggagagagacttcaggaagatcaaccacgaaatggccaatggcggaaaccagaacctgaaagttgcagacgaggccctgaaggtcgacgattgtgactgccatccggaattcagccctcccagttctcagccaccgaagcataaaggcaagcaaaaaagccgaaacaatgaatccgagaaattttcttcttcatcccctcttactctacccgctgacctcaagaatattcttgaaaagcagttctctaagagtagcagagccgcacaccaggactttgccaacattatgaaaatgctgcgcagcctgatccaggacggatatatggccttactcgagcagcggtgtcgttcggcagcccaggctttcaccgaactcctgaacggcctggatccacagaagattaaacagttgaacttagctatgatcaactatgtgctggtggtttacggtcttgcaattagtctgctcggtatcggccagccagaggagctgtctgaagcggagaatcagtttaaacggatcatagagcactacccatctgaaggtcttgactgtctggcttactgtgggatcgggaaggtttatttgaagaaaaaccgcttcctggaggcactgaatcacttcgaaaaggccagaacgctgatctatcgcctgcccggagtgctcacatggcccacaagtaatgttatcattgaagagtcccagccgcagaagatcaaaatgctactggaaaagttcgtggaggaatgtaaatttccacccgtgcccgacgctatatgctgctatcagaagtgtcacgggtacagcaagattcagatctatataactgatcctgatttcaagggctttatccggatttcctgctgtcaatattgtaaaatagaatttcacatgaattgctggaagaaactaaaaacaaccacctttaacgacaaaatcgataaggattttcttcaggggatctgcctcacgcccgactgcgagggagtcattagcaagattatcatattttcctctggtggcgaggtgaaatgcgaattcgagcacaaagtgatcaaagagaaggtacctccgaggcccatacttaagcagaaatgctcgtctctcgaaaaacttcgacttaaggaggataaaaagctaaagcgcaagatccagaaaaaggaagctaaaaagctggcacaggagcggatggaagaggatctgagggagtccaatccgcctaagaatgaggagcaaaaggagaccgtggataatgttcagaggtgtcagttcctcgatgatcggattttgcagtgcattaaacagtacgctgacaaaatcaagagcggtatacagaacactgccatgctccttaaagaactgttgtcatggaaagtcctctctacagaggattatactacctgctttagttctcggaactttttaaatgaggccgtggattacgtgatcagacatttgatacaagagaacaatcgagtgaagacccggattttcctgcacgttctgtccgagttaaaggaggtcgagcctaaattagcggcatggattcagaagttgaattccttcggcctggacgccacgggtacattttttagtagatatggcgctagcctcaaactgctcgacttctcaatcatgaccttcctgtggaacgaaaagtatggacataaactggatagcatcgaggggaagcaactggactatttctccgagcctgcttccctgaaggaggctcggtgcctcatctggcttttagaagagcatcgcgataaatttccggcactgcattccgcactggacgaattctttgatataatggactcaagatgtactgtattgcggaagcaggacagtggggaagctccctttagttcaaccaaggtcaaaaacaagtcgaagaaaaaaaaaccaaaagatagtaagcctatgctcgtaggctcggggaccacaagcgtaacatcgaataacgagatcattactagctccgaggaccactccaacagaaatagcgacagtgccggacctttcgctgtgcccgatcacctacgtcaggatgttgaagaattcgaagcactgtacgatcaacactccaatgagtacgtggttaggaacaagaagctttgggacatgaaccctaagcagaaatgctccacactgtatgattacttcagtcagtttctggaggaacatggtccactggacatgtcaaataaaatgttctctgccgaatacgaattcttccctgaagagaccaggcaaatcttagaaaaagctggcggacttaagccattcctgctcggctgtcctcgattcgtcgttattgataattgcatcgctctgaagaaggtggcgtcacgtcttaagtag

SEQ ID NO: 243870 - DNA, 2343 bp, synthetic construct
  misc_feature 1..2343: note = Description of Artificial Sequence: Synthetic coding sequence
  source 1..2343: mol_type = other DNA
atggataacttcgccgagggggactttaccgtcgctgattacgctctgctggaagactgcccacatgtggatgattgtgtctttgccgcagagttcatgtcgaacgactacgtacgagtgactcagttgtattgcgatggcgttggcgtgcagtataaagattacatccagagtgagcggaacttggagttcgatatttgctcgatctggtgttccaaacccatcagcgtactacaggactactgcgatgcgattaaaataaatatcttctggccacttctttttcagcaccaaaactccagcgttatttctcggctgcatccttgcgtggacgctaacaattcgcgcgcttctgagatcaacctgaagaagttacagcacctcgagctcatggaagatattgtggacctggcaaagaaagttgccaatgactcctttctcatcggaggtttgctgcgcattgggtgtaagattgagaacaaaattttggccatggaagaggcactgaactggattaagtatgcaggcgacgtgaccatcctgacaaagctcggcagtattgacaactgttggccaatgctaagtattttcttcacggagtacaaataccatatcactaaaatcgtgatggaggactgtaatttactggaagaactgaagactcaatcctgcatggactgtattgaggaaggggaactaatgaagatgaagggaaacgaggagttctccaaggaacgctttgacattgcaatcatatactacacccgggcaattgagtaccgcccagaaaattatcttctctacggaaatagagctctgtgctttcttaggacaggccagttcaggaatgcccttggcgatggaaagcgggctactatcctgaaaaacacatggcccaaaggccactataggtattgcgacgctctctcaatgctcggggagtatgattgggccctgcaagctaatataaaagctcaaaaactctgtaaaaatgacccagagggcattaaggatcttatacaacaacatgttaagctgcaaaaacagatagaagatttgcaaggaagaaccgccaacaaggatcctattaaagcattttacgagaacagagcctatacaccgagatctctctcagccccaatctttacgacctccctgaactttgttgaaaaagagagagatttccgcaaaattaaccacgagatggcgaatggcggtaaccagaaccttaaggtcgccgatgaggcgcttaaggttgacgattgcgactgtcaccccgaattctcacctccctcctcacaacctccaaagcataaaggtaagcagaaatcacgcaacaatgagtccgagaaattttcgtcaagcagccccctgactctccctgctgacctgaaaaacatcctggaaaagcagttctcaaaatctagtagagcagcacaccaggatttcgccaacataatgaagatgctgagatctctgatccaggatggatatatggccctacttgaacagagatgtcggtccgccgcacaagccttcaccgaactcctcaatggcctcgacccacaaaagataaaacagctgaaccttgcgatgattaattacgtgctcgtggtgtacggcctcgcaatctcgctgctcgggatcggccagcccgaagagctatctgaagctgagaatcagttcaagaggatcatagaacactatcctagcgagggattggattgtctggcctactgtggtataggcaaagtgtacctgaagaagaaccggttcttggaagccttgaatcactttgaaaaggccagaacccttatctatcgactgcctggagtgctgacctggcccacctcaaacgtgataatcgaagagagtcagccacagaaaattaagatgctccttgaaaagttcgttgaggaatgcaagtttcctcccgtgccagacgctatttgttgctatcagaagtgccacggatacagcaagattcagatctatatcactgatccagactttaaaggatttattcggatcagctgctgtcagtactgcaagatagaatttcatatgaactgttggaagaagcttaagacaaccacctttaacgataagatagataaagacttcttgcagggaatctgtcttacccctgactgtgaaggggtcatatccaagataataattttcagtagcgggggagaagtgaaatgcgagtttgaacacaaggtaatcaaggagaaagtgccgccacgcccaattctaaagcagaaatgcagtagcctggagaagttgaggctgaaggaggacaagaaactcaagcggaaaattcagaagaaagaagcctag

SEQ ID NO: 243871 - DNA, 1839 bp, synthetic construct
  misc_feature 1..1839: note = Description of Artificial Sequence: Synthetic coding sequence
  source 1..1839: mol_type = other DNA
atgctgggcgagtacgactgggccttgcaggccaatattaaagcccagaagctgtgtaaaaatgacccggaaggaatcaaggacctgattcagcagcacgtcaagcttcagaaacaaatcgaagatctgcaggggagaacagccaataaagatcctattaaagccttttatgagaatagagcgtacactcctagatctttgtcagcaccaatcttcacaacctctctcaattttgtcgagaaggagcgcgactttcgaaagattaaccacgagatggccaacggcggaaatcaaaacctcaaagtggcagatgaagcactgaaggtggatgattgcgattgccatcccgagttctccccaccgagctctcagccccctaagcataagggcaagcaaaaaagtagaaataacgaatcggagaagtttagctccagttccccactgaccctgccggctgatctgaagaatatactcgaaaaacagtttagcaagtcctctagggccgcacaccaggactttgctaacattatgaagatgttgcggtcactgattcaggatggatatatggccctgctagagcagcgatgtagatcagcggctcaggctttcacggagctgcttaatggcctggacccacaaaaaatcaagcagttgaatcttgctatgattaattacgtgctagtggtgtatggccttgctattagtttactgggtattggacaacctgaagaactctcagaagccgaaaatcaatttaagaggattatcgagcactatccatccgagggccttgattgccttgcctattgcgggatcggcaaggtgtatctcaaaaaaaatcgcttcttagaagcactgaaccacttcgaaaaggcaagaactctcatctataggttacctggggtacttacgtggccaaccagcaacgttattattgaggagagccagccccagaagatcaagatgctgcttgagaagttcgtcgaagaatgcaagttccctcctgtcccagatgcgatttgttgttatcagaagtgtcatggatactctaagatacaaatctacatcactgatccagactttaagggctttattcgcataagctgctgtcagtattgcaaaattgaatttcacatgaactgctggaagaaactgaaaactactacctttaatgataagattgataaggacttcctgcaaggcatttgcctaactccagactgtgagggcgttattagtaagatcattatattctcttccgggggtgaggtgaagtgtgaattcgagcacaaagttattaaagaaaaggtgcccccacgccctatcctcaaacagaaatgctcaagcctcgagaaacttcgactcaaggaagacaaaaagctaaagagaaagattcagaagaaggaggctaaaaaactcgctcaggagcgcatggaggaggatcttcgcgaatccaatcctccaaagaacgaagaacaaaaggagaccgtcgataatgtacagcgctgtcagtttctggacgacagaattttgcagtgtattaagcagtatgcagataaaatcaaaagcggaatacagaatacggcaatgctgctgaaggaactgctctcttggaaggtgttatctacagaggactacaccacatgcttttcgtccagaaactttcttaacgaagctgtggactacgtaatcaggcatctgatacaggaaaacaacagggtgaagactcggattttcctgcatgtgctgtctgaactcaaagaagtggagcccaaactcgcagcttggatacagaagttaaacagcttcggcatgagtctttacatccctgagcagtag

SEQ ID NO: 243872 - DNA, 1842 bp, synthetic construct
  misc_feature 1..1842: note = Description of Artificial Sequence: Synthetic coding sequence
  source 1..1842: mol_type = other DNA
atggatgccgtcctggcatgcagacttcgcggtagaggaaaccgcgtggcggctttacgccctcgtccaagacctggaggcagcgcgggaccgtcaccctttgccctcctctgcgctggcctctcacctgaacccagagctggagttggaagtgagtttcccgcttggtttctggggggaagcagccagcgccgaaatatggcccttctgggctcccgcgctgagcttgaggccgacgaggacgtgttcgaggacgccttggaaaccatctccatggctaaagagagcatgtatcatgccctggggtacagcacaattgttgtgctccaagccgtgttgacctttgagcaacaggacattcagaatggaatttctgctatgaaggacgcactgcagacatgccagaagtaccggaagaagtatacagtagtagaatccttttcatcattactgtcacgaggaagcctggagcaactcagcgaggaagagatgcacgccgaaatctgctacgcagagtgtcttctgcaaaaagcggcattaacattcgtccaggacgagaatatgattaattttatcaaaggaggcctcaaaatacgcactagctatcagatttacaaggagtgcctgagtatcctgcatgagatccaaaaaaataagctgcagcaggagtttttttatgagtttgaggggggagtgaaactggggtctggagccttcaaccttatgctctcactgctcccagccaggatcattaggctactcgagttcattggcttctctggaaatagagagcttggtttattacaattaagggagggcgctagtggaagatcgatgcgctccgccttatgttgcctgactatcctggccttccatacttatatatctttaatcctgggaaccggagaggtaaatgtcgcggaagccgaacgtctcttggctccgtttctgcagcagtttccaaatgggtcccttgtcctgttttatcacgccaggattgagctgctcaaggggaatcttgaggaggctcaggaagttttccagaaatgcattagtgtccaggaggagtggaagcaatttcaccatctgtgctattgggaactgatgtggatcaacgtatttcagcagaattggatgcaggcttactactactcagaccttctctgtaaggagtcaaaatggtctaaggctacctatgtgtttctcaaagccgctatattgtccatgctgcctgaggaggacgttgtggctactaacgagaatgtggttaccctgtttcgtcaggtcgattccctgaaacagcggatcgcaggtaaatcgatccctaccgaaaagtttgctgtgcggaaagcgagaaggtactctgcttctctgcccgcacccgtgaagctgatcttaccggctctggaaatgatgtatgtctggaacggatttagcattgttagcaagcgcaaagatctctccgagaatctccttgtgacagtagagaaggctgaggcagccctacaatctcagaactttaatagtttctccgtggacgatgaatgtctggtgaaattactgaaaggctgttgcttgaagaacttgcagaggcccctgcaagccgaactctgctacaaccatgtagtcgagtctgagaagctgctgaagtatgatcattacctagtcccttttacactcttcgagcttgcttcactatacaaatcccagggtgagattgataaagccatcaaattcctggaaactgctcgaaataactacaaggactatagtctagagtcacgactgcacttccgtattcaggcagccttgcacttatggcggaaaccaagcagcgattag

SEQ ID NO: 243873 - DNA, 1851 bp, synthetic construct
  misc_feature 1..1851: note = Description of Artificial Sequence: Synthetic coding sequence
  source 1..1851: mol_type = other DNA
atggcacttctgggatctcgcgctgagctggaagccgatgaagatgtgttcgaggatgcgcttgagaccatcagtatctcatcgcattccgacatggccactagctccctgcattttgcgtcatgtgacacccagcaagcacctcggcagcgaggggcttctaccgtgtcttcgagtagcagtactaaggtggacctgaagagcggcttggaggagtgtgcagtggctttgaatttgtttctcagtaacaagtttacagatgctctggagctcttgcgcccatgggcaaaggaatcaatgtaccatgcacttggctactccacaatagtggtgctgcaggccgtgctcactttcgaacaacaagatattcagaacggaatctctgccatgaaagacgctctccaaacatgtcagaagtacaggaagaagtacaccgttgtcgagagtttctctagcctcctctctcggggaagcctggagcagctctccgaggaagagatgcatgccgagatttgttacgccgaatgtctgctccagaaggcagcccttacgtttgtccaggatgagaacatgattaatttcatcaaaggaggtctgaaaatacgaacttcttaccaaatttacaaggagtgcttgtccatcttgcacgagatacaaaagaataagctacagcaagaatttttctatgagtttgaaggaggagtcaagctgggcagtggcgcattcaacctaatgttgtccctcctgcccgcaaggatcattagattgctggagtttatcggattctctggtaaccgagaactgggactgctgcagcttagagaaggggcatcaggacgaagcatgaggagcgctttatgctgtcttaccattttggccttccatacttatatatcgttgattctgggaactggcgaggtcaatgtggccgaggcagaaaggctcctcgctccctttctacagcagttccctaacgggtctcttgttctcttctaccatgcaagaatcgagctcctgaaaggcaaccttgaggaagcgcaagaagtctttcaaaaatgcattagcgttcaggaggagtggaaacaatttcatcacctgtgttactgggagttaatgtggatcaacgtatttcagcagaactggatgcaggcatattattactcagatttactgtgcaaggagagcaagtggtccaaggcgacttacgttttcctgaaggccgcaatcttgtccatgctgcccgaggaagatgttgtggccaccaatgagaacgttgtcactctttttaggcaggtagacagtctcaagcaaagaatcgccggtaagtctatcccaacggaaaaattcgcagtcaggaaggcacgcaggtattcagcctccctgccagctccagttaagcttattctcccagctttagagatgatgtatgtgtggaatggattttctatcgtgagcaaaagaaaggaccttagtgagaacctgctagttaccgtggaaaaggcagaagcggctctgcagtctcagaattttaactctttctcagtggatgacgaatgcttggttaaattattgaaaggatgctgtcttaagaatctgcagcggccactccaagctgaattatgctataaccacgtcgtggaaagcgaaaagctgctgaaatatgaccattatctggtgcctttcacactgttcgaactcgcaagcctatacaaatcgcagggagagatagataaggccattaaattcctagagaccgccaggaacaattataaggactactccctggagtcaagactccactttcgaatccaggccgctttgcacttgtggcggaagccctcctctgattag

SEQ ID NO: 243874 - DNA, 2010 bp, synthetic construct
  misc_feature 1..2010: note = Description of Artificial Sequence: Synthetic coding sequence
  source 1..2010: mol_type = other DNA
atggatgctgtcctggcttgtcgcttgagaggcaggggcaaccgcgtggcagctctacgcccacgtccccgacccggagggtcggcgggacctagtccattcgccctgctgtgtgcaggactgtcgcccgaacccagggcaggggtagggtctgaatttccagcctggtttttgggcggaagtagtcaacgcagaaatatggctttgcttgggagcagagctgagctagaagcagatgaagacgtgtttgaggacgctctggaaacgataagcatttcctcccattcagatatggccaccagctccctgcacttcgcctcttgtgacacgcagcaggcccctcggcagcgcggagcgagtactgtaagtagctcatcttccaccaaagtcgatctcaaatccgggctcgaggaatgcgcagtagctttaaacttgtttctatcaaataaattcactgacgcattggagctgttgaggccctgggcaaaagaatcaatgtaccacgctctggggtactccactatagtggtgctccaggcagtcttgaccttcgagcagcaggacattcaaaatggtatcagtgctatgaaagatgctctccagacctgccaaaagtaccggaagaaatatacagtggtggagtcattctcctctttactgagtcggggatccctggagcaactgagcgaggaagagatgcatgctgaaatctgctatgcagaatgcctgctacaaaaggcggctctgacatttgtccaagacgagaacatgataaatttcatcaaagggggactgaagataaggacgtcttaccagatctacaaagagtgtctatcgatcctgcacgaaatacagaaaaacaagctgcagcaggaattcttctacgaattcgaggggggagtgaaactcggcagcggggcattcaatcttatgttatccttgctgcctgctagaatcatccgacttctcgagttcatcggttttagtggaaacagggagctgggcctcctacaactgagggagggggcatctggtcgttctatgcgcagcgccctctgttgccttactattttagccttccatacatatatctcactcatattaggcaccggcgaggtgaatgtggctgaggccgaacgcctcctggccccatttttgcaacagttccctaacgtgaggtcagttttccaatctgctcaggaagtattccaaaaatgtattagcgtgcaggaagagtggaaacagttccaccacctgtgctattgggagctgatgtggattaatgttttccagcagaactggatgcaggcctactattattccgacctgttgtgtaaggagagcaagtggtctaaggccacctatgtttttctgaaagctgccattctaagtatgcttccagaggaggatgtcgtcgcaacaaacgaaaacgtcgtgactttgttccgacaggtggacagcctgaaacagcgaatcgccggtaagtcaattccgacagagaaattcgccgtccggaaggcgaggcgttacagcgcatcgctgccagcacccgttaaactcatccttcctgctttggagatgatgtacgtgtggaacggattctcgatcgtatcaaaacggaaggacctgagtgaaaatttactggtgaccgtagaaaaggccgaagctgcgttgcagtcacagaattttaattctttctcggttgatgatgaatgtctggtgaagcttctaaaaggctgctgcctgaaaaatctgcagagacctctccaggccgagctttgctacaaccacgtggttgaatccgaaaagctacttaagtacgatcactatcttgtgcctttcactttatttgaactggctagcctttataagtctcaaggcgaaattgacaaggccatcaaatttttggagacggcccgaaataattacaaagattacagtctagaatcccgattgcacttccggattcaggctgcccttcacctctggcgaaagccgtcatctgactag

SEQ ID NO: 243875 - DNA, 2049 bp, synthetic construct
  misc_feature 1..2049: note = Description of Artificial Sequence: Synthetic coding sequence
  source 1..2049: mol_type = other DNA
atggacgccgttctcgcatgccgcttgcgaggtcgcggaaacagagtggcggcactcagacctcggccacgacctggcggaagcgcaggcccatcgcctttcgcgttactgtgcgccggtctttctcccgaacccagagctggcgtgggcagcgagttccctgcatggtttttgggcggaagctcgcagaggcggaacatggccctgctgggcagccgggctgagctcgaggctgacgaggacgtttttgaagatgccctcgagactatatctattagtagtcactctgacatggctacctctagcctgcacttcgcctcctgcgacacacagcaggcccctcggcagcggggtgcctccacagtttcgagctcaagctcgacaaaggtggacttgaagagcgggctggaagagtgtgccgtggcgctaaacctcttcttatctaataagttcacggacgcgctggaactgcttagaccctgggccaaagagtcaatgtatcatgcccttgggtactcaacgatcgtcgtgcttcaggccgtgttgacattcgaacaacaggatattcagaatggcatcagcgccatgaaggacgctctacaaacctgccaaaaatatcgcaagaaatacactgtggtcgaaagctttagctcacttctgtccagaggatccctcgagcagctctcagaggaggaaatgcatgccgagatctgctacgcagagtgcctccttcaaaaggcggcacttactttcgtgcaagacgaaaacatgataaatttcattaagggagggctaaagatcagaacctcatatcaaatttacaaggaatgcctttcaatattacacgaaattcagaagaataagctgcagcaggaatttttctatgaattcgagggaggggtaaaactcggcagcggagcttttaatctgatgctctctctgctgcctgccaggatcattcggcttctggagttcatcggctttagtgggaacagggagctgggcctgctgcagttgagggaaggagctagtgggcgtagcatgcgtagtgcactgtgctgtctgaccattttggcgttccacacttacattagcctgattctgggtactggagaagtgaacgtggccgaggctgagcgactgctggcaccattcctgcagcagtttccaaatggctctctcgttttgttttaccacgctaggatagaactccttaagggcaacctggaggaggcacaagaagtgttccagaaatgcatttcagtgcaggaggaatggaagcagtttcaccacctctgctattgggagctgatgtggatcaacgtgttccagcagaattggatgcaggcctactactattcggatctcctgtgcaaggagtcaaagtggtccaaggcaacgtacgtgttcctgaaggccgctattctgtcgatgctgcccgaggaggacgtggtggccacaaatgaaaacgttgttacccttttcagacaagttgattcattgaagcagaggatagcaggtaagtcgatccccaccgaaaaatttgcagtgcggaaggcgaggcgctactcagcttctctcccggcaccagtgaagcttatactgcccgcactggaaatgatgtatgtgtggaatggcttctccatagtcagtaagcggaaggatctgagtgaaaacctgctcgtgacggtcgaaaaagccgaagcagctttacagtcacaaaatttcaacagctttagcgtcgatgatgaatgcctggtcaagctgctaaaagggtgctgtctgaagaacctgcagaggcctctgcaggctgagctgtgttacaaccacgttgtggaatcagaaaagctgttgaaatacgatcattaccttgttcccttcacactcttcgaacttgcatccctgtataaatcccagggcgaaatcgataaagcgattaaatttctcgagaccgccagaaacaactataaagattattctctcgagtccaggctccattttaggatccaggcagcgctgcacctgtggcggaaaccttccagcgactag

SEQ ID NO: 243876 - DNA, 585 bp, synthetic construct
  misc_feature 1..585: note = Description of Artificial Sequence: Synthetic coding sequence
  source 1..585: mol_type = other DNA
atggccttactggggagcagagcagagctcgaagccgacgaagacgtcttcgaggatgcactcgagacaatcagtatctcctcacattccgacatggcgacttcttccttgcattttgccagttgcgacactcagcaagctccacggcaacgcggagccagcaccgtatcttcgagctccagcacaaaggtagacctcaaaagcgggctggaggagtgcgcagtggcgttgaatctgtttctgagtaataagtttactgatgctttggagctcttgagaccatgggctaaagagtcgatgtaccacgcgctcgggtactccacaattgtcgtattgcaagcggtgttaactttcgagcagcaagacatccaaaatggaataagtgctatgaaagacgctctccagacatgtcagaaatatcgcaaaaagtacacagttgtcgaatcctttagctctcttctaagcaggggcagcctggagcagctgtcagaggaggagatgcatgcggagatttgctacgctgagtgcctgttacagaaggccgctcttaccttcgttcagagaatgtcattctaccccgcatag

SEQ ID NO: 243877 - DNA, 1164 bp, synthetic construct
  misc_feature 1..1164: note = Description of Artificial Sequence: Synthetic coding sequence
  source 1..1164: mol_type = other DNA
atggagcagccaggacaggaccccaccagtgatgatgtaatggacagcttccttgagaagtttcagtctcagccatatcggggaggtttccacgaagaccagtgggaaaaagagtttgagaaggtgcccctctttatgagtcgcgctccttctgaaatcgacccccgtgaaaaccccgaccttgcatgcttgcagtctattatcttcgacgaagagaggtcccctgaggaacaagccaagacctacaaggacgagggcaatgattattttaaggaaaaagattacaaaaaggccgtgatatcctacactgagggactgaaaaaaaaatgtgccgaccccgacctgaatgcagtgctatacacgaaccgcgctgctgcgcagtattatctgggaaattttcgaagcgcacttaacgatgttaccgccgcacgaaagctgaagccatgccacctgaaggcaattattaggggtgcactttgccacctggaactcaagcactttgccgaggccgtgaattggtgcgatgaaggtctacagatagatgcaaaagagaaaaagcttttggagatgagggccaaagcggacaaactgaaaaggatcgagcagcgggatgttagaaaggccaacctaaaggagaaaaaggagaggaatcaaaacgaagccctgctccaggccatcaaagcccgaaacattcggctcagcgaggcagcctgcgaagatgaagacagcgctagcgaagggctgggtgagctgtttctggatgggctgagcaccgaaaacccacacggcgctcggttgtctcttgacggccagggaagactgtcctggccagtgttgttcttatatcctgaatacgctcagagtgactttatttctgcttttcatgaagatagcaggttcattgatcacttgatggtgatgtttggcgagaccccaagctgggacctcgagcagaagtattgccctgacaacttagaggtctacttcgaggacgaagaccgtgctgagctgtaccgcgttcctgctaagagcaccctgctccaggtgcttcagcatcagaggtatttcgtcaaggccctgacaccggcatttttagtctgtgtcggaagttcccccttttgcaaaaatttcctgaggggcaggaaggtctatcaaataagatag

SEQ ID NO: 243878 - DNA, 1515 bp, synthetic construct
  misc_feature 1..1515: note = Description of Artificial Sequence: Synthetic coding sequence
  source 1..1515: mol_type = other DNA
atggccacgagagatgtggtcctgtcaagagtccccgaacaggaggaagaccgcacagtttcactgcaaaacgctgctgcaatctatgacctgctttcaattacactgggacgtagaggccagtacgtaatgttgagcgagtgcttagaaagggccatgaagtttgccttcggggagttccatctctggtaccaggtcgcactgagcatggtagcctgtggaaagtccgcctacgctgtctctcttctgcgggagtgcgtgaagctacgtcccagtgatccaaccgttccgctgatggctgctaaggtgtgtattggttccttgaggtggttagaggaggcggagcacttcgccatgatggttatctcgctaggtgaagaggccggagagttcctccccaaagggtacctcgccctgggcctgacctattctttacaggcgacagacgccacactgaaatcaaaacaggacgagctgcatcggaaggctctccagaccctggagagggctcaacagctggccccttcagacccccaggtaatcctctacgtatcactgcagctcgcactggtgagacagatctcaagcgcgatggagcagctacaagaggccctgaaagtgagaaaagacgacgctcacgcgctgcatttgctagccctgctgttctccgcccagaagcatcaccagcatgccctagacgtggtcaacatggccattactgagcaccccgagaatttcaacctcatgtttactaaggtcaagctggagcaagtcctgaagggcccagaagaagcactggttacatgccggcaggtacttcggctctggcagaccctttattcattttcacaactaggcggactggagaaggatggaagcttcggtgaagggctgactatgaaaaaacaaagtggcatgcatctgaccctacctgatgctcacgacgccgacagtggttctcgcagagcttcctctattgctgcgagccgcttggaagaggccatgagcgagttgacaatgccttcctccgtcctcaagcagggcccaatgcaactgtggacgactctcgaacagatctggctgcaagctgctgaactttttatggagcagcagcacctcaaggaggccggattctgtattcaagaagccgctggcttatttcctacctcgcacagcgtcctatatatgcgaggaaggttagccgaggtgaaaggcaatctggaagaagccaaacaactgtataaagaggctctgactgtgaatcccgatggcgttcgcatcatgcacagcctcggcctgatgctcagcaggctaggacacaaatccctcgcgcaaaaggtcctacgcgatgccgttgagcgacagagcacctgtcatgaagcctggcagggcctgggagaagtgctgcaggcgcagggccaaaacgaagctgccgtcgactgtttcctcaccgcactcgagcttgaggcaagtagtccagtgctgcctttcagcattatccctcgtgaactgtag

SEQ ID NO: 243879 - DNA, 2577 bp, synthetic construct
  misc_feature 1..2577: note = Description of Artificial Sequence: Synthetic coding sequence
  source 1..2577: mol_type = other DNA
atggctgccaaaggagctcacggttcatatctcaaagtggagtcagaactggagagatgtagagcagagggtcactgggaccgcatgccagaacttgtgcgccagttgcagactcttagcatgcccggtggcggtgggaacaggagaggcagcccgagcgctgcattcactttccctgacaccgacgattttggcaaactcttacttgccgaggccctgctagagcagtgtctgaaggagaatcatgccaagataaaagattctatgccgttgctcgaaaaaaacgagccgaagatgtccgaggcgaaaaactaccttagctccatcttgaatcatggcagactaagcccacagtacatgtgtgaagccatgttgattctcggtaagttgcattatgtggagggatcgtaccgggacgcgataagtatgtatgctagagcagggattgacgatatgtcaatggagaataagccgctgtatcagatgcggttgctttccgaggcctttgtgatcaagggactgtcacttgaacgacttccaaacagcattgcctccagattccgtctgacggagcgggaggaggaagtgattacctgcttcgagcgcgcatcctggatcgcgcaggtttttctccaggaattggagaagaccacaaataactctaccagcaggcacctgaagggatgtcaccctcttgactacgaactgacatacttcctcgaggcagcgttgcagtccgcctacgtgaagaacctgaaaaagggaaacattgtaaagggcatgcgagaactccgggaagtactgaggacagtcgagacgaaagcaacccagaacttcaaggtgatggccgctaagcacctggccggagttttgctgcatagcctctccgaggagtgttactggagcccgctatctcatccccttccagagtttatgggaaaggaagagtcttcctttgccacccaggcactacgcaaacctcacctgtatgaaggggacaacctctattgcccaaaagacaacattgaggaggcactgcttctcctcctgatttccgaatctatggccacgcgcgacgtagttctgagtcgagttcccgaacaggaggaggatagaacagtcagcctccagaacgcggctgctatttatgacctgctgagtataacgctcgggaggcggggtcagtacgtgatgctctccgagtgtctagagagagccatgaagttcgcatttggagagttccatctgtggtatcaggttgctcttagcatggtggcatgcggcaagtcagcttatgcagtgtctctactccgcgagtgcgtgaaactgcggcctagcgaccccacagtgcccttgatggcagccaaggtgtgcataggttcccttcgttggttggaggaagctgagcacttcgcaatgatggttatctcactgggggaagaagctggcgaattcctgcctaaaggctaccttgccctggggctcacatatagcttgcaggcgacagatgcaacccttaagtcaaaacaggatgaactccatcgcaaagctctccagacacttgagagggcccagcagctggccccatccgatccccaagtgatcctctatgtaagtcttcagctcgctctcgttagacagattagctcggccatggagcagcttcaggaggcactcaaagtccggaaagacgacgcacacgccctccacctcctggcgctgctcttttccgctcagaaacaccaccagcatgctctcgatgtggttaacatggccatcaccgagcaccctgagaacttcaatctgatgtttacaaaagtaaagctcgagcaagtgttgaaagggccagaggaagcgctggttacatgcagacaggtattgcgcctctggcagacgctttactcattctcacagctgggcggactcgagaaagacggttcgtttggcgagggcctcaccatgaagaagcagtccggcatgcatttaactttgcctgacgcccatgatgccgatagcggttctcgccgagcttcctcaatcgccgctagccgcctggaagaggctatgagcgagctcaccatgccctcctccgtactcaagcagggcccaatgcagctgtggactaccctggaacagatctggctgcaagccgctgagctgtttatggagcagcaacacctcaaagaggcgggattttgcattcaggaagcggcaggccttttcccaacaagccactccgtgctgtatatgaggggacgccttgccgaagtaaaagggaatctggaagaggccaaacaactctataaagaagcattgactgttaacccagacggggtgaggataatgcatagcctcggcctaatgctgtccaggttaggccacaagagtcttgcacagaaggtgctgcgagatgccgtggaacgccagagtacatgccatgaagcttggcagggtttgggggaggtgctccaggcccaaggacagaacgaggctgccgtcgactgcttcctaaccgccctcgagctggaagcctctagccctgtgctcccattctccattatcccccgagaactgtag

SEQ ID NO: 243880 - DNA, 2058 bp, synthetic construct
  misc_feature 1..2058: note = Description of Artificial Sequence: Synthetic coding sequence
  source 1..2058: mol_type = other DNA
aaaaaaaagatcaatttcttcaaaaagccccacagcctgtccttaagaaagaaacgcgaagaggaggtgattacgtgctttgagcgcgctagttggatcgcccaggtttttttacaagaactggagaagacgaccaacaattctacgagccgtcacttgaaagggtgtcatcccctcgattatgaactgacctatttcctggaagccgctctacaatcagcatacgtgaagaatctaaagaaggggaacattgttaagggaatgagagaactccgcgaagtcctacgcacggtagaaaccaaagccactcagaatttcaaagtcatggcggcaaaacacttagccggagtcctgctccattccctgagcgaggagtgctactggagtccgcttagccacccattgccagagtttatgggtaaggaggaaagttccttcgccacacaggcacttcgaaagcctcacctttacgagggtgataatctctattgcccaaaggacaacattgaggaagcactcttactcctgcttatttctgagtcaatggccacccgggatgttgtgttaagccgggtacctgaacaggaggaagacaggacagtgagtcttcaaaatgccgctgcaatctacgatttgctgtcgatcaccctcggtaggcgtggtcagtatgttatgttgtcagaatgtctggagcgagcaatgaagtttgcattcggcgagtttcatttatggtaccaagtggctctcagcatggtggcctgtggcaaatctgcgtatgccgtaagcttgctcagagagtgtgtgaagttgaggcctagtgatccgactgttccgctgatggcagctaaagtgtgcattgggagcctgcgctggcttgaggaggcggagcactttgcgatgatggtgatctctcttggcgaagaagctggagagttcctgccaaaggggtacctcgccttgggcctcacctatagcttgcaggctactgacgccaccctgaagtctaagcaggatgagttgcacaggaaagcccttcagactcttgaacgtgcccagcagcttgccccatcggacccgcaggtgatcttatacgtgagcctgcaactggccctggttcgccagatttccagtgcgatggaacagctgcaggaggcgctcaaagtccgaaaggatgatgcacacgccctgcacctcctggccctgctcttttcagctcaaaagcaccatcagcacgccctggatgtggtgaatatggctatcactgagcatcccgaaaatttcaaccttatgtttaccaaggtaaagctggagcaagtgttaaagggtcctgaggaagccctggtgacctgtagacaggtgctccggctgtggcagacactttattccttctcacagctggggggactcgaaaaagatggtagctttggtgaaggactgactatgaaaaagcagagcggcatgcacctcacgctccctgatgcacatgacgctgactcgggctccagacgggctagctcaatcgccgcatcaaggcttgaagaggccatgtctgaactcactatgccaagctccgtcctgaaacagggcccaatgcagctgtggacgactttggagcaaatctggctccaagcggctgagttgttcatggaacagcaacacctgaaggaggcaggcttctgcattcaggaagcagcagggctcttcccaacctctcatagcgttctgtatatgaggggtaggcttgccgaggttaagggaaacctggaggaggcaaagcagttgtataaagaggctctgaccgtgaacccggatggagtgcgtatcatgcacagtttaggactgatgctgtcgaggctgggccataagagtctcgctcaaaaagttctgagggacgccgtagaaagacaatccacttgccatgaagcgtggcagggattgggcgaggtcttacaggcccaggggcagaacgaggcagcggtggactgtttcctgacagctttggagcttgaggcgtcttcgcccgtactccctttctctatcattcctcgggaactttag

SEQ ID NO: 243881 - DNA, 441 bp, synthetic construct
  misc_feature 1..441: note = Description of Artificial Sequence: Synthetic coding sequence
  source 1..441: mol_type = other DNA
atggctgccaagggtgcccatggatcctacctgaaagtggagtccgaactggagaggtgtcgagcagaggggcattgggacagaatgcctgagctagtcagacaactccagaccttaagtatgcccggaggcggtggaaataggagaggtagcccctccgctgcgttcaccttccccgacaccgatgattttggcaagctgttgctggcggaagctctgctggagcagtgcctcaaggagaatcacgcaaaaattaaagattctatgcctctacttgaaaagaatgagcctaagatgtcggaagcaaagaattatctgtcctcaattctcaatcacgggagactgtccggcttagctgttttgttgaggcttgtgagtaatagctgggctcaagccatcctactgctgcaaccacctgaggctttaggtctgcaggagtag

SEQ ID NO: 243882 - DNA, 1596 bp, synthetic construct
  misc_feature 1..1596: note = Description of Artificial Sequence: Synthetic coding sequence
  source 1..1596: mol_type = other DNA
atgagctcagaaatggagcccctcctgctagcctggtcctattttcggaggaggaagtttcagctgtgcgccgacctgtgtacccagatgttggaaaaaagtccttatgaccaggcagcctggatcctgaaagctcgcgctctgacagagatggtctatatcgatgagatagacgttgatcaggagggcattgccgagatgatgttggacgagaacgcgatagcacaggtaccaagaccgggaacttctctaaagctccctggcaccaaccagactggcggaccttcccaggccgtcagacctataacccaagccggtcggccaattaccggcttcctcaggccaagcacccaatcaggaaggccaggcacgatggagcaggccatccggacaccacgtactgcttatacagcccgaccaattacttcctccagtggacgcttcgtgagacttgggacagcatccatgcttaccagccccgatggaccatttatcaatctgtcacgtctgaatttaaccaagtattcgcaaaagcctaaactggcaaaggccctgtttgagtatattttccaccatgagaatgacgtgaagacaatccatctcgaggacgtggtgctccacttaggcatataccctttcctccttagaaataagaatcacattgagaagaatgccctagacctcgcagccttgtctaccgaacactcccagtataaagactggtggtggaaggtgcagattggtaaatgttattaccggctcggaatgtatcgagaagctgaaaagcaattcaaatcagccctgaagcagcaagagatggtcgacacattcctgtatctagcaaaagtctacgtttctctggatcagcccgttactgcactcaatctgttcaagcagggccttgacaagtttcccggtgaggtcaccctattatgtggcatcgctagaatttacgaagaaatgaacaacatgagtagcgccgctgaatactataaggaagtcctaaagcaggacaacacccacgtggaagcaattgcatgtatcggctccaaccacttctacagcgaccagcccgagattgccctgaggttctataggcgactgttgcagatgggtatttacaacggacagttattcaataatctggggctgtgttgtttttacgcgcaacaatacgacatgactctcacaagttttgagagagccttgagcctagccgagaacgaagaggaggccgcagatgtctggtataacctgggccatgtcgctgtaggcataggagacaccaacctggcccaccagtgctttcgcctggctttggttaacaataataaccacgccgaggcctataacaatctggccgtcctagagatgcgcaaaggtcacgttgaacaggctcgcgctctgctgcaaaccgcttcttctcttgccccacacatgtacgagccgcactttaacttcgctacaatctcagataaaatcggggatttacagagatcatacgtcgctgcgcagaagtctgaagctgccttccccgaccacgtggatacacagcatctgatcaagcagctgaggcagcattttgctatgttatag

SEQ ID NO: 243883 - DNA, 636 bp, synthetic construct
  misc_feature 1..636: note = Description of Artificial Sequence: Synthetic coding sequence
  source 1..636: mol_type = other DNA
atgagtagcgagatggaacccttgctgctggcgtggtcctattttaggcgaagaaagttccagttgtgtgctgacctctgcactcagatgctagagaaatcgccatacgaccagaaaattagttgggcttggtggcacgtccctgtgattcctgctacgtgggaagcggaggccggtgagcttctggagccaagaaaaagaagactccaacaggccgagattacccctctgtactcttccttggggaataagtcaaagactccttcacagaaagccgcatggatccttaaggcgagagctctcaccgaaatggtttatatagacgaaatagatgtggatcaggaggggatcgccgaaatgatgctggatgaaaatgccattgcccaggttcctaggcccggtacttcactgaaattacccggaactaaccaaaccggcggaccgagtcaagccgcaaatcacacaagttggaaaacacattacagatttccacaggctcaacacgccgaatggaaggcccgacattatggaaccggctatcagaacactcagaaccggttgcattctccaccttaccaccagcttctccgtaaaatctgccaggcgggaaatggcttccacgcatataaatcttag

SEQ ID NO: 243884 - DNA, 1518 bp, synthetic construct
  misc_feature 1..1518: note = Description of Artificial Sequence: Synthetic coding sequence
  source 1..1518: mol_type = other DNA
atgtcctccgaaatggagcctttactgctggcgtggtcttatttccgaagacgcaagttccagctgtgtgcggacctatgtacacaaatgctagaaaaaagtccctacgaccaggccgcttggattctgaaagctcgtgccttaaccgagatggtctatattgatgaaatcgacgtggaccaagaaggaattgctgagatgatgctcgatgagaatgctatcgcccaggtgcctcgacctggaacatccctaaagctgccaggcaccaaccagaccggtgggcctagccaagcagttcgaccaattacacaggcgggacgaccgattaccggatttttgcgtcctagtacgcagtctggtcggcctggtaccatggaacaggcaatccgaacccctaggactgcatatactgccagaccaattacctcttcctctggaagattcgtccgcctggggaccgcatctatgttaacatccccagacggcccattcattaacctttccagactaaacctgaccaaatatagtcagaagcctaagttagctaaagccttgtttgaatatatattccaccatgagaacgatgttaaaacagccctcgatctcgcggctctgtctaccgagcatagtcagtacaaagattggtggtggaaggtgcagattgggaagtgttattatagacttggtatgtacagagaggcagaaaagcagtttaagagtgcccttaagcagcaagagatggtggatacatttttgtacctggccaaagtctacgtctcattggatcaacctgttaccgctttgaatctgtttaagcaaggcttggacaagttcccaggtgaagtgactctgttatgcggaatcgctcgcatctacgaagagatgaacaacatgagcagtgccgcagaatattacaaagaggtgctgaagcaggacaatacgcatgtcgaggcaatcgcttgtatcggtagtaatcacttttacagcgatcagcctgaaatcgctctccgcttttatagacggttgttgcagatgggtatctacaatggccaactttttaacaatctggggctttgttgtttctatgcacagcagtatgacatgaccttgaccagtttcgagagagcactctcactcgctgaaaatgaggaagaagccgcagatgtttggtacaacctggggcatgtggccgtgggtatcggtgataccaacttagcccaccagtgttttagattggccttggttaacaacaacaatcacgccgaggcctacaacaacctggccgtgctcgagatgcgtaagggccacgtcgagcaagctagggcccttctgcagacagcttcaagtctcgcccctcacatgtacgaaccacatttcaattttgcaaccatctcagacaaaataggtgaccttcagcggtcatacgtggccgctcaaaaatcggaggctgcatttccggaccatgttgatacccagcacttgattaaacagcttcgccagcatttcgccatgttatag

SEQ ID NO: 243885 - DNA, 1428 bp, synthetic construct
  misc_feature 1..1428: note = Description of Artificial Sequence: Synthetic coding sequence
  source 1..1428: mol_type = other DNA
atgtcttccgaaatggaaccgctgcttctggcctggagctatttcaggcgcagaaaattccagctctgcgctgacctttgtacgcagatgctggagaaatcgccgtatgaccaagccgcttggattctgaaggcccgagcactgactgaaatggtatacattgacgagatcgacgttgatcaagaggggattgccgaaatgatgctggacgaaaatgctattgctcaggttccccgacccggtacaagtctgaagcttcctggaaccaaccaaacgggtggcccttctcaggcggtgagaccaattactcaggcaggccgacctataaccgggttcctccgccctagtactcaaagtggtcggcctggcacaatggaacaggccatccgcacaccaaggacggcctacactgctcgccctatcacctcatcttcaggtaggttcgtgcgcctcgggacagccctgttcgaatacattttccaccacgagaatgatgtgaaaacggccctggatctagctgctctgtcaacagagcacagccagtataaagattggtggtggaaagtccagatcggcaagtgctattatagattgggaatgtacagggaggccgaaaagcagtttaaatctgctctgaagcaacaggagatggttgatacgttcctctaccttgcaaaagtgtacgtttcgctcgatcagcctgtaacagccctgaatctttttaaacagggtctggataagttcccaggtgaggtcacattgttatgtggcattgcacgaatctatgaagagatgaacaacatgagcagcgcagctgagtactacaaagaagtcctaaaacaagacaacacacacgttgaagcaatagcatgtataggaagtaatcacttttacagcgaccagcccgagatagctctgcgattctacaggcgattgctacaaatgggtatctacaacgggcagctctttaacaacctggggctgtgctgcttttacgctcagcagtatgatatgaccctgacttcgttcgaacgtgctctgtccttagccgagaatgaagaggaggcggcagacgtctggtataaccttggccatgtcgccgtcggaattggggacaccaacctggctcatcagtgttttcggttggcactggtaaacaataacaatcacgccgaagcttacaacaaccttgctgtcctggaaatgaggaagggtcacgtcgagcaggcccgtgcccttctccagaccgccagctctcttgcccctcacatgtacgagccgcactttaatttcgcaaccatctcagacaagatcggcgacctgcagagatcctacgtggcggcacagaaatcagaggccgcattccctgaccatgttgatacccagcacctgatcaaacagttgaggcaacacttcgcgatgctctag

SEQ ID NO: 243886 - DNA, 753 bp, synthetic construct
  misc_feature 1..753: note = Description of Artificial Sequence: Synthetic coding sequence
  source 1..753: mol_type = other DNA
atgtcatcggaaatggagccgctgcttcttgcttggtcttatttccgcaggagaaagtttcagctatgcgccgacctctgcacgcagatgctggaaaagagcccatacgaccaagagatgaataacatgtcctccgccgctgaatactacaaggaagtgctgaagcaggataacacacacgtggaggccattgcgtgcatcggcagcaatcacttctactcagatcagcccgaaatcgcgttacgtttctatcggcgtttattacagatgggaatctataatggccagctgtttaataacctgggactctgttgtttttacgctcaacagtacgatatgaccctaacttcatttgagcgagctttatctctcgccgaaaatgaggaggaagctgctgacgtgtggtacaatcttggccatgtggcggtagggataggagatactaaccttgcgcaccaatgttttcggctggcactcgtgaacaacaataaccatgccgaagcctacaataacctggccgtcctggaaatgcgcaagggccacgtggaacaggcccgagcattactacagaccgcgagcagtctggcgcctcatatgtacgagccacatttcaactttgcaacaatttcagataaaatcggcgacctgcagaggtcttacgtggcagcacagaaatccgaagccgcttttcctgaccacgtagatacacagcatctcattaaacagctgaggcaacactttgccatgttatag

SEQ ID NO: 243887 - DNA, 954 bp, synthetic construct
  misc_feature 1..954: note = Description of Artificial Sequence: Synthetic coding sequence
  source 1..954: mol_type = other DNA
atgatcctgtcctacgaagtgattctgcatgctctcgaccttgccgcactctcaaccgaacatagtcaatacaaggactggtggtggaaagtccagatcggtaaatgttattataggttgggaatgtaccgagaagctgagaagcagtttaagagtgcactcaaacagcaggaaatggtcgatactttcttgtacctagccaaggtgtatgtgtcgctggaccagcccgtgaccgctctaaacctttttaaacaggggctggacaaattcccaggcgaagtcaccctgctgtgcggcatcgctagaatttacgaagaaatgaacaatatgagctcagctgcagagtattataaggaagttcttaaacaggacaacactcatgtcgaagcgatcgcctgcattggttccaaccatttctactctgatcagcccgagatcgctttgcgcttttaccggagattgctgcaaatgggaatctataatgggcaactgttcaataacttaggcctttgctgtttctacgctcaacaatatgacatgacccttacgtctttcgagagggccctgtccctcgccgaaaatgaggaggaagcagcagatgtatggtataatttggggcacgtggccgtcggaatcggagataccaatctcgctcatcaatgcttccgcttggccttagtcaataataacaaccacgctgaagcatacaataaccttgcagtgctggagatgcggaaagggcacgtcgagcaagctagggctttgctgcagaccgccagctcactagctccccatatgtacgagcctcacttcaacttcgcaactatttctgacaagattggcgatttgcagcgttcatacgtcgccgcacagaagagtgaggcagcttttcctgatcacgtagatacacagcatcttattaagcagctacgtcagcatttcgcgatgctgtag

SEQ ID NO: 243888 - DNA, 1548 bp, synthetic construct
  misc_feature 1..1548: note = Description of Artificial Sequence: Synthetic coding sequence
  source 1..1548: mol_type = other DNA
atgtctagcgaaatggagcccttactgttggcgtggagctatttccggaggcgcaaatttcagctgtgcgctgacctgtgcacccagatgctcgagaaaagcccttacgaccaggagcctgaccctgaactgccagttcaccaggcagcgtggatcctgaaagccagagctctcaccgaaatggtgtacatagatgaaattgacgtggaccaggaaggcattgctgagatgatgctcgatgagaacgcaatcgcacaagtgccgcgaccaggtacatccctgaaactgcctgggaccaatcaaacaggaggcccatctcaggccgtgagaccgataacccaggcgggtcggcctataaccggcttccttcgaccctctacacagtccggccgaccaggtaccatggagcaagcaataagaactcccagaactgcttacacagcccgacccataacaagcagctctggcagatttgttagactgggcaccgctagcatgctcactagcccagacggaccatttatcaacctcagtagactaaaccttactaagtatagccaaaagccaaagctcgccaaagccttgtttgaatacattttccaccatgaaaacgacgtgaaaaccgcactagacctggccgctctgagtacagaacatagccaatacaaagactggtggtggaaggtacagatcggtaagtgttactaccgattgggaatgtaccgcgaggccgaaaaacagtttaaaagcgccctaaaacagcaggagatggtggatacttttctttacctggccaaagtctacgtgtctctggaccagcctgtaaccgcacttaacctttttaagcagggacttgataaatttcccggagaagtgacactcctgtgcggaatagccagaatatatgaggaaatgaacaacatgagtagcgccgctgagtactacaaggaggttctcaaacaggacaatactcacgttgaggcgatcgcgtgcattggctctaaccacttttattccgaccagccagagatcgcactacggttctacaggcgtcttctccagatgggaatttacaatggtcaactgttcaataacctcgggctctgctgcttttacgcacagcaatatgatatgaccctaacaagctttgaacgtgcattaagcctggccgaaaatgaggaggaagcagctgacgtgtggtataatctcggtcacgttgcggtcggcataggagacactaatctcgcccaccagtgctttcggctcgcattggtgaacaacaataaccacgcagaggcatataacaatctagccgtactagaaatgcgaaagggacacgttgagcaagccagagccctgctacagacagcatccagcttggcccctcacatgtatgaacctcactttaatttcgctacgatttctgacaaaattggcgatctccaaaggtcttacgtggcagctcagaaatccgaggccgctttcccagaccacgtcgacacccagcacttaatcaagcagctcagacagcacttcgccatgctgtag

SEQ ID NO: 243889 - DNA, 831 bp, synthetic construct
  misc_feature 1..831: note = Description of Artificial Sequence: Synthetic coding sequence
  source 1..831: mol_type = other DNA
atgtaccgggaagctgagaagcaattcaaatccgctctgaaacaacaagaaatggttgatacctttctctatctagcgaaggtatacgtctccctggatcagcctgtgacagcgctgaacctgttcaagcagggactggacaaattccccggtgaagttacgctgttgtgcggtattgctaggatatatgaagagatgaataatatgagttccgcagcggagtattataaagaagtactgaagcaggacaacacgcacgtggaggccatcgcatgtataggcagcaaccatttttacagtgaccagcctgagatcgcgctccgtttctaccggaggctgctgcagatgggcatctacaacgggcagctcttcaacaacctgggcctgtgctgcttttacgcgcagcaatacgacatgacccttacctctttcgagagggcattgtctctcgccgagaatgaggaggaggcagctgatgtctggtacaatctggggcatgtggccgtagggattggcgatacaaatctggcccatcagtgctttaggttggccttagtcaacaacaacaaccacgccgaagcctacaacaacctggccgtgttagagatgcgcaaagggcacgtagagcaagctcgcgctcttctgcagaccgcatcaagtctggcccctcacatgtatgaaccgcactttaacttcgccacgatctcagacaagattggtgacttacagcgatcttatgtcgccgctcagaagtcagaggcggcattcccagatcacgttgatacccaacacctgatcaagcaactcagacagcacttcgcaatgctgtag

SEQ ID NO: 243890 - DNA, 348 bp, synthetic construct
  misc_feature 1..348: note = Description of Artificial Sequence: Synthetic coding sequence
  source 1..348: mol_type = other DNA
atgtcatcgcctagtagcccatttcgtgagcagtcgttcttgtgtgctgcgggtgatgccggtgaagaatcccgcgtacaggtattgaagaacgaggttcgccgtgggtcgcccgtgctcctgggctgggtagagcaagcctacgccgacaaatgtgtctgtgggccttcagccccacctgcccctacccctccaagtctgtcccagcgcgtgatgtgcaatgatcttttcaaagtcaacccgttccaattgcagcagttccgcgctgatccgagtacggcctctctcctgctttgcccgggaggtttagatcataagctaaacttacgcggtaaggcctggggatag

SEQ ID NO: 243891 - DNA, 348 bp, synthetic construct
  misc_feature 1..348: note = Description of Artificial Sequence: Synthetic coding sequence
  source 1..348: mol_type = other DNA
atgagttcgcctagctcaccttttcgggagcaaagtttcctctgcgccgcaggcgatgctggagaagaaagtcgcgtccaggtgctcaagaatgaggtgcgcaggggatctcctgtcctgctgggctgggtggaacaggcctacgcagataagtgtgtctgcggaccctctgcaccgccagcccctacccccccaagcctcagtcaaagggtcatgtgtaatgacctgttcaaggtcaatccctttcagttacagcagtttagggcagacccaagtaccgcaagtcttttactgtgtccgggtggcctggaccacaagttgaatctccgcggtaaagcctggggctag

SEQ ID NO: 243892 - DNA, 357 bp, synthetic construct
  misc_feature 1..357: note = Description of Artificial Sequence: Synthetic coding sequence
  source 1..357: mol_type = other DNA
atggaagggggagcttacggtgccggtaaggcaggcggagcatttgacccttatacccttgttagacaaccacatactatcctcagagttgtatcttggctgttctccattgtcgtgttcggctcgattgtgaatgaggggtatctcaacagtgcaagtgagggggaagagttctgcatctacaacaggaacccaaatgcttgctcctacggcgtggctgtcggcgtgctggcctttctgacgtgtttgttgtacttagcgctggacgtttacttcccccagatatcatccgtgaaagaccgcaagaaggcagtgttatcagacatcggagtgtctgcatgggaaatgcattcttag

SEQ ID NO: 243893 - DNA, 1389 bp, synthetic construct
  misc_feature 1..1389: note = Description of Artificial Sequence: Synthetic coding sequence
  source 1..1389: mol_type = other DNA
atggccgcacagagacggagtcttctccagtccgagcagcaaccctcctggaccgatgatctccccctgtgccacttaagcggcgtaggaagcgcgagtaacaggtcatacagcgccgatggaaagggcacagagtcccaccctccggaagacagttggctcaaattccgcagtgagaataattgcttcctgtatggtgtgtttaatggctacgacggcaatcgggttaccaatttcgtcgcacagcggctctctgcggaacttcttctgggacagctcaacgcagagcatgcagaggctgacgtgaggcgtgtcctattgcaggcctttgacgtggttgagcggtctttcctggagtccattgatgatgctctggccgagaaagctagcctccagtctcagttgccagagggagtccctcagcaccaactgcctccacagtaccagaaaatcctggaacgactgaagaccttggaaagagagatctctggaggcgcaatggccgtggtagctgtcttgctgaataacaagctgtacgtagcaaacgtggggacgaaccgagctctcttatgcaagagcaccgtagatggcctgcaagtcacacaactgaacgtggaccatacgaccgagaatgaggatgaattgttcaggctgtcccaacttggcctggatgccggaaaaattaaacaggtaggaatcatatgcggacaggagtcgactcgtcgtattggcgactacaaagtaaaatatggttacaccgatattgatcttttatccgccgctaagtctaagcctatcattgccgaacccgaaatacacggggctcagcctctagatggcgttaccgggttcctggtgctgatgtcagagggcctgtacaaagccctagaagccgcacacggcccagggcaggctaatcaagagatagccgctatgatagatacggagttcgccaaacagacgtcactcgacgctgtggcccaggccgtggtggatagagtgaagcgaattcactcagatacattcgcatctggtggtgagcgggctcgattctgcccgagacacgaggatatgactctgctggttaggaattttgggtaccctcttggggagatgtcccagcccacccctagcccagctcccgctgctgggggtagggtctatcctgtgtcagtcccctatagcagcgctcagtcgacgagtaagactagtgttaccctctcattggttatgccctcccaagggcaaatggtgaacggcgcacacagtgcgtctacactcgacgaggccacgcccaccctgacaaaggatccttctaggcccgcatccgatttaaccgccatccctcagtgccagctcaaccttctgggtagtctgacaccaggctag

SEQ ID NO: 243894 - DNA, 2082 bp, synthetic construct
  misc_feature 1..2082: note = Description of Artificial Sequence: Synthetic coding sequence
  source 1..2082: mol_type = other DNA
atggctcaaggctcgcatcagatcgatttccaggtcctgcacgacctacgccagaaatttccggaagttcctgaggttgtcgtgagtagatgcatgctccagaacaataataatctcgacgcttgttgcgctgtgctgagccaggagtccacacgctacctatatggagagggagaccttaactttagcgatgacagcggtatatccgggttgcggaatcatatgacttccctgaatttagacctccagtcacaaaatatttatcaccatggaagagagggaagccgtatgaacggatctaggaccctcactcactcgattagtgacggacagctgcaggggggtcagtccaactctgagctcttccaacaagagccgcagactgcaccggcacaggtgccacagggcttcaacgtctttggcatgtctagcagctctggtgcgtccaatagtgccccacacctgggatttcacttagggagtaagggaaccagtagcctgtcccagcaaactcctcgctttaacccgatcatggtgacactggctcctaatatccaaactggcaggaacacccccacctctctccacatccatggggtgcctcctccggttctgaactcgccccaaggaaactctatatatattcgaccgtatatcactacccctggaggcacaactcgacagactcagcagcactccggctgggtgtcccagtttaatcctatgaatccgcaacaggtctaccaaccgagccaacccggtccctggacaacatgccctgccagcaacccactatctcacacctcttcgcagcagccaaatcagcagggccatcagactagccatgtatacatgccaatcagctcacctaccacgagtcagcctcccaccattcactcctctggatcgtcccagtcaagcgcgcattctcaatacaatatccagaatatcagcactggaccgcgtaaaaaccaaatagaaattaaactcgaacccccacagaggaacaactcatcaaagctccgaagttccggccctcgtacgtctagtacttctagttctgttaacagccagactctgaataggaaccagccaaccgtgtacatagcggcatctcctcctaatacagacgagttgatgtcccgctctcagccaaaggtgtatatcagtgccaatgcagcaacaggggatgaacaggttatgcggaatcagcccactctgttcatctctactaattcaggtgcctcagcagcctccaggaatatgagtgggcaggtgtcaatggggccagcctttattcaccaccaccctcccaagtcgcgagccataggcaacaattcagccacgagcccacgggtcgtggtcacccagcctaataccaaatacacctttaagataacagtttctcctaataaacctcctgctgtttcgcctggggttgttagccccaccttcgaattgacaaacctcctcaatcatcctgatcactacgtggaaaccgaaaacatacagcacctgaccgatcctacactggcacacgtggacagaatatctgaaactcgcaaactgtctatgggttctgacgacgcagcttatacccaggcattactagttcatcagaaagccagaatggagcgtctgcagcgggagctcgagattcaaaaaaagaaactggacaagctgaaatctgaagtgaatgagatggagaacaacctgacccggaggcggcttaaacggagcaacagcatcagccagattccttccctggaggaaatgcaacagctcagaagctgtaaccggcaattgcagatcgatattgactgtctgaccaaggaaatcgacctcttccaggcacgcggtcctcacttcaacccctccgccattcataacttctacgacaatattggttttgtcgggcctgtccccccaaaacctaaggaccagcggtcaatcattaagacacccaaaacacaggatacagaagatgacgaaggcgctcagtggaactgtacagcctgtactttcctgaaccaccctgccttaatacggtgcgagcagtgtgaaatgccacgccacttctag

SEQ ID NO: 243895 - DNA, 2082 bp, synthetic construct
  misc_feature 1..2082: note = Description of Artificial Sequence: Synthetic coding sequence
  source 1..2082: mol_type = other DNA
atggctcaggggagccaccagatagacttccaggttttgcacgaccttcgccagaagttccctgaagtgccagaggtggtcgtgtctcgatgtatgttacagaataataataacctggacgcttgttgcgctgttctttctcaggaatctacccggtacctgtacggggaaggcgatctgaactttagtgacgattctggcatttcaggcctccgtaatcatatgacttctctaaacctggacctgcagtcccagaatatctaccaccacggtcgggaggggagtagaatgaatggttcccggaccctgacccattcaatcagcgatggtcagctgcagggaggacagagcaattctgagttgttccagcaagaaccccagacagcaccagctcaggtcccccagggatttaatgtgttcgggatgtccagctccagtggggcatctaattcggccccacaccttggcttccacctgggatccaaaggtactagtagtctgagccagcagaccccacgtttcaaccctatcatggtgaccctggccccaaatatccagaccggacgtaacaccccaacaagccttcacattcacggcgtgccgccaccagtcctgaactctcctcaagggaattcgatctatatacgcccttatattacaacaccaggaggcaccacaaggcagacccagcagcactccggctgggtttctcaattcaatccgatgaatcctcagcaggtgtatcaacctagccagccaggtccctggacaacatgtccagcaagcaacccgctgtcacatacctctagccaacagccaaaccagcaggggcaccagacctctcatgtgtacatgcccataagctcaccaactacgagccagccacctacgatacactcctccggaagcagtcaatcttcagcacacagtcagtacaacatacaaaatatcagcaccggccctcgaaagaaccagatcgaaatcaaacttgagcctccccagcgcaataactctagcaaactgcggtcctctggaccgaggaccagttccacgagttcttctgttaacagtcagacactcaaccgaaatcagcctacagtgtacatcgcggcatcccctcctaacaccgatgaattgatgtctcggtctcaacctaaggtatacatctccgcgaacgccgcaaccggcgacgagcaggtgatgcggaatcagcccaccctgtttatcagcacaaattcgggcgctagtgcagcctcaaggaatatgagtgggcaagtgtctatgggacccgcatttattcaccatcacccacccaaaagccgcgctattgggaataactcggccacctcacccagggttgtagttacccagccgaacacgaagtatacttttaagatcaccgtgagccccaacaaacctcccgcagtctccccgggtgtagtctcacccacgtttgagttaaccaatttgctcaatcacccagatcactatgtcgaaaccgaaaacattcagcatttaaccgaccctacactcgcacacgttgaccgcatatctgagactaggaagttaagcatgggatcagatgacgcggcttacacacaggccctgctcgtgcatcaaaaggccagaatggaaagactccagagagagctggagattcaaaaaaagaaacttgataagttgaaaagcgaagttaacgagatggaaaataacctaacacggagacgcttaaaacggtcaaatagcatcagtcagataccctcactcgaggagatgcagcagctgcgaagttgcaaccgacagctacaaatcgacatcgattgcttgaccaaagagatcgacctgtttcaggccagaggcccacacttcaacccctccgccatccacaatttttacgataacatcgggtttgtcggtccagtgccgcctaagcccaaagaccagcggagcattatcaagactccaaagacgcaggacactgaggacgatgaaggagctcagtggaactgtaccgcctgtacattcctgaatcacccagctctgatccggtgtgaacagtgcgagatgcctcgccacttctag

SEQ ID NO: 243896 - DNA, 1611 bp, synthetic construct
  misc_feature 1..1611: note = Description of Artificial Sequence: Synthetic coding sequence
  source 1..1611: mol_type = other DNA
atggcacagggaagtcatcagatcgacttccaagtcttgcacgatctgcggcagaaatttcccgaggtgcctgaagtggttgtatcccgttgtatgctgcagaacaacaataacctggacgcgtgctgcgcagtgctgtcacaggaatccacacgttatttgtacggagaaggggacttgaacttctcggatgactcggggatttctggtcttaggaatcacatgacctctctgaatcttgacctgcaaagccagaatatttaccaccacggcagggaaggttcgcgcatgaacgggagcaggaccctgacccattctattagcgacgggcagcttcaagggggtcagtccaactctgaactgtttcagcaggaacctcaaacagcccctgcacaggtgccacagggcttcaacgtcttcgggatgtccagttctagcggcgctagtaacagcgccccacacctgggatttcatctgggaagtaaggggacatcctccttgagccagcaaacacctcgctttaatcccatcatggttactctggcccctaatatccaaaccggtcggaatactcctacttccctgcatatacacggagttcccccacccgttctgaattctccccaggggaactcgatctacattcggccatatataacgacccccggtggcacaactagacagacccaacagcacagcggctgggtctctcaatttaaccccatgaatcctcaacaggtctatcaaccatctcagcccggtccttggaccacctgtccagcatctaatcccctgtcccacacttctagtcaacagcctaaccaacaggggcaccagacaagccacgtttacatgccgatcagctcccccacaacgtcccagcccccaaccattcactcaagcggcagcagccagagctctgcccacagccagtataacatacaaaatatctctaccggtccaaggaagaaccagattgaaattaagctggagcctcctcaaagaaataactctagcaagctacgctcctctggccctcgaacttcttctacctcttcttctgtaaattctcagactctcaacaggaaccagccaacagtgtacatcgcagcctcccccccaaatactgatgagctgatgtcccgaagtcaaccaaaggtatatatttccgcaaacgcagcaaccggcgacgagcaggttatgcggaaccagccaacattgtttattagcacaaacagcggggcaagtgcagcctcccggaatatgtccgggcaggtatctatggggcctgcctttattcaccatcatccacctaaatccagagcaattggaaacaattctgctaccagtccgagggtggttgtcactcagcctaacacaaagtataccttcaaaataaccgtaagtcctaataaaccccctgcagtctcccctggagtcgttagtcctacctttgaactgaccaacctcctgaatcatcccgaccattacgtggagacagagaacatccagcaccttactgatcccactctcgcccacgttgaccggattagtgaaacccggaagttgtccatgggctcagacgacgcagcttacacccaggatatctag

SEQ ID NO: 243897 - DNA, 1986 bp, synthetic construct
  misc_feature 1..1986: note = Description of Artificial Sequence: Synthetic coding sequence
  source 1..1986: mol_type = other DNA
atgcaaaataataataacctggatgcatgttgcgctgtgctttcacaggagtctacaaggtatctgtacggcgaaggagatcttaacttctcagacgattctggaattagcggcctgcggaaccacatgacaagcctaaatctggacttgcagagccaaaacatctatcaccacggaagagaagggagtcggatgaacgggtctcgaacccttacgcactctattagcgacggccagctgcagggtggccagagtaacagtgagctgttccagcaggaaccacagacggccccagcccaggtaccccaagggtttaatgtctttgggatgagttccagctccggagcaagcaattccgctccccacctgggttttcatctgggatccaaaggaacttcttcactcagccagcaaacccctcgtttcaatccaatcatggtgacccttgcacctaacattcaaaccggacgcaataccccgacaagtctgcacatccacggcgtgccccctccagtgctgaattcacctcaagggaactcaatctacattcgaccctacatcacaaccccaggcggaactacacgacagactcagcagcattccggttgggtgtcacaattcaatcccatgaatccccagcaggtgtatcagccttcccaaccagggccatggactacttgcccagcaagcaacccactcagccatacttcctctcagcagcctaaccaacaggggcatcagacaagccacgtgtacatgccaatctcgtcaccgacaacaagtcagcctccgacaatccatagcagcgggtcgtcacaatctagtgctcacagtcagtataatatccaaaacatttcaactggtccaagaaaaaaccagattgagatcaaattggagccaccccagagaaataacagtagcaaactccgcagctccggccctcggacctccagtacctcctctagcgtgaacagccagaccctgaacagaaaccagcctaccgtgtatattgccgctagtcctcccaacacggacgaactgatgtctaggagccagcctaaggtttacatctccgctaatgccgcaacgggggacgaacaagtgatgcgcaaccagccaactttatttatttcaactaatagcggagcctctgcagcctctcgaaatatgtccggacaggtgagtatgggcccagcatttatccatcaccatcccccaaaatcccgcgctataggaaacaattctgccacctctcctagagttgtggtaactcaacctaacactaaatatacatttaagattacggtttcaccaaacaaaccgccagcagtatcgcccggagtggtgagccccacctttgagttaaccaatcttctgaatcatcctgatcattacgtggaaactgaaaacatacaacacctgacggatcctaccctcgctcacgtggaccgcatctccgagacaaggaagctaagcatgggcagcgatgacgctgcctacacacaggccctgctggtgcaccagaaggctaggatggaacggctccagagggagctggaaatccagaaaaagaagctggacaagttaaaaagcgaagttaacgaaatggagaacaacctgacccgacggagactaaagcgcagtaattctatctcacagatcccctctttggaggagatgcaacagctgaggtcttgtaaccggcaactgcagattgatattgactgtttgaccaaagaaatcgatctgtttcaggcaagggggccacatttcaacccttctgccattcataacttctacgacaacattgggttcgttgggccagtaccccctaagccaaaggatcagcgctctataatcaagaccccaaaaacacaagacacagaagacgatgagggggctcagtggaactgcaccgcttgcacgtttttaaatcaccctgcgctcatcaggtgcgagcaatgcgaaatgcccaggcacttttag

SEQ ID NO: 243898 - DNA, 2082 bp, synthetic construct
  misc_feature 1..2082: note = Description of Artificial Sequence: Synthetic coding sequence
  source 1..2082: mol_type = other DNA
atggcacaaggttctcatcaaattgactttcaggtgctccatgatctgcgccagaaatttccggaagtgcccgaggttgtggtctcgcggtgcatgctacagaataacaataacctagacgcgtgttgtgccgtcctcagtcaggagtctacaaggtatctttatggtgagggtgatctcaacttctctgacgacagcggaattagcggcctgcgaaaccacatgacttctttgaatctggatctacagagtcagaacatttatcaccacgggagagagggatccaggatgaatggatcccgtacattgactcactctatctcggacggacaacttcagggcggacagagcaacagtgaattgtttcagcaggaaccacaaaccgctccagctcaggtccctcaggggtttaatgtgtttgggatgtcaagcagctccggcgctagcaatagcgccccacatctaggattccatctagggtccaaaggtactagtagtctttcccagcaaactccacgcttcaaccccattatggtgactctggctccgaacatccagacagggcgaaacaccccgacctctcttcacatacacggtgtgcccccacccgtgctgaattccccgcaaggaaactccatctatataagaccctatattaccactcctggtggtaccactcgccagactcagcagcacagcggatgggtttcccagttcaatcccatgaatccccaacaggtttaccagccctcacagccaggcccatggactacctgcccagcaagcaacccactgtcgcatacctcttcccagcagcctaaccaacagggccaccaaacaagccatgtttatatgcccatttcctcacccacgacttctcaaccgcctacgattcactcttccgggagctctcagtcaagcgcacatagccagtacaatatccagaatatttccactggccctagaaagaaccagatcgagattaaattagagccacctcaacggaacaacagttcaaagcttagaagcagcggacctcgcacttcctcgactagctcctcggttaacagtcaaacactcaacaggaaccagcccaccgtgtacatcgcagcatctccacccaacaccgatgagctcatgagtaggtcacagccaaaggtttacatctcagcgaacgccgctactggggatgagcaggttatgagaaaccaacccactttatttatcagcacaaatagcggagcctcagccgctagtagaaatatgtctggtcaggtttccatgggaccggcttttattcaccatcatcctccgaaaagtcgggcaataggcaacaacagtgctacatcccctcgtgtggtcgtcacccagccaaacacaaagtacacatttaagatcacagtgtcaccaaacaagcccccagctgtgagtcccggtgtggtgagccccaccttcgagctgaccaacctgttgaatcatcccgaccattatgtggaaacggagaatattcagcaccttaccgaccccaccctggcacatgtggaccgcatatcggagaccaggaagctctcaatggggagtgacgatgccgcatatacacaggccttgcttgtgcaccagaaggcgaggatggagagattacaaagagagctagagatacaaaaaaagaagttggataagctcaagtccgaggtgaatgagatggagaacaatctcactcgacggaggttaaagcgatcaaacagtatttcccagatcccttcgctcgaagaaatgcaacaattgcgctcgtgcaacagacaactgcaaatcgacatcgattgcctgaccaaagagatcgatctcttccaagccagaggacctcacttcaacccatcggcaatccacaacttctatgacaatataggtttcgtcggacctgtgcctccaaagcccaaggaccagcgatctattattaagacccctaaaactcaggataccgaggatgatgagggtgcgcagtggaactgtactgcctgcaccttcctgaatcatcctgcccttattcgctgtgagcaatgtgagatgcctagacacttctag

SEQ ID NO: 243899 - DNA, 714 bp, synthetic construct
  misc_feature 1..714: note = Description of Artificial Sequence: Synthetic coding sequence
  source 1..714: mol_type = other DNA
atgtcagacagcgacctcggagaggatgaaggtctcttgagcttagcgggtaaacgtaaacgaaggggcaacctgcctaaagagtcggtcaaaatcctgagagactggttgtatttgcatagatataacgcataccctagcgagcaggaaaagctttcattgtctgggcaaactaatttatcggtgctgcaaatttgtaactggtttatcaacgcccgaaggcggctgctgcccgatatgttgcggaaggacgggaaggaccccaaccagtttacaattagtcggagagggggtaaggcatctgatgttgcccttcccagaggctcaagcccgtcggtgcttgctgtgtccgtgcctgcacctactaatgtgctgagcttgtctgtatgttcaatgcccctgcactctgggcagggcgagaaacccgcagcccctttccccaggggagagctcgagagcccaaaaccgctggtgacacctgggagtacactgactctgctcaccagggctgaggcaggttctccaactgggggactcttcaatactccaccaccaacccccccagaacaggacaaagaagacttttcatccttccaacttcttgttgaagttgcgttgcaacgggctgctgaaatggagctgcaaaaacagcaggacccgtcactgcctctcttgcacacaccaattccactcgtgagcgagaacccccagtag

SEQ ID NO: 243900 - DNA, 714 bp, synthetic construct
  misc_feature 1..714: note = Description of Artificial Sequence: Synthetic coding sequence
  source 1..714: mol_type = other DNA
atgagtgatagcgatctgggggaggacgaaggtctcctgtctcttgccggtaagaggaagaggcgcggtaatctccccaaggaatccgtcaagatcctgcgggattggctgtacctgcatagatataatgcctaccccagtgagcaagaaaagctgtctctgagtgggcagactaacctgtcagtactgcagatatgtaattggtttataaatgccagaagaaggctgctccccgacatgttgcgcaaagatggaaaggatccgaaccagttcaccatctccagacgcggaggcaaagccagtgacgtggctctccccagaggcagctctccgtctgtgttggccgtgtctgtgccagcgcctacgaacgttctctctctgtctgtctgttctatgcccctgcacagcgggcagggcgagaaaccagccgcaccgttccccagaggcgagttggagtctcctaaacctcttgtcactcccggatcaacactgacgttgctcactcgcgctgaagctgggagccctaccgggggactcttcaacacacctcctccaacacctcccgaacaggataaggaggacttttcttcgttccagctacttgtggaggtggccctgcagcgagccgctgagatggagctccaaaagcagcaggacccctccctgcccctattgcacaccccaatcccactggtaagcgagaatcctcagtag

SEQ ID NO: 243901 - DNA, 525 bp, synthetic construct
  misc_feature 1..525: note = Description of Artificial Sequence: Synthetic coding sequence
  source 1..525: mol_type = other DNA
atgtctgacagtgacttgggcgaagatgagggcctcctgagcctggctggcaaacgaaagaggaggggcaacttacccaaagaatccgtgaagatacttcgagactggctttatctgcaccgatacaacgcatatccgagcgaacaggagaagctcagcctgagcggacagaccaacctatctgtgctgcagatttgtaactggttcataaacgccagacgaagactgcttcctgacatgctgcggaaggatggaaaagatccaaatcagttcacgatctcacgacgaggcggaaaggcaagtgatgtggcactccccagaggttctagcccatccgtattggcagtgagtgtgcccgctccaaccaatgtcctatcgctctctgtttgtagtatgcctctccattcaggacaaggagaaaagcccgctgcccctttcccacggggagagctggagagcccgaaaccgcttgtcacacccggatccactctgactttgctaactcgcgctgaagcaggatcgtag

SEQ ID NO: 243902 - DNA, 714 bp, synthetic construct
  misc_feature 1..714: note = Description of Artificial Sequence: Synthetic coding sequence
  source 1..714: mol_type = other DNA
atgagcgattcagacctgggcgaagacgaaggcctactaagtctggcagggaagcgtaaacgcaggggaaacctccccaaagaatccgtgaaaatcctgagggactggttgtatctccatcgatacaatgcttatccatccgaacaagaaaagcttagtctaagtggccagactaacctgtcagtgctgcagatctgcaattggttcatcaatgctaggcgccgattgttgcctgacatgttgaggaaggacggaaaagatcctaaccagttcacgattagcagacgcggaggaaaagcatctgatgtcgcacttccgaggggttcatccccaagcgtgctcgccgtcagtgtacctgcccctaccaatgtgctttctcttagtgtatgttcaatgcctttgcactccggccagggcgagaagcctgcagccccttttcctaggggagaactggagagccctaaacctttggtcaccccgggatcgacactgacgctcctgaccagggcggaggctggaagcccaaccggcggactgtttaatacacccccacccacccccccagagcaggacaaagaagatttttcttcttttcagctcctggtggaagtcgcactgcagcgggcagcggagatggagcttcaaaagcagcaggatccctctctgccactgttacacactccgatcccactagtgtcggaaaacccgcagtag

SEQ ID NO: 243903 - DNA, 726 bp, synthetic construct
  misc_feature 1..726: note = Description of Artificial Sequence: Synthetic coding sequence
  source 1..726: mol_type = other DNA
atggaggcagcagcagacggtcctgcggaaacccagtcgccagtcgagaaggatagcccagccaagacccaaagtcctgcacaggatacatccattatgagcagaaacaatgctgacactggcagagtgctggcgctgccagagcataagaaaaagagaaaagggaacttacctgctgagagcgtgaagatacttcgggattggatgtataaacacaggtttaaagcatacccttctgaggaggaaaagcagatgctgtccgagaagaccaacctgagcctgctccagatcagcaactggtttattaacgccaggcgtcggatcttaccggatatgctgcagcagcgaaggaacgaccccatcattggtcacaagacaggaaaagacgcccacgcgactcatctccaatccaccgaggcgagcgttcctgccaaatccggccctagcggaccagataacgttcagtctctgccattatggcctttaccaaaaggccagatgtcacgcgagaagcagcccgaccccgagtcagccccatcgcagaagttgaccgggattgcccagccgaagaaaaaggttaaggtctccgtgacctcaccaagctcaccagaactcgtgtctcctgaggagcacgcggacttttcatcttttctcctgctcgtcgacgccgcagtgcaacgggctgccgagctggagttagaaaagaagcaagagccaaatccctag

SEQ ID NO: 243904 - DNA, 726 bp, synthetic construct
  misc_feature 1..726: note = Description of Artificial Sequence: Synthetic coding sequence
  source 1..726: mol_type = other DNA
atggaggccgcagccgatggaccagcagagacacaatctccagtggaaaaggatagtccagccaaaacccagtctcccgcacaggacacgagcataatgtcaagaaacaacgctgacaccggcagagtcctcgcccttccagaacataaaaagaaacgtaaaggcaatcttcccgctgagagtgtgaaaattctccgcgactggatgtacaagcacagattcaaggcctacccgtcggaagaagagaagcagatgctgtcagaaaagactaatttatctcttctgcaaatcagcaattggtttataaacgcacggagaaggatccttcccgatatgctgcagcaacgcagaaatgatccaattatcggacacaaaactggaaaggacgcacatgcaacccatctgcagtcaacagaagccagtgtgcctgcaaagtctggcccatcagggcctgataatgtgcagtccctgccactctggcccctgcctaaagggcagatgagtcgggaaaagcagcctgatccagaaagcgcaccgagtcagaaactaactggaattgcccagcccaaaaaaaaggttaaagtgtctgtcacctcgccgagttcacctgagctcgtgagtcctgaggagcacgctgacttcagctcgttcctgctgttggtcgacgctgctgtccagagagctgcggagctagagctcgaaaaaaaacaggaaccaaatccatag

SEQ ID NO: 243905 - DNA, 558 bp, synthetic construct
  misc_feature 1..558: note = Description of Artificial Sequence: Synthetic coding sequence
  source 1..558: mol_type = other DNA
atggaggccgcagcagacggtcccgctgagacccagtcaccggtggagaaggacagtcctgccaaaacccagagccccgctcaggataccagtataatgtcaagaaataacgctgacactggaagggttcttgccttaccagagcacaagaaaaaaagaaagggcaacctgccagcagaatccgtgaagattctccgcgactggatgtacaagcataggttcaaggcatatccctctgaagaggagaagcagatgttatccgagaagacaaacctgtccctgctgagaatttctaactggtttatcaatgccaggagacgtattttacctgatatgctccaacaaagaagaaatgatccaattattggccataagacaggaaaggatgcacacgcaactcatttacaatcaacggaggcctctgttccggcaaaatcgggaccagtggtgcagactatgtataaggcttgtccatgtgggccatgccagcgtgctcggtgtcaggagagatctaaccaaatcaggtcaagaccgcttgctcggtcttccccagaatag

SEQ ID NO: 243906 - DNA, 558 bp, synthetic construct
  misc_feature 1..558: note = Description of Artificial Sequence: Synthetic coding sequence
  source 1..558: mol_type = other DNA
atggaagctgccgctgacggacctgccgagacccagagccctgtagaaaaggacagcccagcgaaaacacaaagccccgcacaagacacatcaatcatgtctagaaacaatgctgacaccggcagggtcttggcactgcctgagcataaaaaaaagcgcaaggggaacctgccagcagaatcggttaaaatcttgagagattggatgtacaagcatcggttcaaagcttatccttccgaggaggaaaaacaaatgctttctgagaaaaccaatctgagtctgttaaggatttcaaactggtttattaacgccagacgtcggatactgcctgacatgcttcagcagcggagaaatgacccgatcattggccataaaaccggcaaagatgctcacgcgactcatttgcagtccaccgaggccagcgtgccggctaagtccgggcctgtggtacagactatgtacaaggcttgcccgtgcgggccatgccagagagcacgctgccaagagaggtctaaccagatcagaagccggcctctcgccaggagcagccctgaatag

SEQ ID NO: 243907 - DNA, 1773 bp, synthetic construct
  misc_feature 1..1773: note = Description of Artificial Sequence: Synthetic coding sequence
  source 1..1773: mol_type = other DNA
atggcaggtgctgtgccaggagcgatcatggacgaggactattacggttctgcagcagaatggggggacgaagccgatggtggccaacaggaagacgacagtggggagggggaggacgatgccgaggttcaacaggaatgtctgcataaattttcaacgagagactatattatggaaccaagtattttcaatacactgaagaggtacttccaggcagggggtagccccgagaacgttatccagctgctttcagaaaattacactgccgtcgctcaaacggtgaatttactggctgaatggctgattcaaactggggtcgaacctgtgcaggtgcaggagaccgtcgaaaatcatcttaagtccctgctgatcaagcattttgacccgaggaaggctgattcgatcttcacagaggagggtgagacaccagcgtggctcgagcagatgattgcacataccacctggagggacctgttttataagctggccgaggcacaccccgattgcctgatgctgaactttaccgtgaaattgatctcagatgcaggataccaaggtgagatcacgagcgtgagtacagcctgccagcagctcgaggtgttctctagagtcttaagaacttccctggccaccattttggacggtggcgaagagaatctagagaaaaacttacctgagtttgcgaagatggtgtgccatggggaacatacatatctctttgcccaggccatgatgagtgtcctggcacaggaggagcaaggcggatctgctgtccgccgaatcgctcaggaggttcagagattcgcacaggagaaagggcacgacgccagtcaaattacattagccttgggtactgctgcatcgtatcccagggcatgccaagcgctcggggctatgctctcaaaaggcgctttaaacccagccgacattaccgtgctgtttaagatgttcactagtatggaccctccgccagtggaactgattagggtgcctgcgtttctcgacctgttcatgcagtctctcttcaaacccggagcccgtattaatcaggaccacaagcacaagtacatccatatcttagcttatgcagcttctgtagtggagacctggaagaaaaataagagggtgtcgatcaacaaggatgagctaaagtccacaagtaaagctgtagagaccgtacataatctgtgctgtaacgagaacaaaggcgcttctgaactcgtggcggaattgagtaccctctaccaatgtatcaggtttcccgttgtggctatgggcgtgctgaagtgggttgactggaccgttagcgaacccagatatttccaactgcagaccgatcacacacccgtccacctggcgctgctagacgagatttccacttgtcaccagctgttacacccccaggtgctccagcttcttgtgaagctgtttgagaccgaacattctcaactggacgtcatggagcagcttgagctgaaaaagactcttctggatagaatggttcaccttctgagtcggggttacgttctcccagtggtgagctacattcgcaagtgtttggagaaacttgatacagatatctcgctgattcgctatttcgtcaccgaggtcctggacgtcattgcacctccatacactagcgacttcgtccagcttttcctgcctattctggaaaatgactcaattgccggaaccattaagactgaaggcgaacacgatcctgtgaccgagtttatcgcccactgtaaaagcaacttcatcatggtgaattag

SEQ ID NO: 243908 - DNA, 1773 bp, synthetic construct
  misc_feature 1..1773: note = Description of Artificial Sequence: Synthetic coding sequence
  source 1..1773: mol_type = other DNA
atggccggtgctgtgcccggagccataatggacgaggactactatggctccgcagccgaatggggagacgaggctgacggaggacagcaagaagacgactcgggtgagggagaagacgacgctgaagtgcaacaagagtgtctgcacaaattcagtacgcgggactacatcatggaaccttccatctttaataccttaaagcggtacttccaggcgggtggttctcccgagaatgtgattcagctgctgagcgagaattacacagctgtggcgcaaaccgttaatctactggcagagtggcttatccagactggagttgaaccagtccaggtccaggaaaccgttgagaatcatctaaagtccctgcttataaagcacttcgaccccagaaaggccgattccatttttacagaggagggcgagacacctgcgtggctggagcaaatgatagcccatacaacatggcgggatctgttctataagttagcggaagcccaccccgactgcctcatgctcaatttcactgtaaagttaatctccgatgcaggctaccagggcgagatcacttcagttagcacagcatgtcaacagctggaggtgttttcacgcgttctcaggacctcactcgctacaatccttgacggaggtgaagagaacctcgagaaaaacctgcccgagttcgctaaaatggtgtgccatggagagcacacctatctcttcgcgcaagcgatgatgagcgtactcgcccaggaggagcaggggggaagcgccgttcgcaggatcgcgcaggaggtgcagaggttcgcccaggaaaaaggtcatgacgcttcccagattacactcgctttgggcacagctgcttcttacccgagggcctgccaggccctaggggcaatgctctcaaagggcgcactcaaccctgccgacattaccgtcctgttcaagatgtttaccagcatggacccacctcctgtggagctgatccgggtgccagcctttctggacctgttcatgcagtctttgttcaagcccggagccagaatcaaccaggaccacaaacacaagtacatacacatcttggcctatgccgctagcgtggtagagacatggaagaagaataagcgcgtttctataaacaaggatgagctgaagtctacctcaaaggcagtggagacagtccacaatctgtgttgcaacgaaaacaagggcgcaagtgaattagtcgccgagttatccacgctgtaccagtgcatcagatttccagtagtggccatgggtgtactcaaatgggtggattggaccgtctccgagcccaggtactttcagcttcagactgaccacactcccgtgcacctagctctattggatgaaatctcgacttgtcaccaattgttgcaccctcaggtccttcagctcctcgtaaagctgtttgagactgaacactctcagcttgacgtgatggaacagctagagctaaaaaaaaccctcttggatcgaatggtccacttgttgtcaagaggctacgtgcttccggtcgtgtcctacatcaggaagtgtcttgagaagttggatacagatatatccctgatccgctactttgtgacagaggttctggatgtcattgctcccccatacacatccgactttgtgcagctgtttcttccaattttggaaaacgattcaattgccggtaccatcaagaccgagggagagcatgacccagtgacagaattcattgcccattgtaaaagcaattttatcatggtcaactag

SEQ ID NO: 243909 - DNA, 774 bp, synthetic construct
  misc_feature 1..774: note = Description of Artificial Sequence: Synthetic coding sequence
  source 1..774: mol_type = other DNA
atgccagccagatgcgttgcagctcactgcgggaacacaaccaaatcaggaaagtccttgtttcgatttcctaaggacagagcagtccgcctgttgtgggaccggttcgtgcgcggttgtagggccgactggtacggcggaaatgatcggagtgtgatctgtagcgatcactttgctcctgcttgttttgacgtgagctctgttatccagaagaacttgcgcttctctcaacggctacgcctcgtggcgggagctgtgccgacgctgcatcgggttcctgccccagccccaaaaagaggtgaagaaggtgatcaggccggacggcttgacactcgcggagagctgcaggccgctaggcattctgaagcagccccaggccctgtgtcatgcacaaggcccagagccggtaaacaggcagcggcaagccagataacatgtgagaacgagcttgtacagacgcagccacacgcggataatccttcaaacacggttacatctgtgcctacccactgcgaagagggacctgtgcacaagtctacgcagatctccttgaagcgaccccgacatcggtcagtaggcatccaggccaaagtgaaagccttcggaaaacgcctgtgtaacgccaccacccaaaccgaggagctgtggtcacgcacaagctctctgttcgacatttactcttcagactcagagacagacacagactgggacatcaagtctgaacagtctgacctctcttatatggccgttcaggtcaaggaggagacctgttag

SEQ ID NO: 243910 - DNA, 498 bp, synthetic construct
  misc_feature 1..498: note = Description of Artificial Sequence: Synthetic coding sequence
  source 1..498: mol_type = other DNA
atggagccccctaagatgaaccccgtagtagaaccattaagctggatgctcggtacatggttgagcgaccctccaggagccggaacgtaccccacattgcagccctttcagtatctcgaggaggttcacatctcccatgtcggccaaccaatgcttaatttctcgtttaatagctttcatccggatactcgcaaacctatgcatcgggaatgtggctttattcgcctgaaacccgacacaaacaaggtggcttttgtgtctgcccagaacactggcgtggtggaagtcgaggagggagaggtcaacggtcaagaactgtgtatagcatcccacagcatcgctcgtatctcctttgccaaagaaccccacgtagagcagatcacccgcaaatttcgactgaattccgaagggaaacttgagcaaactgtcagtatggccaccaccacacaacctatgacccagcacctacatgttacctataaaaaggtaactccttag

SEQ ID NO: 243911 - DNA, 1734 bp, synthetic construct
  misc_feature 1..1734: note = Description of Artificial Sequence: Synthetic coding sequence
  source 1..1734: mol_type = other DNA
atggtaatttgctgcgccgcagtgaactgcagtaacaggcagggaaaaggcgagaaaagggccgttagtttccaccgatttccgcttaaagacagtaaacgcctcatccaatggctgaaggctgtccagcgtgacaactggactcccacaaaatactccttcctctgttcagaacattttactaaagacagtttctcgaaaaggctagaagatcaacatcggcttctcaaacccaccgcagtgccctcaatcttccatcttacggagaaaaaaagaggcgctggaggccatggacgcacgagacgaaaagatgcttccaaagctaccggtggagtgaggggccactccagcgcagcaacgtctaggggggctgcagggtggagcccctcgtccagcggtaaccctatggccaagcctgagtccaggagactaaaacaggcagcattacagggggaggccactccccgtgcagcccaggaggctgcatctcaggagcaggcccaacaagccttggagaggactcctggcgacggcttagccacaatggtggccggaagtcaagggaaagctgaagcttccgctacagatgcaggtgatgagtccgccacatcgagcatagaagggggagtaaccgacaaaagtgggatctcgatggacgacttcacccctcccggatctggggcatgcaagttcatcggcagtttgcactcctacagtttttcatctaagcacactagggagaggccatcggttccccgagagcctattgacaggaagcgactcaagaaggatgtcgagccgagttgctctggttctagcctcgggccagataaaggactcgcacagtccccaccaagcagctctctcacagcgacccctcagaagccatcgcagtcccctagtgcccctccggcagacgtgacacctaagccggctactgaagcggtccagagcgagcactccgacgcgtcaccaatgagtattaatgaggtgatcttgagtgcaagcggcgcttgcaagttgatcgacagtctgcattcatactgcttcagttccagacaaaataaatctcaggtgtgttgcttacgtgaacaggtagagaaaaaaaatggcgagctgaaatctctccggcagagggtgtctcgatctgatagtcaagtgaggaagctgcaggagaagctggacgaactgcgaagagtgtccgtgccctacccgtctagcctcctgagtccctcccgagagccccctaagatgaaccctgtggtcgagccacttagctggatgttgggaacctggctttcagatccacccggagcagggacctatcccaccctgcagccatttcagtacttagaagaagtccacatttcacatgttggacagccaatgttgaactttagcttcaattctttccatccggatacccggaaacctatgcaccgcgaatgtggctttattcgcctgaaacccgatactaataaggtggcctttgtgagcgcccagaataccggagttgttgaggtagaggagggcgaagttaatggccaggagctgtgcattgcctcgcacagcattgccaggattagctttgctaaagaaccgcacgtggagcaaatcactcgaaaattccggctgaattcggagggtaagttggaacagacggtgagcatggctacaaccacacaaccgatgacacagcacctccatgtcacttataagaaggtgaccccatag

SEQ ID NO: 243912 - DNA, 510 bp, synthetic construct
  misc_feature 1..510: note = Description of Artificial Sequence: Synthetic coding sequence
  source 1..510: mol_type = other DNA
atgtctataaatgaagtcatcctgtccgcctccggtgcctgtaagctaatcgactccctgcattcctattgcttctccagtcgacagaataagtctcaggtatgctgcctccgagagcaggtggaaaaaaaaaacggagaactcaagtcgctcagacaacgcgtcagtcgctccgactcgcaggtaagaaaacttcaggaaaagctcgacgaactcaggcgggtctcagtaccctacccctcaagcctcctgtccccatcccgagaacctcccaagatgaacccagtggtagaaccgctatcgtggatgctcggaacttggctgtccgatcccccaggcgcaggcacttaccctacacttcaacctttccagtatctggaggaagttcatatttcacacgtaggacagcccatgctgaatttcagcttcaatagcttccatcctgacacgcgtaagcctatgcatagagagtgtggctttattcgcctgaagcccggtagcagcggctag

SEQ ID NO: 243913 - DNA, 1062 bp, synthetic construct
  misc_feature 1..1062: note = Description of Artificial Sequence: Synthetic coding sequence
  source 1..1062: mol_type = other DNA
atgaaacgggatagctgggtgcccagcaaataccagtttctgtgcagcgaccatttcacaccagactcgctggatatacgctggggcattcggtatctgaagcaaacagctgtaccaaccatatttagcctccctgaggacaatcaagggaaagacccaagcaaaaagaaaagccagaaaaaaaaccttgaagatgaaaaggaagtttgtcctaaagctaaatctgaggaatcctttgttttaaacgaaaccaaaaaaaatatcgtcaacacagacgtgcctcaccagcaccccgagctgcttcactctagcagcctggtgaaacccccagccccaaaaacaggaagcattcagaataatatgttaactctaaatctggttaagcagcacactggcaaaccagagtcaacactcgagacttcagtgaaccaagatacaggtcgaggagggtttcacacttgttttgagaatcttaattctacaactatcacactcactacctccaacagtgagagcatccaccagagcctcgaaacccaggaggtattagaagttaccaccagccaccttgccaacccaaattttacttctaactctatggagatcaaatcggcgcaggagaaccctttcttattctcaacgattaatcagacggtggaggagttgaatacgaacaaagagtcagtgatagcgatctttgtacctgccgagaactcgaaacctagcgtgaattcattcatctcggcacaaaaagagacgacagagatggaagacacagacatagaagattctctttacaaggatgtggattacggaacagaggttctgcagattgagcatagttattgcagacaggacattaacaaagaacacctttggcagaaagtgtctaagttacattctaagatcacactgctggaactcaaggaacagcagactctgggacggttgaagagccttgaggcactgatacgacagcttaagcaagagaactggctgtctgaggagaacgtgaaaatcatcgaaaatcactttacaacatatgaagtaacaatgatctag

SEQ ID NO: 243914 - DNA, 1188 bp, synthetic construct
  misc_feature 1..1188: note = Description of Artificial Sequence: Synthetic coding sequence
  source 1..1188: mol_type = other DNA
atgcccagatattgtgccgctatctgctgcaagaacagacgcggtaggaacaacaaggatcgcaaactgtctttttacccattccccctccacgataaggaacgactagagaagtggctgaagaacatgaaacgagacagctgggtgccctcaaaataccagtttctatgctcagaccactttacacctgacagcttggatattcggtggggcatcaggtacctcaagcagacagccgtgcccacaatcttctccctgcccgaggacaaccaaggtaaggatccaagcaaaaagaagagtcaaaaaaaaaacttggaagacgagaaagaagtgtgccctaaggctaagtcagaggaaagcttcgtgctgaacgagaccaagaagaatattgtcaatacagacgtcccgcaccaacacccagaacttttgcactcttcctccctcgtcaagccccctgctcctaagactggttctatccagaacaatatgcttacgctcaatctggtaaaacagcatacagggaagccggaaagcacattagaaaccagcgtgaatcaggataccggcaggggcggtttccacacgtgcttcgaaaacctcaactctacaacaatcaccctgacaacatccaatagcgagagcatccaccagagtttagagacccaggaggtcctggaggtcaccacttctcaccttgcgaaccccaacttcacttctaattctatggaaatcaagtctgctcaagagaaccctttcttgttcagtactattaaccagaccgtcgaggaattgaacacgaataaggagtccgttattgcgattttcgtccctgcagagaacagcaagcctagcgtgaatagcttcatctctgcccagaaggagaccaccgagatggaggatacagacattgaagactctctgtacaaggacgtggactatggaacagaggtcctccagatcgaacattcatactgtcgccaggacatcaataaggaacatctgtggcagaaggtgagcaagctgcactcgaaaatcacattactggaactgaaggaacagcagacactgggacgccttaaatcgctggaggcactgatcaggcagctaaagcaggagaattggcttagcgaggagaacgtaaaaattatcgaaaaccactttaccacttatgaagtgacaatgatctag

SEQ ID NO: 243915 - DNA, 669 bp, synthetic construct
  misc_feature 1..669: note = Description of Artificial Sequence: Synthetic coding sequence
  source 1..669: mol_type = other DNA
atggtcaagtgctgttcagccatcgggtgcgcgagtcggtgtctgcccaactccaagcttaagggactcacatttcacgtatttcccactgatgagaacatcaaacgcaagtgggtcctggctatgaaacgacttgacgtcaacgcagcgggtatttgggagcctaaaaaaggagacgttctgtgttcacgccattttaagaaaaccgactttgaccgttccgctcctaacatcaaattgaagccaggcgtgattccttccatttttgacagcccctatcatcttcaggggaagagagagaaactccactgccggaagaattttacattgaagactgtccccgctacaaattataaccaccatctggtgggcgcatcgtcgtgcatcgaagaattccagagtcagtttatatttgagcatagctatagcgtgatggactctcccaaaaagctgaagcacaagctggaccacgtgattggggagttggaagataccaaggaatcactcagaaacgtccttgatagagagaaacggtttcagaagtctcttcggaaaacgataagagagctgaaggatgaatgtttgatctctcaggagaccgccaatcgtctagatacattttgttgggactgttgtcaggagtccatcgagcaggactatatctcctag

SEQ ID NO: 243916 - DNA, 99 bp, synthetic construct
  misc_feature 1..99: note = Description of Artificial Sequence: Synthetic coding sequence
  source 1..99: mol_type = other DNA
atggtcaagtgttgcagcgctatcggatgcgccagcaggtgcctgcctaatagcaaactcaagggtctgacctttcacgtttttcccactgatgagtag

SEQ ID NO: 243917 - DNA, 243 bp, synthetic construct
  misc_feature 1..243: note = Description of Artificial Sequence: Synthetic coding sequence
  source 1..243: mol_type = other DNA
atggtgaaatgctgcagcgccatcggttgcgcgagtagatgtcttccgaacagcaagctgaagggcttgacctttcacgtctttccaaccgacgagaatatcaagaggaagtgggttctcgctatgaagaggctggacgttaacgccgcaggcatttgggagccaaaaaagggagatgttctttgcagccgacattttaagaagacagacttcgatcggagtgctcctaacatcaagctgtag

SEQ ID NO: 243918 - DNA, 669 bp, synthetic construct
  misc_feature 1..669: note = Description of Artificial Sequence: Synthetic coding sequence
  source 1..669: mol_type = other DNA
atggtgaaatgctgttctgccatcggttgtgccagccgatgcctacccaatagtaaactgaagggccttactttccatgtgttccctaccgacgagaatattaaaaggaaatgggtgctggccatgaagagactggacgtgaacgctgccggaatttgggagcctaagaagggagacgtgttatgctcaaggcattttaaaaaaaccgactttgatcggagcgcaccaaacattaagctgaagccaggcgtgattcctagtatctttgacagtccatatcacctccagggcaaacgcgaaaaattgcactgcaggaagaactttactctgaaaacagttcccgcaacaaattacaatcatcatcttgtgggagcttccagctgcattgaagagttccagagtcagttcatcttcgagcactcatatagtgttatggactcacccaaaaagttgaaacacaaactagaccacgtcatcggtgagctggaggatacaaaggagtctttgaggaatgtgctggacagggagaagcgcttccagaaatctctgcgcaaaacgattcgcgaactcaaagacgagtgcctaatctcccaggagaccgccaaccgcttggacaccttttgctgggattgctgtcaggagtctattgagcaagactacatttcatag

SEQ ID NO: 243919 - DNA, 825 bp, synthetic construct
  misc_feature 1..825: note = Description of Artificial Sequence: Synthetic coding sequence
  source 1..825: mol_type = other DNA
atgcctaaatactgccgggcacctaattgctccaatacggccggaaggctcggagccgacaaccgtcctgtttctttctacaagtttccactgaaggacggtccaagactgcaggcctggcttcaacatatgggctgcgagcactgggtgcccagttgccaccagcacctttgctcagaacactttacaccttcctgctttcagtggcggtggggagtgagataccttcggccagatgccgtaccttccatcttcagccgcggaccacccgcaaaaagtcagcgcagaacacgcagcacacagaagcctgtgtcaccccctccccctttgcagaaaaataccccattgccccaaagccctgcaatacctgtaagcggcccagttaggcttgtggtgctggggccaacgagcgggagcccaaagactgtggctactatgctactcactccccttgcacccgcacctacaccagagcggagccaacctgaagtcccagcccaacaagcacagaccggcctgggccctgtcttgggggcattgcagaggcgggttaggcgcctgcagcgttgccaagagcgccaccaggcccagttacaggctctggagagactcgcccaacaacttcacggagaatctctgctagctagggcaaggagagggctgcagcgtctgactacggcccagactctagggccagaggagtctcagaccttcacaatcatttgcggaggtcctgatatcgcaatggttctggcacaggaccctgccccagccacagtcgacgcgaagcccgagctcctcgacacaagaatcccgtcagcatag

SEQ ID NO: 243920 - DNA, 825 bp, synthetic construct
  misc_feature 1..825: note = Description of Artificial Sequence: Synthetic coding sequence
  source 1..825: mol_type = other DNA
atgccaaagtactgtcgggctcccaattgttctaatacagctgggagactcggcgcagataatcgacctgtcagcttttacaagttcccactaaaggatggccctcgactgcaggcttggctgcaacacatgggctgcgaacattgggtgccgtcatgtcatcaacatctatgctcagagcatttcacgccatcatgcttccagtggagatggggtgtacggtacttaaggccagacgctgtgccatccattttttctcgcggaccccctgctaagtcacagcgacgcacaaggtccactcagaagcctgtctctcccccacccccactgcagaagaacactcccttaccacaaagcccggctataccggtatcaggaccggtcaggttagtcgtgctcggccctacgagcggtagtccaaaaaccgtagctactatgctgctgacccccctcgcacccgctccaacgcctgagcgttcccaacccgaagtgcctgctcaacaggcgcagactggcctgggcccagtcttaggcgctctgcagcggcgtgtaaggcggttgcagcgatgccaggagaggcaccaggctcaactgcaggcactggaacgcctggcgcagcagctgcacggcgagtccctgctggctcgggcacgaaggggattgcagaggttgacgaccgcgcagacattagggccagaggagtctcaaactttcactattatctgtggcggacctgatatcgctatggtacttgcacaggatcccgctcccgcaaccgtggacgcaaagccagaattgctggatactcgcatcccttccgcttag

SEQ ID NO: 243921 - DNA, 390 bp, synthetic construct
  misc_feature 1..390: note = Description of Artificial Sequence: Synthetic coding sequence
  source 1..390: mol_type = other DNA
atgcttctgacgcctctggctccagcacctactcctgagcggagtcagcctgaagtgccagctcagcaggcccagacagggctaggtcctgtgttaggggctctgcaaagacgcgtcagaagactccagcggtgccaggagcgccaccaggcccagcttcaagctctcgaacgcctggcacagcagttgcacggcgagtcactgctggccagggccaggagaggtctgcagcggttaacaaccgcccaaacactaggcccagaagagagccagactttcaccattatctgcggcggtcccgacatagccatggtcttagcacaggatccagcccctgcaactgtcgacgcaaaacccgaattgctggacacccgcataccaagcgcctag

SEQ ID NO: 243922 - DNA, 2712 bp, synthetic construct
  misc_feature 1..2712: note = Description of Artificial Sequence: Synthetic coding sequence
  source 1..2712: mol_type = other DNA
atgaccagatcatgctccgccgtaggttgcagtacacgggacaccgttctgagcagagagcgaggcctgagttttcaccagtttccaacagacactatacagagatcaaagtggatccgcgcagttaacagagtagacccgagatccaaaaaaatttggattcctggtcccggagctattctgtgtagtaagcactttcaggaatcagatttcgaatcatatgggattaggcgcaagctgaaaaaaggtgcagtaccttctgtgtcgctttacaaaataccgcagggcgtgcatttaaaaggaaaagcgagacagaagattttaaaacaacccctccccgacaacagccaggaggtggccacagaagaccataactacagcctgaagacaccacttactattggtgcagaaaaactggccgaagtgcaacagatgctccaagtcagcaaaaagaggctaatttcagttaagaattaccgcatgattaaaaaaaggaagggcctgcgcttaattgacgcactggttgaggaaaaactcttgtcggaggagaccgagtgtctcttgagggcacagttctcagactttaagtgggagctttataattggagagaaactgacgaatactcagccgaaatgaagcaatttgcctgcacactatacctttgtagcagcaaggtgtatgactacgttcgcaagattctgaagctgccccattcttctatcctgcggacatggctttcaaaatgtcaacctagtccaggatttaactcaaatatattttcattcctgcaacgccgagttgaaaacggcgaccagttgtatcagtactgttccctgctgatcaaatcgatgcctcttaagcaacagttgcaatgggacccatccagccattcactacaagggttcatggacttcggtttagggaaactggacgccgatgagacgcctctcgcctccgaaaccgtgctgttaatggcggtgggcattttcggtcactggcggacgccattaggctatttcttcgtcaaccgcgcatcaggatatctgcaggctcagctgttgcgactaaccatagggaaactctccgacattggtataactgttcttgcagtaacgtcagacgcaacggctcacagcgtgcaaatggcaaaggctcttggcattcacattgatggcgatgacatgaaatgcacgtttcagcaccccagctcatcctcacagcagatcgcttactttttcgattcttgccacctgctgaggttaatacgaaatgcatttcagaattttcagtcaatccaatttatcaatgggattgcccactggcagcatctcgtggagcttgttgctctagaggaacaggagctcagtaacatggagagaataccatcgactctggcaaacctgaaaaaccacgtgcttaaggtgaatagcgcaactcagcttttttcggagtctgtcgcatcggccctcgaatacctgctgagcttggatcttccacccttccaaaattgcataggtacaattcactttctcaggctcatcaacaacttattcgatatctttaattcccgcaattgctacgggaaaggactcaagggacccttgctgcccgagacctactctaagattaatcatgtgctgatcgaggctaagacaatctttgtgacactgtccgacacttcaaataaccagattataaaaggcaagcagaagctgggttttttgggcttcctcctaaatgctgaatcgttgaaatggctctaccagaattatgtgtttcccaaagttatgccatttccttacctcctgacatacaaatttagtcatgaccacctggagttgtttttgaagatgctacgtcaggtgctggttacctcatcaagtcccacgtgcatggccttccaaaaggcatattacaaccttgagaccagatataagttccaggatgaggtgttcctctcgaaagtgtccatttttgacatctcgatcgctagacgcaaggatcttgccctgtggactgtgcagcgccagtacggcgtatcagtgacgaagaccgttttccacgaggagggcatctgccaggattggtcccactgctcactcagtgaagccttactggacttatctgatcaccggagaaatctgatctgttacgcaggttatgtggccaataagctatcagctctactcacctgtgaggattgcatcactgcactttacgctagcgatcttaaggcctccaaaatcgggagcctgctctttgtgaaaaaaaagaatggtctgcattttccctccgaatcactctgcagggtgattaacatttgcgagagagtggtgagaactcactcccgaatggcaatttttgaattagtgagtaaacagagagaactgtacctgcagcagaaaattctctgtgaattgtctggtcacattaatctgttcgttgacgtgaataagcatttgttcgacggcgaggtatgcgccataaaccattttgtgaagctacttaaggatattatcatctgcttcctgaatattagggctaaaaacgttgcgcagaatcccttgaagcaccattctgagagaaccgatatgaaaacgctcagccgcaaacattggtcttccgtgcaggattacaaatgttcttcgttcgccaatacatcttcaaagtttcgacacttgctcagcaatgatggctacccatttaagtag

SEQ ID NO: 243923 - DNA, 2712 bp, synthetic construct
  misc_feature 1..2712: note = Description of Artificial Sequence: Synthetic coding sequence
  source 1..2712: mol_type = other DNA
atgacaagatcatgtagtgcagtaggatgctcaacaagggacacagtcctgagtagggaaagagggctgtccttccaccagttccccaccgacacgattcagcgctctaaatggattcgggcagttaacagggtcgacccacgcagcaagaaaatatggatccccggacccggagcgatcttatgctctaaacattttcaggaaagcgacttcgaaagctatggcatccgacggaaattaaagaagggcgcagttccgagcgtgtccctgtataagataccccagggtgtccacctcaagggcaaagccaggcagaaaatcctcaagcagcccctgcccgataactcccaagaagtggcaaccgaagaccacaattattctttgaaaaccccactgacaattggggctgaaaaactggctgaagtgcagcagatgttacaggtgagtaaaaagcgcctgatctccgtaaaaaattaccgaatgattaaaaaacggaaaggactccggttgattgacgccctggtagaggaaaaattgcttagcgaagagacggagtgtctgctgcgggctcaattttcagatttcaagtgggaactgtacaattggagagagactgacgaatactccgccgagatgaagcagtttgcgtgcacactgtatttgtgcagttctaaagtttacgactatgtccgcaaaatccttaagctccctcactcatcgatcctgaggacatggttgtccaaatgccagccctccccgggtttcaattcgaatatcttcagctttttacagcgaagggttgagaacggggaccagctgtatcaatattgctcactgctaattaagtccatgccgctgaaacaacagcttcaatgggacccgagtagccactctttacagggttttatggattttgggctagggaaactagacgctgacgagacgccactagctagcgagactgtgctgctcatggctgttggaatatttgggcactggcggacacccctcggatactttttcgtgaatagagcgagcggctatcttcaagcgcaactgcttcgcctgactatcgggaagctctctgatatcgggattaccgtcttggctgttacaagcgatgctaccgcacattcagtgcagatggctaaggctctgggtatccacatagacggggacgatatgaagtgcaccttccagcatcctagcagttcatcacagcagatagcctatttcttcgacagctgccacctgttgagactcataagaaatgcgttccagaactttcaaagcatacagtttattaacggtatcgcacactggcaacacctcgtggaattggtggccctggaagagcaggagttaagtaatatggaaagaatcccctctacacttgccaacctcaaaaaccatgtcctaaaagtaaactcagctacccagctgttctccgagagtgtggcctccgccctggagtatctgctgtctcttgatctccctcccttccagaattgcatcggaaccatccacttcctccgtctcattaacaaccttttcgatatcttcaactctaggaactgctacgggaaagggcttaaggggcctttgctgccagagacatactccaaaatcaaccatgtgttgattgaggcgaagacaatctttgtaaccctgtccgatacatcgaataaccagatcattaaagggaaacagaagctgggttttctgggctttctcttgaatgctgaatctctaaaatggctttatcagaactatgtttttccaaaagtgatgcccttcccttacctgctgacttataagttctcgcatgaccatctagagttatttctgaagatgctacggcaggttttggttacgagctcttcaccaacatgcatggcctttcagaaggcttattataacttagaaaccagatacaaattccaggacgaagtgtttctctccaaggtgtccatctttgacatctccatcgcccgacggaaagatctggccctttggacagttcagagacagtatggtgtgtcggtgaccaagaccgtgttccacgaggagggcatttgccaggactggtcccactgtagtttgtcagaggccctgctcgacctttccgaccataggaggaatttaatatgttacgctggatatgttgccaataagctatccgccttactgacttgtgaagactgcatcacggccctgtatgcgtcagatctgaaggcttccaaaattggctctctgctgtttgtaaagaagaaaaatggcctgcattttccgagtgagagcctatgcagggttatcaacatttgcgaacgcgtggtcagaacacattcaaggatggctatcttcgaactggtgtcaaagcagcgcgagctttacctgcagcagaagatcttgtgcgaactgagcgggcacatcaacttgtttgtcgacgttaacaagcacctctttgacggcgaggtgtgcgcaattaatcactttgtaaaacttctcaaggatatcatcatttgctttctcaacataagggccaagaacgtcgcccaaaatcccctgaagcaccattctgaacgaaccgatatgaaaaccctgtcgcgaaaacactggagcagtgttcaagactataaatgcagcagttttgccaatacttcctcaaagttccggcaccttttgagcaacgatgggtatccttttaagtag

SEQ ID NO: 243924 - DNA, 642 bp, synthetic construct
  misc_feature 1..642: note = Description of Artificial Sequence: Synthetic coding sequence
  source 1..642: mol_type = other DNA
atggtacaatcgtgttcagcgtatggatgcaaaaacaggtacgacaaggataagccagttagcttccacaaattcccgctgactagaccatcactttgcaaggaatgggaggccgcagtccgcaggaaaaatttcaagcccaccaaatattcctccatttgttccgaacattttacccctgactgcttcaaacgcgagtgtaacaataagctgctgaaagagaacgcggtgccaactattttcttgtgcaccgaaccgcatgataaaaaggaggacctgctcgagccacaggaacagctgccaccgcctccactcccccctcccgtgtctcaagtggacgctgccatcggcctgctcatgccaccactccagactccggtgaacctgtccgtcttttgcgaccacaattacactgtagaagacaccatgcaccagcggaaacgaatccaccagctagagcagcaggtggagaaacttagaaaaaagttgaaaaccgcccagcagcggtgtcggcgacaggagaggcaactcgagaagctgaaagaagtcgtgcacttccagaaagaaaaagacgatgtgtcggagcgcggttacgtgattctccctaatgattatttcgaaattgtggaggtgcctgcatag

SEQ ID NO: 243925 - DNA, 162 bp, synthetic construct
  misc_feature 1..162: note = Description of Artificial Sequence: Synthetic coding sequence
  source 1..162: mol_type = other DNA
atggtgcagtcttgttccgcgtacggctgcaaaaaccgctacgacaaggataaacccgtcagtttccataagaagaagatcttctggtcccaccgtaatagtttccctcacctcctctacagacttctgtttcccagactcatgctgctcctcgactactag

SEQ ID NO: 243926 - DNA, 687 bp, synthetic construct
  misc_feature 1..687: note = Description of Artificial Sequence: Synthetic coding sequence
  source 1..687: mol_type = other DNA
atgccaaccaactgcgccgctgccggatgtgccacaacctataacaagcatatcaacatctccttccaccgctttccgctagaccctaagagaaggaaagagtgggttagattggtccggcgaaaaaatttcgtgcccggtaagcacacctttctctgctcaaaacactttgaggcaagctgtttcgaccttacaggacagacgcgtcggctgaagatggacgcagtcccgacaatcttcgatttttgtacccacattaaatctatgaaattaaagtcacgtaatttactgaaaaagaataacagttgctcacccgcaggtccttccaacctgaagtctaacatttcctcccaacaggtcctcctcgaacacagttacgccttccgcaatcccatggaggctaagaagcgcatcatcaaactggagaaggagatcgcctccctgaggcgtaagatgaagacctgtctgcagaaggagcggcgtgcgaccagaagatggatcaaagccacttgtctggtgaagaacctggaggctaacagcgtacttcctaaaggaacatcagaacatatgttgcccaccgcattatccagcctacccttggaggacttcaaaattctggagcaggaccaacaggacaagactctcttgtcactcaacctcaagcagacgaaatctacctttatttag

SEQ ID NO: 243927 - DNA, 720 bp, synthetic construct
  misc_feature 1..720: note = Description of Artificial Sequence: Synthetic coding sequence
  source 1..720: mol_type = other DNA
atgcccaaatcctgtgccgcacgacagtgctgtaacaggtactcctctcgacgcaagcagttgaccttccacaggtttcctttctcccgtccagaactcctcaaggagtgggtccttaacatcggacgcggaaactttaaacctaaacagcacaccgtgatttgttcagagcacttcaggcctgaatgcttttccgcctttggaaaccgcaaaaaccttaagcacaatgccgtgccaacggtcttcgcctttcaggaccctacccaacaagtgagagagaacactgaccccgcttcagaaagaggaaacgcctcaagcagtcagaaggagaaggtactacctgaggccggagcaggtgaggacagccctgggaggaatatggatactgcattagaggaactccagctcccaccaaacgctgagggtcacgtcaaacaggtgtcccccagacggccacaggctacggaagcagtgggtcgtcctacaggcccagccggactccggaggacgcccaataagcagccaagcgaccactcctatgcacttctcgacctcgacagcctcaaaaaaaagctgtttctcaccctgaaagagaatgaaaagctcagaaaacggcttcaggcccaacgccttgtgatgagacgtatgtcctcgcgcctgagagcctgtaaggggcaccaaggactgcaagcacgcctcggtccagagcagcagagctag

SEQ ID NO: 243928 - DNA, 717 bp, synthetic construct
  misc_feature 1..717: note = Description of Artificial Sequence: Synthetic coding sequence
  source 1..717: mol_type = other DNA
atgcctaagtcttgtgccgctcgccagtgctgtaatagatattcctccagaaggaagcagctgaccttccacagattcccgtttagtcgccctgaactactgaaggaatgggtgctcaatatcgggaggggcaactttaaaccaaaacaacataccgtaatctgtagcgagcacttcaggcctgagtgtttctcggcattcgggaatcggaagaacctgaaacataatgccgtgcccaccgtgttcgccttccaagaccccacccaggtccgggaaaacaccgacccggcaagcgagaggggcaacgcatcctcaagccaaaaggagaaagttcttccagaagccggagcgggtgaagacagccctggcagaaacatggataccgctctggaagaactgcagttacctcctaacgctgagggacacgtcaagcaggtgtcaccccgtcgaccccaggctacagaagcagtcggtcgtccgactggacccgctggactgcgtaggacacccaataagcagccatcagatcattcatacgctctgctcgacctcgactcattgaagaagaagctttttctgactctaaaggagaacgagaaattgagaaagaggctgcaggctcagcgcttggtgatgagacgcatgagttcaagattacgggcttgtaaggggcaccagggcttgcaagcgcgactgggtccggaacagcagtcttag

SEQ ID NO: 243929 - DNA, 528 bp, synthetic construct
  misc_feature 1..528: note = Description of Artificial Sequence: Synthetic coding sequence
  source 1..528: mol_type = other DNA
atgcccaagtcttgtgccgctcgccagtgttgcaatcgttacagctctagaaggaaacagttgacttttcaccgcttccctttctcccggcctgagttgctgaaggagtgggtcttgaacattggcagaggcaatttcaaaccaaagcaacatacagtcatttgcagcgaacattttagacccgagtgcttctctgcctttgggaatcggaaaaacctcaaacataatgcggtgcctaccgtgtttgctttccaggaccccacacagcaggtgagagaaaacaccgatcccgcttctgagcggggtaacgcgtcaagtagccagaaagagaagacctcaccgtgccgctctcaggtgcttccggaagcaggcgctggcgaagactcccccggtaggaacatggacaccgccctggaagaactccagctcccgccaaatgcggaaggtcacgtgaaacaggccatgctgtttaacgtagaaaatggaacccccgcttcacgggaagcactatggctgtcagaggagtag

SEQ ID NO: 243930 - DNA, 732 bp, synthetic construct
  misc_feature 1..732: note = Description of Artificial Sequence: Synthetic coding sequence
  source 1..732: mol_type = other DNA
atggagcatgcttttacaccactcgaacccctcctcagtacagggaatttgaaatactgcttagtgattctgaaccagccactcgacaattactttaggcacctttggaataaggctctgttacgcgcttgtgctgatggaggggcaaatcgtttatacgatattactgaaggcgagagagagtcgtttctccctgaattcatcaatggcgattttgactctattcgcccagaagtgagagaatattacgcaacgaaaggatgtgaactgatctctactccagatcaggaccacaccgacttcaccaagtgtctgaaaatgctgcagaaaaaaattgaggagaaggaccttaaggtggacgttattgtgacactggggggtcttgccggacgcttcgaccagatcatggcgagtgttaatacactgttccaggccacccacataacccctttcccaattattataatccaagaagagtccctcatctatctcctccagcctgggaagcatagactgcacgtcgacaccgggatggagggcgattggtgcggtctcattcctgtgggacagccttgtatgcaggtaaccactaccggattgaagtggaatcttaccaacgacgtcttagccttcggaaccctagtttcaacctccaatacgtacgatggctccggcgtcgtcacagtggagactgaccaccccctgctctggaccatggccattaagagttag

SEQ ID NO: 243931 - DNA, 585 bp, synthetic construct
  misc_feature 1..585: note = Description of Artificial Sequence: Synthetic coding sequence
  source 1..585: mol_type = other DNA
atggagcacgcattcacccccctggagccgctgttgtctaccggaaacttgaagtattgtctggtaattctcaatcagccgctcgataactattttcgtcacctgtggaataaagcgctcttgcgggcttgcgccgacggaggcgctaacagactgtacgacattacagaaggggaacgagaaagctttttacctgaattcattaatggagatttcgattcgattcggcctgaagtccgggagtactacgcaactaagggttgcgagttgatctcaacccccgaccaagaccacacggattttactaaatgcctgaagatgctccagaaaaagatcgaggaaaaggatcttaagggcaagcaccgcctgcatgttgacaccggtatggagggagactggtgcggtctgatcccggtgggacagccttgtatgcaggtcacaacgacaggcctcaagtggaacctcaccaacgatgtgctcgcgtttggcaccctcgtgtccactagcaacacatatgatggatcaggagtggtaactgtggagaccgaccatccattactgtggaccatggctatcaagagttag

SEQ ID NO: 243932 - DNA, 375 bp, synthetic construct
  misc_feature 1..375: note = Description of Artificial Sequence: Synthetic coding sequence
  source 1..375: mol_type = other DNA
atggtggacgtgatagtcacgctggggggtctggctggtcgcttcgaccaaattatggcttccgtgaacacgctcttccaggcgacacatatcacacccttcccgatcattataattcaggaggagagcttgatctacctcctccagccaggaaaacatcgtctccacgtagacactggaatggaaggggattggtgcgggctgattccggttggccagccgtgtatgcaggtgacaaccacagggcttaagtggaacttacggacatgcgactacacccgcactacatggatcgccaaggacaatccagtccccaggttgatccggttgatacggctgaaccacatttgcaaggtgcccctagcgatcaagtag

SEQ ID NO: 243933 - DNA, 504 bp, synthetic construct
  misc_feature 1..504: note = Description of Artificial Sequence: Synthetic coding sequence
  source 1..504: mol_type = other DNA
atggaacacgccttcacccctcttgaacccctactttccacaggcaatttaaagtattgtctggtaattctgaaccagcctctggacaattacttccgccacctgtggaacaaagccctcctcagggcttgtgcagacggaggggctaaccgactgtatgatattacggaaggagagcgagaatcattcctgcccgagttcattaacggtgatttcgactctatccggcctgaagtcagggagtactatgctacgaagggttgcgagctgatcagtacacccgaccaggaccatacggattttaccaagtgtctcaagatgctccagaagaagatcgaagagaaagacttaaaagttgatgtcatcgtgacgcttggtggattggccggacgatttgaccagatcatggcgtccgtgaacaccctttttcaggctacacacataaccccattcccaattatcatcatacaagaggagtccttgatctacttgcttcagccctag

SEQ ID NO: 243934 - DNA, 693 bp, synthetic construct
  misc_feature 1..693: note = Description of Artificial Sequence: Synthetic coding sequence
  source 1..693: mol_type = other DNA
atggcccaaggcttgatagaagtggagaggaaattccttccaggaccgggaaccgaagagagactccaagaactcgggggaactcttgagtatcgcgttacctttagggatacttactacgataccccagaattgagcctaatgcaagccgatcactggctgagacgaagggaagattccggttgggagctcaaatgtcctggagctgccggagtgctggggcctcataccgaatataaagagttaaccgcagagcccacaattgtggcccagctgtgtaaagtgctacgcgctgatgggcttggtgccggagacgtggcagccgtgcttgggcctctggggcttcaggaagtggcatcattcgtcaccaagaggagtgcttggaagctagtcctactgggtgctgatgaagaggagccccagctgagagtggatctggataccgccgattttggctacgcagttggggaggtggaggccttagtgcacgaggaggctgaggtccccactgccctggagaagattcacaggctgtcctctatgctcggtgtgcccgctcaggaaaccgcgccagctaagcttattgtgtacctgcagcgctttcgaccccaggattatcaaaggctgctggaagtgaactcttccagagagcgtcctcaggaaaccgaggaccccgatcactgtttgggctag

SEQ ID NO: 243935 - DNA, 693 bp, synthetic construct
  misc_feature 1..693: note = Description of Artificial Sequence: Synthetic coding sequence
  source 1..693: mol_type = other DNA
atggcacaaggtctgattgaggttgagagaaagtttctgccagggccaggtactgaagagcgcctgcaggagctgggtggaactctggaatatcgagtgactttccgcgatacatactatgacactcccgagctctcactaatgcaggccgatcactggttgcggagacgtgaggacagcggttgggaactcaagtgtcccggagcagctggggtgcttgggccacataccgagtacaaggaactgaccgctgagccaactatagtggctcagctgtgcaaggttctccgcgctgatggcctcggggctggggacgttgcggcagtcctgggacctctcggcctccaggaggttgccagcttcgtgactaaacgcagcgcctggaaactggtgctgctgggcgctgatgaagaggagccacagctgcgggtggacttggatacagccgattttggctacgctgtgggtgaggtcgaagccctggtacatgaggaagcagaagtccctactgccctcgaaaagatacaccgtctgtctagcatgttgggggttcctgcgcaggaaactgcaccagccaaattaatcgtgtacctgcaacgctttaggccgcaggattaccagagactgctagaggttaactcctcccgtgagagaccacaggaaacggaagatccggatcattgtctgggctag

SEQ ID NO: 243936 - DNA, 372 bp, synthetic construct
  misc_feature 1..372: note = Description of Artificial Sequence: Synthetic coding sequence
  source 1..372: mol_type = other DNA
atggcccaggggttaatcgaggtggagcgcaagttcctccctggtcctgggacagaggagcgtctacaagagctcggaggcactctggagtaccgtgtgaccttccgcgatacatattatgacacgcctgagctatctttaatgcaggctgaccattggttgaggaggcgggaggactctggatgggaactaaaatgtcccggagccgcaggggttttgggcccacatactgaatacaaggagctgaccgcagaacccactatagttgcacagttatgtaaagtgctaagggctgacggactaggtgcaggcgacgtagcggcagtcttgggacccttgggcctccaagaagtcgcaagctttgtcacatag

SEQ ID NO: 243937 - DNA, 2070 bp, synthetic construct
  misc_feature 1..2070: note = Description of Artificial Sequence: Synthetic coding sequence
  source 1..2070: mol_type = other DNA
atgaaacctcctgcagcctgcgcgggtgatatggccgatgccgctagtccatgctccgtcgtcaatgatttgaggtgggatctgtccgcccaacaaattgaggaacgaacccgcgagctcatcgaacagactaagagagtgtatgaccaggtgggcacacaggaatttgaggatgttagctacgagtcaactctgaaagcactggcagatgtagaagtgacctacaccgtgcagagaaatattctcgactttccccagcacgtctcccctagcaaagatatccgcacagccagtaccgaggcagataagaagttgtcagagtttgatgtggagatgtctatgagagaggatgtctatcagcggatcgtatggctacaggagaaggtgcagaaggacagtctgagacccgaggctgctaggtacctcgaaagactcatcaagctgggtaggcggaacggcctgcacctgcccagagaaactcaggagaacatcaaacgaatcaaaaagaagctaagtctgctgtgtattgattttaataaaaatctgaatgaggacactacatttctcccattcaccctgcaggagctgggaggcttgccagaggacttcctgaatagtctagagaagatggaggacggcaaactgaaggttacattgaaatatcctcattatttcccactgctaaaaaagtgtcacgtgcctgaaacccgcagaaaagtggaggaggcgttcaactgtaggtgcaaagaagagaactgtgcaatacttaaggaactggtgaccctgcgggctcagaaatctcggcttttgggttttcacactcacgcggactatgtgcttgaaatgaatatggcaaagactagccaaactgtggccacctttttagacgagctggctcaaaagctcaagcccctgggagaacaggaaagggccgtcatactggagttgaagcgagctgagtgtgaacggaggggtctgccctttgatgggagaatccgggcatgggacatgcgatattatatgaaccaggtggaggagacaaggtactgcgtggaccagaatttgctaaaagaatacttccccgtgcaggtcgtgacccacgggctcctcgggatttaccaggagctgctgggactcgcatttcaccacgaagaaggcgcttcagcctggcatgaggatgttcgtctctacacagcacgggacgccgcttctggcgaggtagtaggtaaattttatctggacctctatccccgagagggaaaatatgggcacgccgcatgcttcgggctgcagccgggttgcctgcgtcaggacggcagtcggcaaatcgccatcgctgcaatggtcgctaactttaccaaacctaccgctgacgccccaagccttctgcagcatgacgaagtggaaacctacttccatgaatttggacatgtgatgcaccagttgtgctcgcaggctgagttcgcaatgttctcagggacgcacgttgaacgcgacttcgtcgaagcccctagccaaatgctcgagaattgggtatgggagcaggagcccctgctgcgcatgagccggcattatcgaaccggcagcgcggtcccccgtgaactgctagaaaagctgatcgagagccggcaagccaacaccggcttgtttaatctgagacagattgtcttggcaaaggtagatcaggctctgcacacccagacggacgccgacccggctgaggagtatgcacggctttgccaggagatcttaggcgtccctgccacacccggtaccaatatgcccgcaaccttcgggcatctggcagggggatacgatgcacagtattatggatatttgtggagcgaggtatactctatggacatgttccatacgcggttcaagcaggaaggtgttctcaattccaaggtcggcatggattataggagctgcatcttgaggccaggcggatcagaggatgcatccgcaatgctaagaagattcctcggtagagaccctaaacaggacgccttcctcctgagtaagggcctgcaggtcggtgggtgtgagccagagccccaggtgtgttag

SEQ ID NO: 243938 - DNA, 777 bp, synthetic construct
  misc_feature 1..777: note = Description of Artificial Sequence: Synthetic coding sequence
  source 1..777: mol_type = other DNA
atgttttcgggtactcacgtcgaacgtgactttgtggaagccccttcccagatgcttgagaactgggtgtgggaacaagaaccactgctccggatgtcaagacattataggacaggttccgccgtgcccagagagctgcttgaaaagttgattgaaagccgtcaggccaacacaggccttttcaatttgagacaaatcgtgctagctaaagtcgatcaggccctacacacacagacagacgcagaccctgcagaggagtacgccagactgtgtcaggagattcttggagtgccagccacccctgggactaacatgcccgctactttcggtcatttagctgggggttacgacgctcaatactatgggtacctgtggagtgaagtttactctatggatatgtttcatactcgcttcaagcaggagggtgtattgaattctaagtttccacactatgaggtccgaccacttagacatgtgtcgctctgcctacccctgacgtggtgtgatcctggcagtgggcaaccccctgaatccctaacaaggaataggtggctgcctgctttgagagccggtcctgctctgccagggtgcaacatagcgcttgggtcactgcaagtgggtatggattatcgaagctgcatcctcaggccaggcggatcagaagatgccagtgccatgctgaggcgattcctgggcagggatccaaagcaggatgccttcctcctgtcaaagggtctgcaggtcggcggttgcgagccagagccacaagtttgctag

SEQ ID NO: 243939 - DNA, 738 bp, synthetic construct
  misc_feature 1..738: note = Description of Artificial Sequence: Synthetic coding sequence
  source 1..738: mol_type = other DNA
atggatggtacccgaaccagcctggacattgaggaatatagtgatactgaggtacagaagaaccaggtgttgacactggaggagtggcaagacaagtgggttaacggcaaaacggcctttcaccaggaacaagggcaccaactactgaagaagcacctggatactttcttaaaggggaagagcggactgagagtgtttttcccactgtgcggtaaagcagtggaaatgaagtggttcgctgacagagggcacagtgttgtgggagtcgagatttcagagttgggcatccaggagttctttaccgagcagaatctgtcatacagcgaggaaccaataaccgaaatcccaggaactaaggtatttaagagcagctccgggaatattagcttgtattgctgcagtatcttcgatcttcctaggactaatattgggaaattcgatatgatttgggatcgtggggctctggtcgctattaatcccggagaccggaagtgctacgcggacacaatgttcagcctcctggggaaaaaattccagtacctgctgtgtgtccttagctacgacccgacaaaacatcctggaccccctttctatgtccctcacgcagaaattgagaggttattcggaaagatttgtaacattcgttgcttagagaaagtggacgcgttcgaagagagacacaagtcttggggcatcgactgcctcttcgaaaaactctatctgcttacagagaaatag

SEQ ID NO: 243940 - DNA, 519 bp, synthetic construct
  misc_feature 1..519: note = Description of Artificial Sequence: Synthetic coding sequence
  source 1..519: mol_type = other DNA
atggagacgaggcccaggctgggggctacttgcctgctggggttcagttttctgctactggtgattagcagtgacggacacaatggtctggggaagggctttggcgatcacatccactggcgaacacttgaagatggtaaaaaggaggccgcagcctcaggcctccctttgatggtcattatccacaaatcttggtgcggtgcctgtaaagcattgaagcctaagtttgctgagagtactgagatcagcgagctcagtcataattttgtcatggtcaatcttgaggatgaagaagagcccaaagacgaagatttttcgcctgacggcggttacattcccaggatcctgttcctcgatcctagcggcaaagtccatccagaaatcatcaacgagaacggcaaccctagctataaatacttctacgtgtccgcagagcaggtagtccaagggatgaaggaagcacaagagagattgaccggcgacgcctttagaaaaaaacatctggaagatgaactttag

SEQ ID NO: 243941 - DNA, 1767 bp, synthetic construct
  misc_feature 1..1767: note = Description of Artificial Sequence: Synthetic coding sequence
  source 1..1767: mol_type = other DNA
atggccagcaagaagagagaagtccagctccagacggtcataaataatcagagcctgtgggacgagatgcttcagaataagggactgacagtgatcgacgtgtatcaggcttggtgcgggccatgtcgcgctatgcaacctctgtttagaaaacttaagaatgaactaaacgaagatgaaatcctgcactttgccgtcgccgaagcagataatattgtgacactccaaccttttagagacaagtgtgaacccgtgttcctgttttccgtgaatggaaagatcatagagaagatacaaggagccaatgccccacttgtaaataagaaggtgatcaacttaattgacgaagagcggaagatcgctgcgggtgaaatggcaagaccacagtaccctgagataccactggtcgactccgactcagaggtgagcgaggagtccccttgcgaatccgtgcaggaattgtattctatcgcaatcatcaaacctgacgccgtcatttccaagaaggtgctggagattaaaaggaagattacaaaggccggattcatcatcgaagccgagcacaaaaccgttttaactgaggagcaagtcgtaaacttttacagccggattgccgaccaatgtgattttgaggaatttgttagctttatgacttctggtttaagctacatccttgtggtttctcaaggttccaaacacaaccctccctccgaagagaccgagccccagacggatactgagcccaacgaacgaagcgaggaccagcccgaggtggaagctcaggtcacccccggtatgatgaagaacaagcaagattctttacaagaatacttggagagacagcacctcgcacagctgtgtgatatagaggaagatgccgcaaacgtggccaagtttatggacgctttttttcctgactttaagaagatgaagtcaatgaaactcgaaaaaactctcgccctattgcggccaaatctctttcatgaaaggaaagatgatgtgttgaggattattaaggatgaagatttcaagatcctggagcaacgacaggtggtgcttagtgaaaaagaggcccaggcgctgtgtaaagagtatgagaatgaggattatttcaacaagctcattgaaaatatgacaagcggtccgagcctggcactggtcctgctaagggataatggcctgcagtattggaagcagctactgggccctagaacagtagaggaggcaatcgagtacttccccgaatcgttgtgtgctcagtttgcgatggactcactccccgtgaaccagctgtacggatctgactccctggagacagcagagcgggagattcaacatttttttccgttgcagtcgaccctgggattaatcaaacctcatgcaacttctgaacaaagggagcagatactgaagattgtgaaagaagcgggatttgatctgacccaggtgaagaagatgtttcttacgcctgaacagatcgaaaagatctaccctaaagtcaccggaaaggacttttataaagacctgctggagatgctgtccgtcggaccttcgatggtcatgattctcactaagtggaatgccgtggccgagtggagacgcttaatgggtccaactgacccagaagaggcgaaactattgtctcccgatagtatccgcgcacagttcggaatctcaaaactaaaaaacatagtgcatggggcttctaacgcctatgaagctaaagaggtagtcaacagactgttcgaggaccccgaggaaaattag

SEQ ID NO: 243942 - DNA, 1767 bp, synthetic construct
  misc_feature 1..1767: note = Description of Artificial Sequence: Synthetic coding sequence
  source 1..1767: mol_type = other DNA
atggctagcaagaagcgcgaagttcagctgcaaactgtgattaacaatcagtccctgtgggatgagatgctgcaaaacaagggactgactgtcattgacgtatatcaggcctggtgtggtccgtgtagggccatgcaacctttatttcgcaaactcaaaaatgaactgaatgaggacgaaatactgcactttgctgttgccgaggcagataatatcgtgacacttcagccttttcgggacaaatgtgaacccgtctttctgttctcagtgaacggaaagattatcgagaagattcagggcgcaaacgcaccccttgtcaataagaaggtcatcaatctgatcgacgaagaacgaaaaatcgcagctggcgagatggcacggcctcagtacccagaaatcccgctcgtcgattcggactcagaggtctctgaagaaagcccgtgtgagtccgtgcaggagctatatagcattgccatcattaaaccagatgccgtgatttccaagaaggtcttggaaattaagagaaagattacaaaggccggtttcattatcgaagccgaacataaaaccgtattgacggaagaacaggttgtgaacttttactccagaatcgctgatcagtgcgactttgaagaatttgttagtttcatgactagtggtctctcctacatcctggtggttagccagggaagtaaacacaatcccccttctgaggaaacagagcctcagaccgacacagaacccaacgagcggtcggaggatcaacctgaggtggaagcccaggtgacccctgggatgatgaagaacaagcaagacagtctgcaggaatacctcgaaagacagcatctggcccaactgtgcgatatcgaggaggatgctgccaatgtggctaaattcatggatgcattttttcctgacttcaaaaagatgaagtccatgaagttagagaagactcttgccctccttcgcccaaatctatttcacgaacgtaaggatgatgtgctaaggattatcaaggatgaagattttaagatcctcgaacagaggcaggttgtgctgtcagaaaaagaggcacaggcactgtgtaaagagtatgaaaatgaagactactttaacaaactgatcgagaacatgacctcaggtcctagcctggccctggttcttctcagggacaatggccttcagtactggaagcagctgcttggcccaagaacagtggaggaggccatcgagtatttcccagaaagcctgtgtgcacagtttgccatggattccctccctgtcaatcagctgtacggtagtgacagccttgagacagctgaaagggagatccaacacttcttccccctgcaatccactttaggacttatcaagcctcatgccacctcagaacagagggaacagatactgaaaatcgtgaaagaggctggattcgacctgacgcaagtgaagaagatgttcttgacgccagagcagattgaaaaaatttatccaaaggtaacgggcaaagatttttataaagacctgcttgaaatgctgagcgtcgggccttcaatggtgatgattctgaccaaatggaacgcagtcgccgagtggcgacggctcatggggccaaccgacccagaagaggcaaagctactgtcccccgattcaattcgagcccaattcgggattagcaagttaaagaacattgtgcacggcgcatcgaatgcttacgaagcaaaggaagtggtgaaccgcttgtttgaagacccagaggagaattag

SEQ ID NO: 243943 - DNA, 681 bp, synthetic construct
  misc_feature 1..681: note = Description of Artificial Sequence: Synthetic coding sequence
  source 1..681: mol_type = other DNA
atggaggccgacgcatccgttgacatgttttccaaggttctggaacatcagctactgcagaccactaagcttgtggaagaacacctggattccgaaattcaaaagttagaccaaatggatgaagacgaactggagagactgaaggagaaacgtctccaggctctgcgtaaagcccaacagcagaagcaagagtggctgagcaaggggcacggggaatacagggaaattcccagcgagcgggatttcttccaggaagtaaaagaaagcgaaaatgtagtatgtcacttctatcgtgattccaccttcagatgtaagatcctggatagacacctggcaatcctgagtaagaaacacctggagactaaattcctcaagctcaacgttgaaaaagccccattcctctgcgaacgtctccacattaaggtgattcccaccctcgccctgctgaaggacgggaagacccaggattacgtcgtggggttcactgacctgggcaacacagacgacttcacgactgagacactggagtggcgcctgggttcttccgacattttaaactattctgggaatttgatggagcccccattccagaatcagaagaaatttggcaccaattttaccaaacttgaaaagaagaccatccggggaaagaagtacgattctgacagtgacgacgactag

SEQ ID NO: 243944 - DNA, 408 bp, synthetic construct
  misc_feature 1..408: note = Description of Artificial Sequence: Synthetic coding sequence
  source 1..408: mol_type = other DNA
atggaggcagatgcctcagttgacatgttctccaaagtgctggagcatcagctgctccagactactaaattagtcgaggagcacctggattccgaaatccagaagctggaccagatggatgaggacgaattggaacgactaaaagagaagcggcttcaggctctgaggaaggcacagcagcagaagcaagagtggttgtccaaggggcatggcgagtatagagagattccctccgagcgagattttttccaggaggtgaaagagtctgagaacgtcgtctgtcatttttatagagactccactttccggtgtaaaatactggatcggcacctcgcgatcttaagcaagaaacatttggagacaaagtttttgaaattgaatgttgagaaagcgccttttctgtgttag

SEQ ID NO: 243945 - DNA, 627 bp, synthetic construct
  misc_feature 1..627: note = Description of Artificial Sequence: Synthetic coding sequence
  source 1..627: mol_type = other DNA
atgtcgcagaagtcattggctcctagattgaattcagtgccgtttggtcgcatggaagctgacgctagtgtggacatgttttcgaaagtgctcgagcatcaactgctgcagactaccaaactcgttgaggagcatctggactctgagatccaaaaactcgaccagatggatgaggacgagttggaacgtctgaaggagaagaggctgcaggcgcttaggaaggcacagcagcagaaacaagagtggctgagcaaagggcatggcgagtaccgggaaattccatctgaaagggacttttttcaagaagtaaaagagtcagagaacgttgtctgccacttttaccgtgattccacattccgctgtaaaatattggatcgacacttggcaatcctctccaaaaaacacttagaaacaaagtttttaaaactgaacgtggaaaaagcaccctttctttgcgagcgccttcatattaaagtcatacccacactggccctgctcaaagacgggaaaactcaggattacgtggtcgggtttactgatctcggaaataccgatgattttaccactgagacactcgaatggagactggggtccagtgacattctaaactatcgctggtggccttag

SEQ ID NO: 243946 - DNA, 1017 bp, synthetic construct
  misc_feature 1..1017: note = Description of Artificial Sequence: Synthetic coding sequence
  source 1..1017: mol_type = other DNA
atggccgcaatggctgtggcgctgagaggattgggcggaagattccggtggcgaacacaggcagtggccggtggcgtcagaggggcagccagaggcgcagccgcaggccaaagggactacgatttgctggtcgtgggcggagggtcgggtggactggcctgcgcaaaagaagccgctcagctgggccgtaaagtggcagtcgtggactacgtggagccaagcccgcaaggcacccggtggggtctggggggaacatgcgttaatgttggctgcattcctaagaaactcatgcaccaggccgcactgctcggcggacttatacaggacgcacccaactatggatgggaggtcgctcagcctgtgccccacgattggcgcaaaatggcagaggccgtgcagaaccacgttaagagcttgaactgggggcacagggtccagcttcaggatcggaaggtcaagtatttcaatattaaggcatcttttgttgacgagcacaccgtttgtggggtcgcgaagggcggaaaagagatactcttaagcgctgaccacattattatagcaacaggagggcgaccgaggtacccaacacacatcgagggagcccttgagtatggcattacatccgatgatatcttctggctgaaagagtcccccggaaagactctcgtggtgggtgcctcatacgttgctctcgagtgtgcaggatttctgacaggaatcggcctggacaccacaattatgatgcggagtatccccctgagaggatttgatcagcagatgagctctatggttatagagcacatggcctcccacgggacccggttcttaagggggtgtgccccatccagagtacgtcgactccccgacggccaactccaggtgacctgggaagacagcaccactgggaaagaagatacaggtaccttcgacacagtgctgtgggctatcgccccttgtatttcggcctgcctacctaccaccgtggggcatgcaggcaagaaccagaggcgcgattag

SEQ ID NO: 243947 - DNA, 1485 bp, synthetic construct
  misc_feature 1..1485: note = Description of Artificial Sequence: Synthetic coding sequence
  source 1..1485: mol_type = other DNA
  misc_feature 1..1476: note = DNA
  misc_feature 1477: note = RNA
  misc_feature 1478..1485: note = DNA
atggaggatcaggcgggacaacgcgactacgatctgcttgtggttggtggcggatcaggcggactggcctgcgccaaagaggccgctcagttgggaaggaaggtagcagtcgttgactacgttgaaccatcccctcaggggacgaggtggggactcgggggtacctgcgtcaatgtgggctgtatcccaaaaaaactaatgcaccaggcagctttgctgggcggattaattcaggacgctcccaattatgggtgggaagtggcccagcccgtgccccatgactggagaaaaatggccgaggccgtgcagaaccacgtgaagtcattaaactgggggcatcgtgtacagctgcaggacagaaaagtgaaatatttcaatatcaaagcatctttcgtcgatgagcacaccgtgtgcggggtcgctaagggcggaaaggagattctgctgagtgccgatcacataatcatagcgactggcggaaggccaaggtatcctacgcatatcgagggagccctagagtacggaataacttccgatgacattttctggctgaaggaatccccaggcaagactcttgtcgttggagcgagttacgtcgcactggaatgtgccggattccttaccggtatagggctggatactaccatcatgatgagatctattccactgcgcggattcgatcaacagatgtcgtctatggtgatagagcatatggcctcccacggcactcggtttctgcgtggctgcgccccatcccgggtgcggcgactgccggatggacagctccaagttacttgggaggactctacaacaggcaaggaggataccggcacctttgacacagtgctgtgggccatcggacgcgttccggacacaaggtctctgaacctggaaaaggctggggtggacacctcccctgacacccagaagattctggtggactcaagggaggcgacctctgtaccacacatctacgcaatcggtgatgttgtcgagggcagaccagagctgactcctattgcaatcatggctggtcgtctgctcgtacaaaggctcttcggaggtagctctgacctgatggactacgacaacgtgcccacaaccgtgttcactcctctggaatatgggtgtgtgggcctgtcagaagaggaagccgtggcccgacacggacaggaacatgttgaggtttaccacgcccattacaaacccctggaatttactgtcgcgggacgcgatgcatctcagtgttacgtaaaaatggtttgccttcgagagcctcctcaactggtcttaggcctgcactttttaggcccaaatgccggtgaggtcacccagggcttcgctcttggaattaagtgtggcgcaagttacgcccaggtcatgcgcacggttggtattcaccccacatgctccgaagaggtggtaaagcttagaatcagcaaacgatcaggtctggatcccaccgtgacaggttgttgaggctag

SEQ ID NO: 243948 - DNA, 1575 bp, synthetic construct
  misc_feature 1..1575: note = Description of Artificial Sequence: Synthetic coding sequence
  source 1..1575: mol_type = other DNA
  misc_feature 1..1566: note = DNA
  misc_feature 1567: note = RNA
  misc_feature 1568..1575: note = DNA
atggccgctatggccgtggcactacgcggattgggcggtcgtttcagatggcggacacaggccgtggccggtggggtacgaggtgctgctcgcggagctgctgccggacagcgcgattacgatcttctcgttgtgggcggaggctccggcggacttgcctgcgccaaagaagccgctcagctcggcaggaaagtggccgtggtggactacgtggaaccttcccctcagggcaccaggtgggggcttggaggaacctgtgtcaatgtgggttgtatccccaagaaactcatgcaccaggcggctctgcttggcggactgattcaggacgcccctaattacggctgggaagttgctcagcctgtaccccatgattggcgaaaaatggccgaagcagtccagaatcacgtcaagagtctcaactggggacatagggtgcagttacaggaccggaaggtgaaatacttcaatatcaaagcctcctttgtcgacgagcatactgtgtgcggggttgccaaggggggaaaggaaatacttctgagcgctgaccatatcattatcgcaaccggcggacggcctagatatcctacacatattgaaggtgcattggaatatggcatcacgtccgatgatatcttttggttaaaggagagtccaggcaagacattagtcgtcggtgcctcgtacgtggctttggagtgcgccggtttccttacagggatcggccttgatacaaccataatgatgcgatccatcccacttcgcggatttgatcagcaaatgtcatccatggtgattgaacacatggcttcgcacggcacgcgctttttgcgaggctgtgccccatccagggtgaggaggctcccagacggacaacttcaggtcacctgggaagatagcacaacaggcaaggaggatacagggaccttcgacaccgtgctgtgggcaatcggtcgggtgccggatacgcggagtctcaatttggaaaaagcaggtgtggatacatcacccgatacgcaaaagattctggttgactcgagggaagcaacgagcgtgccccacatttatgcaattggagacgttgtcgagggcagacctgaactcacaccaatcgcgattatggctggacgcctactggtgcagcgcctatttggtggcagtagcgatctcatggattacgataacgtgccaaccactgtgtttacgccccttgagtatggatgtgttgggctgagtgaagaagaggccgtagcgaggcatggccaggaacacgtcgaagtctaccacgctcactacaaacccttagagtttaccgtggccggacgggatgcgtcacagtgctatgtgaagatggtgtgcttgcgtgagccccctcagcttgtcttgggacttcactttttggggccaaatgctggagaagtgacacaaggtttcgcactgggtattaaatgtggagccagctacgcccaggtgatgcgtacggttgggatccaccccacatgttctgaggaagtggtgaaactgaggatttccaaacgatccgggttggatcccacggtcacaggatgctgagggtag

SEQ ID NO: 243949 - DNA, 1566 bp, synthetic construct
  misc_feature 1..1566: note = Description of Artificial Sequence: Synthetic coding sequence
  source 1..1566: mol_type = other DNA
atggcggcaatggcggtcgccttaagagggctcggcggacgcttcaggtggcgcacccaggctgtggctggcggagtgcgcggtgcagcacgcggtgccgctggacagagagactacgatctgctggttgtcggaggtggaagtggaggactggcttgcgcaaaggaagccgcacagttggggcgtaaggtggcagtggtggactacgtcgaaccaagcccgcagggcactcgctggggccttggaggtacgtgcgttaacgtgggctgcattcctaaaaagttgatgcaccaggcagccctcctgggtgggttgattcaagacgcccctaattatggatgggaagtggcccagccagtacctcacgactggagaaaaatggccgaggcagtccagaaccatgttaagtctttgaactgggggcatcgagtacaattgcaggaccgcaaggtcaaatactttaatatcaaggcctccttcgtggatgagcacactgtgtgcggagtggccaagggtggtaaagagatcctgctgagtgccgatcacatcatcattgctaccggcggacgcccacgttatcccactcacatcgaaggagccttagagtatgggattacatccgatgatatcttttggctcaaagagtccccaggcaaaactctggtggtcggcgcatcttatgtggctttggagtgtgcaggctttctgactggaatagggctggacacaaccattatgatgcggagcatcccgctccgcggttttgaccagcagatgtcctcgatggtgatcgagcacatggcttcccacgggactagattcctaaggggttgcgccccatcgcgcgtccgcagactccctgatgggcagctacaggtcacgtgggaggactccacgacagggaaagaggatactggcactttcgatactgtcctctgggcgattggcagagttcctgatacgcggagccttaatctggagaaagctggggttgacacaagccccgacacccagaaaatactggtggactctagagaagctacaagtgtgccccatatttacgcgattggcgacgtggttgaaggccgacccgaactgacgccaattgccataatggccggaagattactcgtgcaacggctgttcggaggttcaagtgacctcatggactatgacaatgtaccgaccacagtgtttactccgttggagtatggttgcgtcggcctaagcgaagaggaggctgttgccaggcacgggcaagaacacgtagaagtgtaccacgctcattataagcctttggagtttaccgtcgctgggcgagacgccagccagtgttatgtcaaaatggtctgtctgcgcgaacccccacaattagttcttggactacacttcctcggcccaaacgcaggggaagtcactcagggcttcgccctcggaatcaaatgtggcgcttcttacgcacaggtgatgcgcacagtagggattcaccctacttgttctgaggaagtagtaaaactgaggatctctaaacggtcggggctagatcctactgttaccggttgttag

SEQ ID NO: 243950 - DNA, 1569 bp, synthetic construct
  misc_feature 1..1569: note = Description of Artificial Sequence: Synthetic coding sequence
  source 1..1569: mol_type = other DNA
atggcagcaatggccgtggccctgcgcggacttggcggtaggttccgttggaggacgcaggctgttgcaggcggtgtgcgaggggcagccaggggcgctgccgcaggccaaagggactacgatcttttggtcgtaggcggaggcagcggaggcctggcgtgtgcaaaagaggcagcacagcttggacggaaagtggcggtagtggactacgtggagccatccccacagggaactagatggggcctgggtggcacttgcgtgaacgtcggctgtattcccaaaaagctgatgcaccaagcagcactgctgggagggttaatccaggatgcacccaactacgggtgggaggtggcccagcccgtcccccacgactggcggaaaatggcagaggccgtgcagaatcatgttaagagcctcaattggggacatcgcgtacagctgcaagacaggaaggtcaaatattttaacataaaggcatccttcgtcgacgagcacaccgtttgcggcgtagcaaaagggggaaaagaaattctgctcagtgccgatcacatcattatagctaccggaggaaggcccaggtacccaacacatatcgagggtgccctcgagtatggcataaccagcgatgatattttttggttgaaggagtctcctggcaaaacgctccccgtttccgtctcctatgtagctctcgaatgtgcaggattccttaccgggatcggattagatacaactatcatgatgaggagtataccacttcggggattcgatcagcaaatgtcatctatggtcatcgagcacatggcctctcacggcaccagatttctgagaggctgtgctccatccagggttcgcagactaccggacggacagctgcaggtgacttgggaggatagtaccaccgggaaagaagacacaggaaccttcgacaccgtcttatgggccatcgggagagtgcctgacacacgatcattgaacctcgagaaggccggagtcgacactagcccagatacacaaaaaattctagttgactctcgtgaggctacttcagtcccacacatttatgcaatcggagacgtggttgaggggcgtccggagctgacccccattgccatcatggcaggacgcctcctggtccagcggctgtttggtggcagctcagacttaatggactacgataatgtgccaacaactgtgttcacccccctagagtacggatgtgttggactctctgaggaggaggctgtggcaagacatggacaggaacatgtggaagtgtatcacgcccattacaagccactcgagtttaccgttgctggcagagacgccagccagtgctacgtgaaaatggtgtgtttacgtgaacctccacagctggtgctggggctgcatttcctgggccctaacgccggagaagtcacccagggatttgccctgggcataaaatgcggagcctcttacgctcaggtgatgaggacggtgggaatccatccgacttgcagcgaggaggtcgtgaagctcaggatttcaaagcgtagcggactcgatccaacagtaactgggtgctag

SEQ ID NO: 243951 - DNA, 1281 bp, synthetic construct
  misc_feature 1..1281: note = Description of Artificial Sequence: Synthetic coding sequence
  source 1..1281: mol_type = other DNA
atgcatcaggccgctcttcttgggggactcatacaggatgctccaaattacggatgggaggtggcgcagcctgttccccacgactggaggaaaatggcagaagcagtgcagaatcatgtgaaaagtctcaattggggccatcgtgttcaactgcaagaccggaaggtgaaatacttcaatattaaagcttcatttgtcgatgaacacactgtgtgcggggtggcgaagggtggtaaggaaattctgctcagcgctgatcacatcatcatcgcaactggcggacggcctcggtatccaacgcacatcgagggcgctctcgagtacggtatcacaagtgatgatatcttttggcttaaggagagtcctgggaaaacatgcgtggtcgcacatgcatatgtagccctggagtgcgccggattccttacaggcatcggcctagatacaacgattatgatgaggagcatccctttgcgcggattcgaccagcagatgtcaagtatggttatcgagcacatggcaagtcacggcacgcggtttttaagaggctgtgccccttcgagggtgcgcagactgccagatggacagcttcaagtcacctgggaggacagtacaacggggaaagaggacaccgggaccttcgataccgtactctgggccattggcagagttcctgacacccggtccttgaacttagaaaaagccggtgtagatacgtctcctgatactcagaagattttggtagattcaagggaggcaacctccgtaccccatatttacgccatcggtgacgttgtcgagggacggccagaacttacacctattgcaataatggccggtcgcctgttggttcaacgcctgtttggtggtagcagcgatctgatggattatgataatgtacccacaacagtgtttactccccttgagtatggttgtgtcgggcttagtgaagaggaggccgtggcacggcatggtcaggagcacgtcgaagtgtaccacgcgcactacaaacccctggagttcaccgttgctgggcgagatgccagccagtgctatgtaaaaatggtatgcctgcgtgagccccctcaactcgtgttaggactgcatttcctcggaccaaacgcgggagaggttacacagggatttgcactcgggattaaatgcggggctagctacgcacaggttatgaggaccgtgggcatacatccgacctgttcagaggaggttgtgaagctccggattagcaagcggtctggactcgatcctactgtaaccggctgctag

SEQ ID NO: 243952 - DNA, 1479 bp, synthetic construct
  misc_feature 1..1479: note = Description of Artificial Sequence: Synthetic coding sequence
  source 1..1479: mol_type = other DNA
atggaagatcaggccggtcaacgcgactatgacctcttggtggtaggtggtggatcaggagggttggcctgcgctaaagaagccgctcagctggggcgtaaagtcgctgtagtggactatgttgaaccttctccacaaggcactcggtgggggctgggcggaacctgtgtcaatgtggggtgcatccccaagaagttgatgcaccaagccgctctcctcggtggcctgatacaggacgcacccaactacggttgggaggtcgctcaacccgtgccgcacgactggcgtaaaatggccgaggccgtgcaaaatcacgtgaaatctctaaactggggacaccgtgtccagctccaggatcggaaggtgaaatacttcaatatcaaggcctcgtttgttgatgaacatactgtgtgcggcgtggccaagggtggtaaggagattctcctgtccgccgaccatatcattattgctactggcggacggcctaggtatcctacccatatcgagggggctctcgagtatgggattacatcggatgacatcttctggcttaaggaaagccccggaaagactttggtggtaggggcttcgtacgtggccctggagtgcgcaggtttcctgactggtattggacttgacactactattatgatgcgatccattcctctaaggggattcgaccaacaaatgtcatccatggtgatcgagcacatggccagccacggaacaagattccttcggggttgcgcaccatcccgcgtgaggcgcctcccggatggccagctgcaggtgacctgggaggacagtacaacaggtaaagaggacaccgggacatttgacactgtgctgtgggccattgggcgagtgcccgatactcggtctttaaatcttgagaaagctggggtggacacttctcccgacacacagaagatactcgtggattcccgtgaagccacgtccgtgccccatatctatgcgataggtgatgtggtggaagggaggcctgagctgacgccaatcgccattatggccggacgcctcctggtgcaacggctattcggaggctcttcagatttgatggactacgacaacgtgcctactactgtatttactcccctggagtacggatgtgtcggactgtccgaggaagaggccgtggcgagacacggtcaagagcacgtcgaggtatatcatgcacactacaaacctctagaattcaccgtggcgggtcgtgacgcctctcagtgctatgtgaaaatggtctgcctgcgagaaccgccacagctggtgttggggctacacttcctgggacctaatgccggagaggtaacccaggggttcgcccttggtatcaagtgcggggcatcttatgctcaggttatgcgcaccgtcggaattcatcccacgtgctcggaggaggtcgtgaagctgagaatcagcaaacggtccggcctggacccaactgttactgggtgctag

SEQ ID NO: 243953 - DNA, 429 bp, synthetic construct
  misc_feature 1..429: note = Description of Artificial Sequence: Synthetic coding sequence
  source 1..429: mol_type = other DNA
atgagctatatgctgcctcatttacataatggatggcaagttgaccaggcaattctgagtgaggaggacagagtcgtggtgattcggtttggccatgattgggatcctacttgcatgaagatggacgaagtgctgtacagcattgctgaaaaagtgaaaaatttcgctgtgatctatctggtggatattaccgaggtaccggactttaacaaaatgtacgaactttacgatccctgtactgtgatgttttttttcaggaataagcatatcatgattgatcttggaacaggaaacaataacaagattaactgggccatggaagacaagcaggaaatggtggacattattgagacggtttaccgaggggctcggaaagggcgaggtctggttgtgagccccaaggactactccactaagtaccggtattag

SEQ ID NO: 243954 - DNA, 276 bp, synthetic construct
  misc_feature 1..276: note = Description of Artificial Sequence: Synthetic coding sequence
  source 1..276: mol_type = other DNA
atgagctacatgttgcctcacctgcataatggttggcaggtggaccaagccatcctcagcgaagaagacagggttgtagtgatcaggttcggtcacgattgggatccgacctgcatgaaaatggacgaggtattgtactcaatagccgagaaggttaaaaattttgcagtcatctacctcgtggacataactgaggtgcctgactttaacaagatgtatgagctttacgacccatgtacagtcatgttttttttctcttaccaccgtggttggtag

SEQ ID NO: 243955 - DNA, 894 bp, synthetic construct
  misc_feature 1..894: note = Description of Artificial Sequence: Synthetic coding sequence
  source 1..894: mol_type = other DNA
atggtacaccaggtcctttaccgggctttggtcagcacaaaatggctggctgaaagcatccgaacagggaaactgggtcccggattgcgcgtattagacgcgagctggtattctcctggaacacgggaagccagaaaagagtacctggagagacacgtgcccggtgctagtttcttcgacattgaagaatgccgagacaccgccagcccctatgaaatgatgcttccctccgaggctggcttcgctgagtacgtgggtcgattaggaattagtaaccacacccacgtggtcgtgtacgacggggagcatctgggctccttttacgccccacgcgtctggtggatgtttagagtgttcggtcaccgaaccgtgagtgttctgaatgggggattccgtaactggctgaaagaaggacaccctgtcacaagcgagcctagccgtccagagccagccgtctttaaggccacactcgacaggtctcttctgaagacatacgaacaggtgctggagaaccttgagtccaagcggtttcaactcgtagattctcggagtcagggcaggttcctgggaaccgagcccgaacctgacgcggtcggcctggacagtggacatattcgcggagcagttaacatgccgtttatggatttcctcacagaggacggcttcgagaagggccctgaggagctccgtgccctattccagaccaagaaggtagacttgtctcagccattgattgcaacttgtagaaagggagtcacagcctgccacgtggccctggcagcctatctctgcggcaagcctgatgttgcggtatatgacggctcatggtctgagtggtttcgaagagccccacctgagtctcgcgtgagccaggggaaaagcgagaaggcttag

SEQ ID NO: 243956 - DNA, 894 bp, synthetic construct
  misc_feature 1..894: note = Description of Artificial Sequence: Synthetic coding sequence
  source 1..894: mol_type = other DNA
atggttcatcaggtgctatacagagcgctcgtctccaccaagtggctggccgagtccatcaggaccggaaagctcggccctggcctgcgagtgctagatgcatcttggtactcacccggtaccagagaggctcggaaggaatacctggagcggcatgtacctggcgcttccttctttgatattgaggagtgccgggatacggcttccccatacgaaatgatgttgccttctgaagccggattcgcggaatatgtcggtcgtttaggcatcagcaaccacacacatgtggtggtgtatgacggggaacacctcgggagcttttacgcacctagggtttggtggatgtttagagtctttggccatcgtactgtgtccgtgctgaatggaggatttagaaattggctcaaggaaggccatcctgtgacttcggaaccgtcgcggcctgagcctgcagtgttcaaggcaaccctcgacagaagtctgctgaagacctacgaacaggttcttgaaaacctggagagtaagcgttttcagcttgttgatagtaggtctcaaggcaggtttctgggaacggagccggagcccgacgccgtcggattagatagcggccatatccggggagcagtgaatatgccattcatggattttttgaccgaggacgggtttgaaaagggacccgaagaactgcgagcgttatttcagactaaaaaggtggacctgagtcagcctctcatagccacctgtcggaaaggggtcacagcttgtcacgtggctctggctgcctacctgtgtggtaagccggacgtggctgtgtacgacgggtcatggtcagagtggttcagacgtgcccctcctgaaagcagagtttcacagggtaagagcgagaaagcttag

SEQ ID NO: 243957 - DNA, 735 bp, synthetic construct
  misc_feature 1..735: note = Description of Artificial Sequence: Synthetic coding sequence
  source 1..735: mol_type = other DNA
atggtgcatcaggtcctgtatcgcgctctggttagcaccaaatggcttgccgaatctatacgcaccggcaagctgggacctggactgcgggtgctcgacgccagctggtatagtccaggaacaagggaagccagaaaagagtacttagaacgacacgtgccgggtgcttcgttctttgatatcgaggaatgtagagacacggcaagtccatatgagatgatgttgccatccgaggcgggtttcgctgagtacgtgggcagactcgggatttctaaccacacacacgtggtagtctatgacggggaacatctgggaagcttttatgctcccagagtctggtggatgttccgagtgttcggtcataggaccgtcagcgtactgaacggcggttttaggaactggctgaaagagggtcaccctgtgacgagtgaaccaagccgacctgaaccagcagtcttcaaagcgacgttggatcgctctcttcttaaaacttatgaacaagtcctcgagaatctggagtccaagcgattccagctcgtcgactcccggagccaaggcagatttctgggaacagagcccgagcctgatgccgtggggcttgatagcggtcatattaggggtgctgtcaatatgcctttcatggactttctcacagaagacgggtcttggtccgagtggtttcgcagggctcctcccgaatcacgagtatcccagggaaaatctgagaaagcgtag

SEQ ID NO: 243958 - DNA, 375 bp, synthetic construct
  misc_feature 1..375: note = Description of Artificial Sequence: Synthetic coding sequence
  source 1..375: mol_type = other DNA
atggtgcatcaggtgttatacagagcactggtctccaccaagtggctggccgaatctatccggacaggcaaactgggtcccggactgagggtcctggacgctagctggtactcacccggaacaagggaagcgcgtaaagagtacctggaaagacacgtgcccggtgctagcttctttgacatcgaggaatgccgggacaccgcatccccgtacgaaatgatgctgccgtccgaggccggattcgcggagtatgttggtcgcctcggcatcagcaatcacacccatgtcgtcgtgtatgatggcgagcacctgggaagcttctatgcccctagggtgtggtggatgttcagggttttcgggcaccgaactgtgtag

SEQ ID NO: 243959 - DNA, 1974 bp, synthetic construct
  misc_feature 1..1974: note = Description of Artificial Sequence: Synthetic coding sequence
  source 1..1974: mol_type = other DNA
atgagccccaccccaccactgttctccctccccgaggcccgaactagatttaccaagtccacccgcgaggcgttgaataacaagaacattaaacccttgcttagcaccttttcacaggtgcctggctctgagaacgaaaagaaatgtaccctggatcaggcattccggggtattcttgaagaggaaataataaaccactcaagctgcgaaaacgttctcgccatcatcagcctggctatcggcggagtgacagaggggatctgcactgcctccacaccctttgtccttttaggggacgtgctggactgcctgcccctcgaccagtgcgacactattttcacatttgttgagaaaaacgtagctacttggaaaagcaatactttttattccgcagggaagaattacctcctgaggatgtgcaacgatttactaaggcgtcttagcaagtctcagaatacagtgttttgcggtcgtatacagctctttttggctagactgtttcctcttagtgaaaaatccggcctgaaccttcagtcacagttcaatttagaaaacgtcaccgtttttaatacaaatgagcaagagtctaccctaggccagaagcatactgaggacagagaggaggggatggatgttgaagagggcgaaatgggggatgaggaggccccaacaacttgcagcatcccaatcgattataacctgtaccgcaagttctggagtttgcaggattattttagaaacccggtccagtgttacgaaaaaatctcctggaagaccttcttgaaatatagtgaagaggttctggcagtgttcaaaagttacaaactcgacgacacccaagcatcccgtaagaagatggaggaactgaaaactggaggcgagcatgtgtacttcgccaagttcctcacgtctgagaagctcatggacctgcagctgagtgattcgaattttcgcaggcatatcttactgcagtacttgatactgtttcagtatcttaagggacaagtcaaattcaagtcatcaaactatgtcctaacagacgagcagtccctgtggatcgaggatactactaagtctgtgtaccagcttctttccgagaatccgccagacggggagagattctcaaagatggttgagcacatcttgaataccgaggaaaattggaacagttggaagaacgagggatgcccctccttcgtgaaagaaaggacgtccgatactaagccgacccgcattatccgcaagcgcactgccccagaggattttctggggaaaggaccaaccaagaagatccttatggggaacgaggagttaactcgcctgtggaatctgtgcccggacaacatggaagcttgcaaatccgagacaagggaacatatgcctacattagaggaattctttgaagaggccatcgaacaggccgatcccgaaaacatggtggagaatgaatataaggccgtgaataactccaattatgggtggcgggctctgagactgctggctcggaggagtcctcatttctttcagcccacaaaccagcagttcaagtcactccctgaataccttgagaacatggttatcaaactcgcaaaagagctgccccctccatcagaggaaatcaagactggcgaagatgaagacgaggaggataacgacgccctgctgaaggaaaacgaaagtccagacgttcggagagacaaacctgttactggagagcagattgaggtattcgcaaacaagctcggagagcagtggaaaattcttgccccatacttagagatgaaggacagtgagattaggcagattgagtgtgatagcgaggatatgaaaatgagggccaagcagttgctggttgcctggcaggaccaagagggtgtgcacgctacacctgaaaacctgataaacgccctgaataaaagcggactttccgatttagcggagtcactgaccaacgacaatgaaaccaacagctag

SEQ ID NO: 243960 - DNA, 4782 bp, synthetic construct
  misc_feature 1..4782: note = Description of Artificial Sequence: Synthetic coding sequence
  source 1..4782: mol_type = other DNA
atggccgctgctgccgtcgttgttccggcagaatggataaagaactgggaaaagtcaggcaggggtgagtttcttcacttgtgtcgaatcctgagtgagaataaatctcacgattcctcaacatacagagacttccaacaggcactttacgaattgagctatcatgttatcaaaggaaatcttaagcatgaacaggcaagcaacgtcctctccgatatatcagagttcagggaggacatgccctctattctggcagacgttttttgcattctggatattgagacaaactgtctcgaggagaagtcaaaacgggattactttacccagctggtcttggcttgcctgtatctcgtcagcgacacagtgctaaaggaacggctagatcctgaaacactggaaagcctaggactgattaaacaatcacagcagttcaatcagaaatccgttaagatcaaaacaaaacttttctacaagcagcagaaattcaacctgctccgggaggagaacgaaggctacgcgaagctgattgctgagcttgggcaggacctgagcggcagtataaccagtgaccttattctggaaaatataaaatcactgataggttgctttaatctggacccaaaccgggtgctggatgttattcttgaggtgttcgaatgcaggcctgagcacgatgattttttcatttccctgctcgagagctacatgagcatgtgcgagccgcaaacactttgtcacatcctcggcttcaaatttaagttttatcaggagccgaacggtgagactccctcctcactgtacagggttgctgccgtgctcctccagtttaacctcattgacctggacgatttgtacgtacatctgctccctgccgataattgtatcatggatgaacacaagagggagatcgctgaagccaagcagattgtccgcaaactaacaatggtggtgctgtcttccgaaaaaatggacgagcgcgagaaggagaaagagaaagaagaggaaaaagttgagaagccgcctgataatcagaagcttggattgctggaggctctgctgaaaattggtgattggcagcacgctcagaacattatggatcagatgcctccttattatgcggcttctcacaagctgattgccctggccatttgcaaactcatccacataacaatcgaacccctctatcggagggtcggagtgccaaaaggggctaaggggagcccagtgaacgcgctgcaaaacaaaagggcgcctaaacaggccgagtccttcgaggacctcaggcgcgatgttttcaatatgttctgctatttgggcccacacctgagtcatgatccaatcctctttgccaaagtggtgcgtatcggaaaaagttttatgaaggagtttcagtctgatgggagcaagcaggaagataaagagaagaccgaagtaattctctcctgcctgctttctattactgaccaggtcctcctgccttccctcagcctgatggactgcaacgcctgcatgtccgaggagttgtggggtatgttcaaaacttttccatatcaacatcggtataggctgtatggtcagtggaaaaatgaaacatataactcccatccactactggtcaaggtcaaggctcagacgatcgatcgcgcaaagtatatcatgaaacgcctcacgaaggaaaacgtcaagccaagtggacgccagataggtaaacttagtcatagtaatccgacaattcttttcgattacatcctgagccaaattcagaagtatgataaccttattacacctgtggttgatagcctgaagtacctcacaagccttaactacgacgtcttggcgtactgcatcatcgaggctttggctaatcccgagaaagagagaatgaagcacgatgacacaaccattagctcttggcttcagagcctggcttcattctgcggcgcagtgtttcgcaagtaccctattgacctcgccggacttctacagtacgtggctaatcaactaaaagccggaaaatcttttgacctgctgattctgaaagaagttgtgcagaagatggcagggattgaaataaccgaggaaatgacaatggaacagctcgaagcgatgactggcggagaacaactcaaggcggagggtggatatttcggacagattagaaatactaagaagtcttcccagcgattgaaggacgcattattggatcacgaccttgctctccctctttgcctcttgatggctcaacaacgaaacggggtgattttccaagagggaggagagaaacaccttaagttagttggaaagctgtatgaccagtgtcatgacacgctggtgcagttcgggggatttctagcatcaaatctcagtacggaggactacataaagagagtcccgtcaatcgatgttttgtgcaacgagttccacactccacatgacgcagccttctttctcagccgcccaatgtatgctcatcacatcagtagtaagtatgatgagttaaagaaaagtgaaaagggctccaagcaacagcacaaagttcacaagtacatcacctcatgtgaaatggttatggcaccagtccacgaggctgtagttagcctgcatgtgagcaaggtctgggacgacattagtcctcagttctacgccacattctggagtctcaccatgtatgatctggccgtgcctcatacttcttacgagcgggaggtcaataaactgaaggttcagatgaaagccattgacgataaccaggagatgcctccaaacaagaagaaaaaggagaaagagcgctgtactgcacttcaggataagttgctggaagaagagaaaaagcaaatggagcatgtccagagagtgcttcagcgtttaaaattggagaaggacaattggttactggccaagtcgacaaaaaacgagacaataacaaagtttttgcagctgtgcatattcccaagatgcatcttcagcgctattgatgcagtgtactgcgctagatttgttgagctcgtgcaccagcagaaaactccaaacttctccaccctcctgtgttatgatcgggtgtttagtgacattatttacaccgtagcttcctgtactgaaaatgaggcaagtcgctacggcagattcctgtgttgtatgctggaaacagttacccgatggcactccgaccgcgctacttacgagaaggagtgtggaaattaccccggatttttgacaatactccgcgcaactggttttgacggtgggaacaaggcagatcagctcgattatgaaaattttcgccatgtggtacacaaatggcattataagctgacgaaggcctctgtgcactgcctagaaaccggcgaatacacccatattcggaatattttgattgtccttacaaaaatcctgccctggtaccccaaggtgctgaacctgggacaagcactcgagaggcgcgtacataagatctgtcaggaggagaaggaaaagaggcctgacctttatgctctggccatgggttactctggccaactgaagtctcgtaaatcttatatgattcctgaaaacgaattccatcacaaggaccctcctccacggaatgccgtcgcaagcgtgcagaacgggcctggcggtgggccttcctcctcttctatagggtccgcaagcaaatctgatgaatccagcactgaggagaccgacaaaagtcgcgagcgcagccaatgcggagtaaaagctgtaaataaggctagttccaccaccccaaaaggaaacagctctaacgggaatagcggaagcaattctaacaaagctgtaaaggaaaatgataaagaaaagggaaaagaaaaggagaaggagaaaaaggagaaaaccccagcgactacccctgaagcccgagttcttgggaaggacgggaaggagaaacccaaggaagagcgcccaaataaagacgagaaagcacgcgaaactaaggaaagaactcctaagtcagacaaagagaaggagaagtttaaaaaggaggagaaagccaaagatgaaaaattcaaaaccacagtgcctaatgcggagtccaagtcaactcaggaacgcgagagggagaaggaaccgagccgggagcgcgacatcgcgaaggaaatgaagagtaaggaaaatgtgaaagggggagagaagaccccagtttcaggatccttgaaaagtccagtcccaagaagcgatatccctgagccagagagggagcagaagaggagaaagattgacactcatcccagccctagccacagctccaccgtcaaagattcactgatcgaacttaaggaatcaagcgctaaactatatatcaaccacacacctccccctctgagtaagtcaaaggaaagggagatggacaagaaggacctggacaaaagtcgggaacgtagccgtgaaagagagaagaaagacgagaaggacaggaaggagcggaagagagaccactctaataatgatcgcgaagtgccgccagaccttacgaagagacgtaaagaagaaaacggtaccatgggtgtctcaaagcacaaaagtgaatccccttgtgagtccccctatcctaacgagaaagataaggagaaaaataaatctaagtcctcaggaaaggaaaagggaagtgacagcttcaagtccgaaaaaatggacaagattagcagtgggggaaagaaggagagcaggcatgacaaagaaaagatagagaagaaggaaaagcgtgattcgtcgggtggtaaagaagagaagaaacaccacaaaagtagtgacaagcacaggtag

SEQ ID NO: 243961 - DNA, 4782 bp, synthetic construct
  misc_feature 1..4782: note = Description of Artificial Sequence: Synthetic coding sequence
  source 1..4782: mol_type = other DNA
atggccgcagctgccgtcgtcgtgcccgcagaatggatcaagaactgggagaagtcaggacggggagagtttctccacctctgtcggatcctctccgaaaacaaatcccacgacagctcgacttatcgtgactttcaacaggccctatacgagctgtcatatcacgttatcaaaggaaacttaaagcacgagcaggccagcaatgtcctctctgacatatcagaattcagggaggacatgcccagcattttggccgatgtcttttgcatattagacattgaaacaaactgcttggaagaaaagtccaaacgggattacttcacgcagttggttctagcctgtttatatctggtaagcgacaccgtccttaaagagagactggacccagagacgttggagtccctggggctaattaaacaaagccagcagtttaaccagaaatcagtgaagataaagacaaagttgttttataaacagcaaaagtttaacctcttgcgcgaagaaaacgaaggatacgctaaattgattgctgaattgggtcaggatctctctggaagcattacctctgacctgattctcgaaaacatcaaaagtctcatcgggtgcttcaacttagatcccaatcgtgttttagacgtcatattagaagtctttgagtgtcgccctgaacacgacgatttctttatttcactcctcgagtcatacatgtctatgtgtgagccacagaccctgtgtcacatactcggttttaagttcaagttttatcaagagcccaatggggagacaccatcatccctgtatcgcgtggccgctgtcctcttgcagtttaacttgatcgatctagatgatctatatgtgcatcttctgcccgcagataattgcataatggacgaacataagagggagatcgcagaagcaaagcagatcgtgagaaaacttaccatggtggttctctccagcgaaaagatggacgagcgagaaaaagagaaagaaaaggaggaggaaaaggtggaaaagccaccagacaaccagaaacttggcctgttagaagcgctgctcaagataggggattggcagcatgcccagaatatcatggaccagatgccaccttattacgctgcatctcataaacttattgccctggctatctgcaaacttatccatatcacgatcgagcctttatacaggcgggtgggcgtacctaagggcgctaaagggagccccgtcaacgcacttcaaaacaaacgggcacccaagcaagccgagagcttcgaggacttaagacgcgacgtgttcaatatgttttgttacttgggtcctcacttgagccatgatccgattctctttgctaaggtcgtccggatagggaagagctttatgaaggagttccagtccgatggcagtaaacaagaggataaggaaaagacggaggttatcctgtcctgtctcctgtcaataaccgatcaggttctgcttcccagtctgagcctgatggattgtaatgcctgtatgtctgaagagctctggggaatgtttaagaccttcccctaccagcatcgatataggttatacgggcagtggaagaatgaaacctacaattctcatcctctccttgtcaaagtgaaggcacaaaccattgaccgggcaaagtatattatgaaacgacttaccaaagaaaacgtcaaacctagcggcaggcaaatcggtaagttgtctcactctaatcctaccatcctgttcgattacattctgagccagatccagaaatatgacaacctgattactccagtcgtagattcactgaaatacctgaccagcctgaactacgacgtgttggcttactgtatcatcgaagccctcgcaaatcccgagaaggagcgaatgaaacatgacgatacaactatatcaagctggctgcagtcattggcctctttttgcggtgccgtgtttcgcaagtatccaatcgatttggccggtctgcttcagtacgtagccaaccaactgaaggcgggaaagagcttcgacttgcttatcttaaaggaggtcgtgcagaaaatggctggtatcgaaataactgaggagatgacgatggagcagctggaagctatgacgggaggagagcagctgaaggccgaaggcggttattttggacaaataaggaatacaaagaaatccagccagcggctgaaagacgccttattggatcacgatctggccctgccattgtgtcttctgatggcccaacagcgcaatggcgtgatatttcaggaaggcggtgagaagcacctcaaactggttggcaaactgtacgatcagtgccacgacactctggtgcagttcggtgggtttttagccagtaacctgagtacagaagactacattaagagggtgccatctatcgatgtcctttgtaacgaattccacaccccacacgacgccgcttttttcctctcccggcctatgtacgcgcaccacatttcctcgaaatacgatgagctgaaaaagagcgaaaaaggcagcaaacagcagcacaaagtgcacaaatacattacgtcatgcgagatggtgatggcaccagtgcacgaggcagtggtctcattacatgtgtccaaagtgtgggacgacattagcccacagttttatgcaaccttctggtcattgaccatgtacgacttagcggtgcctcatacttcatatgagagggaagtcaataagttaaaagtgcagatgaaagccatagacgacaaccaggagatgccccctaataagaaaaagaaggaaaaggaaagatgcactgcactgcaagacaaactgctggaggaagagaagaagcagatggagcatgtccagcgggtcctccaaagacttaaactggagaaggataactggttgctagcaaagagcaccaagaatgagaccattacaaagtttttacagctttgtatctttccccgttgcatcttcagtgccattgatgcggtctactgtgctcgcttcgtggagctagttcatcagcagaaaactcccaacttctccacactgctgtgttacgaccgtgtgttttccgacattatttacaccgtggcatcttgtaccgagaacgaggctagtaggtacggacgctttctgtgctgcatgctcgagacagtaacaagatggcacagcgacagagccacttatgaaaaggagtgcggcaattacccagggttcctgacaatccttcgcgcaaccggcttcgacggtggcaacaaagccgaccagttagattacgagaatttccggcacgtggtgcataagtggcactacaagctgactaaggcttctgtgcactgcctcgagactggagagtacacccatattcggaacatactgatcgtattaacaaaaatcctgccgtggtatcctaaagtcctcaacctgggccaagcattagaacggagggttcataagatctgccaggaggagaaggaaaagagaccagatctttatgctcttgcaatgggctattcggggcagcttaaatctcggaaaagctatatgattcccgaaaatgaatttcaccacaaagatccgcctcccaggaatgcggtggcttccgtccaaaacgggccaggaggcggtccatctagtagctccatcggttctgcctcgaaatcagatgagtcgtctaccgaagagaccgacaaaagcagagagcgctcacagtgcggcgtaaaagcggtgaacaaagcgagcagtactactcctaaaggcaattcctcgaatgggaactccggctctaattccaataaagcggttaaggaaaatgacaaagaaaaaggaaaggaaaaggagaaggagaaaaaagagaagacccctgccacgacacctgaggctagggtactcgggaaggatggtaaagagaagccaaaggaggagcgtcctaacaaagacgagaaagccagagaaactaaggagcggacgcctaagagtgataaggagaaagaaaaattcaagaaagaggaaaaggcaaaggacgaaaaatttaaaacgaccgttccaaatgcggaaagcaaatcgacacaagaacgtgagcgcgagaaagagccttctcgcgagagggacattgcgaaagagatgaagtcaaaagagaatgtcaaggggggtgagaaaacccccgtgtccgggtcattgaaaagccctgtgcctcggagcgacattcccgaaccagagcgtgagcagaagagaaggaagatcgatactcaccccagcccatcccactcaagtaccgttaaagattcattaattgagctgaaggagtctagcgccaagctctatatcaatcacactcctcctcctttgtcgaagtccaaggaaagggaaatggataagaaggatttggacaagagccgggaacgcagcagggagcgagaaaagaaggatgagaaggaccgaaaggagcggaagagggaccattctaacaacgatagggaggttccaccagatttaacaaagagaagaaaggaggaaaacggaacaatgggagttagcaagcataaatccgagtccccgtgtgaatctccctaccctaatgaaaaagacaaagaaaagaataaatccaagtccagcgggaaggagaagggcagcgattccttcaagagcgagaagatggacaaaatcagcagtggagggaagaaggagagtaggcatgacaaggagaagatagagaagaaggaaaagagggattcttccggtggcaaagaggagaagaagcaccataagtccagtgacaaacatcgttag

SEQ ID NO: 243962 - DNA, 2547 bp, synthetic construct
  misc_feature 1..2547: note = Description of Artificial Sequence: Synthetic coding sequence
  source 1..2547: mol_type = other DNA
atgccaagtatccttgccgatgtcttttgtatcctcgacatcgagaccaactgtttggaggagaagtctaaaagggattactttacccagctggtgcttgcttgcttgtacctcgtctcagataccgtcctaaaagaaagactggaccctgagaccctggaatccctgggcttgatcaaacagtcacagcagttcaatcagaagagtgtgaagatcaagactaaactattttacaaacagcagaagtttaatctccttagggaggagaacgagggatacgccaaactcattgcagagctgggccaagacctttctggaagtatcacttccgatctcattctcgaaaatatcaagtccttaattggctgttttaatctagatcccaaccgggtgcttgacgtgatcctcgaggtgttcgaatgcagacccgagcacgacgacttctttatcagcctgctggagtcgtacatgtctatgtgtgagcctcaaacactgtgtcatattctcgggttcaagtttaagttctaccaggagccgaatggggagacccctagtagcctgtatagagttgctgcagtactgctgcagttcaatcttatcgacctagacgatctctatgtgcatctgctccccgcagataactgcatcatggacgaacataagcgggagattgcagaggccaagcagatcgtgagaaaactgaccatggttgtcctctctagcgagaagatggacgagcgcgaaaaagagaaggagaaggaggaggagaaggtggagaagccaccggacaatcagaagctcggtctgcttgaggccttattaaagattggtgactggcagcatgcccagaacatcatggaccaaatgcccccatattatgccgcaagccataagctgattgcattggcaatttgtaaactgatccacatcactattgaacccttatatcgcagagtgggcgtacccaagggggctaagggctctcccgttaatgcattgcagaacaaaagagctcctaagcaagctgaatccttcgaagatctgagaagggacgtctttaatatgttttgttaccttgggccacacttgagccatgatcccattttgttcgccaaggtcgtgagaattggcaagagttttatgaaagaatttcagtcagacgggagtaaacaggaggataaagagaaaaccgaagtgattctttcttgtcttctgtccataacggaccaggtactcctgccctcactcagcctcatggattgcaatgcttgtatgagcgaagaattgtggggcatgttcaagaccttcccataccagcaccggtatagactatacggccagtggaaaaacgaaacctacaattctcaccctctgcttgttaaagtgaaggcccagacaattgaccgggctaaatatatcatgaagcggctgactaaggagaacgtgaagccatctgggagacagatcgggaagctgagccactctaacccgacaatactgtttgattatgtctgcttcgagatactgtcccagattcagaaatacgataaccttatcacccctgtcgtggattcccttaaatatctgacctctctgaattacgatgtgttagcgtactgtattatcgaggctctcgcaaaccctgagaaagagcggatgaaacacgacgataccacaatctcgtcctggctccagtccctggcaagcttctgcggagccgtgttccgcaagtatcctattgatctggcaggccttctgcaatatgttgctaatcagctcaaggccggtaagagttttgatctgctcatactgaaggaggtagttcaaaaaatggcgggaatcgaaatcaccgaggagatgaccatggaacaattagaggccatgacaggcggtgaacagctcaaagccgaaggtggctactttggacagatccggaacacgaaaaagagctcccagagactgaaagatgccttactggaccacgaccttgcgcttccgctttgtctgttgatggctcagcagcggaacggtgttatatttcaggaaggcggtgaaaagcatctgaaattagttggtaagctgtacgatcagtgtcatgatactttggtgcagtttgggggatttctggcctcaaacttatcaacggaagactatattaagcgcgttccgtccattgatgtactctgcaacgaatttcacaccccccatgacgctgcatttttcctgtctaggccgatgtatgcccaccacatctcctctaagtacgacgagcttaagaagagcgagaagggttctaaacagcagcacaaggtacataagtatattacttcctgcgaaatggtgatggcacccgtgcacgaggctgttgtttcccttcacgtgagcaaagtttgggacgacatcagtcctcagttctacgccacattctggagcctgactatgtacgacctagctgtgcctcacacgagctatgagcgagaagtaaataagctaaaggtccaaatgaaggccatcgacgacaatcaggaaatgatcccccctcagtag

SEQ ID NO: 243963 - DNA, 570 bp, synthetic construct
  misc_feature 1..570: note = Description of Artificial Sequence: Synthetic coding sequence
  source 1..570: mol_type = other DNA
taagagcagaaacggcgtaagatcgatacacacccatctccaagccattcatcaacagtcaaagattcactaattgagctcaaagagtctagtgccaaactttacatcaatcacacgccacctcccctctccaaatccaaggagagagagatggataagaaggacttagataaaagtcgggagcggagcagagagagagagaagaaggacgagaaggaccggaaagaaaggaagagagaccactccaacaacgaccgggaggtccctccagatttaactaagcggaggaaagaggaaaacgggaccatgggtgtttctaaacataagtctgaatcaccctgtgaatccccttatcctaatgagaaggacaaagagaaaaataagagtaagtcctccggaaaggaaaaagggagtgattcatttaaatccgaaaagatggacaagatcagttctggtggtaagaaagaatctcgacacgataaggagaagatagagaagaaggagaaacgcgatagctcaggtggcaaggaagaaaagaagcaccacaaatccagcgacaaacacagatag

SEQ ID NO: 243964 - DNA, 1056 bp, synthetic construct
  misc_feature 1..1056: note = Description of Artificial Sequence: Synthetic coding sequence
  source 1..1056: mol_type = other DNA
atggccgtgcccgcagccgcaatgggaccttccgccctgggacaatccggccctggaagtatggctccgtggtgttccgtatccagcgggccatctcggtatgtcctcggaatgcaggagcttttccgtgggcacagtaaaactcgagagttcctcgcccattctgctaaagtgcactcagttgcatggtcctgcgacggtcggaggctcgcctctgggtctttcgacaaaacggcctctgtgttcctgctggaaaaggaccggctggtcaaagagaacaattaccgcggacacggagattccgtagaccagctgtgctggcacccatctaatcccgatctatttgtgaccgcgagcggagacaagacaatccgtatatgggatgtgcgaacaacgaagtgcatcgccacagtaaatacaaagggggaaaatatcaatatatgctggtcaccagatggacagacaatcgccgtgggcaacaaggatgacgttgtgacatttattgacgcaaagactcaccggagtaaggcagaggaacagttcaagtttgaggtcaacgagatttcatggaataatgacaataatatgtttttcctgaccaacggaaatggttgcattaacatcctgtcctatcctgagctgaagccagtgcagagtatcaacgcccatccaagcaactgtatctgtatcaaattcgacccaatgggaaagtattttgcaacaggctctgccgatgccctcgtttccttgtgggacgttgacgagctcgtgtgtgttagatgttttagtcgtctggactggcccgttagaacactgtctttctcacacgacgggaaaatgctcgcctccgctagcgaagatcattttattgatatcgcagaggttgaaactggcgataagctgtgggaggtgcagtgcgagtctcctacattcacagtcgcctggcaccctaagcggccactcctcgctttcgcctgtgacgataaggatggaaagtatgattcttcgcgcgaggcagggactgtcaagttgttcggactgccaaatgacagctag

SEQ ID NO: 243965 - DNA, 2052 bp, synthetic construct
  misc_feature 1..2052: note = Description of Artificial Sequence: Synthetic coding sequence
  source 1..2052: mol_type = other DNA
atgtcctccgagtccagtaaaaagcgaaaacccaaagtgatccggtccgacggggctcccgctgaagggaagaggaatcggtccgacaccgagcaagagggaaaatattattccgaggaagcggaagtcgatttgcgcgacccgggaagggactatgagctgtataagtatacctgccaggagcttcaacggctgatggctgagatccaggatctaaaaagtagaggaggcaaagatgtggccattgagatcgaggagcgcagaatccagagctgcgtccatttcatgactcttaagaagctcaacaggttagcacatattagactgaaaaaaggcagggatcaaacccatgaagccaagcagaaggtagacgcttatcatttgcagctgcagaacctactttatgaagtcatgcatctccagaaggagattaccaagtgcctagaatttaagtccaaacacgaagaaatcgaccttgtgagcctagaggagttctataaagaggctcctccagatatttcaaaggcagaagtgactatgggagatccccaccagcagacgctagcccgtctggactgggagcttgagcaaaggaaacgcttggccgagaagtacagggagtgtctttccaacaaggagaagattctgaaagagatagaggtgaaaaaagagtatctcagctctttacagcccagactgaatagcattatgcaggcgtctctgccggtgcaggaatacctatttatgcctttcgaccaagcccataagcagtatgaaacagccaggcatctgccaccgcctttatatgtgctctttgtgcaagccacagcttacggccaggcttgtgataaaaccttgtcggttgccatcgaggggtctgtggacgaggcaaaagctctgttcaagccgcctgaggacagccaggatgatgaaagcgattctgacgctgaggaagaacagacaaccaagcggagaaggcctacactcggagtacagttagatgacaaaagaaaggagatgctgaagagacatccactctcagtcatgctggacttgaagtgtaaggacgactcagtattgcacctaacattctactacctcatgaatctgaatatcatgaccgtgaaagccaaggtgactaccgcaatggagctgattacacctatttccgccggagacctgttgtcacccgatagcgttctctcatgcctctatcccggagaccacggaaagaaaactccaaaccctgcgaaccagtatcaattcgacaaggtcgggattctaacgttatccgactatgtgctcgaattaggtcacccatacctgtgggtgcagaaactgggcggtctgcacttccctaaagagcaacctcagcagacggtgatcgccgaccattccctgtctgccagccatatggaaactaccatgaagctgctcaagacccgagtccaaagccgcctggcactgcataagcaatttgcctctttggaacacggaatcgtgcccgtcacaagcgattgccagtacttattccccgctaaggtcgtctccagactcgtgaagtgggtcaccgtggctcatgaagactatatggaactacacttcactaaagacatcgtggacgccggtttggcgggtgacacgaacttgtattatatggcactgattgagcgaggcacagcaaaattacaggccgcagttgtgctgaatcccggatattccagtattccaccagtcttccaattgtgtctgaactggaaaggcgagaaaacgaactctaacgatgataatattagagctatggaaggcgaggtgaatgtttgttataaagaactttgtggcccatggccgagtcaccaactgttaaccaaccagctgcagagattatgcgtgctcctcgacgtctacctcgaaacagagtctcatgatgactctgtggaaggccctaaggagttcccccaagagaagatgtgcctccggttgtttagggggcctagcagaatgaagccattcaagtacaaccacccccagggattcttttcacaccgatag

SEQ ID NO: 243966 - DNA, 2052 bp, synthetic construct
  misc_feature 1..2052: note = Description of Artificial Sequence: Synthetic coding sequence
  source 1..2052: mol_type = other DNA
atgtctagcgagtcgagcaaaaaacggaaaccaaaagtgatccgcagcgatggggcacctgccgagggaaagagaaatcgctccgataccgaacaagaaggcaaatactattccgaagaggcagaagtggatctacgcgacccagggagagactatgagttgtacaagtatacttgccaggaacttcagcgcctcatggccgaaatccaggacctcaagagcagggggggaaaagacgtcgccattgagatagaggaacgtcggatccaaagttgtgtgcactttatgaccttgaaaaagcttaacaggctggcacacatccggctaaagaaggggagagaccaaacccatgaagcgaaacagaaagtggacgcctaccacttacaactgcaaaacctgctgtacgaagtgatgcaccttcagaaggagatcaccaagtgtctggagtttaaatcaaagcatgaggagattgacctcgtgagcctggaagagttctacaaggaggctccacccgacatctctaaagccgaagtgactatgggtgatccacaccaacagaccttggccaggctggattgggagctggagcagaggaaacgactcgcggaaaaatacagggaatgtctgagcaacaaggaaaagatcctgaaggaaatagaggtcaaaaaggagtatttatcttcccttcagccccgactgaacagcattatgcaggccagcttacccgttcaggaatacctttttatgccattcgaccaagctcacaagcaatacgagacggcccgacacctaccgccaccgctctatgtgcttttcgtgcaggccacggcctatggtcaggcttgcgataaaacgctaagcgtggctatcgaaggttccgttgacgaggctaaggctctctttaagccacctgaagactctcaagatgatgagagcgattctgatgccgaggaggaacagacaacaaagaggcgtcggccaactttgggggtgcagttagatgacaaacgaaaagagatgctgaagaggcacccactgagcgttatgctggatttgaagtgcaaggacgacagtgtactgcacctgactttttattacctgatgaatctcaacatcatgaccgttaaggcaaaggtaacaaccgccatggagttgatcactccaatttccgccggagatctgttatcccccgacagcgtgctcagctgtctatatcccggagaccacgggaaaaaaactcctaaccccgctaatcaataccagttcgacaaggtcggcatattaacactgtccgattacgtactagaactaggacatccatacctatgggtgcaaaagctggggggtctccacttcccgaaagagcagccacaacagaccgtgattgctgaccacagtttgtcagcttctcatatggagactacaatgaagcttctgaagacaagagttcagtctcgtctggcactgcacaagcagtttgcctcactcgaacatgggatcgtgcccgtgacatccgactgccaatatctgttccccgcaaaagtggtgtctcgccttgtgaaatgggtcaccgtggcccatgaggactacatggaactgcacttcacaaaagacattgtcgacgccggactcgccggagataccaatctgtattacatggccctgattgaacggggaactgccaaactacaggccgcagttgtgttgaacccaggctattcttcaatacctccagtttttcaactgtgcctgaattggaagggtgaaaaaacaaactctaacgacgataatatccgggctatggaaggagaggtaaatgtgtgctataaagagttgtgtggaccctggccctcccaccagctgttaactaatcagctgcagaggttatgtgtgttactggatgtgtacctcgaaacagagagtcacgatgattcagtggaaggccctaaggaatttccccaagaaaagatgtgtcttagactctttcggggacccagtagaatgaagcccttcaaatataaccacccgcagggcttcttttcacacaggtag

SEQ ID NO: 243967 - DNA, 2052 bp, synthetic construct
  misc_feature 1..2052: note = Description of Artificial Sequence: Synthetic coding sequence
  source 1..2052: mol_type = other DNA
atgagctcggagtcgtcaaaaaagcggaaacctaaagtaattcgatcagacggcgctccggcagaggggaaaagaaaccggtcagacactgagcaagaaggcaagtactactctgaagaggccgaagtggatctgcgcgatcctggccgtgattatgaattgtataaatatacttgtcaggaactgcaaaggcttatggctgaaatccaggatttgaagagtcggggtggaaaggacgtcgcaatcgaaatcgaggagcgtagaatccagagttgtgtccatttcatgacactgaagaagctaaatagacttgctcatattcggcttaagaagggacgggaccaaacacacgaagctaagcagaaagtggacgcctaccacttgcaactccaaaacctgttgtacgaagtgatgcatctgcaaaaggagattacaaaatgcctcgaattcaagagtaagcacgaggagattgaccttgtgtctctggaagagttctacaaagaggcgcctccggatatctccaaggcggaggtcaccatgggggatccccatcagcagacacttgctcgtcttgattgggaacttgaacagaggaagcggctcgccgaaaagtaccgcgaatgccttagcaacaaagagaaaattcttaaggagatcgaagttaaaaaggaatacttgagttcactgcagcccagactgaatagcataatgcaagcatccctcccggtacaagagtatcttttcatgcccttcgaccaggcgcataagcaatacgaaaccgcacgccatctccctccgcctctgtacgttttattcgtccaggctacagcatatgggcaggcctgcgataaaaccctctccgtcgcaattgaaggaagcgttgacgaagcaaaggccttatttaagcctcccgaggatagccaggatgatgagtctgattccgacgctgaggaggagcagaccactaagcgcaggaggccaaccctgggcgtccagctggacgacaaacgtaaggaaatgctgaagcgccacccgctgagtgttatgctggatctgaagtgcaaagacgactcagtattgcacctgaccttttattacctgatgaacttaaatattatgactgttaaagccaaggtgacaacagccatggaactgatcacccctatttctgccggagaccttctaagccctgactctgtcctcagttgcctgtaccctggagaccacgggaagaagactcctaatcctgctaatcagtatcagtttgacaaggtcggtatcctgactctgagtgactacgtcctggagctgggacatccatatctctgggtgcagaagctcgggggactacattttccaaaggagcagcctcaacaaacagtgatagctgatcactccctgtctgcctcccacatggagaccacaatgaagctcctcaagactcgtgttcagtcaaggttggctctccataagcaatttgcgtccctggaacacggcatcgtgcccgtgacaagcgattgtcagtacctgtttcctgcgaaagtggtcagccggcttgtcaagtgggtgacagtggcccacgaggattacatggaattgcatttcacgaaggacatagtggatgcaggacttgcaggtgacacgaacctgtactacatggcactaatagagaggggcacagctaagttgcaggctgcggtagtgctgaatccgggatatagctctattcctccggtctttcaattatgcctgaactggaagggtgagaagactaattctaacgatgacaatatccgtgcaatggaaggcgaagtaaacgtgtgctacaaagagttatgtgggccatggccatcccatcaacttctgactaatcagctgcagcgattgtgcgtgctcctggatgtttacctggagacggagagtcacgacgactctgtcgaggggccaaaagagttcccgcaagagaaaatgtgtctgaggttgttcagagggccatcacgcatgaagcccttcaaatacaaccacccccagggctttttttcccaccggtag

SEQ ID NO: 243968 - DNA, 282 bp, synthetic construct
  misc_feature 1..282: note = Description of Artificial Sequence: Synthetic coding sequence
  source 1..282: mol_type = other DNA
atgtcaagtgagtctagtaagaagagaaagccaaaggtaatccgatccgacggagcgcctgccgagggcaaaagaaaccgcagcgacacagaacaggagggaaagtactactcagaggaggcagaagtcgacctccgcgaccccggacgggactatgaactgtataagtacacctgccaggaactgcagcggctgatggcggagatccaagatctaaaaagtcgcggtggcaaggacgttgccatcgaaatcgaggagaggcgcatccagagttgtgtgtag

SEQ ID NO: 243969 - DNA, 486 bp, synthetic construct
  misc_feature 1..486: note = Description of Artificial Sequence: Synthetic coding sequence
  source 1..486: mol_type = other DNA
atgagcagcgaatccagtaagaaacgtaagcctaaagtgattcgcagcgatggagcccctgccgagggaaagaggaatcggagtgacacagagcaggaaggaaaatattactcagaagaagcagaagtcgacctccgggatcccggtagagattacgaattatacaaatacacatgccaggaattgcagaggctgatggccgagattcaggacttgaaatcccgcggagggaaagatgtggctatcgaaattgaagaaagacgaatccagtcttgcgtgcacttcatgaccctgaaaaaactgaatcggctcgcacatatcagattgaagaagggacgggaccagacccatgaggctaagcagaaggttgatgcctatcaccttcagctgcagaacctactctacgaagtgatgcacttacagaaggagataactaaatgtttggaattcaagagtaagcatgaggagatcgatctcgtgagctag

SEQ ID NO: 243970 - DNA, 672 bp, synthetic construct
  misc_feature 1..672: note = Description of Artificial Sequence: Synthetic coding sequence
  source 1..672: mol_type = other DNA
atgagctccgagtcttccaagaagagaaagccgaaggtgattagaagcgacggagctcccgctgagggaaagagaaaccggtctgatacagagcaagaagggaagtactactcggaagaggctgaagtcgatttgagagaccctggcagggactacgagctgtataagtatacatgccaggagctccaaagattgatggcagagatccaggatttgaaaagccgcggagggaaggacgtcgccatagaaattgaagaaaggcggatccagtcatgcgtgcatttcatgaccctaaaaaaattgaaccggctagcacacattcggctgaaaaaaggtagagatcaaacccacgaagccaaacagaaggtcgacgcataccaccttcagctgcagaacctgctatatgaggtgatgcacctacaaaaagaaattacaaaatgcctcgagtttaaaagtaagcacgaagaaattgatctggtgtctttggaggagttctacaaggaagccccacctgatatcagcaaggccgaggtgactatgggagacccccatcagcagacgctcgctaggctcgattgggagctcgagcagaggaaacggctcgccgagaagtacagggagtgcctgtctaataaagagaaaatcctcaaggagatcgaagttaagaaatag

SEQ ID NO: 243971 - DNA, 2052 bp, synthetic construct
  misc_feature 1..2052: note = Description of Artificial Sequence: Synthetic coding sequence
  source 1..2052: mol_type = other DNA
atgagcagtgagagttccaaaaagagaaagccaaaagtgatccgatccgatggtgcacccgctgaagggaagcgcaaccggagtgatactgagcaggaaggcaaatactacagtgaagaagctgaggtggatctcagagacccagggcgagactatgagttatacaaatatacatgtcaagagctgcaacgattgatggccgagattcaagatctgaaatcgcggggaggaaaagatgtcgctatcgaaatcgaggaacgacggatacagtcctgcgtgcacttcatgacactcaagaaactgaatagactcgcgcacattaggcttaaaaaaggcagagatcagacacacgaggctaaacagaaggtagatgcatatcatttgcagctccagaatctgctgtatgaggtcatgcacctgcaaaaggagatcaccaagtgccttgaattcaagagcaagcatgaggaaattgatcttgtgtcgctggaggaattctacaaagaggcgccacccgacatctccaaggctgaagtaaccatgggagacccacaccaacagactctggccagattggactgggagctcgaacagcgcaagcgcctggctgagaaataccgagaatgcctgtcaaacaaagagaaaatcctgaaggagattgaggtgaagaaagaatacctgagcagtctgcagcctcggcttaatagcattatgcaggcctccttgcccgtgcaggagtacctgttcatgccattcgaccaggcccacaaacagtatgagaccgcaagacacctgcctccacccctatacgtgttgtttgtgcaggctactgcttacggccaagcctgcgacaaaactctgtctgtggccattgaaggaagtgtggatgaggccaaagctctcttcaagcctccagaggactctcaagatgatgagagtgatagtgacgcggaggaggaacagaccactaagcgacgcagacctactctcggggtgcagctggatgataagcggaaggaaatgctgaaaaggcaccccctaagcgtgatgctcgacttgaagtgcaaagacgactctgttctgcacctgaccttttattatctgatgaatctgaacatcatgactgtgaaggccaaggtgactacagcgatggagttaatcactccaatatctgctggagatctcctgtcgccggacagcgttctgtcttgtctgtatcctggtgatcatgggaagaagaccccaaatcccgctaaccagtaccagtttgataaggtgggaatactgacgctgtctgattacgtcctggagctggggcacccttacttatgggtgcagaagctcggcggactgcacttcccgaaggagcaaccccagcagactgtcatcgcggaccactctctgtcagcttctcatatggagaccaccatgaaactgttaaagactagggttcaaagcagactggctttgcacaagcagttcgcatctttagaacatggtattgttcccgtgacttcagactgtcagtatctctttccagctaaagtcgtttcccggctggtgaaatgggttaccgtcgcccatgaggattacatggagctacactttactaaggatatcgtcgacgcaggccttgccggagacactaatctctactacatggcccttatcgagcgaggtacagcgaagctgcaagccgctgtagtgctgaatcctggctacagttctattccacccgttttccaactctgtcttaactggaaaggcgagaagactaactcgaatgacgacaatatccgcgctatggagggggaggtgaacgtgtgctacaaggagctgtgcgggccttggccatctcaccagctactgactaaccaactccagaggctgtgtgttctcctggatgtatatctggagacggagagccatgatgatagcgtggaagggccaaaggagttcccacaggaaaagatgtgtttaaggctgtttcgcggaccttctcgcatgaagccgttcaagtacaatcaccctcagggctttttctcgcacaggtag

SEQ ID NO: 243972 - DNA, 615 bp, synthetic construct
  misc_feature 1..615: note = Description of Artificial Sequence: Synthetic coding sequence
  source 1..615: mol_type = other DNA
atgggcgctgtgaccgacgacgaagtgatacggaaacggttattaattgacggtgacggggctggtgacgacaggaggatcaatctgctcgtgaaaagcttcatcaaatggtgcaattctggctcccaggaggagggatactcacagtaccagagaatgttaagtacgctcagccagtgtgagtttagtatgggaaagaccctcctcgtctatgacatgaaccttagagaaatggagaactacgagaagatctataaggagattgaatgcagcatagcgggtgcacacgagaagatagccgagtgcaaaaaacagatcctccaggcaaagagaattcgaaagaatcgccaggaatatgatgctctggcgaaagttatccagcatcatcccgatcggcacgaaacccttaaggagttggaggctctgggcaaggaattagaacacttgtcacacatcaaggagtccgtggaggacaagcttgaactgcgccgtaagcaatttcacgtgctgcttagcacaattcatgaactgcagcagacgctggaaaatgacgaaaagcttagcgaggtggaagaagctcaggaggcctctatggaaacggatcccaagccttag

SEQ ID NO: 243973 - DNA, 711 bp, synthetic construct
  misc_feature 1..711: note = Description of Artificial Sequence: Synthetic coding sequence
  source 1..711: mol_type = other DNA
atgtccgaagcaccacgggctgagacttttgtatttctggatcttgaggcaaccggtctacccagtgttgagcccgagattgcagaactatcgctgttcgccgtccacaggtcttctctggaaaaccccgagcatgatgagtccggggctctggttcttcctcgggtattggataaactgactctgtgtatgtgccctgaacggccattcacagctaaggcctcagagatcacagggttgtcctcggaaggccttgcgcgatgtcggaaagccggattcgatggggctgttgttagaacactgcaggcatttctcagtagacaggctggaccgatctgtctggtggcacacaacggattcgattatgattttcctctgctgtgtgccgagctgcgaaggctgggagcgcgtctgcctagagacaccgtgtgtttggatacactgcctgccttacgcggactcgaccgcgctcactcccacggtactagggcccgaggtcggcagggatacagcctgggtagtctctttcatcgttattttcgcgcagagccgtccgctgcacactccgcagaaggggatgtgcacacactacttctgatttttttacacagagcggctgaattactcgcctgggccgatgagcaggctcggggatgggcccatatcgagcccatgtacctgccacctgacgatcctagcctggaagcctag

SEQ ID NO: 243974 - DNA, 840 bp, synthetic construct
  misc_feature 1..840: note = Description of Artificial Sequence: Synthetic coding sequence
  source 1..840: mol_type = other DNA
atgggcagagctggttcacccttgcccagatcctcttggccacggatggatgactgtggaagtcgttcccgctgtagcccaaccctctgttcgagtctgaggacgtgttaccccaggggaaacataaccatgtcggaggccccaagagccgagacatttgtgtttcttgacctggaagcaacaggcctcccctctgtggagcctgagatcgcggagttgagcctgttcgctgtgcacagatcaagcctcgaaaatccggaacatgacgaatctggcgctctggtcctacccagagtcctagataagctgacgctgtgcatgtgccccgagaggccgttcacagccaaagcatccgaaatcaccgggctgtcatcggaaggcctagccagatgtcggaaggcaggatttgacggggctgtggtccgaaccctccaagcgttcttatcgcgccaagccggacctatctgcctagtggcccacaatgggttcgactatgacttccctctgctgtgtgccgaactgagaaggctgggagctcggctcccaagggatactgtgtgcctggacaccctccccgcacttagggggctcgatagagcacactcacacggtacacgcgctcggggaagacaaggctattccctcggatcactgtttcaccgatacttcagggctgaaccctccgctgctcactctgccgagggtgacgttcacacactgttgctaatcttccttcatcgggctgccgagctcctcgcttgggcggacgagcaggcacggggatgggcacatatcgaacccatgtatctgccacctgatgacccgtctctagaggcatag

SEQ ID NO: 243975 - DNA, 711 bp, synthetic construct
  misc_feature 1..711: note = Description of Artificial Sequence: Synthetic coding sequence
  source 1..711: mol_type = other DNA
atgtccgaggccccacgtgcggaaactttcgtgtttcttgatctggaagccaccggtcttccatcggtggaacccgagattgctgaactctcattatttgcagtgcacagatctagtctggaaaatccggaacatgacgaatcgggagccctcgtcctgccccgagtgttggacaaattgactctgtgcatgtgcccggaacggcctttcactgccaaggcctcagaaattaccggcctgtcaagtgaagggctggctaggtgtaggaaggctggcttcgacggcgctgtggttcggacactgcaggccttccttagcagacaggccggacccatctgcctcgtggcacacaatggctttgattacgatttcccgctcttgtgtgctgaattgagaaggttgggtgcgagactgcccagagatacagtgtgcctggacaccctgccagccctccgcggactcgatagggcacacagtcatggaactcgagcacggggacggcagggatactcactgggatcccttttccaccgctacttccgcgctgaacctagtgcagctcattccgccgaaggagacgttcacactcttctcttgatcttccttcacagggcggcagaactgctggcctgggctgacgagcaggccaggggctgggctcatattgagcctatgtatctgcctcccgatgacccctctctggaggcctag

SEQ ID NO: 243976 - DNA, 711 bp, synthetic construct
  misc_feature 1..711: note = Description of Artificial Sequence: Synthetic coding sequence
  source 1..711: mol_type = other DNA
atgtctgaagcccctcgggcagagacctttgtctttctggacttggaagccaccggcctgccttctgttgagcccgagattgctgagttgtccctgtttgctgtccatagaagctctcttgagaatccagagcatgatgaatctggggctctggtgctgccaagggttcttgataagctgactttgtgtatgtgtcctgagcggcctttcacagcaaaggcctctgagataactgggctatctagtgaaggcttggctaggtgccgcaaagccggattcgacggcgctgtggttaggacccttcaggcgtttctctcacgccaggctggtccaatctgtctggttgcacacaatgggtttgattatgacttccccctactctgcgctgaattgaggcggctaggggcacggcttcctcgcgacacggtttgtctcgacactttaccggcactacgcggtctcgacagggcccatagtcacggaacccgggcacgagggaggcagggctattccctcgggagcttgtttcatcggtacttcagggcggagccctcagcagcccactcagccgaaggtgacgtacacacactgctcttaatttttctccacagagctgctgagttgctggcgtgggccgacgaacaggcaagagggtgggcccacatcgagcctatgtaccttccgcctgatgatccctctctggaggcttag

SEQ ID NO: 243977 - DNA, 840 bp, synthetic construct
  misc_feature 1..840: note = Description of Artificial Sequence: Synthetic coding sequence
  source 1..840: mol_type = other DNA
atgggaagggcaggatcccccctgccaagaagctcctggccccgaatggacgattgcggtagtcgcagcaggtgttccccaactctctgcagttccttgcgtacctgttatccacgcggaaatatcactatgtccgaggcacccagagccgagacatttgtgttcctggacttggaagccacaggcctgccgagtgtggagcccgaaatcgccgagttgtccctgttcgcagtgcacagatcctcactggagaatcccgagcacgacgaaagtggcgctctagtcctccccagggtgttggacaaactgaccttgtgtatgtgccctgaacgccctttcacagccaaagcctctgaaatcactggactttcttccgagggtcttgccagatgtcggaaagccggttttgatggagccgtcgtgcggaccctccaggccttcctgtctagacaagctggtccaatatgcctggtcgctcacaacgggttcgactatgatttcccattactctgtgccgagcttaggcggcttggagctcgtctgccccgtgatacagtgtgcctggacaccttacctgccctaagagggctggatagagcacactctcatgggacacgtgccaggggcagacagggatactcgctgggcagccttttccaccgatattttagagccgaacctagcgcagcccactctgccgaaggagatgtccatactctgctgctcatcttcctccatcgggcagccgaactgctggcgtgggcggacgagcaggcaagagggtgggcccatattgaacccatgtacctccccccagatgacccgtccctagaggcatag

SEQ ID NO: 243978 - DNA, 711 bp, synthetic construct
  misc_feature 1..711: note = Description of Artificial Sequence: Synthetic coding sequence
  source 1..711: mol_type = other DNA
atgtccgaggccccaagggccgaaacattcgtcttcctagatttggaagccactggacttcccagtgttgagcctgaaatcgccgaactttcattgtttgccgtacatcgatcatccctggagaacccagagcacgatgaatcaggcgctttggttctgccaagggttcttgacaagctcaccctgtgtatgtgccccgagagaccgtttactgcaaaggcaagcgaaattactgggctgtcttccgaggggctggctagatgtagaaaggcgggttttgacggtgcagtggtccgcacgttgcaagcttttctgtccagacaggccggtcccatctgtctggtcgcccacaacggcttcgattacgactttccgcttttgtgtgcggagctgcgtaggctgggcgctcgccttccacgcgacactgtgtgtctggatactttacctgcgctccgtggcctggaccgcgctcatagtcatggaacccgagctcgcggacggcaggggtacagtctcggatctctctttcatcggtattttagggcagagccctccgctgcgcattccgctgaaggagatgtccacacactattgttgattttccttcatagagccgcagagttacttgcttgggcggacgagcaggctcgtggctgggctcacattgaacccatgtacctcccccctgatgacccgtcactcgaagcctag

SEQ ID NO: 243979 - DNA, 840 bp, synthetic construct
  misc_feature 1..840: note = Description of Artificial Sequence: Synthetic coding sequence
  source 1..840: mol_type = other DNA
atgggcagagcaggttcgccactccccaggtcatcttggccacggatggacgactgtggatcccgctcgcggtgttctccaaccctttgtagttcactgaggacctgttatccacggggtaacatcaccatgtctgaggcaccgagggccgaaacctttgtctttctggatctggaagccacaggattgccctcagtggaacccgagatagccgagctttccctcttcgcagttcatcgctccagtttggagaatcccgaacacgacgagtccggggcacttgttttgcccagagtgctcgacaaactcaccctgtgcatgtgtcctgaaagaccttttaccgcaaaggcctctgagatcacagggctgagcagcgagggcctggctcgctgtaggaaggctggctttgatggagctgtggtcaggaccctgcaggcctttttaagtcgccaagctggccctatttgcctggttgcccacaatggcttcgattacgacttccctttactgtgcgccgaattgcgcagactgggcgcacgactgccaagagatactgtctgcctggacaccctgccggcactgcgtggtctcgatcgcgctcactcacacggtacgagagccaggggaagacaggggtatagcctaggctccctgtttcaccggtacttcagagccgaaccctccgctgcacacagcgcggaaggagacgtgcataccctactgctcatcttcctacatcgggctgcagagcttctggcttgggcggacgagcaagcacgcggatgggcccacatcgaaccaatgtatctgccccctgatgaccccagtttagaagcttag

SEQ ID NO: 243980 - DNA, 837 bp, synthetic construct
  misc_feature 1..837: note = Description of Artificial Sequence: Synthetic coding sequence
  source 1..837: mol_type = other DNA
atgatcgttgcagcagaggccgtagccgctccccgttgtgctttggtcggggaccggagcggcgctgatgcgcctagggccaaaggtcactctctcagaacatgctatccacgcggaaatattactatgtcggaggcccctagggcagaaacatttgtgttcctcgatttggaggctactggcctcccctccgtcgagccagaaattgccgaattgtccctctttgctgttcatcgatcgtcgttagagaacccggaacacgatgagagcggtgcccttgtcctgcccagagtcctcgacaagctgactctgtgtatgtgtccggagcggccttttacagccaaagcctcggagattacagggctttcttctgagggactcgcacgctgtagaaaggctgggttcgacggtgctgtggtccggactcttcaggcgttcctaagccgccaggctggtcccatctgcctcgtggcacacaacgggttcgactacgacttcccccttctgtgtgccgaactccgcaggctcggcgctcggctcccaagggacaccgtatgccttgacacactacctgcccttcgcggactggatcgcgctcattcccacggaacccgtgctcgcggtcggcaaggatactcgttagggagcttgtttcataggtatttcagggcagagccaagtgccgcacatagcgctgagggtgatgttcacacactcctcctgatcttcttgcatcgcgctgccgagcttttggcctgggccgatgagcaggcaaggggttgggcccatatcgagcctatgtacctcccacctgacgaccccagtctggaggcctag

SEQ ID NO: 243981 - DNA, 2172 bp, synthetic construct
  misc_feature 1..2172: note = Description of Artificial Sequence: Synthetic coding sequence
  source 1..2172: mol_type = other DNA
atgtttgaagaaaaggcaagttctccaagcggaaaaatggggggagaggagaaacctatcggcgctggtgaggagaaacagaaggaaggagggaagaaaaagaataaagaagggagcggcgatggagggagggctgagctgaacccttggccagagtatatctatactcgtctggagatgtataatatactgaaagccgaacacgactccatcctcgccgaaaaggccgaaaaggacagcaagcctattaaggtgaccctgccagatggaaagcaggttgacgccgagtcgtggaaaacgacaccttatcaaattgcttgcggcatttcccaaggcctggctgacaacactgtgattgctaaagtcaacaatgtggtgtgggatctcgacaggccgctggaagaagattgcacactggagctcttgaaattcgaagacgaggaggcccaagctgtgtattggcattcctctgcccatatcatgggagaggccatggaacgcgtttatggcggatgcctctgctacggccctcccatagagaacgggttctactacgacatgtacctggaagagggcggtgtgtctagcaacgatttcagctcactggaagccctctgcaagaaaatcatcaaagagaaacaggccttcgagaggctggaggttaaaaaagaaacactattagcaatgtttaagtataataagttcaaatgccggatcttgaacgagaaggtcaatacaccgacgacaacagtgtacaggtgtggccctctcattgatctatgtcgaggtccacatgttaggcacaccggaaaaattaaagcactcaagattcacaaaaatagttcgacatactgggagggcaaagccgacatggaaacccttcaacgcatctatggaataagtttcccagaccccaagatgctgaaggaatgggagaagttccaggaggaggctaagaacagagaccacaggaagataggacgtgaccaggagctgtactttttccacgaactgtcccctggcagttgtttcttcctgcccaagggagcctatatttacaacgcccttattgaatttatcaggtcggaatataggaagcgcggttttcaggaagtggtgacccccaacatattcaactcgagactgtggatgaccagcggacactggcaacactactccgagaacatgttctcattcgaagtcgagaaagagttatttgcgctcaagccaatgaattgcccaggccactgtctgatgttcgaccaccggccaaggagctggcgagagctccctctcaggttggcagactttggagtcctacaccgcaatgaactatccggggctctgaccggcctgactagggtccgacgcttccagcaggatgatgctcacatcttttgcgctatggagcagatcgaggacgagattaaggggtgtctcgatttcttacgtacggtctattcagttttcggcttctcgtttaagctgaacctctcaacgaggcccgagaaattcctgggtgacatcgaggtgtgggaccaagctgagaaacaactggagaacagcctcaacgagtttggggagaagtgggagttgaattccggcgatggtgcattctatggtccaaaaatcgacatccagattaaagacgccattggacggtaccatcagtgcgctacgatccagctggatttccagctgcctatccgctttaacttgacatacgtgtcccatgatggggacgacaagaagagaccagtgattgtccatagggctatcctcggtagcgtggaacgcatgatcgccatcctcactgaaaactatggtggcaagtggcctttttggttgtctcctcggcaggtgatggtcgtgcccgtgggccctacttgtgacgagtacgcacaaaaggtgcgccagcaatttcacgacgccaagttcatggccgatattgatttggaccccggttgtacactgaataagaagatcagaaatgctcagctcgctcagtacaactttattttagtcgtaggcgagaaagagaaaatctcaggcaccgttaatatccggaccagagacaataaggtgcacggagaaagaaccataagcgagactatagaacggctccagcagctgaaggaattccgatcgaaacaagctgaggaggagttctag

SEQ ID NO: 243982 - DNA, 1809 bp, synthetic construct
  misc_feature 1..1809: note = Description of Artificial Sequence: Synthetic coding sequence
  source 1..1809: mol_type = other DNA
atgatccctttctggcaaaaacggcagaaaaagatagcatcccaactgaaatctctgtgccttatggttaataggctaatgaggaatctggggaagcttcatcacattaaattaccggtcgaactggccatggagagggtgtatgggggatgtctctgttatggcccacccatcgaaaatggcttttactacgacatgtacctggaagagggaggtgtcagctcaaatgatttctcctcactcgaagcactatgcaaaaaaatcataaaggaaaaacaggcttttgaaagactcgaggtgaagaaggagaccctgctggcgatgttcaagtacaacaagttcaagtgtcgaatcctcaacgaaaaagtgaacacacctaccacaaccgtttaccgctgtgggccactgattgatttgtgcagaggccctcacgttagacacactggtaagattaaggccctgaagatacataaaaatagcagtacctattgggaaggcaaagccgatatggagaccctgcagcggatctatgggatcagcttccccgacccgaaaatgctgaaggagtgggagaaattccaagaggaggccaaaaatcgggaccacagaaagattggtcgcgaccaagagctgtacttcttccacgaactgagccctggctcatgcttcttcctgccgaagggtgcttacatctacaacgctttaatcgagtttatcaggagtgaataccgaaaaaggggcttccaggaggtggttacccctaacatttttaatagccgtctctggatgacaagcggtcattggcaacattatagcgaaaatatgttttcgtttgaagtggagaaagagctattcgcgcttaagccgatgaactgcccaggacactgcctgatgtttgatcatagaccaagatcatggagggaactgccgctgaggctggccgacttcggggtgctacaccgaaatgagctatcaggcgctcttacggggttgacccgcgtaagaagattccagcaggatgatgcgcacatcttttgcgccatggaacagatcgaggacgagatcaaaggttgcctggattttctccggacggtgtacagcgtgttcggcttctcttttaagctgaatctgagtacccgcccagagaaatttctgggcgacatagaggtttgggatcaagcagaaaaacagctggaaaattcgctcaatgaattcggagagaagtgggagctcaatagcggtgatggcgcattctatggcccaaagattgacatacagattaaggacgccatcggcaggtatcaccagtgtgccaccattcagctggacttccagctccccatcaggttcaaccttacgtacgtctcacacgatggagatgacaaaaagcggccagtcatcgtgcatagagcgattcttggaagcgtcgagcgcatgatcgctatcctcaccgagaattacggagggaagtggcccttttggttatctcctcgccaagtaatggttgtcccggttggcccaacgtgcgatgagtacgcccagaaagtgcgccagcagtttcacgacgccaaatttatggctgatatagacctggatccagggtgcaccctgaacaaaaagatacgcaacgctcagttggcacagtataactttatcctggtggtgggagaaaaggaaaaaatttctggcacagtcaatatcagaacccgagataataaggtgcacggggagaggactatttctgaaacaattgaacggctgcagcaactcaaagaatttaggtccaaacaagcagaggaggaattttag

SEQ ID NO: 243983 - DNA, 2271 bp, synthetic construct
  misc_feature 1..2271: note = Description of Artificial Sequence: Synthetic coding sequence
  source 1..2271: mol_type = other DNA
atgtttgaggaaaaagcgagtagtcctagcggcaagatgggcggagaggagaagcctattggtgcgggagaggagaagcagaaagaaggcggaaaaaagaagaacaaagaagggtcaggggacggcggtcgcgctgagctgaatccatggcccgagtatatttatactcgactggaaatgtataatatcctgaaagccgaacacgattccatccttgccgaaaaggcggagaaggacagtaagcctatcaaggtcaccttgccggatgggaaacaggtggatgccgaatcttggaagactacaccgtatcaaatagcttgcggaattagccacaccgcatcgtgtaaaaatctcagttctctcgcatctctgctggcatcggtggccattccctcgagtggtatgccatggcccccactcttcttcctgcaggggttggcagataacacggtgattgccaaggtgaataatgttgtctgggacttagacagaccacttgaggaagactgcaccctggaactgttaaagttcgaggatgaggaggctcaggcagtgtactggcactcatctgcacatatcatgggagaggccatggagagagtttacgggggatgcctgtgttacgggccacccatcgaaaatggattctactatgatatgtatttggaggaggggggagttagctccaatgacttctcatccctggaagcactctgcaagaaaataattaaggaaaagcaagccttcgagcgcctcgaagtgaagaaggagacattactcgctatgttcaagtacaataagttcaaatgccggatcctgaatgagaaggtgaacactccaactaccaccgtttaccggtgcggcccattgatagatctatgtagggggcctcatgtgagacacaccggtaagatcaaagctttgaagatacacaagaatagtagtacttactgggaaggtaaagcggacatggagaccctgcagaggatatatggcatctcttttcctgacccaaagatgcttaaggagtgggagaagttccaggaagaagctaaaaatcgcgatcaccggaagatcgggagagaccaggagctgtattttttccacgagctttcaccgggatcttgttttttcttgcctaagggcgcttacatctataatgccctcattgagtttatcaggagcgaataccggaagagggggttccaggaggtagtcacacctaatatcttcaatagcagactttggatgacttccggccactggcagcactatagcgagaatatgtttagcttcgaggtggagaaggagctgtttgccctcaagccaatgaattgtcccggacactgcttaatgtttgatcaccgaccgaggagttggcgcgagctgcccctgagactggcagattttggggtgttacacagaaacgaactttcgggggcattgaccggcctcactcgagtgaggcgctttcagcaggacgatgcgcatatcttttgtgctatggagcagatagaggatgaaatcaagggctgtctagatttcttgaggacagtctattccgtctttggattcagtttcaagctcaacctgtctacacgccctgagaagttcctgggggatattgaagtgtgggaccaggcagagaaacaacttgagaactccctgaatgagtttggggagaagtgggagctcaattccggggatggcgcattctatggccctaaaatcgacatacagataaaggatgccattggaagatatcaccagtgtgcaacgatacagttggactttcagctgcccattcgcttcaacctgacgtacgtgagccacgatggagatgacaaaaaacggccagtcatcgtacacagagcgatcctcggctctgtggagaggatgattgcgattctgacagagaattatgggggtaagtggcccttctggcttagccccagacaagttatggttgtgcctgttgggccaacttgcgacgagtacgcccagaaagtgaggcagcagtttcatgatgctaaatttatggctgatatcgacttggacccgggttgtacacttaacaagaagatccggaacgcccaacttgcgcaatacaatttcatactggtcgtaggagaaaaggaaaagattagcggtacggttaatattaggacacgagataacaaggttcacggagagagaaccatttctgaaacaatcgagcggctgcagcagcttaaggaattcaggtcgaagcaggccgaggaggaattctag

SEQ ID NO: 243984 - DNA, 2172 bp, synthetic construct
  misc_feature 1..2172: note = Description of Artificial Sequence: Synthetic coding sequence
  source 1..2172: mol_type = other DNA
atgtttgaagagaaagcctcgtctccctccggaaaaatggggggagaagagaagcccattggagctggggaagagaagcagaaggagggaggtaaaaaaaagaacaaggagggctccggtgacggcggacgcgcagagttaaatccttggccggagtatatttacactcgacttgagatgtataacattctgaaagctgagcacgactccatactggccgaaaaagccgagaaggactctaagccaatcaaagtgaccttgccagacgggaaacaggtggacgctgaaagttggaagacaaccccttatcagattgcctgtggaatcagtcagggacttgcggacaacacagtgatcgccaaggtgaacaacgtggtttgggacctcgataggccccttgaagaggattgcaccctggaactgctgaagtttgaagacgaggaggctcaggctgtgtactggcattcatccgcccatattatgggggaagctatggagagggtttacggcggatgcctctgctatggcccaccaatcgagaacgggttctactatgatatgtacctggaggaggggggtgtcagcagtaacgacttcagttcccttgaggccctgtgtaaaaagatcattaaggaaaaacaggcatttgagcggctggaggtgaagaaagagaccctgctggccatgttcaaatataacaagttcaagtgccgaattttgaatgagaaggtcaatacccccacaaccacagtgtatcggtgcggccctctgattgacctctgcagaggccctcacgtacgtcacacgggtaagattaaggcactgaaaatccacaagaactcgagcacttactgggagggcaaagccgacatggagactctccagcgcatctacgggattagctttccagaccccaagatgttaaaagagtgggagaagttccaagaagaagctaaaaaccgggatcaccggaaaatcggcagagaccaggaactgtactttttccatgagttatcgccagggtcatgtttctttctgccaaagggagcttacatctataatgcgcttatcgaattcatccggtccgagtaccgaaagcgcggttttcaggaggtggtgaccccaaacattttcaacagtagactgtggatgaccagcggacactggcagcactacagtgagaacatgttctctttcgaggtcgagaaagaactgtttgctctgaagccaatgaattgtcccggacattgtttgatgttcgatcaccgcccaaggtcctggcgggaattgcccctccggctggcggacttcggtgtactacatcggaatgaactttcaggcgcattgacaggcttaacgcgcgtccgacgattccagcaggacgatgcgcacattttttgtgcgatggagcagatcgaggatgaaatcaaaggctgtctggattttctccggactgtgtacagcgtcttcggattttcttttaaacttaatctgtcaacaaggccggaaaaatttcttggcgatattgaggtatgggaccaggccgagaaacagcttgaaaattctctgaatgaatttggggagaagtgggagctaaacagcggagacggcgcattttacggtcccaagatcgacatccagatcaaggatgctattggacgttatcatcagtgcgcaactattcaactggatttccagcttcctatcaggttcaacctgacctatgtgagccacgacggcgacgataagaagcgcccagttatcgtgcaccgtgccattctaggcagtgtcgagagaatgatcgcaatactgactgagaattatggcggaaagtggcccttttggttaagtccgagacaggtgatggtggtcccagtcggtcccacgtgtgatgagtacgctcaaaaggtccgtcagcagtttcatgatgctaagtttatggctgatatcgatctcgacccaggatgtacccttaacaagaagatacggaacgcacagctggctcagtacaatttcatccttgtggtcggagaaaaggagaaaatttcagggacagttaacattagaacacgagacaacaaggtccatggcgaacgcacaatttctgaaacaattgagaggcttcagcagctcaaggaatttagaagcaagcaggcagaagaggaattttag

SEQ ID NO: 243985 - DNA, 390 bp, synthetic construct
  misc_feature 1..390: note = Description of Artificial Sequence: Synthetic coding sequence
  source 1..390: mol_type = other DNA
atgtttgaggaaaaggcctccagtccctccggtaagatgggcggagaggaaaaacccattggagccggagaagaaaaacaaaaggaggggggaaagaagaaaaacaaagagggatccggagacggaggacgagccgagctgaacccatggcccgagtacatatatacccgcctggaaatgtacaatattctcaaggcagaacatgactctatcctggccgaaaaagctgagaaggacagtaagcctatcaaggtgacactccctgatgggaagcaggtggatgcagagtcctggaaaactactccctaccagattgcttgcggtatctcccaaggcttagctgacaacacagtaatcgccaaagttaataacgtcgtctgggatctatag

SEQ ID NO: 243986 - DNA, 1860 bp, synthetic construct
  misc_feature 1..1860: note = Description of Artificial Sequence: Synthetic coding sequence
  source 1..1860: mol_type = other DNA
atggaagtggagctgtctcaggggcttgctgataacaccgtgatcgcgaaggtgaataacgtggtgtgggacttggaccggccactcgaagaggattgcacgctcgagctcctaaagttcgaggatgaagaggcgcaggccgtatattggcactcctcagcgcatattatgggtgaggctatggaacgcgtctacggcggatgcctttgttatggccctccaatcgagaatggcttttactatgatatgtatctggaggaggggggagttagctcaaacgattttagctcgctcgaagccctttgtaaaaaaattataaaggagaaacaagcctttgaaaggctcgaggtgaaaaaagagacacttttggctatgtttaagtacaacaaatttaagtgtcggatactgaatgagaaggttaatacgcctactactacggtgtataggtgtgggcctcttattgacctttgcagaggcccacatgttaggcatacaggtaagatcaaagcgctgaaaattcataaaaactcaagcacctactgggagggtaaagcagacatggagactctgcagaggatctacgggatatctttcccggaccctaagatgcttaaggagtgggaaaaattccaggaggaggctaaaaaccgagatcaccgtaaaatcggccgtgatcaggagctgtatttcttccatgaactgtccccaggaagctgttttttcctccccaaaggtgcctatatttacaatgcactaattgagttcatccgatccgaatatcgcaaacgcggatttcaggaagtggttactccgaacattttcaactcgcggctctggatgaccagtgggcattggcagcactattcagaaaatatgttttcattcgaggtcgagaaggagttgttcgctctcaagccaatgaattgtcccggacattgtctgatgtttgatcatcgtccacgatcatggagagagctgccactccgattggccgatttcggagttctgcatcggaacgagctatccggggctctgacaggcctgaccagggtgcgccgtttccagcaggacgatgcccacatcttctgcgcaatggagcagattgaagacgagattaaagggtgtcttgacttcctgagaactgtgtactccgtctttggtttttctttcaagctgaatctgtcaacccgcccagagaagtttctgggagatatagaggtctgggatcaagctgagaaacaactagagaatagcctgaacgaatttggcgagaaatgggaactgaatagcggcgatggcgcattctacggacccaaaattgacatccaaatcaaggatgccatagggagataccatcagtgcgctactatccaattggattttcagttaccgataagattcaacctcacgtacgtgtctcatgacggagacgacaagaaacgccctgttattgtacatcgtgcgatactgggcagtgttgaaaggatgatcgccattctgacggaaaactacgggggtaaatggcccttttggttatctcctcggcaggtgatggtcgtccccgtggggcctacctgcgatgaatacgcccaaaaagtccgccagcagttccatgacgcaaaattcatggccgacatcgatctggaccccggatgtaccttgaacaagaagattagaaatgctcagctggcgcaatataatttcatccttgtggtgggagagaaggaaaaaataagcggcaccgtgaacatacggaccagagataataaggtccacggagagaggactatctcagaaaccattgagcgtttacaacagctcaaggagttccggtcaaagcaagccgaggaggaattctag

SEQ ID NO: 243987 - DNA, 1332 bp, synthetic construct
  misc_feature 1..1332: note = Description of Artificial Sequence: Synthetic coding sequence
  source 1..1332: mol_type = other DNA
atggaacacaatccattacccacatccccagctgaccagtttaacaccggcagatactgtagtggtccaagcaccgagtacggtttctaccatgacttttttctagggaaagagaggtgtggcacgctggtcgatttgtgccagggcccacatcttcgccacaccggacaaattgggggactcaaactactgagcgcggaatatgcacacagagggttcagcgaggtgaaaacaccaactttgttctccactaaactgtgggaacagtcgggtcactgggaacattaccaggaggacatgttcgccgttcagccaccagggagcgaccgacctccttcctcgcagagcgacgatagcactagacacatcacagacaccctagctctgaaaccgatgaactgccccgcacactgccttatgttcgctcaccggccacggtcctggcgagaactcccactacggctagccgatttcggggctctgcatcgggctgaggccagcggagggttaggtggactgactcggctcagatgcttccagcaggatgatgcccacatcttttgtaccaccgaccagcttgaggcggaaattcagtcctgcctcgatttcctaaggagtgtgtacgctgtccttgggttttcgtttagactagccctgagtactcggccatctgggtttttgggagatccctgcctttgggatcaggccgaacaggtgctcaagcaagctctgaaagagtttggagagccctgggaccttaatagcggagacggggctttctatggcccaaagattgacgtgcatctgcacgacgcattgggccgaccccatcaatgtggtactatacaactcgacttccaacttcctctaagattcgacctgcagtataaaggacaggctggagccctggagagacctgtgcttatacatcgagccgtactcggatccgttgagcgactgctcggagtgctagcggagtcctgtggcggaaagtggccgctctggctaagccctttccaggttgtggtgatccctgtgggctcggagcaggaagaatacgccaaggaggcccagcagtctctgagagccgctggcctggtttcggacctcgacgcagatagcggcttgactctgagccggaggataaggcgcgcacagctcgcacactacaactttcagtttgttgtgggccaaaaagaacagtctaaacgcactgtaaacattcggactcgtgataatagacgactaggggagtgggacctccctgaggccgtgcagcgcctcgtggagcttcagaacacgcgggtgccaaatgcggaagaaatattttag

SEQ ID NO: 243988 - DNA, 1332 bp, synthetic construct
  misc_feature 1..1332: note = Description of Artificial Sequence: Synthetic coding sequence
  source 1..1332: mol_type = other DNA
atggaacacaatcccctacctacctcccccgctgaccagtttaacacgggccgttattgccgaggaccgagtacagagtatggcttttatcatgacttctttctcggcaaggaaagatgtggaacgctcgtagatctgtgtcagggtccccacttgagacacaccggccagatcggtggtttgaaacttctgagcgcagagtacgctcatcggggattcagcgaggtgaagacgcctactcttttttcaactaaattgtgggagcagtccgggcactgggaacactatcaggaagacatgttcgcggtacagccaccagggagtgatcgccctccttcgtcacaaagtgatgatagtaccaggcacatcactgacacgcttgcactgaagccaatgaactgtcctgcgcattgtctgatgttcgcccatcggccacggtcctggcgagagctgcccctgagactcgccgattttggagcccttcatcgggcagaggcctctggcggattagggggacttactcggctgcgatgcttccagcaggatgatgcgcacatcttttgcaccaccgatcagctggaagcggagatccagtcttgtctagatttcttgcggtccgtctatgccgttctcgggtttagtttcaggctcgccctgtcaacacgacccagcgggtttttaggtgatccctgcctatgggatcaggcagaacaggtgttgaagcaggcactaaaagagttcggcgaaccttgggatctgaactctggtgatggcgcattctatgggccaaagatagacgtccacctgcacgatgcactggggaggccgcaccaatgcggcacaatccagctcgatttccagctcccgctacgctttgatctgcagtacaaggggcaggcaggtgctcttgaacggcctgtcttgatccaccgggctgtcctgggaagcgtggaaagacttctaggagttcttgctgaatcttgtggcggtaaatggcccctttggctgtcccccttccaagttgtggtgattcccgtgggtagcgaacaggaagagtacgctaaagaagcccaacagtccctcagagccgctgggctggtgtctgatctcgatgccgattcaggactgacactgagtcgccgtattcggagagctcaactcgcgcactataattttcagttcgtagtagggcagaaggagcagagtaagcggactgtaaacattcggacaagggataatcgcaggttaggagagtgggatctgcccgaggccgtacagagactggtagaactccagaacacccgagtgccaaatgccgaagaaatcttttag

SEQ ID NO: 243989 - DNA, 537 bp, synthetic construct
  misc_feature 1..537: note = Description of Artificial Sequence: Synthetic coding sequence
  source 1..537: mol_type = other DNA
atggctctgtaccagagatggaggtgtctgcgtctgcagggacttcaggcctgcaggctgcacaccgctgtggtgtcaacaccaccacgctggctggccgaaaggctgggcctgtttgaggagctctgggctgcgcaagttaagcggctagcctcaatggctcaaaaagaacctcgtacaatcaagatttcactgccgggtggacagaagattgatgcagtggcatggaataccacaccatatcagttagccaggcaaatctcaagcacgctcgccgatacagccgtggcagctcaggtgaacggggagccttacgacctcgagagacccctagagaccgactccgatctgcggtttctgactttcgatagtcccgagggcaaagccgtttctttcttcctgattagaaatacagtgaccactaagcctagggatatcgaggctggcaactccaacatcctttttttttgcaggagtttcagtatctgcagctgggagggagaccttcctcaaacagttctgactatctctggatag

SEQ ID NO: 243990 - DNA, 1767 bp, synthetic construct
  misc_feature 1..1767: note = Description of Artificial Sequence: Synthetic coding sequence
  source 1..1767: mol_type = other DNA
atggcactatatcagcggtggcgatgcctgcggctgcaagggctgcaagcctgcagacttcataccgccgtcgtctctactccccctcggtggctggccgagcgtctggggctgttcgaagaattgtgggctgctcaagtgaaacgactggcttcaatggcgcagaaagaaccgaggacgataaagataagcctgccgggaggtcagaagatcgatgccgtcgcttggaacaccacgccctaccagctggcacggcagattagttcaacccttgcagacactgccgtggctgcccaggtgaacggcgagccatacgatctggagcgccctctcgaaacagatagcgacctgcgcttcttaacctttgactccccggaggggaaagctgttttttggcactcttcaacacacgtcttgggagccgctgcagagcagttcctcggtgcagtcctttgcaggggaccatccaccgagtacggattttaccacgatttcttcttgggaaaggagaggactatccgtggaagcgagctgcccgtactggaaaggatttgtcaggaacttacagccgctgcacggcctttcaggagactggaagcgtccagagatcagctgaggcagcttttcaaagctgaatacgcccaccgcggattctctgaagttaagacccctacactattctctactaagctgtgggagcagtctggtcactgggagcactaccaggaggatatgttcgccgtgcagcccccaggttcagatcgccctcctagcagccagtctgacgacagcacccggcacatcactgacaccttagctctgaaacccatgaattgtccagcccactgtctcatgttcgcacacaggccacgcagttggagggaactgcctttaagacttgctgacttcggagctctgcaccgggcagaagcatcggggggtctaggtgggctgacaagactccgctgtttccagcaggacgacgcccacatattctgcacaaccgaccagttggaggccgaaatacagtcttgtctggattttttgcgaagcgtctacgcagtcctgggtttcagtttcaggttagcactgtctacgaggccctcaggcttcctcggggacccttgcttgtgggaccaggccgagcaggtgctaaaacaggcattgaaggagttcggtgagccctgggacttgaactccggcgatggcgcattttacggtcccaaaatcgacgtccatctgcatgacgctctgggtcgaccacatcagtgtgggacaattcaacttgatttccaactacccctacggtttgacctgcagtataaagggcaggctggagcgcttgagcggcctgtgctgatccacagagccgtcctagggagtgtcgagaggctgcttggcgtgttagctgaatcgtgcgggggtaagtggcccctctggctgtctcccttccaggttgtcgtgatcccagtcgggtcggaacaggaagagtacgctaaggaggctcagcaatctctgcgggctgctggcctggtctctgacctcgatgctgactcagggctcactctgagccgtaggatccgcagagcacagcttgctcactataatttccagttcgtggtgggtcagaaggaacaatccaaacgcacagtgaatatccgcactcgagataatagacgactgggcgagtgggacttgcctgaagcagtgcaacgtttggtggagttgcagaatacacgcgtgcctaacgccgaggaaatcttttag

SEQ ID NO: 243991 - DNA, 2157 bp, synthetic construct
  misc_feature 1..2157: note = Description of Artificial Sequence: Synthetic coding sequence
  source 1..2157: mol_type = other DNA
atggcactgtatcagcggtggagatgcctccgacttcagggtctccaggcttgcaggctgcacaccgctgttgtaagcaccccacccagatggctggctgaacgtttaggtctgtttgaagagctatgggctgcccaagtgaaacgactagcaagtatggcacagaaggagcccaggacaatcaagatctccttgcctggagggcaaaaaatcgatgcggttgcttggaacacgaccccttatcagcttgctcgacagatcagctctactctggcggatacagctgtggcagcgcaagtgaatggggaaccttacgatctggaacggcctttggagacagactccgatcttcggttcctgaccttcgattcgcccgaggggaaggcagttttttggcactccagtacccatgtcctgggggctgctgcagagcagtttctgggggcagtgctctgccgcggaccctctaccgaatacggtttctatcacgactttttccttgggaaggaaaggactattcggggaagcgaactgccagtgctggaacgcatctgccaggagctcacagctgccgctaggccatttaggcgtctggaggctagcagggaccaattgagacaactgttcaaggataatccattcaagctccaccttattgaggagaaagtgacagggcctacagctaccgtgtacggatgtggcactttagtggatctgtgtcaaggaccccatctgagacacactggtcagataggaggtctaaagttactgagtaactccagctccttatggaggtccagcggtgcacccgaaacattacaaagagtgtctggcatttctttccctacaacggagttgctcagagtctgggaagcttggagggaagaagccgagctcagagaccacaggcggattggcaaggaacaagagttgttctttttccatgagcttagcccaggtagctgcttttttctgcccagaggtacacgggtgtacaacgccctggtggcttttatccgcgcagagtatgcccaccgtggcttttctgaggtgaaaacccccacgctgttcagcaccaagctgtgggagcagtccggccactgggagcattaccaggaagacatgtttgcagtccagccgcctggatctgatcgaccaccgtcaagccagtcagacgactctacacgccatatcacggatactttggcccttaagccgatgaattgccccgctcactgtctaatgttcgctcaccggccaagatcatggcgggagcttcctctaaggctcgcggacttcggagcccttcaccgggctgaggccagtgggggtttgggcggtcttacccgactcagatgcttccagcaggatgacgcacatatcttttgtacaacagaccagctggaggctgagatccagtcatgcctggatttccttcggtccgtctacgcagtccttggcttttcatttcgactcgctcttagtacaaggccttccgggtttctcggtgatccttgtctgtgggatcaagcggaacaagtcttgaagcaggcactgaaggagtttggtgagccatgggacttgaattctggggatggggctttctacggacccaaaatagatgtgcaccttcatgacgccctgggaaggcctcaccaatgcggcacaattcagctggactttcaactaccactgcgtttcgatttgcaatataaggggcaggctggcgcactcgagcggccagtgttgatccatagagccgttctcggatctgtggagaggctgctgggcgtcctggctgagtcttgtggtggaaaatggccactatggctgtctcctttccaggtggtcgtgatacccgtgggaagtgagcaggaagagtatgcaaaggaggcccagcagtctctgagggcggctgggttggtgagtgacttggacgccgactcaggacttactctcagcagacggattaggcgcgcacagttagcccattataactttcaatttgtcgtgggccagaaggaacagtccaagcggaccgtcaacattagaacgagggacaatcgtaggctgggcgagtgggacctccctgaggccgtccagcggctagtggaactgcagaacacccgtgtgccaaatgcggaggaaatcttctag

SEQ ID NO: 243992 - DNA, 510 bp, synthetic construct
  misc_feature 1..510: note = Description of Artificial Sequence: Synthetic coding sequence
  source 1..510: mol_type = other DNA
atggccctctatcaacgctggcgctgcctacgccttcagggcctacaggcgtgtagactacacaccgccgtcgtgtcgaccccacctaggtggctcgccgaacgactcggattgtttgaggaattgtgggctgctcaggtcaagagactagcttcgatggcacagaaagagccgagaacaattaagatatccttgccaggtggtcagaaaattgacgccgtggcctggaacaccacgccttatcaactggctaggcagatcagctccaccctggccgacaccgcggtcgctgcccaggttaatggggagccttacgatctcgaacgtcctttagagaccgacagcgatctcagatttcttacatttgattctcccgaaggcaaagccgacaatcctggcctgagggccgcatgcttcggcgctgacctccccggtacatactcctgctgcagcacattgcccgaggcccgtggcttcaccggatccgcgagcccagtggtacagggctag

SEQ ID NO: 243993 - DNA, 4974 bp, synthetic construct
  misc_feature 1..4974: note = Description of Artificial Sequence: Synthetic coding sequence
  source 1..4974: mol_type = other DNA
atgggactgcaggcaaggcgatgggcctcagggagccgtggcgcagccggtccgaggcgtggcgttctgcagctgctcccactacccctgcccctgcccctgctgctgttgctcctgctgcgaccaggagcagggagagccgctgcacagggggaggctgaagcacctaccctttatctctggaaaaccgggccatggggcaggtgcatgggcgatgaatgtgggcctggcggtatccagacacgggctgtctggtgcgcacatgttgagggttggacgactctgcacacaaactgcaaacaggccgagcggcctaataatcagcagaactgtttcaaagtgtgtgattggcacaaggagctgtacgactggaggcttggcccatggaaccaatgccagcccgtcatcagcaaaagcttagagaagcctctggagtgtattaagggggaggaaggtatacaagtgagggagattgcttgtatacagaaagataaggacattccagccgaggatatcatatgcgaatatttcgagcccaaacccctgctggagcaggcctgtctgattccttgccaacaggactgtattgtcagcgagttcagtgcttggtccgagtgctccaagacttgtggatctggtttgcaacataggacccgccatgtggtggcgcctccacaatttggcggaagcggatgtcctaacctaactgagttccaggtgtgccagagcagcccttgcgaggccgaggagctgcgatatagcttacatgtcggcccatggtcaacatgctccatgcctcactctcggcaggtacggcaagctcggagacgcggtaagaacaaagagagggaaaaagatcgatctaagggcgtgaaagaccctgaggccagggaactgatcaaaaagaagcgcaatcgaaatcggcagaaccggcaggaaaataaatactgggacatccagatcgggtatcagacaagggaggtaatgtgtattaataagaccggcaaggcagctgacttgagcttttgccagcaggagaaactgcccatgacctttcagagctgtgttatcacaaaggagtgccaggtgtccgagtggtctgaatggtctccatgttctaagacatgtcacgacatggtttcccctgccggaacaagggtgcgcacacggacaataaggcaatttcctatcggctcagagaaggagtgccccgagtttgaagagaaggaaccttgtctctctcagggcgatggggtagtgccctgtgcgacttatggatggcgcacaacggagtggaccgagtgcagagtggaccctctgctaagccaacaggataagagacggggaaatcaaactgcactatgtggtggaggaatccagaccagagaggtgtactgtgtgcaggctaatgagaatttgcttagccagctgtccactcataaaaataaagaggccagtaagccaatggatctcaagctgtgcacaggccctattcctaacacaacacagctgtgtcacattccttgcccgactgaatgtgaggttagtccgtggtctgcctggggaccttgcacctatgagaattgtaatgaccagcaagggaagaagggtttcaagctccgtaagagacgcattaccaatgagcccacagggggaagcggagtgaccggaaactgcccccatctactggaagctattccttgtgaggagccagcttgttatgattggaaggccgtgagactgggcaactgcgaacctgacaacgggaaagagtgcgggccagggactcaggtgcaggaagttgtgtgcattaatagtgacggcgaggaggtagaccgtcagctctgccgcgacgccatcttcccgatcccagtcgcctgtgacgcaccttgcccgaaggattgtgtgctcagcacgtggtccacgtggtctagctgttcccacacctgttcaggtaaaaccaccgaaggcaaacagattcgtgcacgtagcatcctggcctatgctggagaggaagggggaattcggtgtccgaatagttcagcgctgcaggaggtgagatcctgcaatgagcacccatgcacagtgtatcactggcagacaggtccctggggccagtgtatcgaggacacatccgtctccagttttaacaccacaactacctggaacggtgaggcatcttgtagtgtgggaatgcaaacccggaaggtgatctgtgtccgcgttaatgttgggcaagtgggaccaaagaaatgtccggagagcctacgcccagagacagtgcgaccttgcttgctgccatgtaaaaaggactgcatcgtgacaccctactctgactggacgtcctgtcccagcagctgtaaggagggagacagtagcatacgcaagcagtctaggcaccgggtgatcatacagttacctgctaacggtggcagagattgtaccgacccgttatatgaagagaaagcttgtgaggcgcctcaggcttgccagtcatacagatggaaaacccataagtggcggcgttgccagctggttccatggtctgtgcagcaagattcaccgggtgctcaggagggctgtggtcctggacgccaagcccgagcaattacatgtaggaaacaggacgggggacaggcaggtatacatgagtgtctgcaatatgcagggccagttccggcattgacacaggcgtgtcaaatcccctgtcaagatgattgtcagctcacttcatggtccaagttctcctcgtgcaatggggattgcggagccgtgagaacaaggaaaagaacactggtgggcaagagcaagaagaaggaaaaatgcaaaaactcgcacctttatcccctcattgaaacacagtactgtccatgtgacaaatataatgcgcagccggtggggaattggtccgattgtattctcccagaggggaaggtcgaggtcctcctgggcatgaaggttcaaggggacattaaagaatgcgggcaggggtatcggtatcaggctatggcttgctacgatcagaacgggagactcgttgagacttcccggtgtaattcccacggctacatcgaggaggcatgtatcatcccctgtccaagtgattgtaaactttctgaatggtccaactggtctaggtgcagtaagtcctgtgggagcggggtgaaggttcggtctaaatggctgagagaaaagccatataatggcggacgaccatgtccaaagttggaccacgtcaaccaattccaagtctacgaggtagtcccgtgccacagcgattgcaaccagtacctgtgggtgacagagccctggagcatctgcaaggtgacattcgttaacatgagagagaactgcggcgaaggagtccagaccaggaaggttaggtgtatgcagaatacggccgatgggccatccgagcatgtggaagactatctatgcgacccggaagagatgcctctaggttcccgcgtttgcaaacttccatgccccgaggattgcgtgattagtgaatggggcccttggacacaatgtgtgctgccatgcaaccaaagcagctttcgccagagaagcgctgatcctattagacagccagctgatgagggtcggagctgccctaacgccgtagaaaaagagccctgtaaccttaataaaaattgctaccactatgactataatgtgacagactggagcacttgtcagctaagcgagaaagccgtctgtgggaacgggatcaaaacccggatgttggactgtgtgagaagcgatggaaagtccgtagacctgaaatactgcgaggctcttgggttagaaaaaaactggcagatgaatacatcatgcatggtagagtgccccgtgaattgccaactaagtgactggtccccctggtccgagtgctcccagacatgcggcctgaccggcaagatgattcggaggcgaaccgtcacccagcctttccagggggacgggaggccctgtccttccctcatggaccagagtaagccttgcccggtcaaaccttgctataggtggcagtacggccagtggtctccctgtcaagtacaggaagcccaatgtggggaaggaacaaggacaaggaatataagctgtgtagtatctgacggctctgccgatgacttctccaaggttgtagacgaggagttctgcgctgatattgagctgatcattgacggaaacaaaaacatggtgctggaggaatcatgtagccagccctgccctggcgattgttacctcaaggactggtcctcttggtccctgtgccaactgacctgtgttaatggggaggaccttggtttcggcggaatccaagtgaggtcccgtcctgtgatcattcaggagctggagaatcagcacctctgtccagaacagatgctggagaccaaaagttgttatgacggacagtgttatgagtataagtggatggcttcggcctggaagggcagctcaaggacagtgtggtgccagcggtccgacggcatcaacgtgactggcggttgtctggtgatgtctcagccagatgctgatcgctcctgcaaccccccttgttcacagcctcattcttattgcagtgagactaagacctgtcactgcgaagagggatatacagaggtgatgtcaagtaactcgaccctcgagcaatgtactctaatccctgtggtggtgctgcctactatggaagataaacggggagatgtgaagaccagtcgcgctgtgcacccaactcagccctcctcgaatccagccggtcgcggaaggacatggtttcttcagccgttcggaccagatggcagactcaagacttgggtttacggagtggcagccggtgcattcgtcctccttattttcatcgtctcaatgatttatcttgcatgtaaaaaaccgaagaagccacagcgacgccaaaataaccggctgaagcctttgacactcgcctacgatggagatgccgacatgtag

SEQ ID NO: 243994 - DNA, 4973 bp, synthetic construct
  misc_feature 1..4973: note = Description of Artificial Sequence: Synthetic coding sequence
  source 1..4973: mol_type = other DNA
atgggactgcaggcaagacgctgggcatctggctctcgtggagcagccggtccacggagaggcgttctgcagcttttgccactgcccctgcctctgcctctactactcctgttgctgctccgccctggagccggacgggcagcagcccaaggggaggcagaggcccctacattatacctctggaaaaccggaccttggggaaggtgtatgggggacgagtgtggtccaggcggaatccagacgcgagccgtgtggtgcgctcacgtggagggatggaccacactacacaccaactgcaagcaggctgaacggccaaacaatcagcagaactgctttaaagtgtgtgattggcacaaggaactgtacgattggcggctcgggccttggaatcagtgtcagccagtgattagcaagtccttagagaagccgttagagtgcattaagggcgaagagggtatacaggtgcgtgagattgcttgtatccagaaagacaaggatatacccgctgaagacattatttgcgagtattttgagcctaagccactgcttgaacaggcatgcctgatcccttgtcaacaagactgtattgtgagtgagtttagcgcttggtctgagtgttctaaaacatgtggctctggcttgcaacataggactcgccacgtggtggctccaccgcagtttggcggatcaggatgccccaacctgaccgaattccaagtgtgccagagttccccctgcgaagccgaggaactccggtattctctgcatgtcggcccatggagtacatgctccatgcctcatagccgccaagtccgtcaggccagaagaaggggaaagaacaaagagcgggagaaggacagatcaaagggcgtgaaggacccagaggctcgggaactgattaagaaaaaacgaaatcggaatcggcagaacagacaggaaaataaatactgggatatccaaatagggtatcaaacccgggaggtcatgtgtatcaataaaaccggaaaggctgccgatctttcgttctgccaacaggagaaactcccaatgacattccagtcctgcgttatcacaaaggagtgtcaggtgagtgaatggtctgaatggtctccctgctctaagacgtgccacgacatggtgagcccagccggaacgagggtgaggacacgaacaattcgccagtttcctatcgggtccgaaaaggaatgccccgagttcgaggaaaaggagccttgcctgagccagggagacggtgtggtgccatgcgccacgtacggatggcggaccacggagtggaccgagtgtcgggttgacccactcctgtcccagcaggacaagcggagaggcaatcaaaccgccctctgtggcggaggcattcagaccagggaggtgtattgcgttcaggcgaacgagaacctgctgagtcagctaagcacgcacaaaaataaggaagcttccaagccaatggatctgaaactctgtacaggcccaattccaaatactacccaattatgccatattccctgtcctacagagtgcgaggtctccccctggtcggcgtggggaccttgcacttacgagaattgtaacgatcagcagggtaagaagggctttaagctccgaaaaaggcgtattacaaatgagcctaccgggggtagtggggttacaggaaactgccctcacctgcttgaggccattccgtgcgaagagcctgcttgctacgattggaaggctgtgagactcggtaattgcgagcccgataacggaaaagaatgtggccctggaacccaggtccaggaggtggtatgcattaatagtgatggcgaagaggttgatcgccagctctgtcgagacgctattttcccaatcccagtagcgtgcgacgccccttgtcctaaggactgtgtgctgagtacctggtctacctggtcctcttgctctcatacgtgctctgggaaaaccaccgaggggaaacaaatcagggctagatctatcctcgcctatgcaggtgaggaggggggtatccggtgccccaacagctcagctctgcaggaagtgcgaagctgtaatgagcacccttgcactgtttaccactggcagaccggtccctggggacaatgtattgaggatacaagcgttagtagtttcaacaccacaactacatggaacggggaagcctcttgctcagtgggcatgcaaacaagaaaggtgatctgtgtgcgcgttaacgttggtcaggttggtccgaaaaagtgtccagagagcctccggccagagacagtgcggccatgcctgctgccctgtaaaaaggactgtatcgtgactccatacagtgactggactagctgtccctcctcctgcaaagagggcgacagttctataagaaagcagtcccgtcaccgagtcattattcagttgccagctaatggtggcagggactgcacagatcctttgtatgaggagaaggcatgtgaagcccctcaggcctgccagtcatacagatggaagacccacaagtggagacgatgccaactggtgccttggtctgtgcagcaggactctccaggagcccaggaaggatgtggtccagggcgtcaggcccgtgccattacttgccggaagcaggacggaggccaggccggaattcacgagtgtttgcagtacgccggtccagtgcccgcattaacccaggcttgtcaaatcccctgccaggatgactgccaactgacttcctggtctaagttttcgagttgcaacggagactgcggggctgttagaactagaaagaggacccttgtcggtaagtccaagaagaaagagaagtgtaagaacagccacctctatccccttatcgagacacagtattgcccttgtgacaaatacaacgcccaaccagtcggtaactggagtgactgtatactacctgagggaaaggtcgaggtgcttcttgggatgaaggtgcagggcgatataaaagaatgcgggcagggctataggtaccaagccatggcgtgttacgaccaaaacggcagactggttgagacatcccggtgcaatagtcacggctatattgaggaggcatgcatcatcccatgtccttccgattgcaaactgtctgagtggagcaattggtctagatgttccaaatcatgtggaagtggagtcaaggtcagaagcaagtggctgagagaaaagccctataatggcggacgcccttgccccaagctcgatcatgtgaaccaggcccaggtctatgaggtggtgccctgtcattccgactgcaaccagtacctctgggtcaccgagccttggagcatatgtaaggtcactttcgttaatatgagggagaactgcggtgagggcgttcagacgaggaaagtgcggtgtatgcagaacaccgccgatggaccttcagagcatgtggaagactacctttgcgatcccgaagagatgcctctgggcagccgcgtctgcaagctcccatgccccgaggactgtgtaatcagtgagtggggaccctggacacagtgtgtgctgccctgcaaccagtcgagcttccggcagcggagtgccgacccaatccggcagcccgctgacgaaggaagaagctgtcccaacgccgtcgagaaagaaccttgcaacctgaataaaaactgctaccactacgattacaacgtgactgactggtccacatgtcagctcagcgagaaagccgtatgtggaaatggtatcaaaaccagaatgctggactgcgttcgttccgatggtaaatctgtggatttaaagtattgcgaagccctgggtctcgagaagaattggcagatgaatactagctgtatggtggagtgtccggtcaactgccagcttagcgattggagcccatggagcgaatgtagccagacctgcggattaactgggaagatgatcaggcggaggaccgtgacccaacccttccaaggcgacggcagaccctgcccctccttgatggatcagagcaaaccctgtccagtgaaaccttgctacagatggcagtatggacagtggtctccctgccaggtacaggaggcacagtgcggtgaaggaacacgcactaggaatatcagctgcgtggtttcagacggcagcgcagacgattttagtaaagtcgttgacgaggagttttgtgcagatatcgagctaattattgacggtaacaaaaacatggtgctggaggagtcctgttcacagccatgccccggagattgctacctgaaagattggtctagctggtccctgtgtcagctgacttgcgtgaacggtgaggacctgggattcgggggaatccaggtgcgttctcgtcccgtcatcattcaggagctggaaaaccaacacctatgcccagaacaaatgcttgagaccaagtcgtgttatgatggtcagtgctatgagtacaagtggatggccagcgcctggaaggggagtagccggaccgtctggtgccagcgatcagacgggatcaatgtcacaggtggttgcctggtaatgagccagcctgatgccgaccgctcctgtaatcctccctgctcccaaccacacagctactgctcggagactaagacctgtcattgcgaagagggctataccgaagtcatgagctctaacagtacattggagcagtgtaccctgattcctgttgtggtgctcccaactatggaggacaaacggggagacgtcaaaacatctcgtgcagtacacccaacgcagccttcatctaatccagccggtagaggacggacctggttcctccagccatttggtccagacggcaggcttaagacctgggtatatggagtcgcagctggggctttcgtgctcctcatcttcatcgtcagcatgatctatttggcttgtaagaaacctaaaaaaccccagcgcagacagaacaatcgcctcaaaccgctgacactggcatacgatggcgatgccgatatgta

SEQ ID NO: 243995 - DNA, 2010 bp, synthetic construct
  misc_feature 1..2010: note = Description of Artificial Sequence: Synthetic coding sequence
  source 1..2010: mol_type = other DNA
atgtccgctctccttagcctatgctttgtactcccactcgccgcacccggtcatggcacccagggctgggaaccctgcacagatcttcggccactggacatccttgctgaggtggtgccttctgatggtgcaacatcaggcatcaggatcgtgcaggttcacggcgctcggggactccagctgagtgtggccgctcctaggaccatgtcctttcctgcatcccgcatcttcagtcaatgcgatctctttccagaagagttttcgatcgtggtaacgctcagagtgcccaatcttccgccaaaacggaatgaatacctactgactgttgtggcggaggaatccgatctgcttttactcgggctgaggctgagccccgctcagctgcatttcctgtttctaagagaggacactgccggagcgtggcagactcgagtgagcttcagatcacccgcactggttgacggcagatggcacaccctggtcctggctgttagtgctggcgtgttttccctgaccactgactgcggccttccagtggacatcatggctgacgtgcccttcccagccactttgtccgtgaaaggcgctcgtttctttgtgggcagccgacgccgtgctaagggactgtttatgggactcgtcaggcagcttgtgctgttacccggttctgacgctaccccacggttgtgccctagccggaacgcccctcttgccgtactatccattccacgggtcctccaggctttaactggcaagcccgaagacaacgaggttctcaagtatccgtatgagaccaatatacgcgttacactggggccacagcccccatgtaccgaggttgaggacgcccaattttggtttgacgcctcgcgtaagggactgtacctctgtgttggaaacgagtgggtatccgtgctggctgctaaggagcgccttgattacgtggaggagcatcaaaacctctccactaattctgagactcttgggatagaagtgtttcggatcccccaggtcggactttttgtggccactgctaaccggaaggcaactagtgctgtgtacaaatggacagaggaaaaatttgtttcataccagaacatccccacccatcaggcccaggcatggcggcattttacgataggtaaaaagatattcctggcagtggcaaattttgaacccgacgaaaaggggcaggagttctctgtcatatataagtggtcgcacaggaagctgaaatttacaccctatcagagtatcgccacccattctgccagagactgggaggccttcgaagtcgatggtgagcactttcttgccgtggccaaccacagagagggagataatcacaatattgacagtgtcatttataagtggaatccagccacaaggctcttcgaggctaaccaaaccatagcgacctccggtgcttatgattgggagttcttctccgtagggccttactcgttccttgtggtggcaaacactttcaatggtacctctaccaaagtgcacagtcacttgtacatcagattactgggcagcttccaactcttccagagctttcccacgttcggcgcagctgactgggaagtgtttcagatcggcgagagaatctttctagccgtggccaacagtcattcctatgacgtggagatgcaggtgcaaaatgattcctacgtcatcaactctgtgatttatgagctaaacgtgacagcccaagctttcgtcaaatttcaggacatcttaacatgctctgctttggattgggaattcttcagcgttggggaagattactttctggtcgtggcaaacagttttgacgggcgaacgtttagcgtcaatagcattatctaccgctggcagggttacgaaggcttcgtggctgtccattctcttccaaccgtcggatgccgcgattgggaggcatttagcacaacagccggagcatatctcatatatagcagtgctaaagagccgctctcgcgggtgctgagattgagaactagatag

SEQ ID NO: 243996 - DNA, 1800 bp, synthetic construct
  misc_feature 1..1800: note = Description of Artificial Sequence: Synthetic coding sequence
  source 1..1800: mol_type = other DNA
atgtctgccctgctctctctgtgttttgtactgccacttgccgctccgggacacggtacccaagggtgggagccatgcacagatttgcgccctctggacattcttgccgaagtggtcccatcagacggggctacctcaggaattcggatcgtgcaagtgcacggcgcacggggactgcagctgagcgtcgccgcaccacggacaatgtcctttccagcctctcgcatcttctctcagtgcgacctatttcctgaggagttcagtatcgtcgtaacactcagggtccccaatctgccccctaaacggaacgagtacctactgactgttgtggcggaggaaagcgacctgctgctgcttgggttgcggctgagcccggctcagcttcactttctgtttctcagggaagacaccgccggagcctggcagacacgagtgagcttccgcagtcctgcattagtcgatggccgatggcacaccctggtcctggctgtcagtgcgggtgtgttcagcctgacaacagactgcggcctgcccgtggacatcatggctgatgtgccatttccagctaccctgagcgttaagggcgctagattttttgtaggctctcgacgacgtgccaaaggactatttatgggccttgttaggcagctagttttactgcccggaagtgatgctacccctcggctgtgcccctctcgaaacgccccactggccgttctgtcaatccccagagtcctgcaagccctgaccgggaaacctgaagacaatgaagtcctcaaatacccctatgagacaaacatcagagtgaccctgggtccgcaacctccatgcactgaggtggaagacgcacaattttggttcgatgctagccgcaagggactgtacttgtgcgttgggaacgaatgggtgtcagtccttgcagaggcaaaagagaggctcgactacgtggaggagcatcagaatttgtccaccaacagcgagactctcggaatcgaagtgtttcgaatccctcaagtcggcttgttcgtggcaactgcaaaccgcaaggccacttcagctgtgtacaaatggaccgaagagaaattcgtgtcatatcaaaatattccgacccatcaggcccaggcctggaggcatttcaccatcggaaaaaagatttttttggccgtcgcgaactttgagcccgatgaaaaggggcaggagttctccgtgatttacaaatggtcacaccgcaaactcaaattcacaccataccagtcgatagccacccactccgctagagactgggaggcattcgaggtggacggggaacatttcctggcagtggcaaaccacagagaaggtgataatcacaatatagattccgtgatctacaagtggaacccagccactcgtctgttcgaggcaaatcaaaccattgcaacctccggagcttacgactgggagttcttttcagtaggtccgtactctttcctggttgtcgccaacacattcaacgggacatcaactaaggtccactcacatctatatatcaggctcctgggttctttccagctcttccagtccttccccactttcggggctgcagactgggaagtgtttcagatcggtgaacggatcttcctcgccgtggctaatagccactcctacgatgttgagatgcaggtccaaaacgattcttatgtaatcaattctgttatctacgagctgaatgtaacagctcaagcctttgtgaagttccaagatattttgacatgcagcggcggaagaaggggattacatgccagacgggcagaagggtag

SEQ ID NO: 243997 - DNA, 1569 bp, synthetic construct
  misc_feature 1..1569: note = Description of Artificial Sequence: Synthetic coding sequence
  source 1..1569: mol_type = other DNA
atgtctgcactgcttagtctgtgctttgtgctccccctagcagccccaggccatggcacgcagggctgggagccatgcactgatctgcgccctttggatatactggccgaggtcgtgccaagcgatggcgcaacctctgggatcagaattgttcaggttcacggcgctcgcggattgcagctctccgtcgccgcaccaaggacaatgagcttccccgctagtcggatcttttctcagtgtgatctgtttccagaagaattttctattgtggttactctgcgtgtccctaacttaccaccaaagaggaatgagtacttacttaccgtggtcgccgaagaaagtgacttactgctgctcgggctaagattgtctcccgcacagccgccttgtacggaagtcgaagacgcgcaattctggtttgacgccagtaggaagggtctgtatttatgtgtagggaacgagtgggtgagcgtgctggcagccaaggagcggcttgattatgtggaggaacatcagaacctgtccaccaattcagagaccctgggcatcgaggtcttcaggattccccaggtcggcctcttcgtggctactgccaataggaaagcgacttcagcggtgtataagtggactgaagaaaagttcgtgtcctatcagaacatccccacccaccaagcacaggcatggcgccacttcactattggcaaaaagatattcctggcggttgctaatttcgaacccgacgagaagggtcaagaattcagtgttatttacaaatggtctcaccggaagttgaaattcactccctatcagtcaattgcgacgcactcggctcgagactgggaggcattcgaagtggatggggagcactttctcgccgttgccaaccatcgggaaggagataaccataacattgattctgttatatacaaatggaacccggctaccaggctgttcgaggctaaccaaacaatcgcaacatccggtgcttatgattgggaatttttttcagtgggcccttactctttccttgtggttgctaacacatttaacggaactagcaccaaggtgcactctcacctctacattcgcctgctagggtctttccagttgtttcaaagttttcctacttttggcgcagcagactgggaggtattccagattggcgagagaatctttttagccgtggccaactcacactcgtacgacgtggagatgcaagtgcagaatgatagttatgttatcaattcggtgatttacgaactgaatgtaaccgctcaggctttcgtcaaattccaggatatcctgacctgttctgccctggattgggagttcttctccgtgggagaagactactttttggtcgtcgcaaattcttttgatggccgtactttctctgtcaattccattatatataggtggcaagggtacgaaggattcgttgcggtgcacagcctacccaccgttggctgtcgcgactgggaagcgttttccactactgcaggagcatacctaatctactcgagcgccaaggagccattgagcagggtgctgcgactgaggaccaggtag

SEQ ID NO: 243998 - DNA, 1605 bp, synthetic construct
  misc_feature 1..1605: note = Description of Artificial Sequence: Synthetic coding sequence
  source 1..1605: mol_type = other DNA
atgatggaggccctcggcttcctgaaactggaggtgaacggacctatggtgactgtggcactgtctgtcgccctattagccctgcttaagtggtattctacgtcagcctttagccggctcgaaaaattggggctgcggcacccgaaaccaagcccatttatcgggaaccttaccttcttcaggcaggggttctgggagagccaaatggagctgagaaaactctatggcccactgtgcgggtactacctgggtcggcgaatgtttattgtaatctcagaaccagacatgattaagcaagtactcgtggagaacttcagtaatttcactaaccggatggccagtggattagagttcaaatccgtggcagacagcgttctattcctgcgcgataaacgatgggaagaggtgcgtggagctctgatgtccgccttttctcccgagaaacttaacgagatggttccactgatctcacaggcttgcgaactgctcctggcccacctgaagagatacgcggaatcaggggatgcgtttgatattcagcgctgctactgtaattacactaccgatgttgtcgcctctgtcgcatttggaactcccgtcgacagttggcaggcaccagaagaccccttcgtgaagcactgcaagcgcttcttcgaattctgtataccgcgtcccatattggtactgctactgtccttcccctctattatggtacccctggcaagaattctgcccaataagaaccgtgacgagctcaatggctttttcaacaagctgattaggaacgttatagcactgcgcgaccagcaggccgctgaggagagaaggcgcgacttcctgcagatggtgctcgatgcacggcactctgcttcccctatgggcgtgcaggacttcgacattgtgagggatgtcttcagctctacagggtgcaaacctaacccaagccgacaacaccagcctagtcctatggccaggccactgaccgtggacgaaatcgtcgggcaggcttttatatttctcatcgcgggttacgaaattatcaccaacaccttgagctttgcaacctacttactcgcaacaaaccctgactgccaggaaaaactcctccgcgaagtggatgtcttcaaagaaaagcacatggccccagaattttgttctctggaagaaggtctcccctatctggatatggtcatcgccgaaacactgagaatgtatccgcctgcttttcgctttactcgcgaagcggctcaagactgcgaggtccttggccagcgaattcccgctggtgctgtcctggaaatggccgttggcgcactgcatcacgatcctgaacattggcccagcccggaaactttcaaccctgaaaggttcacggctgaagcaagacaacaacaccgcccttttacttacctcccctttggcgcaggccctcgctcctgcctcggcgtgaggttggggctgctggaagttaagctgaccctgctgcacgttctccacaagtttcggttccaggcgtgccctgaaacacaggtgccgttgcagctggagagcaaatcagcgttgggccctaagaatggggtgtacatcaaaatcgtttcaagatag

SEQ ID NO: 243999 - DNA, 1602 bp, synthetic construct
  misc_feature 1..1602: note = Description of Artificial Sequence: Synthetic coding sequence
  source 1..1602: mol_type = other DNA
atggaggcccttgggtttttgaagcttgaggtaaacggccctatggtgacagtagctctgtccgttgctctcctggcgctccttaagtggtactcgacatccgcctttagcagattagaaaagcttggacttcgtcatcctaaaccatcccccttcatcggcaatttaacatttttccgccaggggttctgggagtcgcagatggaattgagaaagctttacggaccattgtgcggctactacctaggccgtagaatgtttatcgtgattagcgagcctgacatgattaaacaggtactggtcgagaacttctctaatttcaccaacaggatggccagcgggctggagtttaagtcagtggcagacagcgtgttgttcctcagagataagaggtgggaggaagtcagaggggctctgatgtcagcgttcagccccgaaaaactcaacgagatggtccctttgatctctcaggcgtgcgagctgcttctggcccacttaaaaagatacgcagagtcaggcgatgcctttgatattcaacggtgctattgtaactacacaacggacgtagtggccagcgtcgcctttggtaccccagtcgacagttggcaagcccctgaggaccctttcgtgaagcactgtaagaggttctttgagttctgtatccccaggcctattttagtactcttactcagctttccctcaatcatggttcccttagcacgaattctgcccaacaagaaccgtgatgagctgaacgggttctttaataaactgattcggaatgtcatcgccttacgggatcagcaggcagcagaggagcgacgaagagattttctccagatggtgcttgacgcgagacattcagcgtcacccatgggggtgcaagactttgacattgtgcgggatgtgttctcctccactggctgcaaacctaacccttccagacagcaccaaccaagcccaatggccagacccctgacagtcgatgagatcgttggccaagctttcattttcttaattgctggatacgagataatcactaatactctatcgttcgctacgtacctcctggccacgaacccggattgccaggagaaactgctacgtgaagtggacgttttcaaggaaaagcacatggctcccgaattctgttccctcgaagagggcctgccgtacttggatatggtgattgcggaaacactccggatgtatccccctgcatttagatttactagagaggccgcacaggactgcgaggtgctcgggcagaggatccctgcaggtgctgttctggagatggctgtaggcgctctacaccacgacccagagcactggcccagtcctgagactttcaacccagagaggtttaccgcagaggctaggcaacagcataggccgttcacttaccttccatttggcgcaggaccaaggtcttgcctgggggtgcggttgggactgttggaggtcaaacttacacttttacacgtgctccataaatttcggtttcaggcctgccccgagactcaggtgcccctgcagctggaatctaagagtgcactgggtcctaaaaacggggtgtacatcaagattgtgagcagatag

SEQ ID NO: 244000 - DNA, 1380 bp, synthetic construct
  misc_feature 1..1380: note = Description of Artificial Sequence: Synthetic coding sequence
  source 1..1380: mol_type = other DNA
atggaagcgctaggttttcttaaacttgaagtgaacgggcctatggtgacagtcgctctttccgtcgcgctccttgcgttactgaaatggtattctacgtctgccttcagccgactggaaaaactcgggctgcgccatcccaaaccctcgcccttcatcggtaacctgactttcttccgacaggggttctgggaaagccagatggagctgagaaagctttacggacccctgtgcggttactacctgggacgcaggatgttcatcgtaatttctgaacccgacatgattaaacaggtgctggtcgagaacttttctaacttcactaatcggatggcatcaggacttgagttcaagagtgtagccgatagcgtgctattcctgagggacaaacgatgggaagaggtacgcggtgccctcatgagtgccttctctcccgagaagttgaatgaaatggttccattaatatcgcaggcctgtgagttgctcctcgctcaccttaagcgctatgccgaatccggcgatgcgttcgatattcagagatgttattgtaattacactacggacgttgtcgcttctgtcgccttcggaacaccagtagactcttggcaggcaccagaagatcctttcgtaaagcattgtaaaaggttttttgaattctgcattccccgacctattttagtcttgctcttgtctttcccctccatcatggtgccactcgctaggattctgcctaataagaacagggacgaactgaatggctttttcaataagcttatacgcaatgttatcgccctgagagaccagcaggctgccgaggagagacgccgagatttcctgcagatggtgctggacgctcgacattccgccagtcctatgggcgtacaggactttgatatcgtccgggatgtcttcagcagcacaggctgtaagccgaacccatcgcgccaacatcagccttcaccgatggcccgtcctctcaccgtagatgagattgtgggacaagcctttattttcctcattgccggatacgagatcatcactaatactctgtcattcgccacctacctactcgccactaacccagactgtcaagaaaagttgctgcgcgaagtggacgttttcaaagagaaacacatggcccctgagttctgttcactagaggagggtctgccgtacctggacatggtaatagccgagacacttagaatgtatccccctgctttcagattcacacgcgaggccgctcaggattgcgaggtgttggggcagcggatccccgctggcgctgtcctcgaaatggcagtaggtgcacttcaccatgaccctgagcattggccaagtccagagacgttcaacccggaacgctacagatgcagctag

SEQ ID NO: 244001 - DNA, 1383 bp, synthetic construct
  misc_feature 1..1383: note = Description of Artificial Sequence: Synthetic coding sequence
  source 1..1383: mol_type = other DNA
atgatggaagccctgggcttcctgaagctggaagtcaacggtcctatggtgaccgtggctttatccgtggcactgcttgccttgcttaaatggtacagtacaagtgctttctcacgcttagagaagctcggccttcgtcatcccaagccttccccgttcatcggaaacttgaccttttttcgtcagggattttgggagtcccagatggagctgcgcaagctctatggtcccctgtgtggatactacttgggccgtagaatgtttattgtaatttcagagcccgatatgatcaagcaggtcctagtggagaatttttccaatttcaccaaccgaatggctagcggcctcgaatttaagagtgtagccgactccgttctcttcttgagagacaaaaggtgggaagaggtgcggggagccctcatgtcggcgttttctccagaaaagctcaatgaaatggtaccactaattagtcaagcctgtgagttgctgctggcacatctgaaaaggtatgccgaaagcggcgatgccttcgacatccagcgctgttattgtaattataccacggacgtcgtggcgtcggtcgcttttgggacccctgtggacagttggcaagctccagaggatccatttgttaaacattgcaagaggtttttcgaattttgcatcccaagacccattctcgtgctgctgctgtcatttcccagcatcatggtcccgttggcccgaattttgcctaacaagaacagggacgagttgaatgggttcttcaataagctgatacgcaatgtgatcgccttacgcgaccaacaggctgcggaggaacgccgaagggatttcctgcaaatggtcttggatgccaggcactccgcctcgcctatgggcgttcaagattttgacatcgtccgggatgtgttctcctccaccggttgtaaacccaaccctagccgtcagcaccagccatcccccatggctaggccattgaccgtcgatgagatcgtggggcaggcgtttatctttcttatagccggatatgagatcatcacaaacactctttcattcgccacgtacctcttggcaacaaaccccgattgccaagagaaactgttaagggaggtagacgtgttcaaggagaagcatatggccccagagttttgtagcctggaagaaggcctgccatatctagacatggtcattgctgaaacgctgaggatgtatcctcccgcattcagatttaccagagaggcggctcaggactgcgaggtgctcggacagcgcatacccgctggtgctgtcctcgagatggccgtgggcgctctccatcacgatcccgaacattggcccagcccagagacctttaacccggagaggtaccggtgttcttag

SEQ ID NO: 244002 - DNA, 1743 bp, synthetic construct
  misc_feature 1..1743: note = Description of Artificial Sequence: Synthetic coding sequence
  source 1..1743: mol_type = other DNA
atgatggaagcgctcggctttctgaaattagaagtcaatgggccaatggtaactgtggctttgagtgtggctcttctcgctctgctgaaatggtacagcacatccgctttctccaggttagagaagcttggactaaggcaccccaaaccaagccccttcatcggtaatctcacatttttccggcaggggttttgggaatcacaaatggagttgcgcaaactgtacggaccgttgtgcggctattatctgggaaggaggatgtttatcgttatatctgaacctgacatgatcaagcaagtcctggtggagaatttctccaacttcactaaccgtatggccagtggacttgagttcaagtcggttgcagatagtgtattgttcctccgcgataagcggtgggaggaggtgaggggagctctgatgtcagccttctcaccggagaaactcaatgaactgggactcctaataatgcaggaaaggattaaaggccacatggggggacagcaggcccctcagcgcattccaccgacccgcctgagtaaaccaagcggcatctacgtgaatctgcattacgctacactgcccttttgcatggtccccctgatctctcaggcctgcgagctgttgctcgcccaccttaaacgctacgccgagagcggagacgcctttgatatacagaggtgctattgtaattacacaaccgacgtggtggcaagcgtggcattcggaacaccagtagactcatggcaggctccagaggaccccttcgtgaagcactgcaagcggtttttcgagttttgtatcccacgcccaattttggttctgctgttaagtttcccctccattatggtgccactggctagaatcctgccaaataaaaacagagacgaactcaacggtttctttaacaaattaattcgaaatgtgattgctctgagagatcaacaagcagccgaggagagacgaagagatttcctgcagatggtgctggatgccaggcactctgcatcccccatgggggtccaagatttcgatattgtacgagatgttttcagctccaccggctgcaaaccaaacccatctagacagcaccaacctagtcccatggctcgcccactgactgtggacgagattgtgggacaggcctttattttccttattgccggttacgagatcatcaccaacacattgtcattcgcaacctacctgctggccaccaatcctgactgtcaggaaaaactgctgagggaggtggacgtgttcaaggagaagcacatggcccctgagttttgctcgttggaagagggactaccttatctggacatggtcattgcagagaccctgcggatgtatcccccagccttccggttcacacgcgaggccgcacaggactgtgaagtactcggacagcggattccagccggagcagtcctggaaatggctgtgggtgcattacatcatgacccggagcattggcccagccctgagacattcaaccctgagagattcactgctgaggcgagacagcagcatagacccttcacataccttccattcggagctggacctagatcttgtctaggggtcagactgggactgcttgaggtcaagctcactctgctacatgttttgcataagtttaggttccaggcgtgtcctgagacacaggtcccactacagctggaaagcaagtctgctctgggtcccaaaaacggagtctatattaaaattgtctcccgatag

SEQ ID NO: 244003 - DNA, 1605 bp, synthetic construct
  misc_feature 1..1605: note = Description of Artificial Sequence: Synthetic coding sequence
  source 1..1605: mol_type = other DNA
atgatggaagcactcggcttccttaaactcgaggtgaacggacccatggtgaccgtggcactgtccgtggcactgttagctctgttgaagtggtactccacctctgctttctcaaggctcgaaaagttggggttgcgacatcccaaaccatcaccatttatcggcaacctcacattttttcgccaggggttctgggagagtcagatggaactgcgaaaactgtacggtccactgtgcggctactatctcggccgtaggatgttcatcgttatcagcgaacccgatatgatcaagcaagtcctcgtggagaacttctccaacttcaccaataggatggcgagtggcttagaattcaagagcgtagcagatagcgtgctgttcctccgcgataaacgttgggaggaggtcagaggggctcttatgtccgccttctcgcccgaaaagttgaacgaaatggtgcccctcatctcacaggcctgtgaactgctgctcgcccatctgaagaggtacgccgaaagcggcgacgctttcgatatccagaggtgttactgtaattacaccacagatgtcgtggcgtccgtggcctttggaacacctgtcgattcctggcaagcccctgaggatccatttgtgaagcattgcaagagattcttcgagttctgcatacctagacctatcttagtgttgttgttatcctttcccagtatcatggtaccactcgcaagaatccttcccaacaaaaatagagatgagctgaatggtttctttaataagctgatcaggaatgtaattgcactgcgcgaccagcaggccgctgaggaacgaaggcgcgacttcctccagatggttctcgacgccaggcattccgcttctcccatgggtgtacaggacttcgacatcgtgcgagacgttttcagctcgactgggtgtaagcctaacccctccaggcagcaccagccctcacccatggcccgacccttaacggtagatgaaatagtggggcaggcatttatttttctgatcgctggctatgaaattataaccaacacactgtctttcgcaacatatctgctcgccaccaaccccgactgccaggagaaactgttgagggaggtagatgtttttaaggaaaagcacatggccccagaattctgttcactagaggagggcctgccgtatctggacatggtcatcgcggaaaccctccgcatgtaccccccagcattccggttcacccgcgaagcagcccaagattgcgaagttctaggccagagaatccccgcaggagctgtcctggaaatggctgtcggggcattgcaccatgatcctgaacattggccaagtcccgagaccttcaatcccgagcgcttcaccgccgaggcgcgtcagcagcacagaccattcacgtatttgcccttcggcgctggcccacgtagctgcctgggagtaaggctgggtcttctggaagtgaagctgacacttcttcacgttctgcataaattcagattccaggcatgccccgagacacaggtccccctacagttggagtccaaatccgctctggggcctaaaaacggtgtatacattaagatcgtctcccgatag

SEQ ID NO: 244004 - DNA, 453 bp, synthetic construct
  misc_feature 1..453: note = Description of Artificial Sequence: Synthetic coding sequence
  source 1..453: mol_type = other DNA
atggaagctctaggatttctcaagctggaggtaaatggccctatggttaccgtggccctctccgttgctttgttagccctgctgaaatggtactctacatccgccttcagtcggctggaaaagctgggtctcaggcaccctaagccctcaccattcattggcaacttaacctttttccgccaaggcttctgggaatcccagatggagctgcggaagctttatgggcctctttgcggatattatcttggtagacgcatgtttattgtgatctcagaaccagatatgatcaagcaggtgctggttgagaattttagcaactttacgaatagaatggcaagtgggctggaattcaagtccgtggctgacagcgttctgtttttgcgagacaaacgttgggaagaggttcgtggcgcattgatgtcagcttttagccccgagaagcttaacgaatag

SEQ ID NO: 244005 - DNA, 1602 bp, synthetic construct
  misc_feature 1..1602: note = Description of Artificial Sequence: Synthetic coding sequence
  source 1..1602: mol_type = other DNA
atggaagctctgggtttcttaaaactcgaggtgaatgggccaatggtgactgtcgctctgagtgttgctctgctggccttactgaaatggtactcgacaagcgcattttcccgtcttgaaaagttaggcctcaggcaccccaaaccctccccattcatcggcaacctaaccttcttccgccagggcttctgggagagtcaaatggaattgaggaagctttacgggccattatgtggctactaccttggcagaagaatgttcattgtgatttccgaaccggatatgatcaagcaggtactggtggaaaacttcagcaattttaccaatcggatggctagcggcttggaatttaagtctgtcgccgattcagtgctctttttacgtgataagaggtgggaggaagtgcggggagccttgatgtctgcctttagccccgagaaattaaacgagatggtacccctgatctcccaagcctgtgagcttctgctagcccacctgaagagatacgccgagagcggcgacgctttcgatattcaacgatgttactgcaactacacaacagacgttgtggcctccgttgcttttggtacgccagtggatagctggcaggccccagaagatcccttcgtcaaacactgcaaaagattttttgagttctgcatcccacggccaattctggttctgctcctgagttttccatccattatggtaccccttgccagaatcctgccaaacaaaaatcgggatgagctcaatggattttttaacaaactcatccggaacgtgatcgccctgcgggaccagcaggccgcagaggagcggagacgagacttcctccagatggtgttggacgcgcgacattccgcaagtcctatgggagtgcaggacttcgacattgtgagggatgtattcagttccacagggtgtaagcccaacccatcgcgacagcatcagccatccccgatggcccgtccgctgactgtggacgagattgtgggacaggcttttatctttctcattgccggatatgagataataaccaataccctgtctttcgccacatacttgcttgctaccaatcctgattgccaagaaaagcttttgagagaggtcgatgtctttaaagagaagcacatggcacccgagttctgttcactggaggaaggtcttccatatctcgatatggtgattgcagagaccctccggatgtatccacccgcattcagattcacccgagaagccgcacaggactgtgaggttctcggccaaaggattccagctggtgcggtgttggaaatggctgtgggagcactgcatcacgatcctgagcattggccctcccccgagaccttcaatccggaaagattcacagctgaggccagacaacagcaccgtccttttacctatttgccttttggtgccggacccaggagctgtcttggggttaggctgggcctgctggaggtgaagctcacgctgctgcacgtgttgcataagtttaggttccaggcctgcccagagacacaggtgccgctgcaactggagtctaagagcgcgttgggaccaaagaatggagtctacataaagattgttagccgttag

SEQ ID NO: 244006 - DNA, 459 bp, synthetic construct
  misc_feature 1..459: note = Description of Artificial Sequence: Synthetic coding sequence
  source 1..459: mol_type = other DNA
atgatggaggctttggggtttttgaaactggaagtgaacgggcctatggtaaccgtggcactgtccgttgctctactggcactgctcaagtggtacagcacaagcgccttcagtagacttgagaaactcggtttgaggcaccctaaaccaagcccgtttatcggtaacctgaccttcttccgacaggggttttgggagtctcagatggagctgaggaagttgtatggaccactgtgcgggtattacttgggcaggagaatgttcattgtcatatccgaacctgacatgattaagcaggttctggtggagaacttttcaaactttacaaataggatgccacaaagcataatgccaaatagtcggcaccacgtggcctctcgcggtatgtggccgggtggacggcgtttagcatgctacttgcacccttttcgaatggccgaaggcattgctgaggtttag

SEQ ID NO: 244007 - DNA, 1401 bp, synthetic construct
  misc_feature 1..1401: note = Description of Artificial Sequence: Synthetic coding sequence
  source 1..1401: mol_type = other DNA
atggaactcagaaagttatatgggcctctgtgcgggtactacttgggcagacggatgttcatcgtgatttcagagcctgatatgattaaacaagtcctagtggagaatttttcgaattttacgaaccgtatggccagcggcttggagttcaagtcagtcgcagatagtgtgctgtttcttcgagataagcgctgggaggaggtgcgcggtgcccttatgagcgcatttagcccggaaaagttgaatgaaatggttcctctgatatcccaggcgtgcgagctcctgctggctcatctcaaacgctacgccgaatcaggggatgcattcgatatacagcggtgctattgtaattacacaaccgacgtcgtagcgtctgtagcttttggcacaccggtggatagctggcaggctcccgaggacccttttgtgaaacactgcaaacggttcttcgagttctgtatccctcgcccaattctagttttactgcttagcttcccatccatcatggtgccgcttgctaggatccttcctaacaagaatagagacgagctgaatggctttttcaacaaacttattaggaacgtgatcgctctgcgagaccaacaggccgcagaggaacgaagaagagactttttgcagatggttctcgatgcccgtcattctgcctctccgatgggggtccaggatttcgatatagtgagagatgtcttctcctccaccggttgtaaaccaaacccatctcggcagcaccagccgtcgcctatggccagaccgttaactgtcgacgaaatcgttggccaggcattcatttttctaatcgccggatatgagattattacaaacacattgagttttgcaacctacctgctggctacgaacccagattgtcaggagaagctcctccgcgaagtcgacgtctttaaagaaaaacatatggctcccgaattctgcagcctggaggaaggacttccctatctggacatggtcatcgcagagacattacggatgtatccaccagctttcagattcacaagggaggccgcacaggattgtgaggtgctagggcaacggatcccagctggcgctgtgcttgagatggctgtgggagcgcttcaccatgatcctgagcactggcccagccccgagacttttaaccctgaaagattcaccgcagaggccagacagcagcaccggccattcacttatttgccatttggagccggacccagatcgtgtctgggagtccgccttggcctgctggaggttaagttgaccctcctgcatgtgctgcacaaatttagatttcaagcatgcccggaaacccaagtccctctccaactagagtcaaaaagcgccctgggccctaaaaatggcgtctacatcaaaatcgtcagtaggtag

SEQ ID NO: 244008 - DNA, 1032 bp, synthetic construct
  misc_feature 1..1032: note = Description of Artificial Sequence: Synthetic coding sequence
  source 1..1032: mol_type = other DNA
atgtggccgaatggcagtagcctgggcccatgcttccggccaacgaacatcacactcgaagaaagacggctgatcgcttctccatggtttgccgcatccttctgcgtggtgggcttggcttcaaacttgttggccctgtcggtgctggccggtgctagacagggcggtagtcacacaagatcgtctttcctgacatttctctgcggcctcgtcctaactgactttctgggcctcctcgttaccgggacgatagtggtgtcacagcatgctgctctgtttgagtggcatgctgttgaccccggatgtcggctgtgcagatttatgggtgtggtaatgatattcttcggcctctctcctcttctgttgggtgctgccatggcctcagagaggtacctgggaataacccgcccttttagcagaccagccgtagcctcacagcgcagagcttgggcaaccgtaggactagtttgggccgcagcactggccctgggcttacttcccctcctgggggtgggcagatataccgtgcagtatcccggatcttggtgtttcctgaccctgggcgctgagagtggtgatgttgctttcggccttctcttttcaatgctgggcggtctatctgtggggctatctttcctgctgaatactgtctctgtggccaccctttgtcatgtctatcatggccaggaggccgctcagcagcggccacgagactctgaggtggagatgatggcacaactcctgggtatcatggtggtggcttccgtgtgttggttaccactgttagtgtttattgcacagactgtcctacgtaatccccctgctatgagccctgccggacagctgtcacgaacaacagaaaaagagctcttgatctacctgagagtcgcaacctggaatcaaatactggatccctgggtgtatatcctctttcgcagagccgtgctgcgaaggttgcagcccaggctgtccacacggcctcgtagcctcagtttacagcctcagcttactcaacgcagcggacttcagtag

SEQ ID NO: 244009 - DNA, 1224 bp, synthetic construct
  misc_feature 1..1224: note = Description of Artificial Sequence: Synthetic coding sequence
  source 1..1224: mol_type = other DNA
atgtggcctaatggcagtagccttggcccatgctttaggcccacgaacatcacattggaagagcgcagattgatcgcgtcaccgtggttcgctgcaagcttctgtgtggtcggacttgccagcaacctcctcgctctgagcgttctggctggcgcacgccaagggggttcccacacccgaagctccttccttacattcctatgcggactcgttttaactgattttctgggcctgctggttacgggtactatcgtggtcagtcaacacgccgctctcttcgaatggcatgccgtggaccctggttgccggctttgtagatttatgggcgtcgtgatgatctttttcggtctatctccacttttactcggagcggctatggcatctgaaagatatctgggtataacacgtccattctcccgccctgccgttgcatcacaacggcgtgcttgggctacggtaggactggtgtgggccgcagctttggctcttgggctgctgccgctccttggcgtggggcgatacactgtccagtaccctggatcctggtgttttctcacgctgggggctgaatctggggatgtggccttcggtctgctctttagcatgcttggcggtctttctgtaggactcagtttcctattgaacaccgtttcagtcgctaccctctgtcatgtatatcatggccaagaggcagcacagcaacggcctagggattcagaagttgagatgatggcccaactgctgggcattatggtcgtggcctccgtttgctggctccctcttttagtgttcattgcccagacagtgctcaggaaccctccagccatgagcccggctgggcagctgagtaggactacggaaaaagaacttctgatttacctgcgcgtggccacctggaaccagattctggacccttgggtgtacatcctgtttagacgggctgtcctgcgcaggctgcaacctagactctcaactcgtcccaggcgatctttgactctgtggccgtctctggaatattctgggactatcagcgctcactgcaatttacgcctgcctggaagttctgactccagagcgagtgcttcccgtgctgccggtattaccggcgtttcacattgcgccaggccctgcatgctcttcgatcccgagttcgacttgttggccggagtccagcttttgccattcgaacccccaacagggaaggcactctccaggaaggactag

SEQ ID NO: 244010 - DNA, 1422 bp, synthetic construct
  misc_feature 1..1422: note = Description of Artificial Sequence: Synthetic coding sequence
  source 1..1422: mol_type = other DNA
atgagggaggtgagggcgcgtttagctgcaacccaggtggaatacatctctgggaaagtcttcttcaccacttgctcagacctgaacatgctgaaaaagcttaaaagcgcagagagactatttctactgattaaaaagcagttccccttaatcatctccagcgtcagcaaaggaaagatcttcaacgagatgcaacgcctgatcaatgaggaccccggaagctggttaaacgccatttcgatctggaagaatctgttggaactagacgctaaaaaagagaaactcagccaacgtgacgacaatcaattaaaaaggaaagtgggagagaacgagataatcgctaagaagctcaaaatcgagcagatgcagaagattgaggagaatagagactgtcagttagagaagcagatcaaagaagaaactctggaacagagagattttacaactaagagtgaaaagtttcaggaggaggagttccaaaacgacatcgagaaggcaattgatacacacaaccagaatgacctcacttttagagtgagttgcaggtgctctggaactattggaaaagccttcacagcgcaggaagttgggaaagtgatcggtattgcgataatgaagcattttggatggaaggcagatctccgaaacccacagttggaaatatttatccacctgaacgacatctattctgtggtcgggatcccagtcttcagagtgagcctggcctcccgggcatacattaaaactgctggactgcgatcgaccatcgcttgggccatggcatcactggcggatatcaaagcaggcgcatttgttttggatcctatgtgcggcctgggcacgattttgcttgaggccgctaaggagtggcccgatgtgtattatgtgggtgctgacgtgtcagatagccaactgctgggcacatgggacaatctgaaagccgcagggctggaagataaaatcgaactccttaaaattagcgtcatcgaactgccactgcccagcgaatcggtggacatcattattagtgatatcccattcggtaagaaattcaaacttggcaaggacatcaagagcattctccaagaaatggagcgggtgctccacgtgggcggaaccatagtcctcctactctctgaagaccatcacaggaggttgaccgattgtaaggagtcaaatatccccttcaatagcaaagattctcacaccgacgaacctgggattaaaaaatgcttaaaccctgaagagaagactggggcttttaagaccgcttctacctcatttgaggcctctaaccacaagttcctggaccgaatgagccctttcgggtctttggtcccagtggagtgttacaaggtctctcttggcaagacggacgcatttatctgtaagtataagaaatcacactcatccggcctgtag

SEQ ID NO: 244011 - DNA, 873 bp, synthetic construct
  misc_feature 1..873: note = Description of Artificial Sequence: Synthetic coding sequence
  source 1..873: mol_type = other DNA
atgagagaggttcgcgcacggttagccgcaacgcaggtggagtacatttcaggcaaagtgttctttacaacctgtagcgacctgaatatgcttaaaaaactaaagtccgctgagcggctctttctcctgattaaaaaacagttccctctcataatttcttctgtctccaagggaaagatttttaatgagatgcagcgactgatcaacgaagaccccggttcgtggttaaatgccatctctatttggaaaaacctgctggagcttgatgcgaaaaaggagaagctcagccagagggatgataaccagctaaagagaaaagttggagaaaatgagataatcgcaaagaagctcaaaatcgagcagatgcaaaagatagaagagaatcgcgactgccagttggaaaaacagatcaaagaagagaccctggaacagagggatttcacaacaaaaagcgagaaattccaagaggaagaatttcagaacgatatcgaaaaagccatagatacgcacaaccagaatgacctcacgtttagagtgtcatgcaggtgctccggcaccatcggaaaggctttcactgctcaggtgctttacatggggctgtcccccggacccagattgcagatgcatatgcggagccaacagtgtcgcgaggaacgaactccacagaccgtcgccattacccgcccacaccagctggcacttactaagttctcagatgttaagggccattggtccgagtattttattaacttaaaaatttcccagactctcaagggcggacgcaagtccaattggaattgttactatgagacactctggatggagtctcgcctggaggagtcgacgatacgagatctctacacctccaagtag

SEQ ID NO: 244012 - DNA, 1512 bp, synthetic construct
  misc_feature 1..1512: note = Description of Artificial Sequence: Synthetic coding sequence
  source 1..1512: mol_type = other DNA
atgtcagaggctaggggtgaacctgggtctgggccagaagcaggcgcaagattcttttgcactgctgggagaggattagagccttttgtgatgagagaggtgcgagctcggctcgccgctacccaagtcgaatatataagcggtaaagtgttcttcaccacttgtagtgacctgaatatgctgaaaaaattgaagtctgcggagaggctgttccttctgataaaaaaacagtttcctctgattatcagctccgtgagcaaggggaagatatttaacgagatgcagaggctgattaacgaagacccaggtagctggcttaacgcaataagcatctggaaaaatctgctggagctggatgcaaagaaggagaagctgagccaaagagacgataaccagctgaagcgcaaggtgggcgagaatgagataattgctaaaaagcttaagatagagcagatgcagaaaatagaggagaacagggactgtcagcttgagaaacaaattaaggaagagacactcgagcagcgcgactttactacaaaaagtgagaagttccaggaggaagaattccagaatgatatagaaaaagcaatcgatacacacaatcagaatgatttgaccttccgcgtctcttgtagatgctccggcaccatcgggaaggcatttactgctcaggaggtcggcaaggtgattggcatcgctataatgaaacatttcgggtggaaggccgatctccgcaaccctcagctcgagatctttatccacctaaatgacatctattcagttgtaggaataccagtgtttagagtgtccctggcatctagggcttatatcaagacagcgggattgaggtctaccatagcctgggcaatggcatcactggctgacataaaagcgggtgcatttgtgttagaccctatgtgtggtcttggcactatattgctggaggccgcaaaggaatggcctgatgtgtactatgtgggagcagatgtctctgactcacagctactgggcacctgggacaaccttaaggctgctggactggaagacaaaattgagttgctcaaaatcagcgtcatcgagctccccctcccttctgagtccgtggatatcattatcagtgacatccccttcggaaaaaaatttaaattggggaaggacatcaaaagcatcttgcaggagatggaacgagtgcttcacgtcgggggtaccatcgtgctcctgctgtctgaagaccaccatcggagactcactgactgcaaggaatccaatatcccctttaacagcaaagattctcacaccgacgagccaggaattaaaaaatgcctgaatccggaagaaaaaaccggagcctttaagactgcctcaaccagcttcgaggcctccaaccataaatttctggaccgaatgagtccgttcggaagtctagtccctgtagaatgttataaagtgagcctgggcaagacagacgctttcatctgtaagtacaagaagtcccactctagcgggctgtag

SEQ ID NO: 244013 - DNA, 486 bp, synthetic construct
  misc_feature 1..486: note = Description of Artificial Sequence: Synthetic coding sequence
  source 1..486: mol_type = other DNA
atgaatctggccatttccatcgctctgctgctcacagtgctacaagtatcccgaggacagaaggtgacctcgttgacagcttgtctggtggaccaatctttaaggctcgattgcaggcacgaaaataccagttctagtccaatccaatatgaattcagtctgacacgtgagactaaaaaacatgtcttgttcgggacggtgggcgtgccggagcatacatatcggtcacgaaccaacttcacgtcaaaatacaatatgaaggtgctgtacttgtctgcatttaccagcaaggacgagggcacttatacttgcgccctacaccattccggccatagtccccctatcagcagccagaatgtaacagtgttacgtgataaactcgttaaatgcgagggcatctcgttactggcgcagaacacatcttggttgctgctgctgctattgtctttatctctcctgcaggccactgactttatgagtctctag

SEQ ID NO: 244014 - DNA, 486 bp, synthetic construct
  misc_feature 1..486: note = Description of Artificial Sequence: Synthetic coding sequence
  source 1..486: mol_type = other DNA
atgaacctagccatctcaattgctctgctgctcaccgtgctgcaggtgagcaggggacaaaaggttactagcttaaccgcctgtctcgtcgatcagtctctcagactggactgcagacacgagaacacatcatcttcccctatacagtatgagttcagtctaacgcgggaaactaagaagcacgttctctttggcacggtgggggtgcccgaacacacctatcgtagccggaccaattttacatctaaatacaacatgaaggtgctgtatctctcagcttttactagcaaggacgaggggacttacacctgtgccttgcaccactccggccactcaccccctatttccagccaaaatgtgaccgtgctgcgagataagctagttaaatgcgaaggcatctccctactggctcaaaatacctcatggttgctgcttctgctgttatctctgtccttgctccaagccacagacttcatgtcactctag

SEQ ID NO: 244015 - DNA, 480 bp, synthetic construct
  misc_feature 1..480: note = Description of Artificial Sequence: Synthetic coding sequence
  source 1..480: mol_type = other DNA
atgttcccttttgctcttctttacgtgctgtccgtctcttttagaaagatcttcatcttgcaacttgtgggactggtgctgacttacgactttaccaattgtgattttgagaagattaaagctgcctacttatcgacaattagtaaagatcttattacgtacatgtccggcaccaaatccacagagttcaataatacagtatcatgtagcaacaggcctcactgtcttacagagatccagagtctcaccttcaaccctaccgcagggtgcgcgagcttagccaaagagatgttcgcgatgaagacgaaggctgcactggccatctggtgccccggatacagcgagactcagatcaacgccactcaggctatgaaaaagcggagaaaacgcaaggtgactaccaataaatgcctggaacaggtctcccagttgcagggcctctggcgaaggttcaaccgaccgctcctcaaacagcagtag

SEQ ID NO: 244016 - DNA, 192 bp, synthetic construct
  misc_feature 1..192: note = Description of Artificial Sequence: Synthetic coding sequence
  source 1..192: mol_type = other DNA
atgttcgctatgaagacaaaagccgctctagctatttggtgtcccggttactccgagacccagatcaatgctacgcaagccatgaaaaagagaagaaagaggaaagtcacgactaacaaatgcctggaacaagtgagccagctgcagggcctctggcgtaggttcaaccggccactgctgaagcagcagtag

SEQ ID NO: 244017 - DNA, 705 bp, synthetic construct
  misc_feature 1..705: note = Description of Artificial Sequence: Synthetic coding sequence
  source 1..705: mol_type = other DNA
atgtcttgcattaacctccccactgtgctaccgggttctcctagtaagactaggggccagatccaggtcattctggggccaatgttctcagggaaaagcaccgaactcatgcgaagagtgcgcagatttcagattgctcaatataaatgcctggtaattaaatacgccaaagacacacggtattcttcttctttctgcactcatgaccgtaatacaatggaagctctgccagcttgcttacttagggatgtagctcaggaagcactgggagttgctgtgatcggtattgacgaaggccagttctttcctgacattgtggaattttgcgaagctatggccaatgccggtaagaccgtgatcgtggctgcgctagacggtaccttccaaagaaagccctttggagctattttaaatctggtccccctggctgaatccgtggtgaaactgactgctgtatgcatggaatgcttcagggaagccgcttacaccaagcgcctgggcacagagaaagaggtggaagttattgggggagctgataagtaccatagtgtttgtagattatgctatttcaagaaggccagcggccaaccagctggcccagacaataaggagaattgccccgttcccggtaagcctggagaggctgtggccgcaagaaaactgttcgcgccacagcagatcctgcagtgcagtcccgcaaactag

SEQ ID NO: 244018 - DNA, 705 bp, synthetic construct
  misc_feature 1..705: note = Description of Artificial Sequence: Synthetic coding sequence
  source 1..705: mol_type = other DNA
atgtcgtgcataaatctgcccacagttcttcctggatcgccctcaaaaacacggggacagatccaagtcatcttggggcctatgttcagcggtaagagcaccgagctaatgaggcgggtgcgcaggttccagattgcccagtataagtgtctggttatcaagtacgctaaggacacccgctacagctcctctttctgtacacacgatcgcaacactatggaagcgttgccagcgtgtctgttgcgggacgtggcccaggaggccctgggtgtggcagtgattgggattgacgaagggcagttttttcctgatattgttgagttctgcgaagccatggcaaatgccggaaagaccgtcattgtggccgctttggacggaacctttcaaaggaagcccttcggggctatccttaacctggtgccgctggcagagagcgtggtcaagctaacagcagtctgtatggagtgtttccgcgaggcagcgtatactaagcggttaggcaccgaaaaggaagttgaggtgataggaggcgctgataagtatcactctgtctgtaggctgtgttactttaagaaggcatcagggcagcccgcaggtcccgacaataaggagaactgtcctgtccccggtaaaccaggagaagctgtagcagcccgaaaattgttcgcccctcagcagatactccagtgcagccccgctaattag

SEQ ID NO: 244019 - DNA, 924 bp, synthetic construct
  misc_feature 1..924: note = Description of Artificial Sequence: Synthetic coding sequence
  source 1..924: mol_type = other DNA
atgagacctggcctgtttaaaggccaagccccaggatcacggaggcgccctacagctggactcgctgtggtccgcgctgacagccataaaaaagaacccagggcatcaggctcggcccgaccggctatgctgctctggcctctgcggggatgggccgcacgggctctccgatgttttgggcctggctctagaggttcacctgcaagcggacctggccctcgaagagttcaacggcgtgcctggccaccagacaaggaacaggagaaggaaaagaagtctgtgatatgtgtggagggcaacatagcttctggcaaaaccacttgtctggagtttttctctaacgccactgacgtggaagttcttactgaacccgtaagcaaatggagaaatgtgcggggtcataatccactggggttaatgtaccacgacgcttcccgttgggggctcaccctgcaaacttatgtccagctgaccatgctcgacaggcatactaggccccaggtgagcagtgtgcggctgatggaacgaagcatccattcagcccgttatatattcgtcgagaatctgtatcggtccgggaaaatgccagaagtggactatgtcgtgctaagcgaatggttcgactggatcctgcgtaatatggatgtatccgtggacctgatcgtgtaccttcggaccaatccagagacgtgctaccagaggttaaagaagaggtgcagggaagaagagaaagtgatccctttggaatatctcgaggccatccatcatctccacgaagagtggcttatcaaggggtcactattccccatggccgcacccgtgctcgtaatagaggctgaccaccacatggaaagaatgcttgagcttttcgagcagaatagagaccggatactaacccctgagaacaggaaacactgtccatag

SEQ ID NO: 244020 - DNA, 744 bp, synthetic construct
  misc_feature 1..744: note = Description of Artificial Sequence: Synthetic coding sequence
  source 1..744: mol_type = other DNA
atgttgctgtggcccctacggggttgggcagcacgggcacttcgctgctttggacccggttccaggggcagccccgcttcggggccaggccctagacgagtccaacgacgtgcatggccccctgataaagagcaggaaaaagagaaaaagagtgtgatttgtgtagagggaaacattgccagtggtaagacgacctgcctggagttctttagcaacgctacagatgtggaaggactaatgtaccacgacgctagtaggtggggactaacccttcagacgtatgtgcagctgacaatgctagataggcacacgcggccacaggtgtctagtgtgaggctgatggagcggtccatccacagcgcaaggtacatattcgtcgaaaatctgtaccggagtggtaaaatgcctgaggttgactatgtagttcttagcgagtggttcgactggatcctgcgtaacatggacgtgtctgttgatctgatagtttatttgcgaacaaaccctgaaacatgctaccaaaggctaaaaaagcgctgcagggaagaggagaaggtaatccctcttgaatacctcgaggccattcatcacctacacgaggagtggctcatcaaaggctcactttttccgatggctgccccagtgctggtcattgaggctgaccaccacatggagagaatgctggagctgttcgaacaaaatagagacaggattctaacccctgaaaataggaaacattgcccctag

SEQ ID NO: 244021 - DNA, 798 bp, synthetic construct
  misc_feature 1..798: note = Description of Artificial Sequence: Synthetic coding sequence
  source 1..798: mol_type = other DNA
atgttactgtggcccttgaggggttgggccgctcgggctctgcggtgcttcggaccaggctcccggggaagcccagcctccggacccggtccacgcagagtgcagagaagagcatggccaccagacaaggaacaggagaaggaaaagaaatcagtcatttgtgtggaaggaaacattgcatccggaaagaccacatgcctggagttcttcagcaacgctacagatgtggaggtgctcaccgagccagtgtccaagtggagaaatgttcggggacataacccactgggactaatgtaccacgacgcttcccggtggggattgactctgcagacatatgtgcagctgactatgctggaccgtcatacccgaccccaggtgtcatctgtgagattaatggagaggtcaatccattccgcccgttacatctttgtggaaaatctttaccgcagcgggaaaatgcccgaggtggactacgtggtattgtcagagtggtttgactggatcctcagaaacatggatgtttccgtagatctcattgtgtacttgcgtacaaatcccgaaacatgttaccagcgactcaagaaacgatgcagagaggaggagaaagtcattcctctcgaatacctggaggctattcaccacttacatgaagaatggctgataaagggaagtctatttcctatggcagctcctgtgctggtgatcgaggccgatcaccacatggaacggatgctcgaactgtttgaacagaatagggatcggatcctcactcctgagaaccgcaagcactgtccatag

SEQ ID NO: 244022 - DNA, 507 bp, synthetic construct
  misc_feature 1..507: note = Description of Artificial Sequence: Synthetic coding sequence
  source 1..507: mol_type = other DNA
atgtatcacgacgcatccagatgggggctgacactgcaaacatacgttcagctgacgatgctcgacagacatacccggcctcaagtttccagtgtcaggctcatggagcgcagcattcacagtgcccgatatattttcgtcgagaatctatatagaagtggcaagatgcccgaggtggattacgtagtgctctcagaatggtttgactggatcctccggaacatggatgtttccgtggatctcatcgtgtacctgagaactaacccagaaacttgctaccaacgtctgaaaaagcggtgccgggaagaggagaaggtgattcctctggagtatctggaggccatccaccacttgcatgaggaatggttgattaaaggcagtctgtttcccatggccgcacccgtcctggttatagaggccgatcaccacatggaacgaatgttagagctgtttgagcagaaccgcgaccgcattctcactccggaaaacaggaagcactgcccatag

SEQ ID NO: 244023 - DNA, 705 bp, synthetic construct
  misc_feature 1..705: note = Description of Artificial Sequence: Synthetic coding sequence
  source 1..705: mol_type = other DNA
atgggcgcattttgtcaacgcccttcgtccgacaaggagcaggagaaagagaagaagtcagtgatatgtgtagagggcaacatcgcatcagggaagacaacttgtctcgaatttttttcaaatgccacggacgtggaggtcctcactgaaccagtttcaaaatggcggaatgtgcgcggtcataaccctctaggcctgatgtatcatgatgctagcaggtgggggctcaccctacagacctacgtgcaactgactatgctcgaccggcatacccgcccacaggttagcagcgtgcgtctgatggagagatccatccactcagctcgatatatcttcgtcgaaaatctgtatcgaagcggaaagatgcccgaggtagactacgtcgtgctgagcgaatggttcgactggattctccgcaacatggacgtcagcgtggatctgatcgtctacttgaggacaaaccccgaaacctgctaccagagacttaagaaacgatgtagagaagaggagaaggtcattcctcttgagtacttggaggcaattcatcatctgcacgaggaatggctgataaaagggagcctattcccgatggctgcaccggttctcgtgatcgaggccgatcatcatatggaacgaatgctggagttgttcgagcagaatcgggataggattcttacaccagaaaaccgcaaacactgtccctag

SEQ ID NO: 244024 - DNA, 507 bp, synthetic construct
  misc_feature 1..507: note = Description of Artificial Sequence: Synthetic coding sequence
  source 1..507: mol_type = other DNA
atgtaccacgatgcctcacggtggggcctgaccctccagacttatgtgcagctcacgatgttggatagacacacaaggcctcaggtgagttccgtcagactgatggaaaggagtatacatagtgctaggtacattttcgtggagaacttatatcggtctggtaaaatgccagaggtggattacgtggtgctcagcgagtggttcgattggatcttgagaaacatggacgtgtccgtggatcttattgtgtacctgcgcacgaatcccgaaacatgctaccagagactgaagaaacgttgccgcgaggaggagaaagtcatccctctcgaataccttgaagccatccaccacttgcacgaagaatggttaataaaaggcagcttgttccccatggcagcacctgtgctcgtcatcgaagcggaccatcatatggaaagaatgctggagctgttcgaacagaatagggatcgaattctgaccccggagaatcggaaacactgcccatag

SEQ ID NO: 244025 - DNA, 651 bp, synthetic construct
  misc_feature 1..651: note = Description of Artificial Sequence: Synthetic coding sequence
  source 1..651: mol_type = other DNA
atgacgtctatctgtgtagagggcaatatagccagcggtaaaaccacatgtctggagttcttctctaatgctaccgatgtggaagtactgactgagcccgtaagcaagtggcggaacgtcagaggccacaacccactgggccttatgtatcacgatgcaagccgctggggcctaacattgcagacctacgtccagttaacaatgctcgatcgtcacaccagaccacaggtgtcctcagtgcgactcatggaacgctcaattcatagtgcccgttacattttcgtcgagaacttgtaccgatccggcaagatgcccgaggtggactacgttgttctgagcgaatggttcgattggattctgcgcaacatggacgtgagcgtggacctgatcgtttaccttcggacaaatccagaaacctgctatcagagactgaagaaaagatgcagggaagaagaaaaggtcatcccactggaataccttgaagccattcatcacctgcatgaggagtggctgattaagggctctttgtttcctatggctgctccagtactggtgattgaagccgatcaccatatggagcggatgctggaacttttcgagcagaacagagatcgcatcctgaccccagagaatagaaagcattgcccatag

SEQ ID NO: 244026 - DNA, 723 bp, synthetic construct
  misc_feature 1..723: note = Description of Artificial Sequence: Synthetic coding sequence
  source 1..723: mol_type = other DNA
atgctcctgtggcccctgcggggttgggctgccagagccctgcgctgctttggcccaggatcccgtgggtctccagcaagtgggccagggcctcgcagggtgcagagacgagcttggccaccagataaggaacaagaaaaagaaaaaaagtctgtggttttgaccgagcccgtgagcaaatggcgaaatgtcagaggacataaccctctggggctcatgtaccacgacgcttctcgctggggtctcacactccagacttatgttcagttgacaatgcttgatcgacacaccagacctcaggtgagttccgtccggctgatggaacgttccattcattctgccaggtacatcttcgtggagaacttatatcgctcagggaagatgcccgaggttgattatgtcgttctgagtgaatggttcgattggatcctgcgaaacatggatgtttctgtggatctcatcgtgtaccttaggacaaatcctgaaacatgctaccagagactcaagaaaaggtgtagggaagaagaaaaagtgattcctctggagtacctagaggctatccaccatttgcacgaggagtggctaatcaaggggtctctgttccccatggccgcacccgtcttggtgatcgaggctgaccaccatatggaaagaatgctggaattgtttgagcagaacagggaccgaatcctgaccccagaaaacagaaaacactgcccatag

SEQ ID NO: 244027 - DNA, 840 bp, synthetic construct
  misc_feature 1..840: note = Description of Artificial Sequence: Synthetic coding sequence
  source 1..840: mol_type = other DNA
atgcccgtagcaggttccgagctgcctcggaggccactgccccctgctgcccaggagagggacgccgagccgagaccacctcacggtgaactgcaatacctgggccagatacagcacatcctgcgctgtggggtgcgcaaggacgatagaacgggtaccgggactctgtcggtctttggaatgcaggccagatattccctgcgtgatgagtttccgttattgaccacgaagcgtgtcttctggaagggggtccttgaagaactactatggttcatcaaaggctcaaccaacgccaaagaactttcgagcaagggagtgaaaatctgggatgcaaacggctcccgggactttttggattctctgggcttttctacccgggaggagggagatttaggccctgtgtatgggttccagtggcgacactttggggcagagtaccgagacatggagtctgacctccccctcatggcactacccccttgccacgcgctgtgccagttctatgtggtcaatagcgagctgagttgccagctgtatcagcgcagtggagacatgggactcggagtgcctttcaatatcgcaagttacgccctgctgacatacatgatcgctcatattaccggcttgaaacctggggacttcatacacactctgggtgatgcccacatatacctcaatcacatcgagccgctcaagatccagttacagcgcgagcctaggccattccctaagctgcgaatcttacggaaagtcgaaaaaatcgacgacttcaaggctgaagacttccaaatcgaggggtacaacccgcatcccacgattaaaatggagatggccgtgtag

SEQ ID NO: 244028 - DNA, 693 bp, synthetic construct
  misc_feature 1..693: note = Description of Artificial Sequence: Synthetic coding sequence
  source 1..693: mol_type = other DNA
atgcccgtcgcgggttccgaactgcccaggcgcccactgcccccagccgctcaggagcgggatgcggaacctcgccctccgcatggcgaactgcaatacctcggccaaattcagcatattctccgatgcggcgtgcgaaaggacgataggaccggcactggaacacttagcgtgttcggtatgcaagcacgctattctctcagagactattccggccagggcgtcgaccagctccagcgggtgatcgatacaatcaaaacgaacccagatgaccgccgaattatcatgtgtgcctggaacccccgtgacctgcctctgatggctctgcctccctgtcatgcactgtgtcagttttacgtggtcaatagcgagctgagttgccagttatatcagaggtcgggtgatatggggctcggcgtcccattcaatattgccagttacgcgcttctgacctacatgatcgcccatattactgggctgaagcccggagattttatccacacactgggtgacgcacacatttacctcaatcatattgaaccactcaaaattcagcttcagcgggaacctagaccctttcccaagctgcgcattctgaggaaggtggaaaaaattgatgacttcaaagcagaagatttccagattgaaggttacaacccccacccaaccataaaaatggagatggccgtatag

SEQ ID NO: 244029 - DNA, 942 bp, synthetic construct
  misc_feature 1..942: note = Description of Artificial Sequence: Synthetic coding sequence
  source 1..942: mol_type = other DNA
atgcctgtggcaggttccgagctccctcggaggcctttgccgcctgctgcccaagagcgcgacgcagagcctcgccctccacacggggaattgcagtacctgggccaaatccagcacatattgagatgcggggttagaaaggacgacagaactggcaccgggaccctgtctgtctttggaatgcaggctcggtattcgctacgagacgagtttcctttgctgaccactaagcgagtgttttggaagggcgtcttggaggagttgctctggttcatcaaaggcagcactaacgctaaagaactgagtagtaaaggtgtcaaaatctgggacgcaaacgggtcacgagactttctagactcactgggtttttccacccgcgaagagggagatctgggaccggtatacgggtttcagtggaggcatttcggagctgagtatcgggacatggaatctgactactcagggcagggcgttgatcagttacagcgggtgatcgacactattaagacgaatccagacgataggaggatcatcatgtgcgcgtggaatcctagggatttgccattgatggcattaccaccttgtcatgccctgtgtcagttttacgtggtgaacagtgagctctcgtgtcaattgtatcaacggtctggcgatatgggcctgggggtgcctttcaacatagcctcctatgcgctgctaacatacatgatcgcgcacatcacaggtctgaaacccggagattttatccatacattgggcgatgctcacatttatctgaatcatattgaacccttaaagattcagctccagcgagaacctcgacccttccccaagttgagaatcctacgcaaggtggaaaagattgacgattttaaagctgaggatttccagattgagggatataacccccatccaactattaagatggaaatggccgtgtag

SEQ ID NO: 244030 - DNA, 678 bp, synthetic construct
  misc_feature 1..678: note = Description of Artificial Sequence: Synthetic coding sequence
  source 1..678: mol_type = other DNA
atgtccagaccccgaaagaggctagccggaaccagcggctcagacaaaggtctgagtggcaagcgcaccaaaacagaaaattctggagaggctctggccaaggtggaggattctaacccacaaaagacctccgctacaaagaattgtctgaaaaatctcagcagccattggctcatgaagtctgaacccgagtccagactggagaaaggggtggacgtgaaattttccatcgaggatctgaaggcacagcccaaacagaccacgtgctgggacggcgtccgcaactaccaggcaaggaattttctaagggccatgaaacttggcgaggaagctttcttctaccacagcaattgcaaggaacctgggatcgcaggtttaatgaaaatagtgaaagaagcctatcctgatcacacacagtttgagaagaacaatcctcactacgaccctagcagcaaggaagataatccaaagtggtccatggtcgatgtccagtttgttagaatgatgaaaaggttcattcctctagctgagctgaaatcataccaccaggcacacaaggctacaggcggtcccttaaaaaatatggtgctgttcactcggcagaggctgtccattcagccactaacccaggaggaattcgattttgtgctatccctggaggagaaggaaccatcttag

SEQ ID NO: 244031 - DNA, 501 bp, synthetic construct
  misc_feature 1..501: note = Description of Artificial Sequence: Synthetic coding sequence
  source 1..501: mol_type = other DNA
atgtctcggccacgtaaaagattggccggtacttcagggtccgataagggtttatctggcaaacggaccaaaacggagaactccggggaggcgctggcaaaagtggaagactccaatccccagaagactagcgccacaaagaattgcctcaaaaatctatctagtcattggctgatgaagtccgagccagagagcagactcgagaaaggcgtcgacgttaagttctccattgaggatctcaaagctcaacccaagcaaaccacctgctgggacggggttcggaattatcaggcccgaaactttctgcgcgcaatgaagctcggggaagaggcctttttctaccatagtaactgcaaggagcctggaatagcagggctgatgaaaatcgttaaggaagcgtacccggaccatacgcaatttgaaaaaaataatccacattacgacccttcaagcaaggaggacaatcccaagtggagtatgaagtctctcatattgttttag

SEQ ID NO: 244032 - DNA, 678 bp, synthetic construct
  misc_feature 1..678: note = Description of Artificial Sequence: Synthetic coding sequence
  source 1..678: mol_type = other DNA
atgtcccggcctcggaagaggctggctgggacgagcggtagtgacaagggactgtccggaaagaggactaaaacagaaaacagcggcgaggcactggctaaagttgaagactctaacccgcagaaaacttcagccactaaaaactgtctcaagaacctgagttctcactggcttatgaaaagcgaaccggagtccagacttgagaaaggtgtggacgtcaaattcagcattgaggacctgaaggcccagcccaaacagaccacctgctgggacggggttcgcaattatcaagcacggaacttcctcagagccatgaagctgggcgaagaggcctttttttaccatagcaattgtaaggaaccagggatcgccggacttatgaagatcgtcaaagaagcgtatccagaccatacacagttcgaaaaaaacaatccccattatgaccccagcagtaaagaggacaaccccaagtggtccatggtggacgtacagttcgtgcgcatgatgaagaggtttatccctctggctgagttgaaaagctaccaccaggcacataaagcaaccggcggtcctctcaaaaacatggtgctgttcacgagacaaagactatctattcagcccttaacccaagaagagttcgactttgtactgagcctagaagagaaggaacccagctag

SEQ ID NO: 244033 - DNA, 678 bp, synthetic construct
  misc_feature 1..678: note = Description of Artificial Sequence: Synthetic coding sequence
  source 1..678: mol_type = other DNA
atgtccagaccacggaaacggttggccggaaccagcggtagcgacaaaggattgtcgggaaagcgcacaaaaaccgagaactccggcgaagcactagctaaggtggaagacagtaatccacagaaaacctccgccactaaaaattgtctgaagaatctcagcagccactggctaatgaaaagcgaacccgagtcacgactggaaaagggagttgacgttaaattctctattgaagatctgaaggcacagcccaagcagacaacatgctgggatggcgtgcggaattatcaggcaaggaatttcctgcgggcaatgaagctaggtgaggaagcctttttctaccattctaattgtaaagaaccagggattgctggcctgatgaaaatcgtaaaagaggcataccccgatcacactcagtttgagaagaacaacccccattacgatccctcttcgaaagaagacaaccccaagtggtctatggtcgacgtgcagtttgtcaggatgatgaagagatttatccctctggctgagctgaagtcataccatcaggctcataaagcgaccggcggtcctcttaaaaacatggtcctcttcacacgtcagcgccttagcattcaacctcttactcaagaggagtttgacttcgtactatctctggaggagaaggaaccatcttag

SEQ ID NO: 244034 - DNA, 1926 bp, synthetic construct
  misc_feature 1..1926: note = Description of Artificial Sequence: Synthetic coding sequence
  source 1..1926: mol_type = other DNA
atggccttgagcctggaagaattcgtacacagtctcgatctccgcacattgccgagggttcttgagatacaggccggtatttatcttgaaggcagcatttatgaaatgtttggtaacgagtgttgtttttccactggtgaagttattaaaataactggcttgaaagtgaagaagattatcgcagaaatttgcgagcagatagaagggtgcgagtccctccagccttttgaactccccatgaatttcccgggtttgttcaagatagtcgccgacaaaacaccttacctgacaatggaagaaatcacaagaacgatccacattggcccttctaggctcggacacccatgtttctatcaccaaaaagacatcaagcttgaaaatctcatcattaaacagggtgaacagatcatgctgaacagcgttgaggaaatcgacggggagataatggttagttgcgcagttgcacgcaatcaccagacacactccttcaacctgcccctttcgcaggagggcgagttctacgagtgtgaggacgaaaggatctacactcttaaagagattgtcgagtggaaaatcccaaagaatcgtactcgtacggtcaacctgaccgacttttcaaacaagtgggactccacaaatccatttccaaaagatttctatgggaccttgatcctgaaacctgtgtacgagatacagggagtgatgaaattcaggaaagacataattaggattctgcccagcctagatgtagaagtcaaagatatcactgatagttacgacgccaattggtttctgcagctgcttagcacagaagatttgtttgagatgacaagcaaggagtttcccattgtgactgaggtgatcgaggctcctgagggtaatcacctcccgcagtcaattttacaacccggaaaaaccatcgtgatacacaaaaaatatcaggcctctcggatcctggccagcgagattagatctaactttccaaagcgacatttcttgattcctacctcatacaagggtaagttcaagcgcagacctcgtgagtttccaaccgcatatgacttagagatagcgaaatccgaaaaggaaccactccacgtcgttgccactaaagcctttcacagtccacatgataagctctctagcgtgagtgtgggggatcagttcctggtgcaccagtccgaaaccacagaagtgctttgcgagggcatcaaaaaggtggttaatgtcctggcatgtgaaaagatcctgaaaaagagctatgaggcggcactcttacctctctatatggagggtggatttgtggaggttattcacgacaaaaaacagtatcccattagtgaattgtgtaagcaattcagactcccgttcaatgtgaaagtcagcgtaagggacctgagtattgaggaagatgtgttggctgccacccccggacttcagctggaggaagatattactgacagctatctgctcatttccgactttgcaaatcctactgagtgttgggaaatccctgtcgggagattaaacatgactgtacagcttgtgtcaaacttcagccgtgacgcagagccgttcctcgtgcgtacactggtcgaagagatcacagaggagcagtactacatgatgaggcggtatgaatcgtccgcctcccatccacctccgagacctcccaagcacccttccgttgaagaaactaagctgactcttcttaccctggctgaagagcgaacagtggacttacctaagtcccctaagcgacaccatgtcgacatcaccaaaaagctgcaccccaaccaggccggattagacagtaaagtactgatagggtcacagaacgatctggtcgatgaggagaaggaacggtctaatagaggagctacagcaatagccgaaacctttaagaacgagaaacatcagaagtag

SEQ ID NO: 244035 - DNA, 1689 bp, synthetic construct
  misc_feature 1..1689: note = Description of Artificial Sequence: Synthetic coding sequence
  source 1..1689: mol_type = other DNA
atgaattttcctggcctattcaaaattgtggcagataaaaccccatatttaacaatggaggagatcaccagaactatacatatcggaccatcccgtctagggcatccgtgtttctatcatcagaaagacattaagctagagaatcttataattaaacagggagagcagattatgctgaacagcgttgaagagatcgatggcgagatcatggtctcctgtgccgtcgccaggaaccaccagacacactccttcaacctcccactgagccaggaaggagagttctacgagtgcgaagatgagcgcatctacaccctgaaggagattgtcgaatggaaaattcctaagaaccgcacccgaacagttaacctgacagacttttcaaacaagtgggacagtactaacccattccctaaggacttttacggtacacttatcctgaagccagtgtacgagattcagggggtgatgaagttcaggaaagacatcataaggatactaccttccctggatgttgaagtgaaggatatcacagattcatatgatgcgaattggttcctccaactgctcagcaccgaagacctgtttgagatgacctccaaagagttccccattgtcactgaggtgatcgaggcccctgaagggaaccacttaccacagtcaatactgcaacccggaaagacaatcgttattcacaaaaaataccaggcatctcgcatcctggcctctgaaatccgctccaactttcccaaacgtcactttctgataccaactagctacaaaggcaagtttaagcggaggcctcgtgaatttccaactgcctacgatctggagatcgcgaagagcgagaaggagccacttcatgtggttgccaccaaggcttttcattctccacacgacaagctgtcttcggtctcggtcggagatcagttcctggtgcatcaatcggagaccaccgaagtgctctgcgaagggattaaaaaggtggtgaatgtgctggcttgcgagaaaattctgaagaagagctatgaggctgccctgctccctctgtatatggaggggggtttcgtagaggtcatacatgataagaagcaatatcccatctccgagctgtgcaagcagttccgattaccattcaacgtgaaagttagcgtccgcgatttgagcatagaggaggacgtgctcgccgcaactccagggctgcagcttgaagaggatattacagattcctacctgcttatctcagacttcgccaatcctacagagtgctgggagattcccgttgggagactgaacatgaccgttcagctggtcagcaatttctcgagggacgcagagcctttcctggtgcgaactctcgtggaagagatcactgaagagcaatactacatgatgcggaggtacgaatctagcgcatcacaccccccacctaggcctcccaaacacccatccgttgaggagacaaaacttaccctgcttaccctggccgaagagaggactgtggatctacccaaatcacctaaacgtcaccatgttgatattaccaagaagttacaccccaatcaagccggactagattccaaggtgctgattggctctcaaaatgacctcgtggacgaggagaaagaacggtctaaccgcggagccacagctatcgccgagaccttcaaaaacgagaaacaccagaaatag

SEQ ID NO: 244036 - DNA, 372 bp, synthetic construct
  misc_feature 1..372: note = Description of Artificial Sequence: Synthetic coding sequence
  source 1..372: mol_type = other DNA
atgaacttcccggtccggaaagacatcatccggatactgccttccctggacgtcgaagtaaaggacatcactgactcctacgatgcaaattggttccttcagttgttgtccactgaagatctgtttgagatgacatccaaagaatttccgattgttacagaagtgatagaggcacccgagggaaatcacctgccccagtcgatattgcagccaggtaagacaatcgtgatccacaagaagtaccaggcaagccgcatactagcaagcgagatacgttctaacttcccgaagagacacttcctcattccaacatcctataaaggaaaatttaagaggcgccctagggaattcccgaccgcatacgatctatag

SEQ ID NO: 244037 - DNA, 1821 bp, synthetic construct
  misc_feature 1..1821: note = Description of Artificial Sequence: Synthetic coding sequence
  source 1..1821: mol_type = other DNA
atgttcgggaatgagtgttgcttctctacgggggaggtcatcaagataacagggctgaaggtcaagaagatcattgccgagatctgtgagcagattgaggggtgcgagagtctgcaaccattcgaattgcccatgaactttcccggactctttaagatcgttgcagataaaacgccatatctgactatggaggagataaccaggaccatccacataggcccttcgaggctagggcacccctgcttctatcatcaaaaggacatcaaactcgagaacctgattattaagcagggagaacagatcatgctcaacagcgtggaggagatcgatggagaaattatggtttcctgcgcagttgcccgtaaccaccaaactcattccttcaatcttccactctcccaggagggagagttttatgaatgcgaggacgagcggatctacacccttaaggagattgtggagtggaagatccctaaaaacagaaccagaaccgtaaaccttaccgatttctcaaacaagtgggattccactaatccctttccaaaagacttttacgggaccctgatactcaagccggtatatgaaatccagggggtcatgaagtttagaaaggatattatccgcattctgccatccctggacgtcgaggttaaggacattactgactcttacgacgctaattggttccttcagcttctctctaccgaggatctctttgaaatgactagcaaagagtttcctatagtaactgaggtaatcgaggcgcctgaggggaaccatctgccccagagtattcttcagcccggtaagactatcgtgatccataaaaaatatcaggccagtagaatcctcgctagcgagatcagaagcaactttccgaagaggcacttcttaattcctacgtcatacaaaggaaagtttaaacgacggcctcgcgagttcccaaccgcatacgatctggagattgctaaaagcgagaaggagcccctacacgtagtggctaccaaggcttttcacagtccccacgacaagctcagctccgtctccgtaggcgaccaatttctggtgcaccaatctgaaactactgaagtgttgtgcgaaggtattaaaaaagtggtcaacgtcttagcttgtgagaagattttaaaaaagtcgtatgaagcagctcttctgcccttgtatatggagggagggttcgtagaagtgatccatgataaaaaacaatatcccatttctgagttgtgcaaacagttccggctgccgtttaacgtcaaagtgagtgtgcgggatttgtccatcgaggaggatgtgctggccgctactcctggcttgcagctcgaggaggacatcaccgacagctatcttctcatctccgatttcgccaaccccactgagtgttgggagatccccgtcggccgactcaatatgaccgtgcaacttgtttccaactttagtagagatgccgaaccatttttagtccggaccttagtcgaagaaattacagaagagcaatactacatgatgagacgatatgagtcctctgccagtcatccgccaccacgccctcctaagcacccctcagttgaggagaccaagttaacactactgactctggcggaggaaaggactgtggacctgcctaagtctccgaagagacatcacgtggacattacgaaaaagctgcatcctaatcaggccggtctagacagtaaagttttaattggatcccagaacgaccttgtggacgaggagaaagagcgtagcaaccggggagcaacggccattgccgaaaccttcaagaacgaaaaacaccaaaaatag

SEQ ID NO: 244038 - DNA, 2043 bp, synthetic construct
  misc_feature 1..2043: note = Description of Artificial Sequence: Synthetic coding sequence
  source 1..2043: mol_type = other DNA
atggcgttatctcttgaagagtttgtgcacagcctggacctccggactctcccacgcgtgctggagatccaggccggtatttacctggagggtagcatctacgaaatgttcgggaacgagtgctgcttctccaccggcgaagtgatcaagataaccggtctgaaggtcaagaagattatcgccgagatttgtgaacagatagagggctgtgagtccctgcagccctttgagcttcctatgaactttccagggctatttaaaatcgttgcggacaagacaccctacctaactatggaagaaatcacaagaacaattcacatcggcccttcccgtctgggacatccctgcttctaccaccaaaaggacataaagctagaaaatctgatcatcaaacagggcgagcagattatgctcaactccgttgaggaaattgatggggaaattatggtgtcatgcgctgtggcacggaatcatcaaacccattcattcaacctccctctgtcccaggaaggggagttctatgaatgcgaagatgaacgcatttacaccctgaaagagattgtggagtggaaaatccccaagaacaggacacgaacagttaacctgacagacttcagtaacaaatgggattctactaaccctttccccaaagacttttacggcactcttatcctgaagcccgtgtacgaaattcagggagttatgaaatttcggaaagatatcattcgtatacttccttccctagatgtggaagtgaaagatatcaccgacagctatgacgctaactggtttttgcagctcctctccaccgaggacctgtttgaaatgacgagtaaggaatttcctatcgtgaccgaagtaatcgaagcaccagagggcaaccacttaccccagagcatccttcaaccgggaaaaactatcgtgattcacaaaaaatatcaggcttcacggattttggcttcggaaattcggtccaactttcccaagaggcatttcctcattccaacttcgtacaagggcaagtttaagcgacggccacgcgagtttccaacagcttatgacttagagatagccaagtccgagaaagaaccattgcatgtcgtcgccactaaggctttccactcaccccacgataaactaagcagtgtgtccgtgggagaccagttccttgtgcaccagtcagaaaccactgaggttctatgtgagggaattaaaaaagtcgtcaatgtcctcgcctgtgaaaagatcctcaagaagtcgtacgaagccgctctgctgccgctctacatggaaggaggattcgtggaggtcatacacgataaaaagcagtacccaatctctgagctctgtaagcagttccgcctgcccttcaacgtcaaagtatcagtaagggacctgtccatcgaagaagacgttctcgcagcgacaccgggactgcagttagaagaagacatcaccgattcatatttattaattagtgattttgctaaccctactgaatgttgggagatacctgtgggacgactaaacatgactgtgcagttggtttccaattttagcagagatgccgagcctttcttagtccgaacattggtggaggagatcaccgaagaacagtactatatgatgagacgatacgagtctagcgcctcccacccaccccctaggccaccaaagcatccaagcgttgaggaaacaaagctcacattgttgacgcttgcagaagaaagaactgtcgacctgccaaagtccccgaaagccggtgtccaatggagggatctgggcagcttgcagcccctgcctcctggctttaagcagttttcggcctccgctagccacgtggctggaataaccggaaccccacaccatgtacaaagacatcatgtggacattactaaaaaactacaccccaaccaggcaggacttgacagcaaagtgttaatcggttcacagaatgacctagtggatgaagaaaaagagaggtcgaaccgaggagcaactgcaatcgctgaaaccttcaagaatgagaaacatcagaaatag

SEQ ID NO: 244039 - DNA, 1581 bp, synthetic construct
  misc_feature 1..1581: note = Description of Artificial Sequence: Synthetic coding sequence
  source 1..1581: mol_type = other DNA
atggacgtaagattttaccccccaccggcacagcccgctgcagcccctgatgcaccctgtcttgggccttctccttgcctcgacccctactactgcaacaagtttgatggggaaaatatgtacatgtccatgaccgagcctagtcaagattatgtcccagcctctcagtcttatccaggaccgtcactggagagtgaagacttcaatatcccacctattacacctccctccctgcctgatcactccctggtgcatcttaatgaggttgagagcgggtatcactctctgtgtcaccccatgaatcataatgggctgctgccttttcatccacagaatatggacctccctgaaatcaccgtgtctaacatgttgggacaggacggaaccctcctgagcaacagcatcagtgtcatgccggacatccgtaatcccgagggtactcagtatagttcccacccacagatggcagccatgcgtcccaggggacaacctgctgatatccgccagcagccaggcatgatgccccacggtcagcttacaaccattaaccaaagccaactctccgcgcagttagggctgaacatgggaggcagtaacgtgcctcacaactctccatccccgcctggctctaagagtgccacgccatcaccttccagcagcgtgcacgaagacgaaggcgatgatacgtccaaaatcaatggaggagagaagaggccagcgtctgacatggggaagaagccaaagacccctaaaaagaagaagaaaaaggaccctaatgaaccccagaagcccgtttccgcgtatgccttgttctttcgggacacgcaggcagctattaaggggcaaaatcccaatgctacttttggagaggtgtcaaagatcgtagctagcatgtgggacggcttgggggaggaacagaagcaggtgtacaaaaagaaaacggaggctgccaagaaggagtacctgaagcaactggcggcttatcgcgcttcactcgtaagcaagtcctactcagaaccagttgacgtgaaaacctcgcagcccccacaactgatcaacagcaagccctccgttttccacggacccagtcaagctcactctgccctttacctgtcctcacactatcatcagcagcctggcatgaacccccatctgactgctatgcaccctagccttccacggaacatcgctccaaaaccgaacaaccagatgccagttacagtctcaatcgcgaacatggccgtgagccctccgcctccgctccagataagcccacccctacatcagcacctgaatatgcagcaacatcagcccctgactatgcagcagcccctcggaaatcagctcccaatgcaggtgcagtccgcgctacacagtcccacaatgcaacagggcttcaccctccaacccgactatcagacaatcatcaatcctacgtccaccgccgcacaggtggtgacacaagcaatggagtatgtgcgctccggctgtaggaatccaccccctcagcctgtggactggaataatgactactgctctagcggaggcatgcagcgcgataaagcgttgtacctcacttag

SEQ ID NO: 244040 - DNA, 831 bp, synthetic construct
  misc_feature 1..831: note = Description of Artificial Sequence: Synthetic coding sequence
  source 1..831: mol_type = other DNA
atggggaagaaacctaaaactcctaagaaaaagaagaaaaaggacccaaacgagccacagaagcccgtctccgcctacgccctcttctttcgggacactcaggctgctattaagggacagaatccaaacgccacctttggtgaggtcagcaaaattgtggcatctatgtgggacgggctgggggaagaacagaagcaggtgtacaagaagaaaacagaggccgcaaaaaaagaatacctaaaacagctagccgcttaccgtgccagcttggtaagcaagagttactctgagccagtggacgtaaaaacatcacagccccctcaattgattaactctaaaccctctgtctttcacggaccctctcaagcccattatcatcagcagcctgggatgaatcctcatctgactgcaatgcacccctccctgcctcgaaacatcgcaccaaagcccaataaccagatgccggtaactgtatccatagcaaatatggcggtgtcgcccccaccccctctgcaaatttctccaccactgcaccaacacctaaacatgcagcagcaccagccattaaccatgcagcaacctctcggcaatcagctgcccatgcaggtacaatccgcccttcactctccaactatgcaacaggggtttactctccagccagattaccagactatcataaaccctacgagtaccgctgcacaggtggtcacccaggccatggagtacgtgaggtccggctgcagaaaccccccaccccagcctgtggactggaataatgattactgctcgagcggaggaatgcagcgcgacaaggccttgtatttgacgtag

SEQ ID NO: 244041 - DNA, 747 bp, synthetic construct
  misc_feature 1..747: note = Description of Artificial Sequence: Synthetic coding sequence
  source 1..747: mol_type = other DNA
atgccagaattcctcgaggacccaagcgtgctgaccaaagacaaactgaagtcagaattggtggctaacaatgtgaccctgcctgccggagaacagaggaaagacgtatatgtccaactgtatctccagcatttgacagcgaggaataggccacctttgcctgctggaaccaattctaaggggcctcctgacttttcaagtgacgaggagcgggagcccaccccagttttaggctccggagctgcagccgctggcaggagtagggcggcagtgggaagaaaagctactaaaaaaacggacaaaccacgccaggaggataaagacgacttggatgtgaccgaactcacaaatgaagatctgctcgatcagctcgtgaagtacggggttaatcctggacctatcgtcggcaccacaaggaaactatatgagaagaaactgttgaagctaagagaacagggcacagagtcccgtagcagcaccccccttcccactatctcctcatcagcagagaatacccggcagaatggatctaatgattctgacaggtactctgataacgaggaggacagcaaaattgagcttaagctggagaaacgcgaacctctgaaaggccgtgccaaaactccggtaactctgaagcaacggagggtggagcacaaccaggtttctctcgtgctcctcccaccttgtactggtattaacaatctcttaactacattgatacacgttctggcattcaatggctag

SEQ ID NO: 244042 - DNA, 2085 bp, synthetic construct
  misc_feature 1..2085: note = Description of Artificial Sequence: Synthetic coding sequence
  source 1..2085: mol_type = other DNA
atgccagagtttctcgaagaccctagtgtactgactaaagacaagctcaagagtgagctggtagctaataacgtgaccctgcctgctggggagcagcgtaaggacgtgtacgtccagctgtatctgcagcacttgacagcccgaaacagaccccctttgcctgcagggactaacagcaaggggcctccagacttctcatctgacgaggaacgtgaacccacaccagtgctcggcagtggcgctgctgctgcaggccgtagtcgggcagccgtaggcagaaaggctactaaaaaaacagacaagcccagacaggaggataaagacgatctggatgtcaccgagctgacaaacgaggatctgttagaccagttggtgaaatacggggtaaaccctggacccatcgtcggaaccacacgcaaactctacgagaaaaaactccttaaactgcgagaacaggggactgaatctcggagctctaccccactgcctacaatcagtagcagtgccgaaaacacacgacaaaatggcagtaacgactcagatcgttatagtgacaatgaggaggggaagaagaaggagcacaaaaaggtaaagtcaacacgcgatatcgtcccgttcagcgagcttgggaccacacccagcggcggtggattcttccagggtatctctttcccagaaatttctacacgacctcccttaggatctactgaactccaggcagctaaaaaggtgcatacttccaaaggagacctgccacgggagccacttgtggccaccaatttacctggcagagggcagctccagaagctggcatcagagaggaatcttttcatctcctgtaagtcatcacatgatagatgtttagagaaaagttcctcctctagttctcaacccgaacactcagctatgctcgtgtccacagcagcttccccttccctgatcaaggagactaccaccggatattataaggacattgttgagaacatttgcggaagagagaagtcaggcatccagcctctatgtccagagcgaagccatatttccgaccaaagccccctctcaagcaagaggaaggccctcgaagagtcagaaagtagtcagttgattagcccaccgcttgcgcaagccatacgagattatgtcaacagcttacttgttcagggcggagtgggctccctccccggaaccagtaatagtatgccaccactggacgtagagaacatccagaaacggatcgaccagtcaaagtttcaggagacggagttcctttcccccccaaggaaggtgcctagactctctgagaagtccgtggaagaacgggatagcggcagtttcgtcgcattccagaatatcccaggcagtgagctgatgagctcctttgccaaaaccgtagtctcccacagtctgaccactctcgggctggaagtggctaagcagtctcagcacgataagattgacgctagtgaactgtccttccctttccatgaatccatactcaaggtgatagaggaggagtggcagcaagtggatcggcagcttccaagtttagcctgcaagtatcctgtctcctcacgggaagctactcagattctctcagtgccaaaagttgacgatgagatattaggatttatctctgaagcaaccccactgggcggtattcaggcagcaagcacagaatcctgcaatcagcagctggatctggccctttgcagagcatacgaagccgcagccagcgccctacagatagctacgcacactgcatttgtggcgaaggccatgcaagctgacatcagccaggctgctcaaatcctctcttcagacccgtcccggacacaccaggcgttgggaattctcagtaaaacgtacgacgcagcttcttatatctgcgaagccgcttttgatgaagttaaaatggccgctcacaccatgggaaacgctacagtggggagaagatacctgtggcttaaggactgtaaaataaacttagccagcaagaataagctcgctagcaccccatttaaaggcggtaccctgtttggaggggaagtttgcaaagttattaaaaaacggggtaacaagcattag

SEQ ID NO: 244043 - DNA, 1245 bp, synthetic construct
  misc_feature 1..1245: note = Description of Artificial Sequence: Synthetic coding sequence
  source 1..1245: mol_type = other DNA
atgcctgaatttctcgaagatccgtcagtgctgacaaaggataaactcaagagtgagctggtcgcaaacaacgtaacacttccagccggagaacagaggaaggacgtgtacgttcaactgtatctgcaacatctgaccgcaagaaacaggcccccattgcctgctggcactaatagcaagggcccacccgatttctcttccgacgaagagcgggagcccactccagttctcgggtctggcgctgctgccgctggccgaagccgagcagccgttggccgtaaggccaccaaaaagacagacaaaccacggcaagaagataaagatgacctggacgtgacggagctgacgaatgaggacctgctggatcagctggtgaagtatggggtaaatccaggaccgatcgtgggaacaaccagaaaattgtacgagaagaaactgctgaagctgcgagagcaagggacagaatcgaggagcagcacccctctcccaacgatctctagcagtgctgagaatacccgtcagaacggaagcaatgacagcgatcggtattccgataatgaggaggactcaaagatagaattgaaactggaaaaacgcgagccactgaaggggcgagcgaaaacccccgtgaccctcaaacagcgaagagtggaacataaccaggtggaaacgtcagagcatttcaggattgatggcccagtaatttccgagtctactcctattgccgagaccataatggcctccagtaatgaatccctcgttgttaaccgtgtaacaggaaacttcaagcacgcctccccgatcttgcccattacagagttttctgatatcccgagaagggcacccaaaaagccactgactagagccgaagttggtgaaaagactgaggagcggagggtggaacgcgacatcttaaaggaaatgttcccctatgaggcaagtacgcctaccggaattagcgcgtcatgccggagaccaataaaaggcgctgcgggtcgtccactggagctgtcagacttccgaatggaggagtccttttcctctaaatatgtgcctaagtatgttccactggccgacgtgaagagcgagaaaactaaaaaaggtaggtcaattcctgtctggattaagattctattatttgtggtggtggcagtgtttctgtttctcgtataccaggctatggagaccaaccaggttaatccatttagcaactttctccacgtggatcccaggaagagcaactag

SEQ ID NO: 244044 - DNA, 1038 bp, synthetic construct
  misc_feature 1..1038: note = Description of Artificial Sequence: Synthetic coding sequence
  source 1..1038: mol_type = other DNA
atgccagagttcctggaggatccatccgtgctcaccaaagacaaactgaagtccgagctcgtagcaaataatgttacccttcctgcaggggaacagcgcaaagacgtgtacgtgcagctgtacttacagcacttgaccgccaggaaccgccctccgctgcctgctggcaccaactctaaggggccacctgacttcagcagtgacgaagaacgggagccaacgccagtcctaggatccggagcagccgcagcgggaagaagccgcgctgccgtaggtaggaaggcaaccaaaaaaacagacaagccccgacaggaagacaaagatgatttggatgttacagagctgaccaacgaagatctgttggatcaactggttaagtacggggtgaaccccggtccaatcgttggcacaacccgcaaactgtatgagaaaaaactcctaaagttgcgtgagcaaggtaccgagtcacggagtagtacacctctgccaaccattagctctagtgccgagaacaccagacagaacggaagcaacgattcagatcgctattcggacaatgaggaagactccaagatcgaactcaagttagaaaagagagagcctttgaaaggccgtgcgaagacacctgtcacactcaaacagcgtagagtcgagcacaaccaggtgggagaaaaaacagaagaaaggcgagtggaacgggacattcttaaagagatgttcccctacgaagctagtactcctactggcattagtgcctcctgccgtcgccctattaaaggagccgctggccgaccgcttgagctatcagatttccggatggaggagtccttcagttccaaatacgtgccgaaatacgtaccactggcggacgtcaagtccgagaagaccaaaaagggtagaagcatccctgtctggattaaaatcctcctcttcgtggtagtcgccgtgtttttattccttgtttatcaggccatggagacaaatcaggtgaaccctttttctaacttcttgcacgtggacccacggaagtcgaactag

SEQ ID NO: 244045 - DNA, 1365 bp, synthetic construct
  misc_feature 1..1365: note = Description of Artificial Sequence: Synthetic coding sequence
  source 1..1365: mol_type = other DNA
atgccagaatttctggaagatccctctgtcttgaccaaagataagctcaagtctgagctggtcgccaacaacgtaaccctccctgcgggtgaacaaaggaaagatgtttatgtgcagttatacctacagcaccttactgccagaaacagacctccgctgcccgctgggactaatagcaagggtccgccagacttctcctcggacgaggagagggagccaacccccgtcctcgggtctggtgccgcagccgcaggacgctctagggccgcagtcggtaggaaggctaccaagaaaactgataaacccaggcaggaggacaaggatgaccttgacgttaccgagctcactaatgaggacctcctcgaccagctggtaaaatacggcgtcaaccccggacctattgttggcacaacccgcaagctctatgaaaagaagctgctcaagctcagggagcagggcaccgaaagtcggtcaagcacccctttgccaaccataagttcaagcgcagagaacacacgccaaaatgggtccaacgactcagaccgttatagtgacaacgaggaggactccaagatcgagttgaagcttgaaaagcgtgaaccacttaaaggtagagccaagacccccgtgacactaaagcagagaagagtggaacacaatcagtcatactcccaagctggtataacagaaacagagtggaccagtggctcctctaaaggaggtccgttacaggccctcacgagggaaagcactagagggtcaagacgaactccccgaaagcgggtagagacttccgagcactttaggatagacggtccagtcatcagcgaaagcactccaatcgccgaaaccattatggcttcttccaatgagagtctcgtggtgaaccgggtcacagggaactttaaacacgcgtccccgatactcccaatcacggagtttagcgacatcccgagacgtgctccaaagaagcccctgactagagctgaagtgggagagaagacagaggagagacgggtggaacgcgacatcctgaaagaaatgttcccttacgaggcttctactccaacgggtatctcggcttcatgccggagaccaatcaagggtgccgcaggtcgcccactggaacttagtgattttaggatggaggaaagcttttcctctaaatatgtgcccaagtacgtcccactggcagacgtaaaatcagaaaagactaaaaagggtaggagtatccctgtttggattaagatcctcttgttcgtggtggtggccgttttcctgttcctggtgtatcaggccatggagaccaaccaagtcaacccttttagcaatttcttgcatgtagaccctcgaaaatccaactag

SEQ ID NO: 244046 - DNA, 135 bp, synthetic construct
  misc_feature 1..135: note = Description of Artificial Sequence: Synthetic coding sequence
  source 1..135: mol_type = other DNA
atgtcagacaagccagatatggcggaaatagaaaagttcgataaaagtaagctgaagaaaacggagacgcaagagaagaatcccctgccctcaaaagagacgatcgagcaggagaaacaagcaggggagtcttag

SEQ ID NO: 244047 - DNA, 135 bp, synthetic construct
  misc_feature 1..135: note = Description of Artificial Sequence: Synthetic coding sequence
  source 1..135: mol_type = other DNA
atgtctgataagcccgatatggctgagatcgaaaaattcgataaaagcaagctcaaaaaaaccgaaacacaggaaaaaaatccacttccctccaaggaaaccatcgaacaggaaaagcaagccggagagtcctag

SEQ ID NO: 244048 - DNA, 135 bp, synthetic construct
  misc_feature 1..135: note = Description of Artificial Sequence: Synthetic coding sequence
  source 1..135: mol_type = other DNA
atgtcagataaacccgatatggcagaaattgagaagtttgacaagagcaagctcaaaaaaacagagacccaggagaaaaatcccctgcctagcaaggaaaccatcgagcaggaaaagcaggcaggtgagtcctag

SEQ ID NO: 244049 - DNA, 135 bp, synthetic construct
  misc_feature 1..135: note = Description of Artificial Sequence: Synthetic coding sequence
  source 1..135: mol_type = other DNA
atgtcagacaaaccggatatggcagaaatcgaaaagttcgataagtcaaagctgaagaaaaccgagacacaggaaaagaatcccctgcccagtaaggaaaccatagaacaagagaagcaggccggtgagagttag

SEQ ID NO: 244050 - DNA, 135 bp, synthetic construct
  misc_feature 1..135: note = Description of Artificial Sequence: Synthetic coding sequence
  source 1..135: mol_type = other DNA
atgagcgataagcccggtatggcggagatcgaaaagttcgacaagtccaaactgaaaaagacagagacccaggagaaaaatcctctctcatccaaagaaacgatcgaacaggagagacaagccggtgagtcttag

SEQ ID NO: 244051 - DNA, 1299 bp, synthetic construct
  misc_feature 1..1299: note = Description of Artificial Sequence: Synthetic coding sequence
  source 1..1299: mol_type = other DNA
atggggccagcagggtcacttctaggcagcggccagatgcaaattaccctctggggctcacttgccgcagtcgccattttttttgttatcacatttctcatctttctgtgttcctcctgcgatagagaaaagaagccaaggcagcactctggggaccacgagaacctcatgaatgtaccttccgacaaggaaatgttctcaagatcagtaacatcactggcaacagacgcccctgcctcttctgagcagaatggggcattgaccaatggcgacatattgtctgaagattccacactgacatgtatgcagcactatgaggaggttcagacctccgccagcgaccttctggattcacaggactcaacgggaaagccaaagtgccaccagtctagagaattaccacgtatacccccagaatctgccgtcgacacgatgcttacagcaagaagtgtggatggcgaccaggggctggggatggaaggtccctacgaggttctgaaggactcctctagccaggaaaacatggttgaggattgtctgtacgagacggttaaagagatcaaggaagtggcagctgcagctcacttggagaagggtcattccggcaaggcgaaatccaccagcgcctcaaaggaactcccgggaccccagaccgagggcaaggctgaattcgccgaatacgccagcgtagacagaaataaaaagtgccgccagagcgttaacgtggaatccatacttggcaacagctgcgaccctgaagaggaggcccctcctccggttcctgtgaagttgctcgacgagaacgagaaccttcaagagaaggaggggggagaggctgaggaatccgcaaccgatacaacttcagagactaacaaacggttcagctccttgtcatacaagtcgagagaagaggatcccacccttactgaagaggagatctccgccatgtatagttcagttaacaagcccggacagctcgtgaacaagtccggtcagagcttgactgtacccgagtccacttacacctctatccaaggcgacccacagaggagcccttctagctgcaacgacctttacgctacagtaaaggacttcgaaaagaccccaaattcaacattgccaccagcaggtaggcccagcgaagaaccggagcccgactacgaggcaatacaaacgttgaatcgcgaggaggagaaagctactctaggaaccaatgggcaccacggactggttccaaaggagaacgactatgaatcaatttccgacttacaacagggacgggacattaccaggctctag

SEQ ID NO: 244052 - DNA, 8135 bp, synthetic construct
  misc_feature 1..8135: note = Description of Artificial Sequence: Synthetic coding sequence
  source 1..8135: mol_type = other DNA
atggcccttgtgctggaaatcttcacgctcttggcctcgatctgctgggtgagtgccaatattttcgagtatcaggtggatgctcagccacttcgtccttgcgagttgcagagggagaccgctttccttaagcaggcagactacgtcccccagtgtgccgaagacggtagtttccagactgtgcagtgtcagaacgacggtcgctcttgttggtgtgtaggagcgaatggatcggaggtcctgggtagtcgccagccaggcaggcctgtcgcatgtctgagcttttgccagctccagaagcagcagatcctgctgtctggatacatcaactcaaccgatactagctacctcccccagtgccaggattcaggtgattatgctcccgttcagtgcgacgtccagcaggtgcagtgttggtgcgtggatgccgaaggaatggaagtgtatggaacacgacagctgggcagacccaagcggtgcccgaggtcatgtgagatccggaaccggcgacttctgcatggggtgggcgataaatcccctcctcagtgtagtgcagaaggtgaatttatgcccgtgcaatgtaagtttgtcaatactaccgacatgatgattttcgatctggtccattcttacaaccgcttccccgacgcttttgtcacatttagctcatttcagcggcgatttcctgaggtgtccggttactgtcactgtgctgactcacagggcagggaactcgcagaaaccggtctggagctgctgctggatgagatttatgacaccatctttgcgggattggacttgcccagcacattcacagagacaaccctgtacagaattcttcagcggaggttcttggctgtgcagtctgtcatctcaggccgttttcgatgccccaccaagtgtgaggtcgagcgcttcaccgcaacaagttttggccatccttatgttcccagttgtcgcagaaatggtgattatcaggcagtgcagtgccagaccgagggtccctgctggtgcgttgacgctcagggaaaggagatgcatggcacacggcaacagggggagcccccaagctgcgccgaaggccagtcatgcgcatcagaacggcaacaagccctgagcagactgtactttggcacaagcggctatttttcccagcacgacctgttttcaagtccagagaagagatgggctagcccacgggtggccaggttcgcgacctcttgccctcctaccatcaaagagctgtttgtggactctgggcttttgcgcccaatggttgaggggcagtcacagcagtttagcgtgtcagagaatctgttgaaggaagctataagggccatcttcccttcaagaggacttgccagactagccctgcagtttaccacaaaccctaaacgcctccagcaaaacctgttcggagggaaattcctggttaacgttggccagtttaatctcagcggcgctctcgggacccggggaacctttaatttttcacagtttttccagcagctgggcttagcttcatttctcaacggcggaagacaggaagacctagctaaacccctctccgtaggcctggactccaatagctccaccggaactcctgaagccgctaagaaggacggaactatgaacaaacccaccgtcgggtcctttggcttcgaaatcaatctacaggaaaaccagaacgccctgaagttccttgcctccctgctggaattaccagagtttctcctgtttttacagcatgcaatctccgtccccgaggatgtagccagggatctgggcgacgtgatggaaaccgtgctgtcttcacagacgtgtgaacagaccccagagcgcctgtttgtacctagttgcaccactgaaggaagttacgaggacgttcagtgtttttcaggggaatgctggtgcgtaaactcgtgggggaaggagctgcccggttcaagggtccgtggtggccagcctagatgtccgactgactgcgagaaacagagggctaggatgcagtcccttatgggcagtcagccagccggtagcacattattcgtaccggcttgcacaagcgagggccattttctccccgtccaatgcttcaacagcgaatgttattgtgtagatgccgaggggcaggccatccccggaactcgcagtgcaatcggtaagccaaaaaagtgcccaaccccctgtcagctgcaaagtgagcaggcattcctgcgtaccgtgcaggccctgctgagcaactcaagcatgctgccgaccctgtcggatacatacatcccacagtgctctactgacggccagtggcggcaggttcagtgtaacggtcctccagagcaggtgtttgagctgtaccagcgttgggaggctcagaacaagggtcaagacctaactccagctaaactgctagtgaaaatcatgagttatcgcgaggccgcttccggaaacttcagtctttttattcagtcgctctacgaagccggacagcaggatgtttttccagtactgtcacaatacccatctctgcaggatgttcccctggcagcactggagggaaagaggccacagcctcgtgaaaacatcctgcttgagccataccttttttggcagatacttaacgggcagctcagccaatatcctgggagctattcagacttctccactcctctggcgcacttcgatctcagaaattgctggtgtgtggacgaggctgggcaagaactggagggcatgcgcagcgagccatctaagcttcccacttgtcccggaagttgtgaggaagccaagttacgcgttttgcagttcatccgcgagactgaggaaatcgtgtcagcttccaattcttcccgttttcctctcggcgaatcctttctggtggctaaggggataaggctccgaaacgaggatctcggactacccccacttttcccaccacgtgaggccttcgctgagcaattcctgcggggaagtgactacgccataaggttagcagctcagagcactttgagcttctatcagcgtcgtaggtttagccccgatgactctgccggagcgtccgcccttctccgctctggcccatacatgccacaatgtgacgcttttggctcgtgggaacctgtgcagtgtcatgccggtacaggtcactgctggtgcgtcgatgagaagggaggcttcattccaggatcactgaccgctaggtccttacaaatacctcagtgtcctacaacatgtgaaaaatcccgtacttctgggctgctgtccagctggaaacaggcgaggtcacaagagaatccgagcccaaaagatctctttgtgccagcatgcctggagaccggtgagtacgccagacttcaagcgtctggggcagggacctggtgtgtggatcctgcctcaggcgaggagctgcgcccagggtcgagcagctccgcccagtgtcctagcctgtgcaacgtccttaagtccggcgtcctgagtaggcgagtgagtccaggctacgtgccagcgtgtcgtgcagaagatggcggtttttcccctgtccagtgcgatcaggcacagggctcttgttggtgcgttatggattccggcgaagaggtgcctggtacacgggtaacagggggacaaccagcttgtgaaagccctagatgcccactccctttcaacgccagtgaggtcgttggcggaactatcctctgcgagactatcagcggacctacgggatcggccatgcagcagtgccagcttctctgccgacagggaagttggtctgtgttcccccctggcccactgatctgcagcctggaatctggtaggtgggagtcacaacttccgcagcccagagcctgtcaaaggccccagctgtggcagaccatacagacgcagggacatttccaacttcagctgccaccgggaaagatgtgttcggcagattacgccgatttacttcagaccttccaagtgtttatcctggatgaactgaccgccagaggcttttgccagatccaggtcaagacgtttggtacgctggtgagcatccctgtatgtaacaacagctccgtgcaggtggggtgtctaaccagggagcgcttgggtgtaaacgtgacctggaagtctcggctggaggatattcccgtagccagccttcctgatctgcatgacatcgagagggccctggtgggaaaggatcttctgggacgattcacagacctgatccagtccgggtccttccagctccacctcgattctaagactttccctgctgaaacaattcggtttctccagggagatcatttcggcacttcccctcggacctggttcgggtgcagcgaaggtttctatcaagtcctaacatcagaggcatcacaggacggactcggctgtgtaaaatgccccgaggggtcttactcgcaggatgaggaatgcatcccatgccccgtaggtttttaccaggaacaggccggatcattagcttgcgtcccctgtccagtggggagaaccacgatctccgctggcgcattctctcaaactcacctaatgcagaaattcgagaaggtgccagagtctaaggttattttcgacgcaaatgctcccgtcgcagttcgctcgaaagtgcccgacagcgaatttcctgtcatgcagtgtctaaccgactgcacggaagacgaagcttgcagcttttttacagtaagcacaaccgaaccagaaatctcctgtgatttttatgcctggacaagcgacaacgtcgcttgcatgacatcagatcagaagcgcgacgcactgggcaatagcaaagctacctcatttggctctttgagatgccaggtgaaagttcggagccatggtcaggacagccctgcagtctacctgaaaaaaggacaagggtccacaaccacattgcaaaagcgttttgagccaacaggtttccaaaatatgctgagcggcctctacaaccccatcgttttctcggctagtggggcaaacctgaccgacgcacacttattctgtttattggcttgcgatcgagatttgtgttgcgatggctttgttcttacccaggtgcaggggggagccataatatgcgggctgttatcgagcccgtcagtcctgctttgcaacgtgaaggattggatggatcctagcgaagcttgggccaacgccacctgccctggagtgacgtatgatcaggagtctcatcaggtgatactgagacttggggatcaggagttcattaagtccctgactcctcttgaggggacccaggacacattcacgaattttcagcaggtgtacctgtggaaggacagcgatatgggatcgaggccggaatcaatggggtgtaggaaagataccgtgcctcgcccagcgagccctacagaggccggattgaccactgagttgttctcacccgtggacctgaaccaggtgatcgttaatggaaatcaatctcttagttcgcaaaaacactggctgttcaaacatcttttctcagcccaacaggctaacctctggtgcctcagcagatgcgtgcaggagcactctttttgtcaactggccgagatcactgagtccgcatccctgtacttcacctgcacactgtacccggaggcccaggtgtgcgacgatatcatggagtctaatgcccaaggatgtagactgatcctgcctcaaatgccaaaagctctgttcaggaagaaagtgatcttggaagataaggtcaaaaacttctacacaagactgcctttccagaaactgatgggaatcagcattcggaataaagtgcccatgtccgaaaagtcgatctcaaacgggttctttgagtgtgaaagacgttgcgacgctgatccttgctgcaccggattcggctttctgaatgtatctcagttaaaaggaggcgaggttacatgcctcacactcaattccctgggcatccaaatgtgctcggaggaaaatggcggagcgtggaggattctggactgtggctcacccgacattgaggtccacacttatcctttcggttggtaccagaaaccgatcgcccagaataatgccccttccttttgccctctggtggtgctgccttctctgacagagaaggtatctttggattcttggcagtcacttgcattatccagtgtcgtggtggacccctccataagacatttcgacgtcgcacatgtctcaaccgctgccacctccaacttttctgctgtgagagatctgtgcctgtccgagtgttcccaacatgaggcatgtctcatcaccactctccaaacccagcccggtgccgtgcgctgtatgttttatgccgatacccagagctgtacccacagcttacagggccagaactgcagactgctgctacgcgaagaggccacccacatctaccggaaacccggaatctcgttgctttcatatgaagcttcagttccatcagttcccatttctacacatggcagattgctcggcagatcgcaggctatccaggtggggacatcatggaaacaggtggatcagttcctgggtgtgccatatgctgctccacctctggcagaacggcgtttccaggcccctgagccgctgaactggacgggaagctgggacgcatccaagcccagggctagctgttggcagcccggaaccagaacgtccacgagtccaggcgtctccgaagattgtttatatctgaacgttttcattccgcaaaatgttgccccaaacgccagcgtgcttgtatttttccataacacaatggatagagaggaaagtgagggatggcctgcaattgatggctcatttctggccgcagtgggtaacctcatagtggtgactgccagctatcgggttggggtttttggcttcctgtcatccgggagcggggaagtgtccggtaattggggcctccttgaccaagtcgccgcactgacatgggtccaaacccacattcgcggattcggtggagacccccgaagggtttccctggcggctgatcgaggcggagcggatgttgcgtccattcatctcctcaccgctcgcgctaccaatagccagttgttccgcagagccgtccttatgggcggaagcgcactctccccagctgctgtaatctcacatgaaagggcgcagcaacaggccattgcccttgccaaggaggtcagctgtcccatgtcctcttcccaggaagtggtcagttgtctgagacagaagcccgcaaacgtgctcaacgatgcacagactaaacttttggcagtgagtggtccatttcactactggggccctgtgatagacggccactttctcagagaacctcctgccagggcactgaaaaggagtctgtgggtggaggtcgatctattgattgggtccagtcaggatgacggactcattaaccgcgcaaaggccgtgaagcaattcgaagaatcaagagggcgaacaagctcaaaaacagcgttctaccaggctctgcagaacagtctaggaggggaggattccgacgccagagtggaagccgcagccacgtggtattattctcttgaacattctacggacgactacgctagcttttctagagccctggagaacgccacacgggattactttatcatctgtccaataatcgacatggcctcagcctgggcaaagcgtgctcgcggtaatgtgttcatgtaccatgctcccgagaattatgggcacggcagcctggaactcctggccgatgtgcagtttgcactgggcctgcccttttaccccgcatatgagggccagttcagcttggaggaaaagtcactgtcccttaagataatgcaatatttctcgcactttatcagaagcggtaacccgaattacccttacgaattctccagaaaagtccctacattcgccacaccctggcctgactttgtgcccagggccggaggcgagaattataaggaatttagcgaactgctgcctaatcgccaggggttaaagaaggcggactgctcattctggtctaagtacataagttctcttaaaacctctgccgacggagccaagggtggccaatccgctgaaagtgaggaagaggagctgacagccggatctggtttgcgagaggatcttctgagcctgcaggagcccggatccaaaacatattctaaata

SEQ ID NO: 244053 - DNA, 2664 bp, synthetic construct
  misc_feature 1..2664: note = Description of Artificial Sequence: Synthetic coding sequence
  source 1..2664: mol_type = other DNA
atggctctggtacttgaaatctttaccttgctggccagtatttgctgggtttccgcgaacatctttgaataccaggtcgacgcccagccacttcgcccatgcgagctacagagggaaaccgcctttttgaaacaggccgactacgtccctcaatgcgctgaggacggaagttttcaaacagtccagtgtcaaaacgatggcaggagctgctggtgcgtgggcgcaaatggctcagaagtgctcggcagcagacaaccagggaggcctgttgcttgtctaagtttctgtcagctgcagaaacaacaaatactcctctccggctacatcaactctactgataccagttatcttccccaatgccaggattccggggattacgctcctgtacagtgcgatgtgcaacaggttcagtgctggtgtgttgacgcggagggcatggaggtttacggaacccgacagttgggcagacccaagcggtgccctaggtcatgtgagatccgcaacaggcggctcctgcacggagttggagacaagtctccgccacagtgtagcgcagagggggaattcatgccagtccagtgcaaattcgtcaacacaacagatatgatgattttcgatctggtacacagttataacagattccctgacgcattcgtgaccttcagctctttccagcgtagattccccgaagtgtccggctactgccattgcgccgacagtcaaggacgcgagctggcggaaacgggcctcgaattgctcctggatgaaatttatgacactattttcgcagggttagatctgccatccacttttactgagacaacgctctatcggatcctccagcgccgatttctagccgtacagagtgtaatctccggcaggtttcggtgccccaccaagtgtgaggtagaacgctttacagctacctccttcggccacccatatgtgccgtcctgtcgcagaaatggggactaccaagcagtccaatgccagaccgaagggccttgctggtgtgtcgatgcccaggggaaggaaatgcacggcacaagacaacaaggcgagccaccatcctgtgctgaaggacagtcatgcgcaagtgagaggcagcaggcattatccaggctttatttcggtacatcgggctacttttcgcagcacgacctgttctcctcaccggagaagcggtgggcctccccacgcgttgccaggttcgctacgtcctgcccccctaccatcaaggagttgttcgtggactcaggccttctgagaccaatggtcgagggccaatcccagcagttcagtgtgtctgagaacctgcttaaagaggctattagggccatattcccttctcgcggacttgctagactggcactccagttcacaacaaatcctaagagacttcagcagaatttattcggcggaaagttccttgtgaacgttggacagtttaacctcagtggagcactcggtacaaggggcacatttaacttttcccagttcttccagcagctgggcctggcttccttcctcaacggcggaagacaggaagacctcgcaaagccactatccgtgggactggattccaacagttcgactgggacccctgaggcggctaagaaagatgggaccatgaacaagccgaccgtaggcagtttcggatttgagataaacctccaggagaaccagaatgccctgaagtttctggcttcgctcctggaactaccggaatttttattgtttctacagcatgcgatcagtgtgccagaagatgtcgcgagggacctaggggatgtaatggaaaccgtcctctcatctcaaacttgcgagcagacccctgaacgcctcttcgtgccttcatgcacaacagagggaagctacgaggacgtgcagtgtttttcaggcgaatgctggtgcgtgaattcctggggaaaggagcttccaggcagcagagttcgcggagggcagccaaggtgtcctaccgactgtgaaaagcaacgggctcggatgcaatcccttatggggtctcagcccgctgggtcaaccctgttcgtcccagcttgcacaagcgaggggcactttctcccggttcagtgttttaattcagagtgttattgcgtcgatgcagagggccaagcgattccgggtacccgctccgcaatcggaaaacccaaaaaatgccccacaccctgtcagctgcagagcgaacaagcatttctgcgcaccgtgcaagcactgcttagtaacagcagtatgctgcccacactgagtgacacttatgagggacagtttagtctggaagagaagtccctcagtttaaagattatgcagtatttttcacacttcatcagatcaggaaaccccaactacccctatgaatttagccgtaaagtgcctacctttgcgacaccttggcccgattttgtgcccagagccggtggtgaaaactataaggaattttctgaacttttgcctaaccggcaggggcttaagaaagcggactgttctttttggtctaagtatatttcctctctcaagacttctgctgatggcgcaaagggaggccagtccgctgagagtgaggaagaggagcttactgcgggaagcgggctacgagaagacctgctttccttgcaggagcctggcagcaaaacttattccaagtag

SEQ ID NO: 244054 - DNA, 3417 bp, synthetic construct
  misc_feature 1..3417: note = Description of Artificial Sequence: Synthetic coding sequence
  source 1..3417: mol_type = other DNA
atgatgcagaagttcgaaaaagtcccggagtccaaggtcatctttgatgctaatgccccagtggctgttagatccaaggttcccgattccgaatttccagtgatgcagtgcctgacagattgtacggaggacgaagcatgctcattctttacagtgtccaccacagagcctgaaatttcgtgtgacttctacgcctggacctctgacaatgtcgcttgcatgacgtccgaccagaaaagagatgctttaggcaatagcaaggcgacatcgtttggaagcctgagatgccaggtgaaagtgaggagccacggacaggacagccccgctgtctaccttaagaaaggcgcaatcatttgtggcctcttgtcttcgccatcagtactgctttgcaacgtcaaggattggatggatccctccgaagcatgggctaacgccacgtgtcccggtgttacatacgaccaagaaagccatcaggtcatcttgcgccttggtgaccaggagttcatcaagtctctgacccctttagaaggcacacaggataccttcaccaactttcagcaagtttacctttggaaagattccgatatgggatcaaggcctgaaagtatggggtgtaggaaagacaccgttcccaggccagcatcgcctacagaagctggactcacaacagaactgttcagccctgtagatttgaatcaagttattgttaatggcaaccagagcctgtcctcccaaaagcactggttgtttaagcatctattctctgctcaacaggcaaacctctggtgtctgtcacggtgtgtgcaagaacattccttttgtcagctcgccgagatcactgaatctgcatccctgtactttacgtgtacgctttaccctgaagcacaggtctgtgacgacattatggagtctaacgcccaaggatgccgtcttattctgccccaaatgcccaaggcactgtttcggaagaaagtgatactggaggataaagtcaagaacttctacacgcggctccccttccagaagctcatgggtattagcatcaggaacaaggtgcctatgtccgagaagtctatatcgaatggcttttttgaatgcgagcgccgttgcgacgccgacccttgttgcaccgggtttggcttcctgaatgtttcgcagcttaagggcggagaggtcacatgtttgaccctcaactccttaggtatccagatgtgcagcgaagaaaatggaggcgcatggagaatcttggactgcggttcccctgatatcgaggtccatacatacccatttgggtggtaccagaaaccaatagctcagaacaatgctcccagcttttgccccttggttgtgctgcctagtctaacagaaaaggtgagtctcgattcatggcaatccctcgctttgtcttctgtggtggtagatccctccatccggcacttcgacgtcgcccacgtaagtactgccgctacgtctaacttttccgcggtgagggacctctgcctctctgagtgttcacagcatgaggcttgtctgatcaccaccctgcagacccaaccaggggcagttaggtgcatgttttacgccgacacccagagctgcacgcattctttgcaaggtcagaactgcaggttactattaagggaggaagctacccatatctatcggaaacccggaattagcctgctgagttatgaagcctctgtcccttccgtgcctatctctacccacgggaggctccttgggaggtcccaagctatccaggtggggacttcctggaagcaagttgaccagttcctgggggtcccctacgctgcgccacctctggccgagagacggtttcaagcacctgagcctctgaactggactggtagctgggacgcctcaaaacctcgggcatcttgctggcagcccggtacccgcacaagcacatcgcctggtgtgagcgaagactgtctctacctgaatgtattcattcctcagaatgtggcaccaaatgcctctgtgctggtttttttccacaatacaatggatcgcgaggaatctgaaggatggccagccatcgacgggtcatttctggccgcagtcggcaatttaatcgtggtgaccgcttcctatcgcgtaggggtctttggatttctgtcctctggatctggtgaagtatcaggaaactggggactgctagatcaggtggcagcgcttacctgggtacagacccacatccgcggtttcggcggtgacccacggcgtgtgtccttggccgcagaccgtggcggagccgatgtggcctctatacaccttctgactgcacgcgcaactaactctcagctgttcagacgtgctgtgctgatggggggtagcgccctctctcctgccgcagtgatttcccacgagagggctcagcagcaggcgatcgcattggcgaaggaggtgtcatgccctatgagttcctcacaggaagtggtgtcctgcctgcgccagaagccggcaaatgtgctgaacgacgctcaaaccaagttgctggctgtttcaggtccctttcattactggggtccagttattgatggccactttctgagggaacccccagcccgagccctgaaaaggtctctctgggtggaagtggatctgctaattgggagctctcaggacgacggactgatcaacagggcaaaggctgtaaagcagtttgaggaatccagaggcagaacaagctccaaaacagccttttaccaggctctgcaaaactcactgggcggagaggattcggacgcaagagtagaggcagcagcgacttggtattattcccttgaacactcaacagatgactatgcttcctttagtagagccctggagaatgccacccgggactactttattatatgtccgatcattgatatggcgagtgcctgggcaaaacgcgcacgagggaatgtatttatgtatcacgcacccgagaactacggacacgggagcctggagctgcttgccgacgtccagttcgccttagggctgcccttctacccagcctatgaaggacagttcagccttgaagagaaatcactgtcacttaagatcatgcagtactttagtcattttatcagaagtgggaatcctaactacccttacgagttcagccggaaagtcccaactttcgccaccccttggcctgactttgtgcctcgggctggaggagaaaattataaagaattttcggaacttttaccaaaccgacaaggcctgaagaaagcggactgtagcttctggtcaaaatatatcagcagcttgaagacgtcagccgatggcgcaaagggaggacagtctgctgagagtgaagaggaagagctcactgctggctctggactccgcgaagacctgctttcattgcaggagcctggatccaagacctactctaaatag

SEQ ID NO: 244055 - DNA, 4724 bp, synthetic construct
  misc_feature 1..4724: note = Description of Artificial Sequence: Synthetic coding sequence
  source 1..4724: mol_type = other DNA
atacccagaaagccgatttccaagagaccagtgcggccatccctccccagatcccctcggtgtcccctgcccttcaacgccagcgaggtggtgggcggtaccatcctatgcgagaccatctccgggcctactgggtcagctatgcagcagtgtcagctgttatgtcggcagggatcttggtctgtcttcccgcctggccctctcatatgttctcttgagagcgggagatgggaatctcagcttcctcagccaagagcttgccagcgaccacagctatggcaaaccatacagacccagggccacttccagctgcagttaccaccaggaaagatgtgcagcgcggactacgcagatctgctgcagacattccaggtgtttattttggacgaactgaccgcccgtgggttttgtcagatccaggtaaagacctttgggactttagtaagcatcccagtgtgtaacaactcctcagtccaggttgggtgtttgacgcgtgagagattaggtgtgaatgtaacatggaaatctcgcttagaggatattcctgtggctagcctgcccgacctgcacgacattgaacgggcactggttggaaaggacctgcttgggcgatttacagacctcatccaaagcggaagtttccagctacatttagactcaaagacatttccagcagagaccatcagatttctgcagggagatcactttggtacttctcctcggacctggtttgggtgcagcgagggattctatcaggttctcaccagtgaggcttcacaagatggcctcggctgtgttaaatgcccggagggtagctattcccaggacgaagaatgcataccttgccccgtcggattctatcaggagcaggccggttccctcgcatgcgtgccctgccccgtcggcagaacaaccatctcagccggtgcattttcacagacacattgcgtcaccgattgtcagcgcaacgaggccggtctgcagtgcgaccaaaatgggcaataccgcgcttcacaaaaagatagaggctcaggaaaagccttctgcgtcgacggagagggacgaagactgccatggtgggaaacggaggccccactcgaggactctcagtgtctcatgatgcagaaattcgagaaagtccccgaatccaaggtaattttcgacgccaacgcccctgtggctgtccggagcaaggtgcctgacagcgaattcccagtcatgcagtgtcttacggactgcacagaggatgaggcctgcagttttttcactgtgagtacaactgagccggaaatcagctgcgacttctatgcttggacttccgacaatgtcgcctgtatgacctcagatcagaaaagagatgccctgggtaacagcaaagccaccagttttggctccctgaggtgccaggtgaaggtcaggtcacacggtcaggacagtcccgctgtatatttgaaaaaagggcaagggtctacaaccacgctccagaagcgatttgaaccgacaggctttcagaacatgttatcaggactctataatcctattgtattttctgcttcaggtgcaaatcttaccgacgctcatttattctgcctcttagcttgtgatcgggacctgtgctgcgacgggttcgtgttgacccaggtccagggcggagcaatcatctgcgggctcctcagttccccctccgtgctgctttgcaatgtgaaagattggatggacccgagcgaggcttgggcaaatgcaacctgtccaggcgtgacatatgatcaggaaagccaccaggttattctgcgcctcggggatcaagagttcatcaaatccctgacaccactggagggtacacaggataccttcacaaattttcagcaggtgtatctgtggaaagattccgatatgggatcccggcctgagtccatggggtgtagaaaagacacggttccccgtcccgcttccccaacagaggcaggactgacgaccgagctctttagccctgtagacctgaatcaggtcattgtcaacggcaatcagtctctttcaagtcagaaacactggctgtttaagcacctgttttcagcacaacaggcaaatttgtggtgccttagcaggtgtgtacaagaacactccttctgccagctggcagaaattaccgaatcagcctctctctacttcacatgtactctctacccagaggcccaagtgtgtgacgacatcatggaatccaatgcgcaggggtgtcggctcatattgcctcagatgcctaaagccctcttcagaaaaaaggtgattctggaggataaggtcaagaatttctacacaaggcttccctttcagaaactgatgggcatcagcattaggaacaaggtccccatgagtgagaagtctatttccaatggatttttcgaatgcgaacgaaggtgtgatgcagatccgtgctgtacaggattcggattccttaacgtttcccagctgaagggaggggaagtcacgtgtttgaccctgaactctctcggaattcagatgtgcagcgaagaaaacggaggagcatggagaatcttggattgcggaagccccgacatcgaggttcacacttacccctttggctggtaccagaaacccatcgcacaaaataatgccccttcgttctgtccgctcgtggttttaccctcactgacagaaaaggtctctctggacagctggcaatctctggccctgtcctcagtcgtcgtcgatccttccatccggcactttgatgtcgcccacgtttcaacagctgccaccagtaatttttcggccgttcgggatctgtgtctctcagagtgcagccagcatgaagcatgccttatcactacactccagacccagcccggagctgtgagatgcatgttctatgcagacactcagtcatgtacacactctctgcagggtcagaattgtcgactgcttctaagagaagaggctacccacatctatagaaaaccagggatttccctgttatcctacgaagcctcggtgccctctgttcccatcagcactcacggtcgccttctcggaagaagtcaggccatacaagtcggtactagctggaaacaggtggatcagttcctgggggtgccctacgccgcaccccctctggctgaaaggcgcttccaggccccagagccactaaattggactggctcctgggatgcttctaagcccagagcatcatgctggcagcctgggaccaggacgtcaacctcacctggcgtgagcgaagactgtctctatctgaatgtattcatacctcaaaatgtagcaccgaatgcaagcgtcctggtgttctttcacaatacaatggacagagaagaatctgaagggtggcccgctatcgacgggtcattcctggctgcagtggggaatttaattgtggtgaccgcctcctatagggtcggggtttttggctttttgagcagcggatctggggaggtgtcagggaactggggtctgctggaccaggtggctgctctgacctgggttcagacgcatatacgaggattcgggggagacccaagaagggtctccctagctgcggaccgtggaggggcagatgtagcgtccatccatctgctcaccgcacgggctactaattctcagttgtttaggcgcgctgtgctaatgggaggcagtgccttatcccccgcagcagtcatttctcatgagagagcacagcagcaggccatagcactggctaaggaggtctcctgtccgatgagctcttcccaggaagttgtgagctgtctcaggcagaaacccgctaacgtcctgaatgatgcccagaccaagttactggcggtgtcagggccttttcactactggggtcctgtgatcgacggtcactttttgagggagcctccagcccgtgcactgaagaggtctctgtgggtagaagtagacttgctgattggatcaagtcaggatgacgggcttattaatagagctaaggccgtgaaacagttcgaggagagtcgaggacgaaccagctcaaagaccgctttttaccaggctcttcagaatagcctgggaggagaagattccgacgcgagagtagaagcagccgctacctggtattacagcctggagcatagcactgacgactacgcctcatttagccgtgcactcgaaaacgctacccgggattactttattatctgcccaatcatcgacatggcctccgcgtgggcaaagcgcgcacgtgggaatgtatttatgtatcatgcccctgaaaattatgggcatggaagtctcgaactgttggcagatgtgcagtttgcattgggcctgcctttctatcctgcttacgaggggcagttcagtctggaggagaagtcgctatctctcaaaatcatgcagtatttctctcacttcataagatccggtaatcctaattacccctacgagtttagtcgcaaagtccccacattcgctactccttggccagattttgtgccaagggccggaggggaaaactataaagaattttccgagttgttacctaacaggcagggtctgaagaaagcggattgctccttctggtctaagtacattagctctcttaagacgagcgcagacggagcgaaaggaggacagtccgccgaatctgaagaggaggagcttaccgctggctccgggctgcgtgaagaccttctgtcactgcaggaacctgggtctaaaacttattctaagta

SEQ ID NO: 244056 - DNA, 1356 bp, synthetic construct
  misc_feature 1..1356: note = Description of Artificial Sequence: Synthetic coding sequence
  source 1..1356: mol_type = other DNA
atggaacagaagccgagtaaagtcgaatgcggcagcgacccggaagagaattctgcgcgttcccctgacggaaaaagaaagagaaaaaacggtcagtgcagccttaaaaccagcatgagtggctacatcccttcatatcttgataaagacgaacagtgtgttgtctgcggagacaaagctactgggtaccactaccgctgtatcacgtgtgaaggttgcaagggctttttccggaggacaattcagaagaatcttcatcctacctattcatgcaagtatgattcctgctgtgtgattgacaaaatcacccggaaccagtgtcagttgtgtagattcaagaagtgcattgcagttgggatggctatggaccttgtgcttgatgactctaagagagtagccaaaagaaagctgatagaacaaaatcgggagaggaggaggaaggaagaaatgatccggagcctgcagcagaggcccgaacctacacccgaggaatgggatctgattcatattgcaacagaggcgcatcggagcactaatgcacagggctcacactggaaacagaggcgaaaattcctgcccgatgatatcggccaatctcctatagttagtatgcccgacggagacaaggtggacctggaagctttcagtgagtttaccaaaataattacacccgctattaccagagttgtggactttgccaaaaagctgccaatgttttccgaacttccatgtgaagatcagattattctgttaaaaggttgctgcatggagatcatgagtctccgcgctgcagtgcggtacgatcccgaatcggataccttaacccttagcggagaaatggcagttaaaagagagcagctgaaaaatggcggtctgggagtcgtgagtgatgcgatcttcgagttgggaaaatcccttagcgcttttaaccttgatgacactgaagtcgcactactacaagccgtgctccttatgtctactgatcgatccgggctgctctgtgtcgacaagattgaaaagagccaggaggcttacctccttgccttcgaacactatgtgaaccaccgtaagcataatattccacacttttggccaaagctgcttatgaaaggcccacaggtgcgccagctagagcagcagctgggagaggccggaagtctgcaggggcctgtgctgcagcaccagtctccaaagagcccccaacagcggttacttgaattactacaccggtctggaatcctgcatgccagggcagtttgcggcgaagacgactcgagtgaagccgactccccgtcctccagtgaggaagaacccgaggtctgtgaagatctggctgggaatgccgcaagcccttag

SEQ ID NO: 244057 - DNA, 5939 bp, synthetic construct
  misc_feature 1..5939: note = Description of Artificial Sequence: Synthetic coding sequence
  source 1..5939: mol_type = other DNA
atgagctcatggcttggaggacttggaagcggtctgggacagtctctgggacaagtcgggggatcactggccagccttactggtcagataagtaatttcactaaggatatgctcatggagggtactgaagaagtcgaagccgaactgcccgacagtaggacgaaggagattgaggccatccatgcaatcctccgaagcgagaatgagagacttaaaaagctctgtaccgatctggaagaaaaacacgaggcatcagaaattcagattaaacaacagtccactagttacaggaaccagctccagcagaaagaagtggagatttctcaccttaaggcaagacagattgctctgcaggaccaactcttaaagcttcagtccgcagctcagtctgtgccgtctggggcaggcgttcccgcaaccactgcctctagctccttcgcctatgggatcagtcatcacccctccgcatttcatgatgacgacatggacttcggagatattatatcaagccaacaggaaatcaacagactgagcaatgaggtgtcccggcttgagtccgaggtgggccactggaggcacatcgcccagactagcaaggctcaaggcacagataatagcgaccagtcagagatctgcaagcttcaaaacattattaaggagttaaaacagaaccgctcccaagaaatcgatgaccaccagcacgagatgagtgtgctgcaaaacgcacaccaacagaaacttaccgaaatttctcgcagacatcgcgaagagctctccgattatgaagagagaatcgaagaattagagaatcttctgcagcaaggtggctctggggtgatcgagaccgacctcagtaagatatacgagatgcagaaaacgatccaagttctgcagatagagaaggtggagtccactaaaaagatggagcaactggaggacaaaataaaggatattaataaaaagttatccagcgccgagaacgatagagatatactgaggagggagcaggaacaactaaatgtggaaaagcggcagatcatggaggagtgtgagaatttgaaactggagtgtagcaaactgcagccatccgcagtgaaacagtctgacactatgaccgaaaaggaaaggatactggcgcagagtgccagtgtggaagaagtttttagactccaacaggcacttagtgacgccgagaatgagatcatgaggctttccagtctgaatcaggataactcgcttgccgaagataaccttaaactgaagatgagaatcgaggtgttggaaaaagaaaagtcacttctgagtcaggaaaaagaggaactgcagatgagccttctgaagctcaacaatgaatacgaggtgataaagagcacagccactagagatattagcctcgattccgagttgcacgacctccgcctgaatctggaggcgaaggagcaagaactaaaccagtctatttcagagaaggaaactctcatcgccgagatcgaagagctggatagacagaatcaggaagcaaccaagcacatgattctaataaaagatcagctgagtaaacagcagaacgagggcgatagcattatctctaagctgaaacaagacctaaacgatgagaagaaacgagtccaccagctggaggacgacaagatggatatcacaaaggaattagatgttcaaaaggaaaagctaatacaatcagaagtggctctcaatgacctgcacctcacgaagcagaaactcgaggacaaggtggaaaacctggtggaccagctgaacaaatcgcaagagtcgaacgtcagcattcagaaggagaatctggagcttaaagagcacatacggcagaacgaagaagaacttagccgaattagaaatgagcttatgcagagcctaaaccaagactccaattctaatttcaaggacactctgctcaaagaaagggaggctgaagtgcggaatctcaaacagaatctctccgaactcgagcaactcaatgagaacctgaagaaggtcgcctttgacgtgaaaatggagaacgagaagctagtactggcatgcgaagacgtcaggcatcagctcgaagaatgtctggcagggaataaccagctcagtctggagaagaacactatagtcgaaactctcaaaatggagaaaggagagattgaggcagaactgtgctgggccaagaaaagactgcttgaggaggccaataaatatgaaaagacaatcgaggaacttagtaacgcacggaacttgaatacaagtgccctgcagctggagcatgaacacctcatcaagttaaaccagaagaaggacatggagatcgccgaattgaaaaaaaacattgagcaaatggatacggatcacaaggagaccaaggatgttttgtcaagctccctggaggagcagaagcagttgacccagctaatcaataagaaagaaatttttatagaaaaactgaaagaaaggtcctccaagctgcaggaagagttagacaagtactcgcaggccctcaggaagaatgagattctgaggcaaaccatcgaggagaaggataggagtttgggttccatgaaagaggagaacaatcatctccaggaggagctggaacggctgcgtgaagaacagagccggaccgccccagtagccgatcccaagactcttgattccgtaactgagcttgcatcagaggtctcccaacttaacacaataaaagagcacctggaggaggagattaagcaccatcagaagattattgaagatcagaaccagagcaaaatgcagctcctgcaaagccttcaagagcaaaagaaggaaatggatgaatttcgctaccagcacgaacagatgaatgctacgcatacgcagcttttcttggagaaggacgaggagatcaagtccctgcagaagacaatcgagcagattaagacccaactccatgaggaacggcaggatatacagactgacaatagcgacattttccaggagacaaaagtccagtcactcaatattgagaacgggagcgagaagcacgatctgtccaaggcagaaaccgagagattagtcaagggtataaaagagcgtgagctcgagattaaactcctaaacgaaaagaatatttctttaacaaaacagatcgatcagcttagcaaggacgaggtgggaaaactaacacagattatacagcagaaagacctggaaattcaagctctgcacgcccgaatctcttctacgtcccacactcaggatgtagtttacctgcaacagcagctgcaagcatatgcaatggagagggagaaagtttttgctgttcttaacgagaaaacaagagaaaactcccacttgaaaactgagtaccacaagatgatggatatcgtggccgctaaggaggctgccctgatcaaacttcaggacgaaaacaagaaattgtccacaagatttgagtcatccggacaggatatgttccgtgagacaattcaaaaccttagccgcataatcagggaaaaagacatcgaaatcgatgctttgtctcagaagtgccaaaccttactggccgtactgcaaacaagctcaactgggaacgaggctggcggtgtaaactctaatcagttcgaggagctgttacaggaacgggacaagctgaagcagcaggtgaaaaagatggaggaatggaaacaacaagttatgacaacggtgcagaacatgcaacacgagtccgcacagctgcaagaggaattgcaccagctgcaggctcaggtgttagttgactccgataacaattctaagctgcaggtggattatacaggcctcatccagtcatatgagcagaatgaaactaagctcaagaacttcggccaggaactggcgcaggtgcagcatagcatcgggcaattgtgcaacactaaggatctcctgctaggaaaattggatatcatttcacctcagctgtctagcgcgtcccttctgacccctcagtccgctgaatgcctccgcgctagcaagtccgaggttctgtccgagtcctctgagctgctgcagcaagaactagaggagcttaggaagagcctccaagagaaggatgccactatcagaactctgcaagaaaataatcaccgtctgagtgactccattgcggctaccagcgagttggagcgaaaagagcatgagcagacggacagcgagattaaacaactcaaagaaaagcaggatgtgttacaaaaactcttaaaggagaaagacttgttgataaaagctaaatcagaccagcttctgtcatccaatgaaaattttacaaacaaggtgaatgaaaacgaattgttgcggcaggctgtaaccaacctgaaggaacgaattctaatattagaaatggacatcggcaagctgaagggagagaacgagaaaatcgtagagacgtatcggggtaaagagacagaatatcaagcactacaagagacaaatatgaagttttcaatgatgctgcgcgaaaaggagtttgagtgtcactcaatgaaagagaaagcactggccttcgagcagctcctgaaggaaaaagagcagggaaaaactggggaactgaatcagctgcttaacgcagtgaagagtatgcaggagaaaaccgtcgtgtttcagcaggagcgggatcaggtcatgttggcccttaagcagaagcagatggagaataccgccctccagaacgaggtgcagcgactacgagacaaggagttcaggagtaatcaagagttggaacggctgcgcaatcatctgcttgaatctgaggatagttacacgagggaagcactggcagccgaggatagagaggctaagttaaggaaaaaggtcacagtactggaagagaagctggtgagcagcagtaatgccatggagaacgcatcacatcaggcatcagtgcaggtagagtccttgcaggagcagctgaatgtcgtgtcaaaacaaagagatgagacagctctgcagctcagcgtgtcacaggaacaagtgaaacagtacgcgctctcactggctaatcttcagatggtgctagagcattttcagcaggaggagaaagccatgtacagtgcagagctggagaaacagaagcagctgatcgctgagtggaagaaaaacgcagagaacctggaggggaaggtcatctcattgcaagagtgcttggatgaagccaatgctgccttggactcagctagccgcctgacggagcagctggacgtcaaagaggagcaaattgaagaactgaaacggcagaatgagctgcggcaggaaatgctggacgacgttcaaaaaaagctgatgtctctcgctaatagctccgagggcaaagtggataaagtgctaatgcggaatctgtttattgggcacttccacacgcctaaaaaccagaggcacgaagtgttgaggctgatggggtctatcctgggtgtgcgaagagaggaaatggagcagctgtttcatgacgatcagggtggcgttacacgttggatgacagggtggcttggcggtggatctaaatcagtgcccaatacgccgttgaggccaaaccagcaaagcgtggtcaactcctctttctctgaactcttcgtcaagtttcttgagacagagagtcacccgtcaattccgccaccaaaactctcagtccacgacatgaagccgctggactcccccggaagacgcaaaagggatacaaatgcgccagagtctttcaaggacactgctgagtctagatctggaagaagaacagatgttaatccattcctggctccgcgaagtgcagccgtgcccttgattaaccctgcaggtctggggcctggagggcctggccacctactattaaaacctatatccgatgtcctgcccaccttcacacccctgcccgcactgcctgataactcagctggagtggtactgaaagatttactgaagcagta

SEQ ID NO: 244058 - DNA, 5147 bp, synthetic construct
  misc_feature 1..5147: note = Description of Artificial Sequence: Synthetic coding sequence
  source 1..5147: mol_type = other DNA
atgagcgtcctccagaatgcccaccagcagaaactgaccgagatatctcggaggcaccgggaagaactatcagactacgaggagaggattgaggagctggagaacctgttgcagcagggaggcagtggagtgatcgagacagatctgtctaagatctatgagatgcaaaagaccatccaggtactgcagatagagaaagttgagagcaccaagaaaatggaacagttagaagataagattaaggacattaacaaaaaactttcctctgcagagaacgatcgagatatccttcgtagggaacaggaacagctaaatgtggagaaacggcagatcatggaggagtgtgaaaacctcaaactcgagtgctctaaattgcagccttccgctgttaagcagagtgacaccatgacagagaaagaaagaattctcgcacagtctgcatcggtggaggaggtctttaggctgcagcaggcgctgagcgatgctgagaatgagatcatgagactttcaagccttaaccaggaggaactgcaaatgagtctgctaaaattgaacaacgaatatgaagtcattaagagcactgccactcgagacattagcctcgattctgagctgcacgacttgaggcttaatttagaggcaaaggaacaggaattaaaccagagcattagcgagaaggaaacgctgatcgcagagattgaggagctggataggcagaaccaagaggcaaccaaacatatgattcttatcaaggaccagctgtcgaagcagcaaaatgagggagactccatcataagcaagctgaagcaggatctgaatgacgaaaaaaagagggtgcaccaactggaagatgataagatggacatcaccaaagagctcgacgttcaaaaagaaaagcttatccaaagtgaagtggcactgaatgatttacaccttacgaaacagaaactggaggacaaggtggaaaacctcgtggaccagttgaataaatctcaggaaagcaacgtaagcatccagaaggagaacctggagcttaaagagcacatccggcagaatgaggaagaactgtccagaattcgtaatgagttaatgcagtcactgaatcaggactcaaacagcaacttcaaggataccttactgaaggagagagaagccgaggtacgcaacctcaagcagaaccttagcgagctggaacagctgaacgaaaacctgaagaaggtggcgtttgatgtaaagatggaaaatgaaaaattagtgctggcctgcgaagacgtgcgacatcagcttgaggagtgcctggctgggaataaccagttaagcctggagaaaaacacgatcgtggaaactctcaagatggagaaaggggagatcgaggcagagttatgctgggctaagaagcgccttttggaagaagcgaataaatatgaaaaaaccattgaagaactaagtaatgcgagaaatctgaatacctccgccctgcaattggagcacgaacacctgattaagctaaaccagaagaaggatatggaaattgccgagttgaagaaaaacatcgaacagatggacactgaccataaggagactaaggacgtgttgtcaagctctcttgaagagcagaagcaactcacccaattgataaataagaaggaaatatttatcgagaagttgaaggagaggtccagcaaacttcaggaggaactggacaaatatagtcaggccttgcgcaagaacgagatacttcgccagactattgaagagaaggacagaagtctcgggagtatgaaggaggaaaacaaccaccttcaggaagagctggagcggcttagggaagaacagtctcgcactgcccctgtggctgaccctaaaacactagatagcgtgactgaactggcttctgaagtgtctcagctgaacactatcaaggagcacctagaggaggaaatcaaacaccaccagaaaattatagaggaccaaaaccagtccaaaatgcagctccttcagagcctgcaagagcagaagaaagaaatggacgagtttcggtaccagcatgagcagatgaacgctacccatactcagctatttctcgaaaaagatgaggaaattaagtctcttcagaagacaatagaacaaatcaagactcagctccacgaggaacgccaagacattcagaccgacaattccgacatatttcaggagacaaaagtccaatctttaaacatagagaacggatccgaaaagcacgatcttagtaaagccgaaactgagcggttggtcaagggtattaaggaacgcgaactagagataaaattactgaatgaaaagaacatttcccttaccaaacagatagaccagttaagcaaggatgaggtcgggaagctcacacagattatccagcagaaagaccttgaaatccaagcgctccatgctaggatcagctcgactagccatacccaggatgtggtctacctgcagcaacagcttcaggcatacgccatggaacgtgagaaggtgttcgccgtcctgaacgagaaaactcgagagaactcacacctaaaaacggagtatcataaaatgatggacatcgtagcagctaaagaggctgctcttatcaagttacaggatgaaaataaaaaactgtccacacggtttgaatcttctggacaggatatgtttcgagagactattcagaacctttctcgcataattagagagaaggatatcgaaatcgatgctttgtctcagaagtgccagactctgctcgccgttctacagacctcatccactgggaacgaagccggaggtgtcaacagcaatcagtttgaggagcttctccaagagagagataagcttaaacagcaggttaagaagatggaggagtggaaacaacaggtaatgacaactgtgcagaatatgcaacatgagagcgcacaactccaagaggagctgcatcagctgcaagctcaagtccttgtagactctgataacaacagtaaactacaggttgactacactggcttaatccaaagctacgaacaaaacgagaccaaactgaagaattttggccaggagctcgcccaggtacagcattccatcggccagttgtgcaatactaaggatctcttgttagggaagctggatatcatatctccccagttgtcttcagcatcactgctgaccccacagagcgccgaatgtctcagggcctcgaagagcgaagtgctcagcgagagcagcgaactgttacagcaagagctcgaggaattacgcaagtccctgcaagaaaaagatgctactatacgtaccctgcaggagaataatcatcgattgtctgatagcatcgctgctacatcagagctcgaacgaaaggaacatgaacaaacagactcagagatcaagcagttaaaggaaaaacaggacgtgctgcagaagctccttaaagagaaagacctgttaattaaagccaagtcagatcaattgctatccagtaacgagaactttacaaacaaagtaaatgagaatgagcttctgcgacaggccgtgacaaacctgaaagagcgcatactcattcttgagatggatattggcaagctgaaaggcgaaaatgagaaaatagtcgaaacttaccggggtaaggaaaccgaataccaggctctccaggagactaatatgaagttctccatgatgttgcgagagaaggagtttgagtgccacagtatgaaagaaaaagccctggccttcgaacagttgctgaaagagaaggagcaaggcaagaccggagagctgaatcagctgttaaacgccgtcaagtctatgcaggagaagactgtcgtctttcaacaggagcgggatcaagtgatgctggcacttaagcagaagcagatggagaacacagccctgcaaaatgaggtgcagcgattgcgagacaaagagtttcggtccaaccaggagttagaacggcttaggaatcatctgctcgagtctgaggattcttacacacgggaggccctcgcggctgaggatcgtgaagctaagttgagaaaaaaggtcaccgtcctcgaggagaagttagtcagttcaagcaacgccatggagaacgcatcccatcaagcctcagtccaagtcgagtcactgcaggagcagcttaatgtggtgagcaaacaaagagatgaaaccgccctccagctgtccgtgtcacaggaacaagtgaaacagtacgccctcagcctagctaatctccagatggtgttggaacacttccagcaggaggagaaagcaatgtactccgccgagctcgagaaacagaagcagctgattgccgagtggaaaaaaaacgccgagaacctggaaggcaaggtgatatctttgcaggagtgcctggacgaggccaatgctgctttggacagcgcaagcaggctcactgaacaactggatgttaaagaagaacagatcgaggagttgaagagacagaatgagcttagacaggagatgctggacgacgtccagaagaaactgatgagccttgcgaattcttcagagggtaaagtggacaaagttctcatgcggaacctgttcattggtcacttccacactcctaagaatcagagacacgaggtattgcgtcttatggggtccattctgggtgtgcggagggaagaaatggagcagctgtttcacgacgaccaaggaggagttacaagatggatgacaggatggctgggaggaggctccaaatcggtccccaacacccctctccgtcctaaccagcagagcgtagtgaattcttccttctccgagttatttgtcaagtttctcgagacagagtcccacccttcgattcctccaccgaagctcagcgttcacgacatgaaaccactggactcccccggtaggaggaagcgagatacaaatgcacctgagagcttcaaggacaccgctgagagtcgcagcggcagaagaaccgacgtgaatccctttttagcaccaagatctgctgccgtcccgctcataaatcccgcaggactcgggccaggaggccctggccacctcttgctgaagcccatctctgatgtcttgcctacgtttacgccactcccagcccttccagacaattcagccggagtggtgctcaaagaccttctgaagcagta

SEQ ID NO: 244059 - DNA, 5979 bp, synthetic construct
  misc_feature 1..5979: note = Description of Artificial Sequence: Synthetic coding sequence
  source 1..5979: mol_type = other DNA
atgagcaaccgccctaacaataacccgggaggatccctccggaggtcgcagcgtaatacagctggagcacagccccaggacgactctataggcggaaggtcatgctcttcaagttccgcagtcatagtaccacagccggaggatcccgatcgagctaacactagtgagcggcagaagactgggcaagtgcctaagaaggataatagccggggtgtcaaacgcagcgctagtccagactataataggacaaattctcccagctccgccaagaaacctaaggccttacagcatacagagagccctagcgaaactaacaaaccgcacagtaagagtaagaaacggcatctggatcaagaacagcaactgaaaagtgcgcagagcccgagcacatcgaaggcccatacgcgtaagtctggagcaacgggtggctctcgcagccagaaacgcaagcgcaccgagagtagctgtgtgaagtcaggctcaggaagcgaatccacaggtgcagaagagcggtcagccaagccaaccaaacttgctagcaagagcgctaccagcgccaaggcgggatgttcaaccatcactgatagctctagcgctgccagtactagttcctcctcgtccgcagttgcgtccgctagctccacggtgccccctggagcacgggtgaagcagggcaaagatcagaataaagctcggcgtagccgatctgcttctagcccctctcccagaagatcttcccgagaaaaagaacaatctaaaaccggaggtagctctaaatttgactgggctgctaggttttctcctaaagtttctctgcccaaaaccaaactctcattgccaggctcgtcgaaatccgaaacttcaaaaccagggccatccggcctccaggcgaaactggcctcactgcggaagagcacgaaaaagagaagcgagagccctcctgctgagctgccttcattgaggcgatcgacccgtcagaagactaccggtagttgcgcttcaacttctaggcgaggatctggactgggtaagaggggggcagcagaggcaaggcgtcaggaaaagatggccgatccagagtcgaaccaggaggctgtgaatagctcagccgctaggactgacgaagcccctcagggcgcagccggtgcagtgggtatgacaacaagcggcgagagcgaaagcgatgactcagagatggggaggcttcaggccctgctggaagccaggggactgccccctcacctgtttggacccctggggccaagaatgtcccagctcttccaccgtacaatcggcagcggagccagttccaaggctcagcagctgctacagggcttgcaggccagcgatgaatcccagcagctgcaggccgttattgaaatgtgtcaactgcttgtaatggggaacgaagaaaccctcgggggattccctgttaaaagcgtcgtcccagcgctcatcactctgctgcagatggagcacaacttcgatattatgaaccacgcatgccgcgctttaacttatatgatggaggctctgcctcgctcttccgcggtggttgtagacgctatccccgtgttcctggaaaagctgcaggtgatccagtgcatcgacgtcgctgaacaggctctcactgcccttgagatgctcagccgacggcattcaaaagcaatcctgcaggccggagggttggccgattgcctcctgtatctcgagttcttcagcatcaatgcgcaaagaaatgctctagccattgctgctaattgctgccagtcaatcacgcctgatgaattccactttgtcgccgatagcctcccgcttcttacacagcgtctgacacatcaggataagaaaagcgtggaaagcacatgtctttgttttgcaagactggttgataacttccagcatgaggagaacctcctgcagcaggtagcttctaaagatttacttacaaacgtccaacagcttctggtggttacaccaccaattctgagttccgggatgttcataatggtggtgaggatgttctcactgatgtgcagtaactgccctaccctcgcagtgcagctcatgaagcaaaacatcgcagagacattgcatttcctactgtgcggggcttccaacgggtcctgtcaggaacagattgatctggtgcccagatctccacaggaactatacgagctcacgtctttgatatgtgagcttatgccttgtctgcctaaagaaggcattttcgcggtggatacaatgttaaaaaaaggaaatgcgcaaaatacagacggcgctatttggcagtggcgcgacgacaggggcttgtggcacccatacaacaggatcgactctcgtatcatcgagcagatcaatgaagataccggtacagcgagggctattcagagaaagcccaatcctcttgctaactccaacacatccggttattcagagagcaaaaaagatgacgccagagcgcagctgatgaaggaagatccagaattagccaagtcattcataaaaactctgttcggtgtattatacgaggtatattcttctagtgctgggccagctgtccgccacaaatgcctccgcgcaattttacgcattatatactttgccgacgccgagctcttgaaagacgtgctcaagaatcacgccgtgtccagtcatattgcctcgatgctaagtagtcaggatcttaaaatagtcgtgggggctctgcagatggcggagattttgatgcagaaattgcccgacatttttagcgtatactttcgccgagaaggagtgatgcatcaagtgaagcatctagcggagtccgagtccctactgacctcacctcccaaggcctgtactaacggatccgggtccatggggtctaccacctcagtttccagtggcacagcaacagctgcaacacacgccgcagccgacctggggtcaccatcactgcagcattcccgtgatgactccttggaccttagtccccagggtcgcctatctgatgtccttaagcgaaagcgactacccaaacggggacctaggcgcccaaaatactctccaccgagggatgatgataaggtagacaaccaggctaaaagtcccacgaccacacaaagtccaaaatcctcatttctcgcctctttaaaccccaagacctgggggaggctgtcaactcagagcaatagtaataacattgaacctgccagaactgctggagggtcgggacttgcgagggccgcttctaaggacaccatttctaacaacagagaaaagatcaagggatggatcaaggagcaagctcacaaatttgtcgaaaggtacttcagcagtgagaacatggacggttccaatccggcacttaacgtcctgcagcgtctgtgcgccgcaactgagcagctgaacctgcaggtcgatggcggagcggagtgtcttgtcgaaattcggagcatcgtgtctgagtcagatgtgagtagttttgagatacaacactctggattcgtgaagcagcttctcctgtacctcaccagcaagagtgaaaaggacgcggtgagcagggagattcgcctcaaaaggtttcttcacgtgtttttttctagcccactgcccggagaggagcccattggacgagtggagcctgtagggaacgcaccactcctggctttggtgcacaaaatgaacaactgtttgagtcaaatggaacagtttccggtcaaggtccatgacttcccatcagggaatggtactggtggcagtttcagtttaaaccgtggatcccaggctctgaagtttttcaatactcaccaacttaagtgtcagctgcagagacacccagactgcgctaatgtgaaacagtggaagggagggcctgtcaagatcgacccactcgccctggtacaggccatcgagcgataccttgtggtcaggggttatggcagagtgcgagaagatgatgaggattctgatgacgatggcagtgatgaagagatcgacgaaagcctggctgcccagttcctgaattcagggaatgtccgacatcggctgcagttttatataggcgaacatctgttgccatacaatatgaccgtgtaccaagcagtgaggcagttttccatccaggctgaggacgagcgcgagagcaccgatgacgaaagcaaccccttggggcgagccggaatctggacaaagactcacacgatttggtataagcctgtcagagaggatgaagagagcaataaggactgcgtggggggtaaaagaggcagggcacaaaccgcccctactaagacctccccgcgaaatgcaaagaagcatgatgagctgtggcatgatggcgtctgccccagtgtttctaatccgctagaggtttacctgattcccacacctcccgagaacatcacttttgaagacccttccctggacgttatcttgcttctacgcgttctgcatgctattagtcggtactggtattacctgtacgacaatgctatgtgcaaagaaatcattcccacttctgaatttattaattctaaactaacagcaaaagccaacagacagcttcaggatcccctggtgataatgaccgggaacattccgacctggctgactgagctcggaaaaacatgtcccttcttttttccttttgatactcggcagatgctgttctacgttacagccttcgatagggatagggcgatgcagcgcctgctggatactaatccggaaatcaaccagtcggacagccaggattcccgggtagctccaagactggaccgcaaaaagagaaccgtgaacagagaagagctccttaagcaggccgagtcagttatgcaggatctgggcagctcgcgtgctatgcttgaaattcagtacgagaacgaggtgggaaccggcctcggtccaaccctcgagttctatgccctggtgagccaggaattgcagagggctgacctagggctgtggcggggagaagaggttactctgtccaaccccaaaggcagccaggaagggaccaagtatattcagaacttgcaggggttgttcgccttgcccttcggacgaacggccaaacctgcccacatcgcaaaagtcaagatgaaattcagatttctgggaaaactaatggctaaggcaattatggactttagactggtggatttgccattaggcctacctttctacaagtggatgcttaggcaagagacatccctcactagccatgacctttttgacattgatccggtggtggcacggtcagtgtatcacctcgaagacatagtgcggcaaaagaaaagacttgagcaagataagagccagaccaaggagtccctgcagtatgcgctggaaaccctgaccatgaatggctgcagcgtggaagacctgggccttgatttcaccctgccaggttttccgaatatcgaactgaagaaaggaggaaaggatattccagtgacgattcacaacctcgaggaataccttagattggtgatcttttgggccttaaacgaaggagtgtccaggcaatttgactcatttcgggatggtttcgaatcagtctttcctttatcgcacctgcagtatttttaccccgaggagcttgatcaactcctgtgtgggtcgaaggccgatacatgggatgctaaaacactcatggagtgttgccggcctgatcacggttatacacatgatagccgtgccgttaaattcctatttgagattttgtcaagctttgacaacgaacagcagcgtctgttcctccaattcgtgaccggaagtccacggctgccggttggaggctttcggtcgttgaatccgccactgactatcgtgagaaagacattcgagtcaacggagaacccagatgatttcctgccttccgtcatgacctgcgtgaattacctcaagctgcccgactactcatcaattgaaatcatgcgagagaaactgttgatcgcggcaagggaagggcagcagtcgtttcatctgtcatag

SEQ ID NO: 244060 - DNA, 300 bp, synthetic construct
  misc_feature 1..300: note = Description of Artificial Sequence: Synthetic coding sequence
  source 1..300: mol_type = other DNA
atgagtaatagacctaataacaatcctggaggcagcctaaggaggagccagagaaataccgccggagcccagccccaggatgactccatcggaggtcgatcgtgttcctcttccagtgccgtcattgtgcctcagcccgaggacccagatcgcgctaacacaagtgaaagacagaagactgggcaggtgccgaaaaaggataattcccggggtgttaagcggtcagctagccctgactataataggacaaacagcccatcatccgccaaaaagccaaaagccctgcagcacactgaatag

SEQ ID NO: 244061 - DNA, 6122 bp, synthetic construct
  misc_feature 1..6122: note = Description of Artificial Sequence: Synthetic coding sequence
  source 1..6122: mol_type = other DNA
atgagcaatagacccaataacaatcctggcggtagccttagaaggtcgcagcgaaacacggctggggcacagccccaggacgattccatagggggtagaagccacttgggacaggccaaacataagggctattctcctcctgagtcacgcaaaagcaattccaaagctccaaaagtccagtcaaataccaccagtgagctgtcgagagggcatctttccaaaagaagttgctctagtagctcggcggtcattgtaccacaacccgaggacccggacagagccaacacatccgagaggcagaagaccgggcaagtcccaaagaaggacaattctagaggtgtgaaacggtcagcatcgcctgattacaatcggactaattcccctagctccgccaagaagccaaaggcacttcagcataccgaatcgccatctgaaaccaataaaccccactctaaaagtaagaagcgccacttggaccaggagcagcaactcaaaagtgcgcagtcaccttctacttccaaggcccacactcgcaaaagcggtgccactggtggctcaaggagccagaagcgcaagcgaaccgagtcttcctgtgtgaaaagcggcagtggcagtgaaagcacaggtgctgaggagcgctcagccaagcccacaaagctggcctctaaatccgcaacctcagcaaaggccggttgctccaccatcaccgattccagcagtgcggcatctacgtcctccagcagctccgccgtggcttctgcctccagcacagtgccacccggtgctcgggtgaagcagggcaaagaccagaacaaagccaggcgttcccgctccgcgagtagtccatctccccgtagatcgtccagggagaaagaacaatctaaaacaggcggatcttctaagtttgattgggccgctcggttttctcccaaggtaagtctacccaagacgaagctgtctctgccaggctcctctaaatccgagacgtccaagccgggaccctccgggctccaggccaagttagcaagcctgcggaaatccactaagaagaggtcagagagtccacccgctgagctcccctcactccgtaggtctaccagacagaagactaccgggtcttgtgcatccacgagccgtcgtgggtcgggtctcggaaaaaggggagcagctgaggcgcgtcgtcaggaaaagatggcagaccccgagtctaaccaagaggcagttaattcatccgctgctaggactgacgaagccccacagggagcggctgcctcctcgagcgtcgccggagcagtcggcatgaccacttccggagagtcagagtcagacgactccgaaatggggcgactgcaggcactcctggaagcccgaggtctcccaccacacttgttcgggccactaggacccaggatgtctcagctgttccatcggacaatcggttctggcgcaagctccaaagcccagcaactcctacagggtctgcaggctagcgatgaatctcagcaactccaagccgtgattgaaatgtgccagctgctcgttatgggcaatgaagaaaccctcggagggtttcccgtgaagtcagtagtcccggctctaatcacactgctgcagatggaacataactttgatataatgaatcacgcctgtcgggcactgacgtatatgatggaggcacttcctaggtccagcgcagtggtcgtggacgcaattccagttttccttgagaagctgcaggttatccagtgcattgacgttgctgagcaggccctgactgccctggagatgttgtccaggcgccattccaaggccattctgcaggctggaggcctcgcagactgtctgctttatctggaattttttagtatcaatgcccagcgaaatgcattggctatagccgctaattgctgtcaaagcatcacacctgacgagtttcactttgtggccgactctcttcccctgctgactcagagactgactcaccaggataaaaagagcgttgagagcacatgcttgtgtttcgccaggcttgttgacaatttccagcacgaagagaatctgctgcagcaggtcgcttcaaaagatttgcttacaaacgtccagcagttactggtggtcacacctcctatcctctcctctgggatgttcatcatggtcgtgaggatgttttccctcatgtgctcaaactgcccaactctggctgtgcagctgatgaagcagaacatcgcggagacattacattttctgctctgcggcgcaagtaacggtagctgccaggagcaaattgatctggtcccacgctctccacaggagctttacgaactgacaagtctaatttgcgaattaatgccttgcttgccaaaggaaggtatcttcgccgttgacactatgctcaaaaaaggaaacgcccagaacaccgacggcgctatatggcaatggcgagatgatagggggctgtggcacccctataacaggatcgattctcgaatcattgaacagattaacgaggataccggcacagccagggccatccagcgcaaacccaacccactggccaactctaacacttcaggctactcagagtcaaagaaagacgatgcaagagcccaacttatgaaggaggaccccgagctagccaagagttttattaagaccctgtttggagtactttacgaagtctatagcagctctgcagggcctgctgtcaggcataaatgtctcagagctattctgcgaatcatctactttgcagacgcggaactgctgaaagatgtgctcaaaaaccacgcagtctcatctcacattgctagtatgttgagcagtcaggatttgaaaatcgttgttggagctctccagatggccgaaatcttgatgcagaagcttcctgacatcttttcagtctactttcgacgcgaaggagtgatgcatcaggtgaagcacctggccgaatctgagtccctactcacgagcccaccaaaggcgtgcactaatggatcagggtcaatggggagcacgacatctgtttcctcaggcacagctaccgccgcaacccacgccgcagccgacctcggttctccgagcctacaacatagtcgcgatgactccctggacttgtccccccagggacgtttatccgatgtcctgaagcgaaagaggctcccaaaacgaggccctcgaagacctaagtacagtcccccacgggacgatgacaaggtcgataatcaagccaagtctcccacaactacacagtcccccaaatccagctttctggccagtctgaaccctaagacctggggaaggctcagcacccaatctaacagtaataacattgaaccggctagaaccgcagggggttcaggattggctcgggctgcctctaaagacacaatctcaaacaatcgtgaaaagattaaagggtggataaaagagcaggcccacaagttcgtggaaaggtatttttctagtgaaaatatggacggaagcaaccccgcactgaatgtgctccagcggctctgtgccgcaaccgagcagctgaacttacaggtcgacggaggtgccgagtgccttgtggagatccgcagcatcgttagcgagagtgacgtgtcatctttcgaaatccaacatagcggtttcgtgaaacaactgcttttgtatctgacctccaagtcagagaaagacgctgtttcccgtgagattagactaaaacgcttcttgcacgtgtttttcagttcacctctgcccggagaggagcctatcggccgagttgaacccgtggggaatgcccctctgcttgccctcgtccacaagatgaataattgcttgtcccagatggaacagttcccagttaaagtgcacgatttcccttcggggaatggtaccggaggttccttctccctgaatcgtggctcccaggctctgaaatttttcaatacccatcagctgaagtgtcagctacagcgtcatccagattgtgcaaacgtaaagcagtggaagggaggtcctgtcaaaattgaccccctagcacttgtccaggccatcgagcgctatctagtggtgaggggttacggccgagttcgagaggatgatgaggatagtgatgatgatggatccgacgaggaaatcgatgagtctctggctgcccaattcctcaactctgggaacgttcgtcaccggctccagttttatattggcgagcacctgctgccttataatatgaccgtgtatcaggcagtaaggcagttttccattcaagcggaggatgagcgcgagtctacggatgatgagtccaacccgctgggcagggctggcatatggactaagacccatacaatctggtacaagcccgtacgcgaggatgaggaatcaaacaaagactgtgtgggaggcaaacgcggacgagctcagaccgcaccaactaaaaccagtccacggaatgccaaaaagcacgacgagctgtggcatgacggcgtgtgcccctccgtgtcgaaccctttggaggtttacctcatccccaccccacccgagaacattacttttgaggaccctagtctcgatgttatcctccttctgagagtgctgcatgccatctcgcgatactggtattatttatatgacaacgccatgtgtaaggagataattccaacctccgagttcatcaattctaaacttaccgctaaggctaacagacaattacaggacccgttggtcatcatgactgggaatattcccacatggctgacggagcttgggaaaacctgcccatttttcttcccctttgacacgaggcaaatgttgttttatgttaccgcttttgacagggatcgcgctatgcaacgcctgttggatactaatcctgaaatcaatcagagtgacagtcaggattcacgcgtcgctcctagattggacaggaaaaagagaactgtgaacagggaggaactcctcaagcaagcagagagtgttatgcaggatctgggcagcagcagggcgatgttagagatccaatacgaaaatgaagtgggcaccggcctgggaccgaccctggagttctacgctctggttagtcaggaactccagcgcgcagaccttggcctgtggaggggcgaggaggttaccctaagtaaccccaagggctcccaggagggtaccaaatatatccagaacttacagggcctgtttgccctgcccttcggtcggaccgcaaagcctgcccatattgctaaggtcaaaatgaaatttcggttccttggtaagctcatggcaaaagctatcatggactttcggcttgttgatctaccactcggcctgcccttctacaagtggatgctgagacaggagaccagtcttaccagtcacgacctgtttgatatcgatcctgtcgtagctagatcggtgtatcatctggaggatattgttcgtcagaagaagcgtctggagcaggataagagtcagactaaagagagcctgcaatacgctcttgaaaccctgacaatgaacggctgcagtgtggaagatcttgggttagacttcaccctgcccggattcccaaacatcgagttaaaaaagggaggaaaagacatccctgttaccatacataacctagaagaatatcttcgcttggttatcttctgggccctcaacgaaggcgtcagccggcagtttgatagtttcagggacggcttcgagtcagtcttcccgctgagtcatttgcagtatttttatcccgaagaactggaccagctgctttgtggctctaaggctgatacttgggacgcaaaaaccctgatggaatgctgtaggccagatcatgggtatactcatgactcccgggctgtgaaatttctctttgaaatcctctcctccttcgataatgagcaacagagactatttctgcaatttgtgaccgggagtcccagactcccagttggtggtttccggtctctcaaccccccactgaccatagttaggaagaccttcgaaagtaccgagaaccctgatgatttccttccttccgttatgacttgcgtcaattacctaaagctgcctgactactcctcaatcgagataatgagagagaaactgctgattgcagccagggaaggccaacagtcgtttcacctctccta

SEQ ID NO: 244062 - DNA, 5168 bp, synthetic construct
  misc_feature 1..5168: note = Description of Artificial Sequence: Synthetic coding sequence
  source 1..5168: mol_type = other DNA
atgtcgaaccggcctaacaacaacccagggggatccctgagacgctcccagaggaacacagcgggagcacagcctcaagatgactccatcgggggaagccgcaggggctccggcttggggaaacgcggagcagcagaagccagacgacaggagaaaatggctgatcccgagtcgaaccaagaggcggtaaatagcagtgctgccaggaccgacgaagcccctcaaggcgctgcagcctcttccagcgtggctggcgcagtgggaatgactacttcgggcgagtctgaaagcgatgacagtgagatggggcgactgcaggctttacttgaggctcggggtctgccgcctcatctcttcggccctcttggccctagaatgagtcagctttttcatagaaccatcggctccggtgccagctccaaagctcagcaactgctgcaaggcctccaggcctcagatgagtcccagcaactccaggctgtaattgaaatgtgccaactactggtgatgggtaatgaggagaccctcggaggtttccccgtgaaatccgtggtgccggctcttatcactctgctccagatggagcacaattttgatatcatgaaccatgcatgccgtgcactcacgtatatgatggaagcactgcccagatcgagcgccgtagtggtggacgccattcctgtgtttcttgaaaaactccaggtgattcagtgcattgatgtggctgaacaagcgctgacagcactggaaatgctctctcggagacatagtaaggctattctacaggcaggtgggttggccgactgtcttctgtacctcgagttcttctccattaatgcacagaggaacgccctggccatcgcagccaattgttgccagtcgatcacgcctgacgaatttcatttcgtcgctgattcgctcccacttttgacccaacgactcacacatcaggataaaaaatcggtcgaaagcacctgtttgtgctttgcgagactagtcgataactttcaacatgaggaaaacctgctgcagcaagtcgccagcaaagacctcctgaccaatgtgcaacaactgctcgttgtgaccccgccaattctgagcagtgggatgttcataatggtcgtgcgcatgttcagtctgatgtgctccaattgccccacgcttgctgtgcagctcatgaagcagaacatagctgagaccctccactttttgctgtgtggagctagcaatggctcctgccaggagcagattgatctagtcccacgaagtccacaagaactctatgagctgacatccctgatctgcgagttgatgccttgcttgccaaaggagggaattttcgcagtcgacaccatgctgaagaagggcaatgcacagaacaccgatggcgcaatatggcagtggagggacgaccgtgggctctggcatccttacaacagaatagactctcggataatagaggccgctcaccaggtgggcgaagatgaaataagtctatcaacgttgggcagggtgtatactattgacttcaactccatgcaacaaattaatgaggacacagggacagcacgggcaatccagcgaaagccaaaccctctcgccaacagcaatactagcggatattccgaaagtaagaaagatgacgctagggctcagctgatgaaggaagatcctgagctggccaagtcattcatcaagaccctgtttggcgtgctgtatgaagtgtacagcagctcagccggtccagctgtgcgccataagtgcctgagagcaatcctgcgcattatatacttcgctgacgctgagctgctgaaggatgtcctgaaaaaccatgccgttagtagtcatatcgcttctatgctcagtagccaggacctgaagatcgtggtaggcgctctacagatggccgagattcttatgcagaaactgccagatatcttcagcgtgtacttccgacgggaaggcgtgatgcaccaggtcaagcacctagccgagtctgagagtttgctgacctcacctccaaaggcctgcactaatggctccggcagtatgggaagcaccacgagcgtgtcatcaggcactgctactgctgccacacatgcagccgctgacctgggcagcccttccctgcagcactctcgtgatgatagcttggacttatctccacagggtaggctttcagatgtgcttaagcgcaagcgcctcccaaagcgcggacccagacgccctaaatattcaccgccacgagacgatgataaggtggataaccaagctaaatctcccacaaccacacagagtccgaaaagctcattcctggctagcttaaatccaaagacttggggcagactgtccacacagagtaattctaacaatattgagccagctaggactgctgggggatctgggctcgccagagcagcaagcaaagacacgataagcaataacagagagaaaatcaaggggtggataaaggagcaagcccataaattcgtggagcgctattttagctctgagaatatggacggttcaaatcctgccctcaacgtgttacagaggctctgcgctgccactgagcagctcaacctgcaggtggacgggggagccgagtgtttagtggaaatccgtagcattgtcagcgagagtgatgtctcaagttttgaaatacaacattcgggttttgttaagcagttgttactgtatctcacttccaagtcagagaaggacgccgtgtccagagaaatccggctaaaaagatttttgcatgtgttcttcagctccccgctgcccggtgaggaacccatcggccgtgtagagcccgtcggaaacgctcctctgctggccctcgttcataaaatgaataattgtctcagtcagatggagcagttccctgtgaaagtacacgacttcccaagtggcaacggaacaggaggctccttcagtctaaaccggggatcacaggccctgaagttctttaacacccatcagctgaagtgccagctccaacgacaccccgattgcgcaaatgttaagcagtggaaaggcggacctgtgaaaattgacccgctggctcttgtgcaggcgattgaaagataccttgttgtgagaggctatggcagagtgagagaggatgatgaagacagcgatgatgatgggtctgatgaggagattgatgaatccttagctgctcagttcctcaattcaggtaacgtaagacacaggctgcagttttacatcggcgaacacctgctgccctacaacatgacggtgtatcaagcggtcaggcaattcagcatccaggcggaagatgaacgggagagcacggacgacgaatccaatcccctagggcgagcaggcatatggactaagacccatactatttggtacaaaccagtcagggaagacgaggaatcgaataaggactgcgtgggcggtaaacgtggaagggcccagacagccccaaccaaaacttccccgagaaacgccaagaagcatgatgagctgtggcatgacggcgtgtgcccatccgtgagtaatcctctggaggtttatcttatcccaaccccgcctgaaaatataactttcgaggatccatccttagatgtcatactgctcttgcgtgtcctgcatgctatctcacgttattggtactacctttatgataatgccatgtgcaaggaaatcattcctacatccgaattcatcaacagcaagctgaccgccaaagcaaaccggcagctccaggatccactcgttattatgaccggaaatatacctacctggttgaccgagctaggcaagacttgtccctttttctttccttttgatactagacagatgctgttctacgtcactgccttcgaccgggatcgagctatgcagaggctgcttgatacaaatccagaaatcaaccagagcgactcccaggattcacgggtcgccccacggcttgatagaaaaaagcgtacagtcaaccgcgaggaactcctgaagcaggctgaatctgtgatgcaagatcttggatcttcccgagcaatgttggagatccaatacgaaaatgaagttggcaccgggttgggcccaacactcgaattctacgcccttgtgagccaagagctccagcgggcagatctggggttgtggcgcggagaggaggtgaccctcagcaacccgaaggggagtcaggagggaacgaaatacatccaaaacctgcaggggctcttcgccctacctttcggtaggacagctaaacctgcccacattgcgaaagtcaaaatgaagtttagattcttaggaaagctgatggcaaaagctataatggactttagacttgtcgacctaccactcgggctccccttttacaaatggatgcttaggcaggagacttctctcacatcacatgacttgtttgatattgaccccgtggttgcccgatccgtatatcatctggaagatattgttaggcagaaaaagcgactggagcaagataagtcccagacgaaggaatccctgcagtacgctctggaaactctgactatgaatggttgtagtgttgaggatctcggcctcgacttcacactcccaggctttccaaatattgagttgaaaaaaggtgggaaagatatccctgtgacaattcataatctggaagaataccttcggctggtcatcttttgggctctcaatgaaggggtttctcgtcagttcgactcttttagggacggattcgagagtgtcttcccattgagtcacctccagtatttctaccctgaagagctcgaccagctgctgtgcggatccaaagcagacacctgggatgccaaaactttgatggaatgttgccggcctgatcacggctatactcatgacagcagagccgtgaagtttttattcgagatactgtctagttttgacaacgaacagcagagactattcttgcagtttgtgacaggtagccctcgtctgccagtggggggattcaggtcactgaacccccctctaacaatcgtgagaaaaacatttgagagcaccgagaatccagacgacttcctcccttctgtaatgacttgtgtgaattatctaaaattacccgattattcttcgatcgagattatgcgtgagaagctccttatcgccgcacgcgaaggtcaacaaagctttcacctctccta

SEQ ID NO: 244063 - DNA, 450 bp, synthetic construct
  misc_feature 1..450: note = Description of Artificial Sequence: Synthetic coding sequence
  source 1..450: mol_type = other DNA
atgtctaatcgacctaataacaacccaggagggagcttgcgcaggagccagaggaatactgccggagcccagccgcaggatgactccataggtggtcgatcatgttcctcatcaagcgccgttatcgtccctcagcctgaggaccccgatcgggctaacacctccgagagacagaagacaggacaggtcccaaagaaagataactcgcgtggagttaagagaagtgccagtcccgactacaatcgcaccaatagtcccagtagcgccaaaaagcccaaagcactgcaacacacagaatccccttccgaaaccaataaaccccactccaagtcaaagaagcgacacctggaccaggagcagcaactaaaatccgcccagtccccctctactagtaaggcgcacacacggaagtccggcgctacgggaggatccagaagccaaaagcggtag

SEQ ID NO: 244064 - DNA, 465 bp, synthetic construct
  misc_feature 1..465: note = Description of Artificial Sequence: Synthetic coding sequence
  source 1..465: mol_type = other DNA
atgagtaaccgacccaataacaatcctggcggttcactgagacggagccagcggaataccgccggagctcagccgcaggacgattccataggcggaagaagctgctcatcttctagcgccgtcatcgttcctcaacccgaagatcctgaccgtgctaataccagcgaaaggcaaaaaacagggcaggtccctaaaaaagataattctcgaggcgttaagcgttcagcttctcccgactacaaccgcacaaatagtcccagttcagctaaaaagccgaaggccctccagcataccgagagcccctctgagaccaacaaaccacacagtaaatccaaaaagagacacctggatcaggaacagcagctgaagtctgcccagtcccccagtacctctaaggcccatacgcgtaaatcgggggcaaccggtggttcgagaagtcagaagagaaagaggaccgaaagctag

SEQ ID NO: 244065 - DNA, 1041 bp, synthetic construct
  misc_feature 1..1041: note = Description of Artificial Sequence: Synthetic coding sequence
  source 1..1041: mol_type = other DNA
atgagcaatcggcctaacaacaaccctgggggtagtttacggcgatcccagcgaaataccgccggtgctcaaccacaggacgacagtataggcggaagatcacacctgggccaggccaaacataaaggctacagcccacccgagtcccgaaaatccaatagcaaggctcccaaggttcaatctaacacaacgtctgagctgtctcgcggacatctgagcaagagatcctgcagctcatcctccgctgtgattgtcccacagcccgaggatcccgacagggccaacaccagtgaacgacaaaaaactggacaagttcctaagaaggacaattcacgcggtgtgaaacggtcagcttctcccgattacaatcggaccaactcaccctcctctgccaagaagccaaaggccctccaacacaccgaatctccatcagagaccaacaagcctcacagtaagtccaagaaacgccatcttgaccaggagcagcagctgaagtccgctcagtcaccttccacctctaaagcacacacacgtaaatcgggcgctactggtggcagcagatcccagaaacggaaacggaccgaaagctcctgcgttaaatcggggtctgggtccgaaagcacgggcgcagaggagcggtcagccaagccaaccaagctggcgagcaagtctgcgacgtccgctaaagccggttgtagcactattacagactcttcgagtgccgcttccacctccagctcatccagcgccgtagcttctgctagttctactgtgcctccaggtgccagagttaaacaggggaaggatcagaacaaagcacgcagatccagatctgcaagctctccaagcccgaggcggagctccagggagaaggaacagtccaaaacaggcggtagttcaaaatttgattgggcagcacgattttcaccaaaggtttcactgcctaaaactaagctgtccctcccagggtcatcaaagtctgagactagcaagcctggtccaagcgggctacaggccaaagtcctgacatccaaacggtag

SEQ ID NO: 244066 - DNA, 1746 bp, synthetic construct
  misc_feature 1..1746: note = Description of Artificial Sequence: Synthetic coding sequence
  source 1..1746: mol_type = other DNA
atggccgtggctggcgctgtctccggtgagcctcttgtgcattggtgcacccaacagttgcggaagacgttcgggcttgacgtctctgaggaaatcatccagtacgtgctctcaatagagtctgctgaggagatcagggagtatgtcaccgatctgttgcagggcaatgaaggaaaaaaggggcagttcatcgaggaactcatcaccaagtggcaaaagaacgaccaagagctaataagcgaccctttgcaacagtgttttaagaaggatgagatcctcgacggccagaagtcaggggatcatctgaaacgcggacggaagaagggccgaaaccgacaggaagtccccgctttcacggagcctgacacaaccgcagaagtgaagacgccctttgacctggccaaggcacaggagaacagcaacagcgtaaagaaaaaaactaaatttgttaatctgtacacgagagagggccaggatagactggctgtactgctgcccggacgccacccatgcgattgtctcgggcagaagcacaaactgataaataattgtttgatatgcggtcgcattgtctgcgaacaggagggatccgggccatgtttattttgcggaaccctggtctgcacacatgaagaacaggacattctccagcgggactctaataagtcacaaaagcttcttaagaaactgatgagcggggttgaaaacagcggtaaggtggacatctcgactaaagatctattgccccatcaggaactgaggatcaaaagtggattggaaaaagccataaagcataaggacaaattgttagagtttgataggacttcgatccgccgaacccaggtgatagatgatgagtccgattactttgcatccgatagcaaccagtggttgtcgaagctcgagcgggagacactgcagaaacgtgaggaagaactgagagagctaaggcatgcatctcgactttctaagaaagttactattgactttgccggaagaaagattctggaagaggagaattccctggctgagtatcatagcagactcgacgaaaccatacaggcaattgcgaatggaaccttgaatcagcctcttaccaagctagaccgctcatctgaggaaccacttggtgtgctagtcaaccccaacatgtaccagtctccccctcagtgggtcgaccataccggcgctgcttcccagaaaaaggcgttcagatcttccgggttcgggctcgaatttaatagttttcagcaccagttgaggatacaggatcaggaatttcaagaggggttcgatggcggttggtgtctgtctgtacaccagccatgggcgagtttgctggtgcgtgggatcaagcgagtggaaggccgatcctggtatacccctcacagagggaggctgtggatagcagcgacagccaaaaagccgtcgccccaggaggtgtcagaacttcaggccacataccggcttctgcggggtaaagacgtggagtttcccaacgactacccgagcgggtgtctgttggggtgtgtggacctgatcgactgcctgtcccaaaaacagttcaaggaacagttccccgacatttcacaggaaagtgacagtccgtttgtgttcatttgtaagaatccacaggagatggttgtgaaatttccaatcaaaggtaacccaaaaatctggaagctcgattcaaaaattcatcagggggcaaaaaaggggctcatgaagcagaacaaagccgtgtag

SEQ ID NO: 244067 - DNA, 1431 bp, synthetic construct
  misc_feature 1..1431: note = Description of Artificial Sequence: Synthetic coding sequence
  source 1..1431: mol_type = other DNA
atgtccggaccaacctggcttcctcccaaacagcctgaacccgcacgcgcaccccaagggagagcaattcccaggggaacaccgggaccgcctcctgcccacggagctgctctgcaacctcatcctagggttaatttttgtcctctgccctccgagcaatgctaccaggccccagggggaccagaggaccggggtcccgcttgggtggggagccatggggtgttacaacatacccaaggtttacccgcagaccgcggagggttgcgtcctggatctctggatgcagaaatcgatctcctatcttcaaccctggcagaattgaatggaggtaggggacacgccagccgccgaccagatcgccaggcatacgaaccaccaccaccgcctgcttatcgcaccggctccctgaagcccaatcccgcaagcccattaccagcttctccctatgggggaccaactcccgcttcctacacaactgccagtacccccgcaggcccagccttccccgtgcaggtgaaggtcgcacagcccgtgcgtgggtgtggcccacccaggaggggcgcttcccaggccagtggacctctgccgggaccacactttccgctccctggcagaggggaggtatgggggcctggctatcgctcccagagagagccgggtcccggtgctaaagaagaggctgcaggcgtgagcggcccagctggcaggggcagaggtggtgagcacggcccacaggtacctctgtctcagcccccagaggatgagttggacagactaaccaaaaagctcgttcacgacatgaatcaccccccaagcggggaatattttgggcagtgtggtgggtgcggggaggacgttgttggtgatggtgccggagtagttgctttggatcgagtgttccacgtgggatgcttcgtttgctctacctgtcgcgcacaactaaggggccagcacttctacgcggttgagcgacgagcctactgcgaggggtgctatgtggcaacactggaaaaatgtgcaacctgctcgcaaccaattctcgatagaatcctccgagcaatggggaaggcataccatccaggctgttttacctgcgtcgtgtgccatcgtggactggacgggatccccttcaccgtggacgctacaagtcaaatccattgtattgaggatttccatagaaagtttgccccacggtgctcagtgtgtggcggagcaataatgcctgagcctggccaggaggagacagtcagaatcgtggctctggacagatccttccatatcggctgctacaaatgcgaagaatgtgggctgttacttagctccgaaggagagtgccaaggctgctaccccctcgacggtcatatactctgtaaagcgtgctccgcctggaggatccaggagctgagcgcgacagttacaacagactgctag

SEQ ID NO: 244068 - DNA, 1473 bp, synthetic construct
  misc_feature 1..1473: note = Description of Artificial Sequence: Synthetic coding sequence
  source 1..1473: mol_type = other DNA
atggaacagaaaccgtccaaggtggagtgtggtagcgatcccgaggagaacagtgccaggtcacctgatggcaagaggaaaaggaagaacggccagtgcagccttaagacgtcaatgtcaggatacatcccttcctatctggataaggatgaacagtgcgtcgtgtgtggggataaagcaacgggctaccactaccgctgcataacctgcgaaggctgcaagggcttttttcggagaaccattcagaagaacctgcatccaacctactcgtgcaagtatgactcctgttgcgtgatcgacaagattaccagaaaccagtgtcagctgtgcagattcaagaagtgcattgcagtcggcatggccatggatctagtgttggatgacagtaagagggttgctaagcgaaaactaatagagcagaacagggagaggcgcaggaaagaagaaatgatcaggagtttgcagcagagacccgaacccactcctgaagagtgggatctgatacatatagccacagaggcacatagatcgacaaacgcacagggcagccactggaaacagcgtcgcaaatttctccccgatgacatagggcaatcgcctatcgtgtcgatgcccgatggagataaggtggaccttgaagccttcagcgagtttaccaagattatcacccctgccataactagggtggtggacttcgcaaagaaactgccaatgttcagtgaactgccttgtgaggatcaaatcatactcttaaaggggtgttgtatggagattatgtccctcagagcggcagtgcggtacgatcccgagagcgatacactgacgctctccggagagatggctgtcaagagagagcaacttaaaaatggcggtctgggagtggtgagcgatgcgatctttgagcttgggaagagcctgagcgcatttaacctggacgacaccgaagttgccctgttgcaggccgtgctcctcatgagcacggatcgttcaggactgttgtgcgtggataaaatagagaaaagccaggaagcttacctcctggccttcgaacactatgtgaaccatcggaaacataacatcccacatttctggcccaagctcctcatgaaagagcgggaagtacaatcgagcattctctacaaaggcgcagccgctgaagggaggcccggaggctcccttggcgtccaccccgaaggtcagcagttacttggcatgcacgtagtgcaaggcccacaggtgcgacagcttgagcagcagttaggagaggcaggctctttgcagggccctgtgctccagcaccagagcccaaaatccccccagcagcgcttactggagctgctgcacaggtcaggtatactccacgcccgtgccgtctgcggcgaagatgacagcagtgaggcagattcccccagcagttcagaggaggagcctgaagtgtgcgaggacttggccggaaatgctgctagcccctag

SEQ ID NO: 244069 - DNA, 1473 bp, synthetic construct
  misc_feature 1..1473: note = Description of Artificial Sequence: Synthetic coding sequence
  source 1..1473: mol_type = other DNA
atggagcagaaacctagtaaggtggaatgcggctctgaccctgaggaaaactccgctaggtctcctgatggcaagagaaaacgcaagaatgggcagtgttctctcaagactagcatgagcgggtatataccatcctatctcgataaggacgagcagtgtgtcgtttgtggggacaaggcaactggctatcactaccgttgcattacatgtgagggatgcaagggattttttagacgtaccatccagaagaacctgcacccaacctattcctgcaaatatgactcctgttgtgtcattgataagatcacccggaatcaatgccaactctgcagattcaaaaagtgcatagccgtggggatggcaatggacctcgtgctcgacgattcgaagagagtagctaagcggaagttgattgaacagaatcgcgagagaagacggaaggaagagatgatccggagtctccaacagagaccggagcccacacctgaggaatgggacctgatccatatagccaccgaagctcacagaagcacgaatgctcagggctctcactggaaacagcggaggaaattcttgcctgacgacattggtcagagccccatagtctctatgcccgacggcgataaagttgatctcgaggctttcagcgagttcactaaaattatcacccccgctataacgagagtagtggatttcgccaagaaactgccaatgttttctgagctcccatgcgaagaccaaattattctgctgaaaggatgctgcatggagatcatgagcctgagagcagccgtgcgctatgaccccgagtcagatacattgacgctgagtggggaaatggccgtgaagagagagcagctgaaaaatgggggattgggcgtggtttcagatgccattttcgagctgggcaaaagccttagcgcatttaatctggatgataccgaggtagcgctcctgcaggctgtgctactcatgtcaacagatcggagcggcctgctgtgcgttgacaaaattgaaaaatcacaggaagcctatctcctggcatttgaacactacgttaaccacagaaagcacaacattccccacttttggcccaaattactgatgaaggaaagagaagtgcagtcctctatcctttacaaaggagcggcagccgagggtcggcctggtggatccctgggggttcaccccgaagggcaacagctgctgggaatgcacgtggtacagggcccacaggtgcgtcagctcgagcaacagctgggtgaagcaggttccctgcagggacccgtcctccagcaccagagtcccaaatctccccagcagagacttctcgagctgcttcatcgttcaggcatcctgcatgcccgagcagtctgcggtgaggatgacagtagcgaggccgactctccctcctcgtcagaagaagagcctgaggtgtgcgaagatctggccggaaacgcagcatcaccatag

SEQ ID NO: 244070 - DNA, 1233 bp, synthetic construct
  misc_feature 1..1233: note = Description of Artificial Sequence: Synthetic coding sequence
  source 1..1233: mol_type = other DNA
atggagcaaaagccttctaaagtcgaatgcggcagcgaccctgaggagaacagtgcaagaagcccggatggtaagaggaagagaaagaatgggcagtgcagtttaaaaacatctatgagtgggtacattccatcttatctggacaaggacgagcagtgcgtggtttgtggggataaggcgaccggataccactaccgatgcatcacatgtgaggggtgtaaaggcttcttccgtcgcactattcaaaagaacctccatcctacttattcttgcaagtacgactcttgctgtgtgatcgacaagatcactcggaatcagtgccagttgtgtcgcttcaagaagtgcatagccgttggaatggctatggatttggtccttgacgatagtaagcgggtcgccaaacgcaagctgatcgaacaaaaccgcgagcgcagacgcaaggaggagatgatacggagtctgcagcagcggccagaacctactccggaagagtgggacttgatccacatcgctaccgaggcccatcgttccactaacgcacagggttctcactggaagcagagacggaaattccttccagatgatataggtcagagcccgatcgtttcgatgccagacggggataaagtcgacctcgaggctttctctgaatttaccaaaatcatcactcccgcaattaccagagtggtggatttcgcgaaaaagctgccaatgtttagcgagctcccctgtgaagaccagatcatcctgctcaaaggctgctgcatggagattatgagccttcgcgcagccgtgcgatatgatcccgaatccgatactttgacgctgtccggtgagatggccgttaagcgagagcagttgaagaatggtgggttgggtgtagtgagcgacgcgatattcgaactcgggaagtccctcagtgcttttaatctggacgatacagaagttgcactgcttcaggccgtgctgcttatgagtacagatcggtctgggctgctctgcgtggacaagatagagaaaagccaggaggcatacctgctagcgttcgaacattacgtgaaccacaggaagcataatatcccacatttctggcccaagctgctcatgaaagtgactgatcttagaatgatcggcgcatgtcacgcctcacgcttcttgcatatgaaagtcgagtgcccaacggaattattccctcccctcttccttgaagtgtttgaagaccaggaggtctag

SEQ ID NO: 244071 - DNA, 1233 bp, synthetic construct
  misc_feature 1..1233: note = Description of Artificial Sequence: Synthetic coding sequence
  source 1..1233: mol_type = other DNA
atggagcagaagccttccaaagtcgagtgcgggtccgatcctgaggaaaatagtgctcgttcccctgacggaaaaagaaagaggaagaatggtcagtgttctctcaaaacctcaatgagcggctatatcccatcgtacttagacaaggatgaacagtgtgtggtatgcggcgacaaggccacaggctatcactatcgctgcattacatgcgaagggtgcaagggtttttttcggagaaccatacagaaaaatcttcatccaacatattcttgcaaatacgattcgtgctgtgtcatcgataagatcacgcgaaatcagtgccaactctgtaggtttaagaagtgcatcgccgtcggtatggcgatggacttagtgttggatgattcgaagcgcgtggccaagcgaaaactcattgaacagaatagagagaggcgtaggaaagaagaaatgattcggagcttacaacaaaggcccgaacccacgcccgaagaatgggatctgattcacatagcaactgaagcgcaccggtccactaatgctcagggcagtcactggaaacagcgcagaaaattcctgcccgatgatatcgggcagtctcctattgtgagcatgccggacggtgataaggtggacttggaagccttctctgagttcaccaagattataacaccagccattacgagggtcgtagacttcgccaagaagttgcccatgttttcagagttaccctgcgaggaccagatcattctcctaaaaggatgctgtatggagatcatgagcctgcgggcagcggtaaggtatgatcctgaatcagacacccttaccctgagcggcgaaatggctgttaaacgcgagcagctcaaaaacggtggacttggggtcgtctccgacgctatttttgagctggggaagtccttaagcgcttttaatttggacgacaccgaggttgcgctgctacaggctgttcttttgatgagtactgacagaagcggactcctgtgcgtagataagattgagaagtcccaggaggcctatttgctggccttcgagcactacgttaaccatcggaaacacaatatccctcacttctggcccaagctcctgatgaaggtcactgatctgagaatgatcggggcatgtcacgcatccaggttcctgcatatgaaagtggagtgtcccactgaattgttccccccactctttctggaagtgtttgaagaccaggaggtgtag

SEQ ID NO: 244072 - DNA, 1386 bp, synthetic construct
  misc_feature 1..1386: note = Description of Artificial Sequence: Synthetic coding sequence
  source 1..1386: mol_type = other DNA
atgactcctaattccatgacagaaaatggactcaccgcatgggacaaaccaaaacattgcccagaccgggagcacgactggaaactggtcggcatgtccgaagcgtgtctgcatcgcaagagtcacagcgaaaggcggtctaccctgaaaaacgagcagtcctctccgcatctgatccaaacaacctggacgagctccatttttcacctggatcacgatgacgtcaacgaccaaagtgttagcagcgcgcagaccttccagacagaggagaaaaagtgcaaagggtatataccatcctacctggataaggatgagctgtgcgtggtgtgtggcgataaagccacaggttaccattacagatgtatcacctgtgagggatgtaagggcttctttcgcaggacaatacagaagaatctgcacccttcatattcatgtaaatacgaagggaaatgtgtaattgataaagtgacccggaaccaatgccaggagtgtaggtttaaaaagtgcatctacgtaggcatggctacggatctagtgctggacgattctaaaaggttggcaaagcgcaaattgatcgaggaaaatcgggagaaaaggaggcgcgaggagctgcaaaagtctatcggccacaagcccgagcccaccgatgaagaatgggagctgataaagaccgtaaccgaggcccacgtggcaactaacgctcagggttcacattggaagcagaagaggaaattcctgccggaagacattgggcaggcacccattgtgaacgccccagagggcggaaaagtcgatctagaggcatttagccactttaccaaaataattactcccgcaattacaagagttgtggacttcgctaagaagttacctatgttttgcgaattgccttgtgaggatcagatcattctcttaaaaggatgctgtatggaaattatgagccttagggccgctgtgcgatacgatcctgagagcgagacccttacactgaacggcgagatggccgtaacaagaggccagctcaagaatggagggctcggcgtagtctcagatgccatcttcgatctgggtatgtcactgagttcttttaacctggatgacactgaagtcgccttgctgcaggctgtacttctaatgtcctcagacagacctggactggcgtgcgttgaaaggatcgagaagtaccaggattctttcctcctggccttcgagcactatattaactataggaaacaccacgtgacacacttctggcccaaactgctcatgaaagtcaccgacctccggatgataggggcttgccatgcatcccgcttcctgcacatgaaagttgaatgcccgacagaacttttccctcctctcttcctcgaggtcttcgaggattag

SEQ ID NO: 244073 - DNA, 1386 bp, synthetic construct
  misc_feature 1..1386: note = Description of Artificial Sequence: Synthetic coding sequence
  source 1..1386: mol_type = other DNA
atgactcccaacagcatgaccgaaaacggtctcacggcgtgggataagccgaagcattgcccagatcgggaacatgactggaaacttgtagggatgtccgaagcctgtctccacaggaaatcccattccgagagacggtccactctgaagaatgaacagagcagtccacacttgatccaaactacttggacatcctcaatcttccatcttgaccacgatgacgtcaacgatcagtccgtaagcagcgctcagacgttccaaaccgaggagaagaagtgcaagggctacatcccttcttacctggacaaagacgaactgtgtgtcgtctgcggggacaaagccacaggctatcactataggtgcatcacctgcgagggctgcaagggttttttcagaagaacgatacagaagaaccttcacccttcgtactcgtgcaagtatgagggcaaatgcgtgattgacaaagtcactcgtaatcagtgccaggagtgccgcttcaagaagtgtatttatgttggcatggctactgacctggtgctcgacgactcaaaacggttggcaaagcgcaaactgatagaggaaaaccgagaaaagcggagaagagaggagttacagaagtccattggccataaaccagaacctacggatgaggagtgggagctcatcaaaaccgttacggaagctcacgtggcaaccaacgctcaaggatctcattggaagcagaagagaaaatttctgccagaagacataggacaggctccaattgttaacgcgccagagggaggtaaggtagatctggaggccttctctcatttcaccaaaatcataactcctgcgattacacgggtagtcgatttcgctaagaagctgcccatgttctgtgaacttccctgtgaagaccagatcatactgttaaaaggatgttgcatggagataatgtctctgcgggctgccgtcagatatgaccctgagtccgagaccctcacacttaacggagaaatggccgttacacggggacagctgaaaaatggcggtttaggtgtggtgtctgacgccatcttcgacctggggatgtccttgtctagcttcaaccttgatgatactgaggtcgccctgctgcaggcagtgctgctgatgtcttcagatcgaccgggactggcttgcgtggagcgaatcgaaaagtaccaggattcgtttctgctggcgttcgagcattatattaattaccgaaagcaccacgtgacacacttctggccaaaactgctcatgaaagttacagatctgcgaatgatcggcgcttgtcatgcgagcaggttcctgcacatgaaggtcgagtgtcctacggaactgttcccgccactctttttagaagtgttcgaagactag

SEQ ID NO: 244074 - DNA, 1386 bp, synthetic construct
  misc_feature 1..1386: note = Description of Artificial Sequence: Synthetic coding sequence
  source 1..1386: mol_type = other DNA
atgacaccgaactctatgactgagaatggactaactgcctgggataaaccgaagcactgtcctgaccgagaacacgattggaagcttgtggggatgtcagaagcatgcttgcaccgcaagtcacactccgaaagacggtctactctgaaaaatgagcaaagtagcccgcacttgattcagacgacctggacctcatctattttccacctggaccatgatgatgtcaatgatcagtctgtatcatcagcccaaacttttcagactgaggagaagaagtgcaagggttacattccttcctatcttgacaaagatgagttgtgtgttgtgtgtggggataaagctaccggataccactatcgctgtattacgtgtgaagggtgcaagggattcttccggaggacaattcagaaaaatttacacccatcatattcatgcaaatacgaggggaagtgcgtcatcgataaggtgacacgcaaccagtgccaggagtgccgatttaagaaatgtatctatgttggcatggccacagatctggttctggacgatagcaagcggctcgccaagaggaaactcatcgaagagaatcgggaaaagcgacggagagaggaacttcagaaaagcatcgggcacaaacccgagcccaccgatgaggagtgggaactgatcaagacagtgaccgaagctcacgtggcgaccaatgctcaggggtcccattggaagcagaagaggaaatttctgccagaagatattggtcaggccccaatcgtgaatgctcccgagggtgggaaggtcgacttggaagctttctcccactttactaaaattattacccccgcaataactcgcgtagtcgactttgcgaagaaacttcctatgttttgcgaactcccatgtgaagaccagatcatcctccttaagggatgttgtatggagatcatgtccctccgagcggctgtgaggtacgatcccgaaagcgaaacactgaccctgaatggggagatggctgtcacacgaggacagttgaagaacggcggtctaggagtggtctccgacgcgatttttgacctgggcatgagcttgagctcattcaatttggatgacactgaggtcgctctgctgcaggccgtgctgctcatgtctagcgaccgccctgggctggcatgtgtggaacgaattgaaaagtaccaagactcctttcttttggcattcgaacattatattaactaccgaaaacaccacgtaacacacttctggcccaaacttctaatgaaggttactgatttaagaatgatcggagcttgccatgcctctcgctttctgcatatgaaagtggaatgccctacagagctgtttccacctctgttcttggaggtcttcgaagactag

SEQ ID NO: 244075 - DNA, 87 bp, synthetic construct
  misc_feature 1..87: note = Description of Artificial Sequence: Synthetic coding sequence
  source 1..87: mol_type = other DNA
atgacccccaactcaatgaccgagatggcacttcagccagggaccaaccgctccacagtccagactgagaatactacgggaagctag

SEQ ID NO: 244076 - DNA, 366 bp, synthetic construct
  misc_feature 1..366: note = Description of Artificial Sequence: Synthetic coding sequence
  source 1..366: mol_type = other DNA
atgaccccaaattctatgactgagaacggactaacagcctgggacaaacccaagcactgtcccgatcgggaacatgactggaagctggtcggtatgtccgaagcttgcctgcacagaaaatcgcactctgaacgaagatctaccctgaagaacgagcagagctctcctcacctgattcagaccacatggacttcctccatatttcacctggatcatgatgatgtgaatgaccagtccgtgtcctctgcacagacatttcagactgaggagaagaaatgcaaaggctatataccatcgtacctggataaggacgaactctgcgtcgtttgcggagacaaagcgacaggctaccactacaggtgctag

SEQ ID NO: 244077 - DNA, 441 bp, synthetic construct
  misc_feature 1..441: note = Description of Artificial Sequence: Synthetic coding sequence
  source 1..441: mol_type = other DNA
atgcaggtgcttacaaaacgctaccccaagaattgcctgctgacagtgatggatcgctacgctgccgaagttcataacatggaacaagtagtcatgatcccctctctgttaagggatgttcaattgtcgggtccgggaggccaggctcaggccgaagcgccagacctgtatacctactttacaatgctgaaagccatttgcgtggacgttgatcatggcttactgccaagggaagaatggcaggctaaggtggcgggaagcgaagagaacggcacagccgagacagaggaggtggaagatgaatcagcatccggggagctggaccttgaggctcagttccacctgcatttctcatctttacaccacatcctgatgcatctgactgagaaggctcaggaagtgacacgcaaatatcaggaaatgaccggacaagtgtggtag

SEQ ID NO: 244078 - DNA, 2802 bp, synthetic construct
  misc_feature 1..2802: note = Description of Artificial Sequence: Synthetic coding sequence
  source 1..2802: mol_type = other DNA
atgcgtgcgctggctgtgctgagcgtcacattggtgatggcgtgcacagaggcgttctttccgttcattagtcgaggaaaggagctgctgtggggcaaacccgaggagtcgagggtctcgagtgtgctagaagagtcaaagcgcctagttgatactgcaatgtacgcaaccatgcagcggaacctcaaaaagcgcggaatcttgtcccctgcgcagttactgtcttttagtaaactgcctgagccaacttctggcgtgatcgccagggccgcagaaattatggagaccagcattcaggccatgaagagaaaagtaaatctcaagactcagcagtctcagcatccaacggacgccctgtctgaagatctgctgtccattattgctaatatgagtggctgcctgccctacatgcttccacccaagtgtcctaatacttgcttggcaaataagtatcgacccatcaccggtgcgtgcaacaatagagatcaccccaggtggggagcatctaacactgctctcgcaaggtggctgcctccggtgtacgaagatggcttttcacagcctagggggtggaaccccggttttttgtataacggctttccgctgccccctgtgagagaggttactcgacacgtcatacaagtgtcaaatgaagtagtcactgatgatgaccgttatagtgatctgcttatggcttggggacagtatattgaccatgatatcgcatttaccccgcagagcaccagcaaagctgcctttggcggaggagcggattgccagatgacctgcgagaaccagaatccctgcttcccaatacaactccctgaagaagccagacccgctgccggaacagcctgtttacctttttatcgatcctccgctgcttgtggtaccggcgaccagggtgcactgttcggtaacctatctactgcaaacccgagacagcaaatgaacgggctcaccagcttcttggatgcttccacggtgtatggtagctcacccgctctggagcgtcaactgcggaactggacctctgctgaaggactgctgagagtgcacgctagactgagagacagtggccgtgcctatctgcctttcgttccacccagagcccctgctgcttgtgcgccagaacctggtattcctggcgagaccagaggtccttgctttctggcgggagatgggagagcttccgaggtcccgagtctcacagccctacatacattatggctgcgcgagcataatcgacttgcagcggctctgaaagcacttaacgctcattggtcagctgatgcggtctaccaggaggctcgcaaggtagtgggtgccctgcaccaaataattacactccgcgactatattccacgtatccttggaccagaagctttccaacagtatgttggtccgtatgagggatacgattccactgcaaaccctactgtgagcaacgtgtttagtaccgcggctttccgatttggacatgccactattcatcctttagtccgtcgactcgacgcgtccttccaggagcaccccgatctgccaggcctgtggctccaccaggcattcttcagcccctggaccctcctgcgcggtggagggctggatccccttatcaggggcctgcttgctcgacctgcaaagctgcaggtccaggatcagctcatgaacgaggagctgacggagcggctgttcgtattgtccaatagcagcactctcgatctcgcgagcatcaacctgcaacgtggcagagaccacggtctccctgggtataatgagtggagggagttttgcggccttcctagactagaaactccggctgacctgtctacggctatcgccagccggtcggtcgccgacaagattttagatctgtataagcaccctgataacatcgatgtgtggctgggaggcctagcagagaatttcctgccgcgagctaggacggggcctctattcgcttgcttgattgggaaacagatgaaggcactgagagacggagattggttctggtgggagaatagccacgtcttcacagatgcccagcgccgagaacttgagaagcactcactgagtcgggtgatctgtgacaatacgggcctcacaagagtcccaatggacgcttttcaagttgggaagttcccggaagacttcgagtcctgtgactcaataacagggatgaacctggaggcatggcgggaaacattcccacaagacgacaaatgcgggttcccagagtcggtcgaaaatggcgatttcgtccactgtgaggagtccggacgacgtgtcctggtctactcgtgtagacacgggtacgagctccagggaagggagcagctgacctgtactcaggagggctgggactttcagcccccattatgcaaggacgtgaacgagtgtgctgacggcgctcaccccccatgccatgcctcggccagatgcaggaacaccaaaggcggtttccagtgtctgtgtgcagatccttatgagctgggcgacgacggtcgaacttgtgtagactccggcagactgccaagggttacctggatttcaatgtccctcgctgccctcctcatcggcggtttcgcagggctgacctctaccgtaatttgccggtggactcgaaccggtacaaaaagcaccttgcccatatccgagacaggaggcggtactcctgagctccgttgcggcaaacatcaagcagttggcacctcgccacaacgcgcagcagcccaggacagtgagcaggagagcgccggaatggaaggacgggacactcaccggctccccagagctttatag

SEQ ID NO: 244079 - DNA, 2790 bp, synthetic construct
  misc_feature 1..2790: note = Description of Artificial Sequence: Synthetic coding sequence
  source 1..2790: mol_type = other DNA
atgagagcgctcgcagtgttgtcggtgacacttgtgatggcctgtaccgaggcattttttccattcatcagcagggggaaagaactactctggggaaagccggaagaatccagagtatcctcagtcctcgaggaatcaaaaagactggtggacactgcaatgtatgccactatgcagcggaacttaaagaagcgaggcattcttagcccagcacaactgctatcttttagtaaactccccgagcctacttctggtgtgatcgcaagggccgcagaaatcatggagactagcatccaggctatgaagcgaaaagtgaatttgaagactcagcagagccagcatccgaccgacgccttaagtgaggacctcctgagcattatcgccaacatgtccggctgcctcccctacatgctgccaccaaaatgcccgaacacctgtctcgccaataaatacagaccgatcactggcgcttgcaacaatagagaccacccgcgatggggcgcttcaaacactgctcttgccaggtggctgcctccagtgtatgaggatggcttttcccaaccacgaggctggaacccaggcttcctgtataatgggtttcccttgccccctgtaagggaggtaacaagacatgtgatccaagtgagtaatgaggtcgtgaccgacgacgatcgttactcagacttgctgatggcttggggacagtacatcgatcacgacatagccttcactcctcagagcacaagcaaggcagcctttggaggcggagcggattgtcagatgacgtgcgagaatcagaatccgtgtttcccaattcagttaccagaggaagctcggccagccgctggaaccgcttgtctgcctttctatcgcagctcagccgcttgtggcacaggtgaccagggagccctttttggcaacctgagcaccgcaaacccacggcagcaaatgaatggactgacctctttcttagacgctagcaccgtttatggaagctcacccgcactcgaacggcaattaagaaattggacttcagcggagggcctcctccgcgtgcacgcacgcctcagagattcaggacgggcatacttgccattcgtcccaccacgggctcccgcagcctgtgccccagaacccggaataccgggagagacaaggggtccttgtttcctcgcgggagacggaagagctagtgaggtgcctagccttaccgccctacacacattgtggcttcgggagcacaacagactcgccgctgcgctcaaagccctcaacgcgcattggagtgccgacgcagtgtatcaagaggccagaaaggtggttggagccctacatcagattatcacactccgcgattacattccacgaatccttggaccggaggccttccagcagtacgtaggtccctatgagggctacgacagcacagcgaatccaactgtaagtaatgtgttcagtacagctgcgttccgatttggacacgccacaattcaccccttagtccggagactcgacgcaagtttccaggaacatcccgacctgcctggcctgtggttacatcaagcctttttttcgccttggacacttttgcggggaggagggttagaccctcttatccggggtctcctcgcccgaccagccaagttgcaggttcaagaccaactgatgaatgaagagttgacagagcggctgttcgttttgagtaattcgagtacactggaccttgcctcaatcaatcttcaaaggggaagggaccacggactgcctggatacaatgaatggcgggagttctgcgggctgcccaggcttgagacccctgctgatttatccactgccattgcaagccggtctgtggcagacaaaatactggatctttataagcacccagataatatcgacgtgtggttaggtgggttggcagagaatttcttgcctagggcacgcactgggcctctttttgcttgtcttattggcaagcaaatgaaagccctcagagacggcgactggttctggtgggagaattcccacgtgtttaccgacgcccagaggcgggaactagagaagcacagtctgagccgagtcatttgtgataatacgggcctgaccagagtacccatggatgcattccaggtgggtaagttccccgaggattttgagtcctgtgacagcattaccggcatgaaccttgaagcatggcgggagaccttcccacaggatgacaagtgcgggtttccggagagcgtggaaaatggagacttcgtacattgtgaggagtccggccgaagggttctggtgtactcctgccggcatgggtacgaattgcaggggagagagcagctcacttgcacccaggaagggtgggattttcagccccctctgtgtaaggacgtgaatgagtgcgctgatggcgctcaccccccttgtcacgcctctgcaagatgtaggaataccaaaggtggtttccaatgcctctgcgcggacccctatgagcttggcgatgacggacgcacttgtgtggactctgggaggctgcctcgggttacctggatctctatgtcccttgcagctctgttaattggtggatttgcgggactcacatctacagtgatttgtcgctggcgggtcttgggctggaaggctggtattctcacaggatgtcgagaacctagcgagggcaaagtggccggacactgccggaccgcaagctgctctcagaaccaccgcacaaccctatttcagactcaggcaaatccgaagtccgcgggtcgtctgttcagccagcacgggtag

SEQ ID NO: 244080 - DNA, 2802 bp, synthetic construct
  misc_feature 1..2802: note = Description of Artificial Sequence: Synthetic coding sequence
  source 1..2802: mol_type = other DNA
atgcgggcacttgccgtactatcagtaactcttgtgatggcatgtaccgaggccttctttcccttcattagccggggaaaagagctgctctggggaaagcctgaagaatcaagagtatcttccgtactggaggagagcaagaggctggttgataccgcgatgtatgctacaatgcagcgtaacttgaaaaaacgcggtattctgtctccagcccagctcctgtctttcagtaagcttcctgaaccaacctctggagtgatagctcgcgcagcagaaataatggaaacttctatacaagctatgaagagaaaggtgaatctgaagacccaacagtctcaacatcccaccgacgcactgagtgaggacctgctgtcaatcattgccaacatgagcggatgcctgccctatatgctgccgccaaagtgtcccaatacatgtctggccaacaagtataggccgatcacaggggcttgcaacaacagagaccatcctaggtggggcgcaagcaatacagctctggcacgatggctcccgccagtttacgaagacggatttagtcagcctcggggttggaacccgggattcttatacaacggatttcccttgcctccagttagggaagttacccgccatgtcattcaggtctctaacgaggttgtcacggatgatgatcggtattcagatttgctgatggcgtggggacagtacatagatcacgatatcgcattcacaccacaaagtacttccaaggccgctttcggcggaggcgcagattgtcagatgacctgcgaaaaccagaacccctgctttccaattcagctgcccgaagaggcaagacctgccgcaggaactgcctgcttgcccttttaccggtcttcagctgcatgtggaacgggcgaccaaggagctcttttcgggaatctgagcacagccaacccaaggcagcagatgaacggcctgacgagctttcttgatgccagcacagtgtacgggtcgagtcccgcacttgaacggcagctgcggaactggacgagtgctgaaggcctgttgcgggttcacgcacgcctgagggattcgggaagagcttatcttccctttgtgcctccacgcgctcccgctgcatgcgcgcctgagcctggtattcccggtgagaccagaggaccctgcttcctcgctggtgatggcagagcatctgaagtccccagcctgactgctttacacaccctgtggctgagggaacacaatcggctagcagctgctctgaaggctctcaacgctcactggtccgccgacgccgtttatcaggaagctagaaaagtcgtgggcgcattacaccaaattataaccttacgcgattatataccgcgaattttaggcccagaggcattccagcaatacgtcgggccttacgagggctatgactcaaccgccaatcccaccgtcagcaacgtattctccacagcagcattccgcttcgggcatgcaacaattcatccactggttagacgactagatgccagctttcaagaacaccctgatctaccaggattatggctgcatcaggccttttttagcccctggactctccttaggggagggggactagaccccctcatcagaggccttttggctaggccagcgaaactgcaagtgcaggaccagctgatgaatgaagagctgacagagaggttattcgtgctgtcaaatagcagcacactcgacttggcgagcattaatcttcagagaggccgagatcacggtctgccaggctacaatgaatggagggagttctgcgggttgccccgactagagacccctgccgacctgtccacagccatagctagtaggtccgtggccgataagatcctggacctgtacaagcacccagacaatatagatgtgtggcttggaggacttgccgaaaatttcctgccccgagccaggactggcccactgtttgcatgcctaatcggcaagcagatgaaagcgctgagggacggcgattggttttggtgggagaacagccacgtcttcacagacgcccagagaagagaactcgagaagcacagcttgtctagggtcatctgcgacaatacaggcctcactagagtcccaatggatgcctttcaggtggggaaattccctgaagacttcgagagctgcgactcgatcacaggcatgaacctggaggcttggagagagactttcccacaggacgataaatgtggatttcctgagagcgtagagaatggagactttgtgcattgcgaggaatctggtcgacgggttctcgtgtattcgtgtcgccacggttatgagttgcaggggagggagcaactgacctgtacacaggaggggtgggattttcaaccacctttgtgtaaagacgtcaacgagtgcgccgacggagcacaccctccatgtcatgccagcgctcgatgcagaaataccaagggagggtttcagtgcctttgtgcagacccatacgagttgggcgacgatggacgcacctgcgtcgattctgggagactccccagagtcacttggatttctatgtcactcgccgctctcctcatcgggggatttgccggtctcacgtcgacagtgatttgtcgatggactcggactggcaccaaatcaactttgcccatttccgaaactggagggggaacaccagaactccggtgcggcaagcaccaggccgtgggcacgtcaccccagagagccgctgctcaggacagtgaacaagaaagcgcgggtatggaaggaagagacacccaccgcctcccacgtgcactgtag

SEQ ID NO: 244081 - DNA, 2670 bp, synthetic construct
  misc_feature 1..2670: note = Description of Artificial Sequence: Synthetic coding sequence
  source 1..2670: mol_type = other DNA
atgcgggcactcgcggttttgtctgtgacactcgtgatggcgtgtacggaggccttcttccctttcataagtaggggaaaagaactgttgtggggcaagccagaggagtcccgggtctcatcagtgctggaggaatccaagagacttgttgacacagcaatgtacgctaccatgcaaagaaatctgaagaagaggggaatcttgtctcctgcccaacttttgtcttttagtaaactccccgaaccaacatctggagtgatagccagggctgcggagataatggagaccagtatccaggccatgaaacggaaagtgaatctgaaaacgcagcagagccagcatccaactgatgccctctctgaagatctcctgtcaatcatagcaaatatgtcagggtgccttccgtatatgctcccacctaaatgtccgaacacttgcctagccaataaataccgccctatcaccggggcatgcaacaatagagaccaccctaggtggggggcttctaacactgcgctcgctagatggctgccacctgtttacgaggatgggttttcccagcccagaggatggaatcctggatttctgtataatggtttccccttaccgccagtccgtgaggttacccgccacgtgatccaggtgtccaacgaggtggtgacggacgatgacaggtactccgaccttcttatggcttggggacagtatattgaccacgatatcgcatttaccccacagtcgacgtctaaagcggcttttggtggtggggcagactgccagatgacctgcgagaaccagaatccatgttttccaattcagctgccagaggaggcccgacctgctgccggaaccgcctgtctcccgttctaccgcagttccgctgcctgtggtaccggcgatcaaggggctctgttcggcaacctatccactgcgaatccgaggcagcaaatgaacggcctgacaagttttctggacgctagcacagtgtatggcagctcgcctgctttggaacgccaactgagaaactggacatccgctgaaggcctgttgcgggtgcacgctcgtctacgagactccggccgagcttacctgccattcgtgcccccacgagcacctgctgcatgtgcccctgaaccagggatcccaggagagacgcgcggaccgtgttttctggctggcgatggaagggcttcagaagtgccatctttgacagctttacatacactctggcttcgggaacacaatagacttgcagcagccctgaaagccctgaatgcacattggtcagccgatgccgtgtatcaagaggctagaaaggtggttggggcattgcatcagataataaccctgcgggactacattccacgcatcctcggccctgaggccttccagcagtacgtgggtccttatgagggatatgactcgacagccaacccaacggtgtccaacgtgttttcaaccgccgctttccggtttggccacgcaacaattcatcctctggtgcgtcgtctcgacgcttcattccaggagcaccctgacctacctgggctttggctgcatcaggcattcttttccccatggacccttctacggggagggggtctggacccactcatacggggtttactcgcacggcctgcaaaactccaggtccaggaccagctcatgaacgaggagcttaccgaacgactgttcgtgctcagcaacagtagcactctggatcttgcttctattaatctgcagaggggcagagaccacggtttaccgggatacaatgagtggagagagttctgtggcctgccgaggctggaaacgccagccgacctgtcaacagcgatcgctagtaggagcgtggcagacaagattctcgatctgtacaagcaccctgataatattgatgtgtggctaggcggattggctgagaatttcctgcctcgcgcaaggaccggcccactattcgcctgtctcattggtaagcaaatgaaggcgcttcgggatggggactggttctggtgggagaatagccatgtgttcacggatgctcagcggagagagctggagaaacactccctctctagagtcatctgcgataatactggcctaaccagagtcccgatggatgcgttccaagttggcaaatttcctgaggactttgagtcatgcgattccatcaccggtatgaacctagaggcatggcgggagacatttccccaggatgataaatgtggatttcccgagagcgtggagaacggggacttcgtacactgcgaggaatctgggaggcgtgtactagtgtatagctgccgccacggctacgaattacaaggccgtgagcagctcacgtgcactcaagaagggtgggatttccaaccccctctgtgtaaggactctggcaggcttcccagggtcacctggatttccatgtccctcgcagcattattgattggcggtttcgcgggactgacatccaccgtcatatgtaggtggaccaggaccggcaccaagtctactttgcctatctctgaaactggagggggtaccccagagctgcgatgtggtaagcaccaggcagtggggacgagcccacaacgcgcagccgcacaggactccgagcaggaatcggcaggcatggagggtcgggacacccatcgcctccctagggccctatag

SEQ ID NO: 244082 - DNA, 2283 bp, synthetic construct
  misc_feature 1..2283: note = Description of Artificial Sequence: Synthetic coding sequence
  source 1..2283: mol_type = other DNA
atgcgggctctggctgtgctgtcagtgacacttgtcatggcatgcaccgaggccttttttccctttatctctcgtggcaaggaactgttgtggggtaaacctgaagagtctagggtgtcttctgtgctggaggaatccaaaagactggtggacactgcaatgtacgcaacgatgcaacgcaatctcaagaagaggggcattttgtctccggctcaattgctgagcttttcaaagctgcccgagccaacaagcggagtcattgctcgcgctgccgagatcatggaaacatcaatccaagcaatgaagcggaaagtgaatctcaagacccagcagtcccagcaccccactgacgcactgtccgaggacttactgtcgatcattgctaacatgtccggctgcctcccatatatgctcccaccaaagtgtcccaacacctgcctcgccaataagtaccgccctatcacgggcgcttgtaataacagagatcaccctcggtggggagcatcaaacaccgctctggcaagatggctgccacccgtttatgaggacggattttctcagccccgagggtggaatcctggattcctttataacgggttcccattgccgccagttagggaggtgacccgccatgttattcaggtgtcaaatgaggtggtgacagacgacgacaggtacagtgacttactcatggcgtgggggcagtacatcgatcatgatatcgcattcaccccgcagtccacctcgaaagccgcattcggagggggagctgattgccagatgacttgcgaaaatcagaacccctgcttccctatccagatcattaccctccgcgattacatcccccgaatactggggcctgaggccttccaacagtacgtgggcccttacgagggctatgactctaccgcaaatccgaccgtctccaatgtgttctcaaccgccgcatttcgttttggccacgcaactatccatcctctggtgcgtagactcgacgccagcttccaagagcaccctgatcttcccggactgtggctccaccaggctttcttctcaccttggaccttgctgaggggtggcggactggatccactgatccgaggactgctggctcggcctgcaaagctgcaagtgcaggatcaacttatgaacgaggaattaactgaaaggctgttcgtgctctcaaactcgagcaccctggacctcgcctccattaacctacagcggggaagagaccacggcctaccaggatataacgaatggcgggaattctgtgggttacctcggctcgagactccggctgatctctctacagctatagccagtcgttcagttgctgacaaaatattggatctgtacaaacaccccgacaatattgacgtttggttaggcggtttggcagagaattttctccctagagccagaacaggtcctcttttcgcctgtctcataggcaaacaaatgaaggcgttgcgcgatggggactggttttggtgggagaactcacacgtctttactgacgctcagcgacgcgagctggaaaaacacagcctatcgcgagtgatctgtgataacactgggctgacccgcgtgccaatggacgcctttcaagtgggcaaattccctgaagatttcgaatcctgtgacagtatcacagggatgaacctagaggcttggcgtgagaccttcccacaggacgacaaatgtggctttccagaatcagtcgagaacggcgattttgttcactgcgaggagtctgggagaagagtcttggtatatagttgtcgccacgggtacgagctgcagggacgtgagcagctgacttgcacccaggagggatgggattttcaacctccactgtgcaaggacgtgaatgagtgcgcagacggtgctcaccccccttgccacgcgtccgcaagatgtcggaacacaaaggggggtttccagtgcctgtgtgccgacccctatgagctgggcgatgatggccgaacttgcgtggattcagggagattaccaagagttacatggatctcaatgtcgctggccgctctgttaatcggaggcttcgctggccttacaagcaccgtcatctgccgctggaccagaacagggacaaagagtactctgcctatatcagaaacagggggaggaacacccgagctacgttgcgggaagcatcaggctgtcggcacctcacctcagcgggcagccgcacaggattcagaacaggagtcagccggaatggagggccgtgacacacaccgacttccccgtgccctttag

SEQ ID NO: 244083 - DNA, 2283 bp, synthetic construct
  misc_feature 1..2283: note = Description of Artificial Sequence: Synthetic coding sequence
  source 1..2283: mol_type = other DNA
atgagggcgctcgccgtcctgagtgtgaccttagtgatggcctgcacagaagccttttttcctttcatttcgagaggcaaggaacttctttggggcaaaccggaagagtcccgagtctcctctgtacttgaagagtccaaacggcttgtggataccgccatgtacgccaccatgcagaggaatctcaaaaaacgtggcattttgtcccccgcacagttgcttagcttctctaagctccctgaaccaacctccggagtgatcgcgagggcagccgaaatcatggaaacatccatacaggccatgaagagaaaggtcaacctaaagacccagcagagccagcacccaactgacgcactgagcgaagacctgctgtcaattatcgccaacatgagcgggtgcctgccttacatgctgccacctaaatgtccaaacacttgcctggctaacaaatacagaccaattacaggcgcttgcaataaccgcgaccacccgcgatggggagcctctaacaccgcgctggcccgttggctgccacctgtctatgaggatggtttctcccagccccgtggctggaatcctggcttcctgtataacgggtttcctctaccaccagtcagagaagtgactcggcacgtcatccaggtatctaatgaggtcgtgactgatgatgatcgttactctgatctgctaatggcatggggccagtatatcgaccacgacattgcctttactccacagtcaacctccaaggcagcttttggagggggagcagattgccagatgacatgcgagaatcagaatccatgtttccctatccagattatcaccctgcgcgactacattcccagaattctggggccagaggcctttcaacagtatgttggcccatacgagggttatgattcgacagccaaccccacagtcagcaatgttttttcaaccgcagcattccgtttcggccatgctacgattcatccccttgtacggcgactcgatgcctcttttcaagagcatcctgacctaccaggtctgtggctccatcaggcgttcttcagcccctggaccttgctgagaggaggtggacttgaccctttgattaggggcctgctggcacgccctgcaaaacttcaggtgcaagaccagttgatgaatgaggaactgaccgaacgcctgtttgtcctgtcaaactccagtactctcgacctggccagtatcaatctgcagagggggagggaccatggcctgcctggttacaatgagtggcgagagttttgtggcctcccaagactggaaacacctgcggatctgagcactgcaatcgcgtctagaagcgtggcagacaagattttggacttgtacaaacaccccgacaacatcgatgtctggttggggggtctggccgagaattttctgcctagagccaggactggacctcttttcgcctgtcttatcgggaaacagatgaaggccttgcgggacggtgactggttctggtgggaaaactctcacgtctttaccgatgctcaaaggcgagaacttgagaaacactccctctcccgcgttatatgcgataataccggcctgacccgagtgcccatggacgcattccaagtggggaagtttcctgaagatttcgagagctgtgactccatcactggtatgaatcttgaggcctggagagagacctttccacaggatgataaatgtggtttccccgaatctgtcgaaaatggagacttcgtgcattgcgaggagtccggccgtagggtcttggtttattcttgcagacatgggtatgagctacagggcagggagcagctgacttgcacacaggagggctgggacttccagcctcctctgtgcaaggatgttaacgaatgcgctgacggcgctcatcctccctgccacgcctcggccagatgtagaaatactaagggtggttttcaatgtctgtgcgcagacccttacgagctgggcgacgatgggcgtacctgcgtcgattctggtcgactgcccagagtgacatggatctcaatgtccttggccgcacttctaataggtggcttcgctggactcaccagcaccgtgatttgccggtggaccaggactggaaccaagtcaacccttccaatatctgaaaccggaggtgggacgcctgagttgaggtgtggtaaacaccaggctgttggcacctctccccaaagagccgcagctcaggacagcgaacaggagagcgctggaatggaagggcgagatactcaccggctcccaagggctctttag

SEQ ID NO: 244084 - DNA, 2631 bp, synthetic construct
  misc_feature 1..2631: note = Description of Artificial Sequence: Synthetic coding sequence
  source 1..2631: mol_type = other DNA
atgagagcattagcggtcttgagcgttaccttggtgatggcctgcaccgaggcttttttcccattcattagccgcggtaaagagctcttgtggggaaaacccgaggagagcagagtgagttctgttttggaggagtccaaaaggcttgtggacaccgccatgtacgccactatgcagagaaatcttaagaagcgtggcatactgagccccgctcagctcctgagcttctcaaagcttccggagcctacctctggtgtgatcgccagggccgctgagattatggagacatccatacaagccatgaagaggaaagtgaaccttaagacacaacagagtcagcatcccacggacgccctgagtgaagatctgttgagcatcattgccaatatgtccggttgtctgccatacatgctcccaccgaaatgccccaacacatgcctggcaaataagtaccggccaatcaccggcgcttgcaataatagggaccaccctcgttggggcgcaagtaataccgcactagctcggtggttgccacctgtgtatgaggatggttttagccagcctaggggatggaacccaggatttctctataatgggtttcctttgccacctgtgagggaggtaacgagacacgtgatccaggtcagcaatgaggtcgtgacagatgacgataggtactcggatctgctgatggcatggggtcagtatatcgatcacgacatagccttcacacctcagagcacttccaaagcagccttcggaggcggtgcagactgccagatgacatgcgaaaaccagaatccttgctttcccatccaactcccggaggaggccagacccgctgcaggcacggcgtgtctgccgttctatagaagctccgccgcttgcggcacaggcgaccagggcgctctgtttgggaacctcagcacagcaaacccacgccaacaaatgaatggcctgacgtccttccttgacgcttctacggtatacggcagttccccggctctggagagacagctcaggaactggacctcagctgagggcttactgcgtgtgcatgctcggcttagagactcaggcagggcctatttgccatttgtcccaccgagagccccagctgcatgtgcaccggagcctgggatacccggtgaaacaaggggtccctgtttccttgcaggcgacggtcgtgcatccgaggtgcctagcctgactgcgctgcatacactctggcttagagagcacaatcgccttgccgctgcgctgaaagcactcaacgcacactggtctgctgacgccgtctaccaggaggccagaaaggtcgtgggagctctgcatcaaattattactctaagagactacatcccaaggattcttgggccagaggcctttcagcaatacgtcgggccatacgagggctacgactctaccgccaacccaaccgtgtctaatgtgttcagtacagcagcttttcgcttcgggcatgctacgatccaccccctggttagaaggctcgatgcatcctttcaagagcaccccgatctacctgggttatggctacaccaggcattcttctcaccctggacattattgcggggtgggtacaacgagtggagggaattttgcggtctcccaaggcttgaaacacccgctgacctgtcaaccgccattgccagccgttccgtggccgataagatcctggatttgtataagcaccctgataacatcgacgtttggctgggcggactggcggaaaattttctacccagagcacgtaccggtccactcttcgcatgcctgatcggcaagcagatgaaagccctcagagatggcgactggttttggtgggaaaattctcatgtatttacagacgcacagcgtcgtgagctggaaaaacactctctctccagggtaatctgtgataatacagggctgacccgagtgcccatggatgccttccaagtggggaagttccccgaagactttgagagctgtgactcaattactggcatgaacttggaggcgtggcgtgagaccttcccccaagatgacaagtgcgggtttcccgagtccgtggagaatggggactttgtccactgcgaggaaagcggcaggagggtattggtctacagctgcagacatggatatgagctgcagggaagggaacagttaacttgtacgcaagagggctgggatttccagccccctctttgtaaggacgtgaacgagtgcgccgatggggcacaccccccttgtcacgcctctgcccgatgccgcaatacaaagggaggattccaatgtctgtgtgccgatccctatgagcttggggacgacggccgtacgtgtgtcgactctggaagactgcccagggtaacttggataagtatgagtctggccgctttgctgattggagggttcgctggtcttacctcaacagtgatctgccgctggaccagaacggggaccaaaagcaccctgccgatctctgagactggtggcggtacacctgaactgcgctgcggtaagcaccaagccgtggggactagcccacagagggctgccgcacaggactccgaacaggaaagcgccggtatggaaggaagagacacacatagacttcctcgcgcactgtag

SEQ ID NO: 244085 - DNA, 519 bp, synthetic construct
  misc_feature 1..519: note = Description of Artificial Sequence: Synthetic coding sequence
  source 1..519: mol_type = other DNA
atgcgggctctggccgtcctgtcagtgaccctggtgatggcatgcacagaggcatttttcccatttataagccgtggtaaggaattgttatggggcaagccagaggagtcccgtgtctcatcagtgctggaagagtctaagaggctggtagataccgccatgtatgcaaccatgcaaagaaaccttaagaaaagaggcatactatccccagcccagttactcagtttttccaaactgcccgaaccaacgagtggggtgatcgcccgagctgccgagataatggaaacttcaattcaggctatgaagagaaaagtgaatctgaaaacccaacagtcccagcatcctactgacgccttatctgaagatcttttgagtataattgctaatatgtctggctgcttgccctatatgctgccccctaaatgtcccaatacctgcctggctaacaaatataggccaataacaggcgcatgcaacaacagagatcacccgcgttggggcgcatccaacacggcgtag

SEQ ID NO: 244086 - DNA, 462 bp, synthetic construct
  misc_feature 1..462: note = Description of Artificial Sequence: Synthetic coding sequence
  source 1..462: mol_type = other DNA
atgaacgggttaacttccttcctcgatgcgtccactgtctacggcagctcccctgcccttgaaagacagctgcggaactggacttctgcagaaggactccttcgagtgcacgccagactgagggactctggtcgtgcatacctgccctttgtcccaccgagggctccagccgcttgcgcccctgaaccagggatcccaggagagactcggggaccgtgctttctagccggagatccgcgacagagaggcccattgccagacggaacggctcacgcggtggcagccagagcccagccgccaggcaggggtgcgcaagggcctcaatgtgcactggaaagaggacgcagggttccgggtggagctcagggcagggggagaagcgcaccagaccatcatcccgagggcctccacccgcaggatcctggaacaagagggttgcccgctgtgagggggagcctgtag

SEQ ID NO: 244087 - DNA, 525 bp, synthetic construct
  misc_feature 1..525: note = Description of Artificial Sequence: Synthetic coding sequence
  source 1..525: mol_type = other DNA
atgagagcattagctgtgctatccgtaacactcgtcatggcctgtaccgaagcctttttcccttttattagccgcggaaaggagctgttatggggcaagcccgaggaatccagagtgagctccgtgctagaggagtcaaagagactggtcgacaccgcaatgtacgctaccatgcagagaaacctcaaaaagcggggaatcctttcgcccgctcagctattaagcttcagcaaactgcccgagcccacctctggcgtaatcgcgagagcggctgaaataatggagacatccatccaggcaatgaagcggaaagtgaatctgaagacccaacagtcccagcatcctactgatgccttgtcagaggatctgctttcgatcatcgctaatatgtcaggatgcctcccctacatgcttcctcccaaatgcccaaacacgtgcctggccaataaatacaggccgatcacgggcgcatgtaataatagaaaaatgaagtacaaacctgaccattctgagactgctaattag

SEQ ID NO: 244088 - DNA, 2295 bp, synthetic construct
  misc_feature 1..2295: note = Description of Artificial Sequence: Synthetic coding sequence
  source 1..2295: mol_type = other DNA
atgcggcctgccgacctcctacaactggtgctactgctggatctgcccagagatcttggcggtatgggatgtagctctccaccttgtgagtgccatcaagaggaagactttcgagtgacctgtaaggacattcagcggatcccatcactgccaccatcaactcagactcttaaacttatcgagacgcacttacggaccattcctagtcacgcattttcaaacctcccgaatatttctaggatttacgtttctatagatgtgaccctgcagcagctagaatcgcacagcttctacaacttgagtaaagtgacccatattgaaatccggaacaccaggaatctgacttacatcgaccctgacgccctgaaggagctgccgttacttaaattcctgggcattttcaacaccggcctaaaaatgtttccagacctgactaaggtatactctacggacattttcttcattctggagattaccgacaacccatatatgacctccatccccgtcaatgccttccagggcctgtgcaatgagaccttgacactgaaactgtacaacaacgggtttacttccgtacaggggtacgcatttaatggtactaagctcgacgccgtgtacctgaacaaaaacaagtacttaactgtcatcgataaggacgcgtttggtggtgtgtatagtggcccaagcttactggatgtttcccagacaagcgtcaccgccctgccttctaaaggactggagcatctcaaggaactgatcgctcgcaacacctggactttgaagaaactgccactgtctcttagcttcctgcatctgactagagccgacctaagctatcctagccattgctgcgccttcaagaaccaaaagaagatccggggtattctggagagcctgatgtgtaatgagagttctatgcagagcctcaggcagcgaaagtctgtgaatgccctgaacagtccactccaccaagaatatgaagagaatctcggagactctattgtgggctataaggaaaaatccaaattccaggatacacacaacaatgcccactactacgttttcttcgaagaacaggaggacgaaatcataggattcggccaggaactaaagaacccccaagaggagactcttcaagcttttgattcacactacgattacaccatctgtggtgattccgaagatatggtctgcactcctaaaagcgacgaattcaatccgtgtgaggatatcatggggtataagtttctgaggatcgtggtgtggttcgtcagcctcttggcgctgttggggaatgtgtttgttctccttatcctgctcaccagccactacaagcttaacgtcccaagatttctgatgtgtaaccttgcttttgccgatttctgcatgggcatgtacctactcctcattgcctccgttgacctatatacccactcggaatactacaaccacgccatagattggcaaacagggcctggctgcaacactgctggtttttttaccgtgtttgctagtgagctgtctgtgtacacactgacagtgattacactggagcggtggtacgccataaccttcgccatgcggctagacaggaagatccgactgaggcatgcctgcgcaatcatggtgggcggatgggtctgctgcttcctgttagccctgttgcccctggtcggcatctcatcctacgccaaagtgtctatttgtttgccaatggacacagagacccccttagcccttgcctacattgttttcgtcctgactctcaatatagtggcattcgtgattgtttgctgttgctacgtcaaaatttacatcacagtacgtaacccccagtataacccaggcgacaaagataccaaaatcgctaaacgcatggcggtgctgatctttaccgatttcatctgtatggccccaatctcattttatgccctgtccgccattctgaacaagcctctcatcacggtgtcaaattcaaagatcctgctggtactattctatcccctgaactcctgtgccaatcctttcctttatgccatctttaccaaggccttccagagagatgtatttatcctgctgagcaaatttggtatttgtaagcgccaggcccaagcgtatcgtggtcaacgcgtgccccctaaaaacagtactgatatacaggtgcaaaaagttacacacgagatgcgccaagggcttcacaacatggaggacgtgtacgagttaatagaaaattctcacctaactcctaagaaacagggtcagatctcagaggagtacatgcagacggttctctag

SEQ ID NO: 244089 - DNA, 762 bp, synthetic construct
  misc_feature 1..762: note = Description of Artificial Sequence: Synthetic coding sequence
  source 1..762: mol_type = other DNA
atgcgacctgccgatcttctgcaactggttttgttgctcgacttacccagagacctgggcggaatgggatgctctagcccaccatgcgaatgtcaccaggaggaggacttcagagtcacatgcaaggatattcaacggataccaagtttgcccccttccactcaaaccctgaagctgatagagacgcatcttagaactattccatctcacgccttttcaaacctgcctaatatctctcggatttatgtgtcgatcgatgtgacactgcagcaactcgagtcccacagcttctataatctctccaaagtgacccatatcgagatacgcaacacgcgcaacctgacctatattgaccccgacgctctgaaggagctcccactgctgaagttcctgggaatttttaatacaggcctgaagatgttccccgaccttactaaagtgtactctacagatatcttctttatcctggaaatcaccgataatccatatatgacttcaatccctgtcaacgctttccagggtctctgcaacgagaccttaacccttaagttgtacaacaatggtttcacaagcgttcagggctatgcatttaacggcaccaaactggacgcggtctacctgaataaaaataagtatctcacggtgatcgacaaagacgcatttggcggagtgtatagcggtccttcactccttcttcccctcgggcgtaaaagcctgtcatttgagacccagaaggccccacggagcagcatgccctcatag

SEQ ID NO: 244090 - DNA, 1236 bp, synthetic construct
  misc_feature 1..1236: note = Description of Artificial Sequence: Synthetic coding sequence
  source 1..1236: mol_type = other DNA
atgcgtcccgctgatctgttgcagctggttttactactggacctgccgagagatctgggagggatggggtgcagctctccaccatgtgagtgtcaccaggaagaagatttccgagttacttgcaaagatatacagagaattccaagcctgcctccttctacacagacgctgaaattaattgagacacacttgaggatagtggtctggttcgtctccttgttggccctcctaggcaacgtgtttgtgctgctcattttgctaaccagccactacaagctgaatgtccctagatttctcatgtgtaatttggcctttgcagacttctgtatggggatgtatctgctcttaatcgcgagcgtggatctttacacccacagtgagtattacaaccatgccattgactggcagacggggcctggatgtaacaccgctggatttttcactgtattcgcctcagagctgagcgtttatactctgactgttatcactctagaaagatggtacgccatcaccttcgccatgcgcctcgaccgaaagatcagactgcgacacgcttgtgccatcatggttggaggctgggtgtgctgctttcttcttgccctccttcccctggtgggcatctcttcctacgctaaggtgagcatatgcttgcctatggatactgagacacctctggccttagcttacattgtgttcgtcctgactttaaacatagtcgccttcgtcatcgtgtgttgctgctatgttaaaatctatattactgtgaggaatcctcagtacaaccccggagacaaagacacaaagatcgccaagagaatggcggtgctgatttttaccgattttatttgcatggcccctatatcgttctacgctctgtcagccattcttaacaagcccctcatcaccgtttctaattctaaaatcctcttggtgttattttaccccctgaacagctgcgcaaacccctttctgtacgcaatctttacaaaggcatttcagagagacgtgtttattcttctgtcgaagtttgggatctgcaagcggcaggctcaagcataccgcggacagcgcgtaccgccaaagaacagcactgatattcaggtccagaaagtcacacacgagatgagacagggactacacaacatggaagacgtgtacgaactgatcgaaaacagccatcttaccccaaagaagcagggacagattagcgaggagtacatgcagacagtactgtag

SEQ ID NO: 244091 - DNA, 2295 bp, synthetic construct
  misc_feature 1..2295: note = Description of Artificial Sequence: Synthetic coding sequence
  source 1..2295: mol_type = other DNA
atgaggcctgccgatctcctccagcttgtcctgttgctagatctacctcgggatctggggggtatggggtgctcttctcctccatgcgaatgtcatcaggaggaggactttcgagtgacttgtaaagacatccagcgaataccctcactcccaccatctactcagacactcaaacttattgagacccacttgcgaaccattccatcccatgccttttctaatcttcccaacatttccaggatctacgtgtctatcgacgtcaccctgcagcagctggagtcacactcgttctacaatctgtcaaaagtgacgcacatcgagattagaaacacaaggaacctgacatacatcgaccctgacgcgctgaaagaactgccccttctgaagttcttaggaatctttaacacgggtctgaagatgttccctgatctaaccaaggtgtatagtacagacattttttttatcctagagattaccgacaatccctatatgacaagcattcccgtgaatgccttccagggactatgcaacgagacgcttacactcaaactgtataacaacggattcacctcggttcaggggtacgcgttcaacggcaccaaacttgacgccgtatacctcaacaaaaataaatacctaacggtcatcgataaagatgcttttggcggtgtgtactctgggcctagcctgcttgacgtgagtcagacttccgtgaccgctctgccaagcaaggggctggagcatctgaaggaactgatcgccaggaacacctggactttgaaaaagctgcctctttcactgagcttcctgcatttaacacgtgcagacctgtcatatccctcacactgttgcgccttcaagaaccagaaaaaaattagaggaatactggaatccctaatgtgtaacgagtcttctatgcagtcactgcgtcaacgaaagagcgtgaacgcacttaacagtcccctgcaccaagaatacgaggaaaaccttggtgactccatcgtgggttacaaagagaaatctaagttccaggatacccataataacgcccactactacgtgtttttcgaggaacaggaagacgagatcattggcttcggtcaggagctgaagaacccccaggaagagacccttcaagctttcgacagccattacgattacactatctgcggcgacagtgaggatatggtctgtactcccaaatcagatgaattcaacccttgtgaagatatcatggggtacaagttcctgcgtatagtagtgtggttcgtctccctactggccctgctgggtaatgtgtttgttctcctgattctgctgacttcccactacaaactgaacgtcccacggttcctaatgtgcaacctggcctttgcagatttctgcatgggtatgtacctcctgttgatcgcaagcgtggacttgtatactcattccgaatactataatcatgccattgattggcagactgggcctggatgtaatactgcaggattctttaccgtgttcgcgtcagaactcagtgtttacactcttactgtgatcactttggagcggtggtatgccataacctttgcaatgcgcctggaccgtaagataagactccgacatgcttgcgcaatcatggtgggcggttgggtgtgttgcttcctgttagccctgctgccactcgttggcatctcctcgtatgccaaggtgtcgatatgtctgcccatggacacagagactcctctcgccctcgcctacattgttttcgtgctgacccttaacatcgtcgcctttgtcattgtgtgttgctgctatgtgaagatctacataaccgtcaggaacccccaatataacccaggcgacaaagacacaaaaatcgccaagagaatggcagtactcattttcactgactttatttgcatggctccaatatccttctacgctctgtccgccatcctgaataagcccctcattactgtgtcaaatagtaagattctcctggtgctcttctaccccctgaactcctgcgccaatcccttcctttacgccatttttactaaagcatttcagagggacgtctttatcctactctctaagtttggaatctgcaagcgccaggctcaggcataccggggtcagcgagtgcccccaaaaaattccaccgacattcaggtccaaaaagtaactcacgagatgcgccagggactacataatatggaggatgtctatgagcttattgagaactcccatctgaccccaaagaaacagggacaaataagtgaagaatacatgcagacagtcctatag

SEQ ID NO: 244092 - DNA, 825 bp, synthetic construct
  misc_feature 1..825: note = Description of Artificial Sequence: Synthetic coding sequence
  source 1..825: mol_type = other DNA
atgagacctgcggatttgttgcaactcgtgttgctgctggatctgcctcgcgatctcgggggtatgggatgctcctcaccaccttgcgaatgtcaccaggaggaagattttcgggttacctgtaaggacatacagaggatacccagccttccccctagcactcagacgctgaagctcattgaaacccacctccgaaccatccccagccatgcgttctccaacctgcccaacatctcaaggatctacgtttccattgacgtaacgctacagcagctggagtcacactcattttataacctgtcaaaagtgactcacatcgagatcaggaataccaggaatctcacctacatcgatccggacgcccttaaggagctgccattgctgaagttcctcggcatcttcaacacgggcctgaagatgttcccggacctcacaaaggtgtattctactgatattttctttatactggagatcactgataatccttatatgacgtctatacccgttaacgccttccaaggcctctgcaacgaaaccttgactcttaaactgtacaacaatggctttactagcgtccagggttacgcttttaatggtactaaattggacgctgtttatctcaataaaaataagtatctgacagtgatagacaaagatgccttcggtggcgtatattcagggccttccctgctcgtcgaaaacgtagccgtgtcaggcaaaggattttgcaagtctctgttttcttggctgtacagattacccctgggcagaaaatcactgagctttgagacacaaaaagcacctcgctcatccatgccctcgtag

SEQ ID NO: 244093 - DNA, 912 bp, synthetic construct
  misc_feature 1..912: note = Description of Artificial Sequence: Synthetic coding sequence
  source 1..912: mol_type = other DNA
atgtccgacgccggaggcggaaagaagcctcctgttgatcctcaagcaggccctggacccggtcccggaagagctgccggagaacgcggtttaagcggatccttccccctggtcctcaagaagcttatggaaaatcctccaagggaggctagattagataaagaaaaaggaaaagagaaactcgaagaagacgaagcagctgctgccagcacaatggctgtgagcgcctctctgatgcctcccatctgggacaaaacgattccatacgatggagaatcatttcacctcgagtacatggacctggacgagttcctgcttgagaatgggatcccagccagcccgactcatctcgcgcataacttactcctgcccgttgcggaacttgagggaaaggaatctgcgagcagctcaactgcttcacctccatccagctcaacggcgatctttcagcccagtgagactgtgagttctaccgaaagcagtctggagaaggagcgggagacaccctcacctatcgatccaaattgcgtggaggtcgacgttaacttcaaccccgacccagccgatctggttctgtcctccgtccccggaggggagctgttcaatcctaggaagcataaattcgcggaagaggatctcaagccgcaacccatgatcaagaaggccaaaaaggtgttcgtgcccgatgaacagaaggatgagaaatattggacacgccgtaagaaaaacaatgtggctgctaaacgcagccgggacgcgcgaagattgaaggaaaatcagataacaattcgagctgccttcctggaaaaagaaaacactgcccttcggacagaagtagccgaactccgcaaagaagtcgggaaatgcaagactatcgtgagcaagtacgaaaccaaatacggcccactgtag

SEQ ID NO: 244094 - DNA, 555 bp, synthetic construct
  misc_feature 1..555: note = Description of Artificial Sequence: Synthetic coding sequence
  source 1..555: mol_type = other DNA
taatttatattcctgcctcggcctggcacctcacttggcagaattcggaaagctgacaaggaaaagggcaaggagaagctggaggaggatgaggcagcggctgcttcgaccatggctgtttcagcctccctgatgccaccaatttgggacaaaactattccttatgatggagaatccttccacctagagtacatggatcttgacgaatttctgctcgaaaacgggataccagcttcccctacccacttggcacacaatctgcttctgcccgtggccgagttagaaggcaaagaaagcgcttcgtcgagtactgcttcccctcccagctcctccaccgccattttccaaccatccgagactgtaagtagcacggaatcctccctggaaaaagagcgtgagactccttccccaattgatccaaattgcgtagaagtcgatgttaacttcaatcccgatcctgccgaccttgtcctgtcgagcgtgccgggaggagaactgttcaatcctagaaaacacaagttcgcagaggaggacctcaagccgcagcccatgtag

SEQ ID NO: 244095 - DNA, 822 bp, synthetic construct
  misc_feature 1..822: note = Description of Artificial Sequence: Synthetic coding sequence
  source 1..822: mol_type = other DNA
atggatatgccagaggttctgaaatctctgcttgaacacagcctgccttggcccgaaaagcggaccgataaggaaaaaggcaaggaaaaactggaagaggatgaagccgcagcagcctccacgatggccgtgagcgcgtcactgatgcccccaatctgggataagaccatcccctatgatggcgaatctttccatttggagtacatggatctagacgaattccttctggagaatgggatccctgcttccccaacccacttggcacacaacctcctgttaccagtggcggagttggagggtaaggagtccgcttctagcagcactgctagtccccctagcagctcaacagctatttttcagccgagtgagacagtcagcagtacagagtcaagtttagaaaaggagagagaaacccctagccccatcgaccccaattgcgtcgaggtcgacgtgaacttcaaccctgaccctgctgatcttgtcctcagtagcgttcctggtggagagctgtttaacccacgcaaacataaattcgccgaggaagatctgaagcctcagcccatgattaagaaagctaaaaaggtatttgtgcccgatgaacagaaagacgaaaaatactggactcgcagaaagaagaataacgtcgctgcgaagagaagcagagacgcgaggagactcaaggagaatcaaatcacaatccgcgctgctttcctggagaaagagaacaccgccctgagaaccgaggttgcagagctgcgaaaagaagttgggaaatgtaagaccatagtctctaaatacgaaacaaagtatgggccattatag

SEQ ID NO: 244096 - DNA, 822 bp, synthetic construct
  misc_feature 1..822: note = Description of Artificial Sequence: Synthetic coding sequence
  source 1..822: mol_type = other DNA
atggatatgccggaggtgttgaaatcactgttggagcactccctgccgtggcctgagaaaaggacagacaaagagaagggcaaagaaaaattggaggaagacgaggccgctgccgctagcacaatggctgtgagtgcctccttaatgcctccaatttgggacaagacaattccttacgatggggaaagtttccacttagagtatatggatttggacgagtttctgcttgaaaatggaataccagcttcccccacccacttagcccacaatctgttgcttcccgtggccgagttggagggcaaagagtccgccagttcttccaccgccagcccacccagtagcagcacggctatcttccagccctccgaaacggtgagctcgacggagtccagtctagagaaggaacgggagaccccgtctcctatcgatccgaactgcgtggaagtggatgtgaatttcaacccggaccctgcggacctggtgctctcctctgtaccaggcggtgagctttttaaccccagaaaacacaagttcgcggaggaggatctgaagccccagcctatgattaagaaggcaaagaaggtgttcgttcccgatgagcaaaaggacgagaaatactggacccgtcgaaagaagaacaatgtcgctgccaagaggtctcgagatgcccgaagacttaaagaaaaccagatcacaatcagggcggctttcttggagaaggagaacaccgctttgcggactgaggttgctgagctccgcaaagaggtaggaaagtgcaagaccattgtttcaaagtacgagacgaagtatgggccactgtag

SEQ ID NO: 244097 - DNA, 729 bp, synthetic construct
  misc_feature 1..729: note = Description of Artificial Sequence: Synthetic coding sequence
  source 1..729: mol_type = other DNA
atgccaggcccatggctcctccttgctctggcactcactcttaatttgaccggcgtgcctggcggacgcgctcaacctgaagcagcccagcaagaagcagtcacggccgcagagcaccctggtttggatgacttcttgagacaagtggaaaggttactcttcttgagggagaatatacagaggctccaaggggaccagggggagcacagcgcatcccagatttttcagagtgattggctgagcaagaggcagcatcccggtaagagagaggaagaggaggaagaaggcgtggaagaggaggaggaagaggagggaggcgctgtgggacctcacaaacggcagcatcccggtagacgagaagacgaggcttcatggagtgtggatgtgacccaacataagcgacagcacccgggtagacgatcaccttggctggcctatgcagtgcccaaacgccaacacccaggtaggaggcttgctgatcccaaagctcagaggtcctgggaagaagaagaggaggaggaggagcgcgaagaggaccttatgcctgaaaaaaggcagcacccaggtaaacgcgctctcggagggccatgcggccctcagggagcgtatgggcaggccggacttctgctgggactcctcgatgacctgagccgatctcagggggctgaggagaaaaggcagcaccctggcagacgggctgcatgggtccgtgaaccgctcgaggagtag

SEQ ID NO: 244098 - DNA, 3075 bp, synthetic construct
  misc_feature 1..3075: note = Description of Artificial Sequence: Synthetic coding sequence
  source 1..3075: mol_type = other DNA
atgggcgaagatgacgctgcgctcagggctgggtcgagagggctcagcgacccgtgggctgattctgtgggcgtgcggcctcgtaccaccgaacgtcacatagcggttcacaagcgtcttgtgctagcgttcgctgtctctctggtggcattgcttgccgtaacaatgctggccgtgcttctctcactccgtttcgacgagtgtggggcttcagccactcccggagccgatgggggaccctcaggctttccagaaagggggggaaacgggtcgcttcctggctccgctcggaggaatcatcacgcaggcggagattcatggcagccagaagccggtggggtggccagcccaggaaccacctctgctcaacctcctagtgaagaggagcgggagccttgggagccctggactcagctccgacttagcggccatttgaaacccctccactacaacctaatgctcacagcattcatggaaaattttacattctctggcgaagtaaatgtggagatcgcctgccgtaatgctacaagatatgtagtgctgcacgcaagtagagttgccgttgagaaggtccaacttgccgaggatagagcttttggggcagtccccgtagccggttttttcctctatcctcagacacaagtgctggtggtcgtgctgaaccggacactggatgcccagcgtaattataacctgaaaattatctacaacgcactaattgagaatgagttacttggcttcttccgctccagctatgtgttgcacggcgagcggaggtttttgggtgtcactcaattttcccctacacacgctcgcaaagcctttccctgcttcgacgagccaatttataaagctacttttaaaatctctatcaagcaccaagctacctacctgtcccttagcaacatgccagtcgagaccagcgtctttgaggaagacgggtgggtgaccgatcattttagccagactcccctcatgtctacttactacctcgcctgggctatctgtaacttcacatatcgggaaacaacaactaaaagtggagttgtggtaagactatatgctcggccagatgccatcagaagagggtccggggactacgccctgcacattaccaagaggctgattgagttttatgaagactactttaaagtcccttatagcctgcctaagctggatctgctggcggtacccaaacacccatacgcagccatggaaaattggggacttagtattttcgttgaacagaggattctcctggacccatccgtcagtagcatctcctacttactcgatgttacgatggtgatcgtccacgaaatatgccatcaatggtttggtgatttggtgacccctgtctggtgggaagacgtgtggttgaaagaaggattcgcccactacttcgaatttgtggggactgactacctgtatccagggtggaacatggagaaacagcggttcctgactgatgtcctgcatgaagtgatgctcctagatggactggcgtcatcccaccctgttagtcaagaggttctgcaggcaacagacatcgatcgggtctttgattggattgcatataaaaaaggagcagccctgattcggatgttggcgaactttatggggcactcagtatttcagaggggcctgcaagattacctgacaatccataagtacggtaatgcggcaaggaatgacctgtggaatactctgtctgaggctctaaaaagaaacggaaaatacgtaaatattcaagaggtgatggatcagtggaccctgcaaatgggttaccccgtgatcacgatcctgggtaacactaccgctgaaaacaggattataatcacccagcagcactttatatatgacatcagcgccaagaccaaggccttgaaactgcagaacaatagctatctctggcagatacctttgactattgtggtgggtaaccgctcacatgtctcatcagaagcaatcatatgggtgagcaacaagtcggagcatcatagaataacctatcttgacaaaggttcctggctcttaggcaacattaaccaaactggctactttcgcgtgaattacgacctcaggaattggcggctcctgattgaccaacttatccgcaaccacgaggtcctctccgtgagcaacagggccggactcatagatgacgctttctccctggcacgggcaggctatttacctcagaatatcccattagagatcatccgttacctgagcgaggagaaggatttcctgccttggcacgctgccagccgcgctctctatccgctggacaagctgttggataggatggagaattataatatctttaatgaatatattctcaagcaggtggcaaccacctacatcaagcttggatggcctaagaataactttaatggatctctggtccaagccagttatcaacacgaggaactgcgtcgggaagttataatgttggcatgctccttcggtaacaaacattgtcatcagcaagcatcaaccctcatctccgattggatttctagcaacagaaatcgtataccacttaatgttcgtgacatcgtgtactgtacaggtgtcagcctcttggacgaggatgtctgggagtttatctggatgaaattccattctacaaccgctgtctcagaaaagaaaattcttctggaggcattgacctgtagcgatgaccgcaaccttcttaaccgattattaaatctctctctcaacagtgaggtggtactggaccaggatgccattgatgttattatacacgtggcaagaaacccacacgggagggatctagcgtggaagttttttagagacaagtggaaaattctcaatacgagatacggcgaggcattatttatgaactcaaaactgattagtggggtcacggagtttctgaacaccgagggggagctcaaggaactgaagaacttcatgaagaattacgatggtgttgcagcagctagttttagcagagccgtcgaaaccgtggaggctaacgtgagatggaagatgctgtatcaggacgaactgtttcaatggctaggcaaggctctccgccactag

SEQ ID NO: 244099 - DNA, 1197 bp, synthetic construct
  misc_feature 1..1197: note = Description of Artificial Sequence: Synthetic coding sequence
  source 1..1197: mol_type = other DNA
atggaaaatgaaacggtgtcagaactgaaccagacccaactccagcccagggctgttgtggccctggagtaccaggtggtgactatcctgctggttctgattatctgcggactgggaattgtgggaaatatcatggtcgtcctggtggtgatgaggaccaagcacatgagaacccccaccaactgctacctcgtgtccctagccgtcgccgacctaatggtgctggtagctgcgggactcccaaacattacggactcaatttacggctcatgggtgtatggatacgtggggtgcctgtgtattacttaccttcaatatctaggaataaacgcatccagctgcagtattactgcctttaccatcgaacgctatatcgccatttgccacccaatcaaagcacaattcctctgtactttcagtcgggcaaaaaagatcatcatattcgtgtgggcctttacaagtctttattgtatgttatggtttttcctgctggatctaaacatctctacctataaagacgctattgtgatcagttgcgggtataaaatcagtaggaactactactcccctatctacctgatggattttggtgttttttacgttgtccccatgattctggctacagtattgtacggcttcatagcccgtatactgttcttgaaccctatccccagcgatcccaaggaaaatagtaaaacatggaaaaatgatagtactcatcaaaataccaacctgaacgtgaacacttctaaccgttgcttcaattcaactgtgagcagcagaaaacaggtgactaagatgctggccgttgtcgtcatactttttgcactgctctggatgccttataggaccctggtggtggtaaacagttttttatcttcacctttccaggagaattggtttttactcttttgcaggatctgcatttatttaaattcagccatcaatccagtcatttacaacctcatgtcacagaagttcagagctgcctttagaaaactgtgcaactgcaaacagaaacccacagagaaacccgctaattactccgtggcattgaattacagcgttatcaaagagtccgatcatttttcaactgaattggacgacattacagtgactgatacatacttgtcagcaacaaaggtgtcgttcgacgacacatgtctggcatctgaggtgtctttcagtcagagctag

SEQ ID NO: 244100 - DNA, 1197 bp, synthetic construct
  misc_feature 1..1197: note = Description of Artificial Sequence: Synthetic coding sequence
  source 1..1197: mol_type = other DNA
atggagaacgagaccgtttcggagctcaaccagactcaactacagccacgtgcagtggttgctctggaatatcaggtggtgacaattttgctggtgttaattatttgcggacttggtatagtaggcaatataatggtggtgctggtggtaatgaggacaaagcacatgaggacccctacaaattgctatctggtaagtctggccgtggcggatctgatggtgctggtggccgctggcctacccaatattacagactcgatttacggaagttgggtgtatgggtatgtcggctgcctctgtataacttatctgcaatacctgggcattaacgctagcagctgcagcatcacagctttcacgatcgaaaggtacatagccatctgccatccaattaaggctcagtttttgtgcacattctcaagagcaaagaagattattatctttgtgtgggcatttacaagtctgtattgcatgctctggttctttctgctcgacctgaatattagcacctacaaagatgcgattgttatcagctgtggctataaaatctcaaggaattattacagcccaatctacttaatggatttcggtgtgttttatgtagtgcccatgatccttgccactgtgctctatggattcatagcaagaatccttttcttgaatcctatcccctccgaccctaaggagaattctaagacatggaaaaacgattcaactcaccagaatacaaacctaaatgtgaatactagtaaccgctgctttaattccacggtgtcttcaaggaagcaggtgactaagatgctggctgtagtcgtgatcctcttcgccctgctgtggatgccttacaggactcttgtggttgtcaattcattcctcagctcgcccttccaggaaaactggtttttgctgttttgccgcatctgcatatatctgaacagtgccatcaatcctgtgatttataatctgatgtcgcagaagttcagggccgcattccggaaattatgcaactgtaaacagaagcctactgaaaagcccgctaattactcggtcgctctcaactactccgtcatcaaagagagtgaccatttttcaaccgagctagacgacattaccgtcaccgatacatatctgtccgcaaccaaggtgtcattcgatgatacgtgcctcgccagcgaggtgagcttttcacagagttag

SEQ ID NO: 244101 - DNA, 1128 bp, synthetic construct
  misc_feature 1..1128: note = Description of Artificial Sequence: Synthetic coding sequence
  source 1..1128: mol_type = other DNA
atggaagatgagatgcccaaaaccctgtacgtgggtaatctgagcagggacgttaccgaagctctgatactgcagctgttttcccagatcgggccttgcaagaactgtaagatgatcatggataccgcagggaatgacccctactgtttcgttgagtttcatgaacaccgtcacgctgctgcggctctcgctgctatgaatggccgaaagattatgggcaaagaggtaaaggtgaactgggctacaacaccaagtagccagaaaaaagatacaagcaatcacttccacgtcttcgtcggcgacctctcacctgaaatcaccactgaggacatcaaggcagctttcgccccttttggccgaatctcagacgccagggtggtcaaggatatggccacagggaagtcaaaaggatacggcttcgtgtcgttcttcaacaagtgggacgctgagaatgccatccaacagatggggggtcagtggcttgggggacgccagatacgaaccaattgggctaccaggaagccacctgctccgaagtccacttatgagtctaataccaagcaactgtcatacgatgaagtggtcaatcaatcctctccctccaactgcaccgtctactgtgggggtgtgactagcggcctgactgaacagctgatgaggcagacgttcagcccctttggtcagataatggaaatacgcgtcttccctgataagggatattctttcgtacggtttaacagtcatgagtccgctgctcacgctatagtctcagtgaacggtaccacgatcgagggccatgtcgttaaatgctattgggggaaagagacactggatatgatcaacccggtccagcagcagaatcagatcgggtatccccagccatatggccagtggggacagtggtatggaaatgcccagcaaattgggcagtatatgcccaatggatggcaggtgccagcatacggaatgtatggtcaggcctggaatcaacaagggtttaatcaaacacaaagttcggctccctggatgggacccaattacggggtccagccgcctcaggggcagaatggtagcatgcttccaaatcagcccagcgggtatagagttgccggatatgaaacacagtag

SEQ ID NO: 244102 - DNA, 1161 bp, synthetic construct
  misc_feature 1..1161: note = Description of Artificial Sequence: Synthetic coding sequence
  source 1..1161: mol_type = other DNA
atggaagacgaaatgcccaaaactctgtacgtcggcaacctcagtagagacgtcacagaagcccttatactgcagctgtttagccagattggcccatgtaagaactgtaaaatgattatggatacggccggaaacgacccttattgcttcgtcgagtttcatgaacacagacacgctgcagcggcattagccgcaatgaacgggaggaagatcatgggtaaagaggtgaaagtgaactgggccactacaccctctagtcagaagaaagatacttcctcctccactgtggtcagcacacaacggtctcaggatcacttccacgtttttgtaggagacctaagtcctgaaataacaacagaagatattaaagccgcattcgccccttttggacggatcagtgacgcccgagttgtaaaggacatggctacaggaaagagtaaggggtacggctttgtaagcttcttcaacaaatgggacgcagaaaacgcaatccagcagatgggcggtcagtggcttgggggacgccagatccgcacgaactgggctacacgtaaaccaccagccccaaagagcacttacgaaagcaacaccaaacagctgagctatgacgaagtggtcaaccagtcctctccaagtaactgcaccgtgtactgcggtggagttacatccggcttgacagagcaactcatgagacagacattttcacccttcgggcagataatggagattcgagtattcccggataaggggtattcattcgtgcgctttaacagccacgagtctgccgcacacgctatcgtgtctgtgaatgggacaaccatcgaagggcatgtcgtcaaatgctactggggcaaggagactctggacatgataaacccagtgcagcaacagaatcagatcggctacccacaaccctacgggcagtggggacaatggtacggaaacgcacaacagattgggcagtacatgcccaacggttggcaggtcccagcctatggcatgtacggtcaagcttggaaccagcagggcttcaaccaaacacagagtagtgccccttggatgggacctaactatggcgtccagcctcctcagggccagaacggatcaatgctccctaatcagccatcgggctaccgcgtagccggttacgaaacacagtag

SEQ ID NO: 244103 - DNA, 1392 bp, synthetic construct
  misc_feature 1..1392: note = Description of Artificial Sequence: Synthetic coding sequence
  source 1..1392: mol_type = other DNA
cccttggttagccgggaaaccccgctgagttgtagtcacaaccgcctcaacgacttggggggaagcgaaggccaaggcgctggtcccggaggcgctgctgccactgcagccgcaatggaagacgagatgccaaaaactctctacgttggtaatctgagcagggacgtgacagaggcactcatcctgcagctgttttcacagattggcccttgcaaaaattgcaaaatgatcatggatacggccggtaacgacccctactgttttgtggagtttcacgaacaccggcacgctgcagctgcgctggcagccatgaacgggagaaagattatgggcaaagaagtgaaagttaactgggctaccacaccctcctctcaaaagaaggacacgtcttccagtactgtagtgtccacccagagatctcaagaccacttccacgtgttcgtcggcgacctgagcccagaaattactacggaggatattaaagctgcgtttgcacccttcggaaggatctccgatgcaagggttgtgaaagatatggctacaggaaaaagcaagggctatggcttcgtttccttctttaacaaatgggacgctgaaaatgccattcagcaaatgggcggacagtggctgggcggtagacaaatacggacgaactgggccactaggaaacccccagctccaaagtccacctatgagtgcagatgcataggcgaggagaaagagatgtggaatttcggggaaaaatacgctcgcttttgcagtcgtaggctgatcgccgagattgatgagaaacagatcaaaacaactattcagaaaagcaatactaagcaattaagctatgacgaggtggttaaccagtcttctccatccaattgtactgtgtattgtggtggagtgacctctggccttacggagcagctgatgagacagacttttagccccttcgggcaaatcatggagatacgggtattcccagacaaaggctactcattcgtacgctttaattcccacgagagcgctgcacacgccattgtgtccgtgaacggtacaacgatcgaagggcacgttgtcaagtgctactggggcaaagaaaccctcgatatgatcaatcctgttcagcagaatcagattggatatcctcagccatacgggcagtggggtcaatggtacgggaacgcccagcagattggccaatatatgcctaacgggtggcaggtgccagcctatggcatgtatgggcaggcatggaatcagcaagggttcaaccaaacccagagcagtgcaccctggatgggaccaaattacggtgttcagcctccccaggggcagaacgggtccatgcttcccaaccagccgagcgggtacagagtggctggctacgagacccagtag

SEQ ID NO: 244104 - DNA, 258 bp, synthetic construct
  misc_feature 1..258: note = Description of Artificial Sequence: Synthetic coding sequence
  source 1..258: mol_type = other DNA
atgattacagagcacaccagcaatgacccatattgcttcgttgagttttatgaacatcgtgatgctgctgccgctcttgcagccatgaatgggaggaaaatcctcgggaaagaggtgaaggtgaactgggcaacgacgccaagcagtcagaagaaggacacatcaaaccactttcatgtgtttgtgggggacctcagccctgagattacaacagaagacattaagtccgcctttgccccattcggaaagatttcgtag

SEQ ID NO: 244105 - DNA, 759 bp, synthetic construct
  misc_feature 1..759: note = Description of Artificial Sequence: Synthetic coding sequence
  source 1..759: mol_type = other DNA
atggatgctagagttgtaaaggatatggccacaggtaaaagtaaggggtacgggttcgtgtcattctacaacaaactggacgccgagaatgccatcgtgcacatgggcggtcagtggttagggggacgccagattcgaacaaactgggctacgcgaaaacctcctgccccaaagagcacgcaggagaataacacaaaacagctgcgattcgaggatgtagtgaaccagtctagtccaaagaattgcacagtgtactgtggaggtattgcttcgggccttacagatcagttgatgagacaaacgttttcgccattcggccaaattatggagatacgcgtctttcccgagaaagggtactcatttgtgaggttctccacccacgaatctgctgcccatgccatcgtgtctgttaatggtacaaccattgagggacatgtcgtaaagtgttactggggcaaggaatcacccgacatgacaaagaatttccagcaggttgactattctcagtggggacaatggtcacaggtctatggaaaccctcaacagtacggccagtacatggctaatggctggcaggtgcctccttacggagtgtacggacaaccctggaaccagcaaggctttggagtggatcagagtccctcagcagcttggatgggaggttttggagctcagcccccacagggacaagctcctccgccagtgatcccgcctccaaatcaggccggatatggtatggcgtcctatcagacccagtag

SEQ ID NO: 244106 - DNA, 1179 bp, synthetic construct
  misc_feature 1..1179: note = Description of Artificial Sequence: Synthetic coding sequence
  source 1..1179: mol_type = other DNA
atgatggaggatgatggccagccccgtacactgtacgtcggcaatctgtccagagacgttacggaggtcctgattcttcagttgttttctcagattggtccctgcaagagttgcaagatgatcacagagcagcctgattctaggagagttaattcaagcgtgggcttcagtgtgctgcaacacacctccaatgatccatactgtttcgttgaattctatgaacatagggatgcggcagcggctctggccgcaatgaacggcaggaagatcctgggcaaggaggtcaaagtcaactgggcgacaaccccttcatctcagaagaaagatactagcaatcatttccacgtgtttgtgggtgacctcagccctgaaatcacaacggaggatattaaaagtgcattcgctccgtttggaaaaatatctgatgctcgagttgtcaaggatatggcgactggaaagtccaaagggtatggtttcgtctcattttacaacaagcttgatgctgaaaacgccattgttcacatggggggacagtggctcggcggaagacagatccgcaccaactgggccactcggaaacctcctgctccaaaaagtacccaagaaaacaacactaagcagctacggtttgaggacgttgtaaaccagagttccccaaagaattgcacggtgtattgcggcggaattgcttcaggactgactgaccagttaatgagacagacatttagcccattcggacaaataatggagattagagtgtttcccgagaaaggttattcctttgtcagatttagcacccacgaatcagcagcacacgccattgtgtcggtcaatgggacaacaattgaaggccacgtcgtgaagtgttattggggaaaggaatctccagacatgaccaaaaattttcagcaggtcgattattcccagtgggggcagtggtcacaggtttacgggaatccccaacaatacggccaatacatggccaatggttggcaggtacctccttatggcgtgtatggacagccatggaatcagcaggggttcggggtggaccagagcccaagcgcagcttggatgggcggatttggggctcaaccccctcaggggcaggcgcctcctccagttataccacccccaaaccaagctggctacggaatggcaagctaccagacccagtag

SEQ ID NO: 244107 - DNA, 399 bp, synthetic construct
  misc_feature 1..399: note = Description of Artificial Sequence: Synthetic coding sequence
  source 1..399: mol_type = other DNA
atgatcactgagcacacctccaatgatccctattgctttgtggagttttatgaacatcgagatgccgcagcggcactggccgctatgaatggaagaaagatcttgggcaaggaggtgaaggtgaactgggctactaccccatctagccagaagaaggacacgtcaaaccactttcacgtcttcgtcggagacctctcaccagagatcaccactgaggatatcaaaagcgcctttgccccttttggcaagataagtgacgcccgagtagtgaaggacatggctaccgggaagagcaaagggtacggctttgtgagcttctataacaagcttgatgcggagaacgcaatagttcatatgggcggacaatggcttggagggaggcaaattcggacaaattag

SEQ ID NO: 244108 - DNA, 1128 bp, synthetic construct
  misc_feature 1..1128: note = Description of Artificial Sequence: Synthetic coding sequence
  source 1..1128: mol_type = other DNA
atgatggaggacgatggtcaaccccgaacactgtatgtcggaaacctgtcgcgcgatgtaacggaggtgttaatccttcagctgttcagccaaataggcccatgcaaaagttgtaaaatgattacagagcacacatctaatgacccctactgtttcgttgaattttatgaacacagggatgccgctgcagctctagctgccatgaatggcagaaagatcctgggaaaagaagtgaaagtgaactgggcaacgaccccttcttcccagaagaaggacacctctaaccattttcacgtattcgtcggagatctttcgcctgaaatcaccactgaggatatcaagagtgctttcgccccatttgggaaaattagcgatgccagagtggttaaagatatggccaccggcaagtctaagggatacggatttgtgtccttctataacaagctggatgctgaaaacgcgatcgtgcatatgggcggtcagtggctaggcggaagacagattcgcacaaattgggcaactcggaagccacctgcacccaaatccacccaagaaaacaacactaaacagctgaggttcgaagatgttgtgaaccagagctcaccaaagaattgtacggtctactgcgggggtattgcctccggcttgactgatcagctgatgagacagacattcagccctttcgggcagattatggagataagagtcttccctgagaagggctattcatttgtgcgattttctacacacgagtccgccgctcatgctattgtatctgtgaacgggacaactattgagggtcatgtggtcaaatgctattgggggaaggaatccccagacatgaccaagaactttcaacaggtggattatagccagtgggggcaatggtctcaggtttatggcaaccctcagcaatatggacagtatatggccaatggctggcaggttcccccttacggagtctatgggcagccttggaaccagcagggcttcggagttgaccagtcccccagtgcagcttggatggggggatttggcgcacagcctccccagggacaggcaccaccgcctgtgattcctcctccaaaccaggctggatatggaatggcaagttaccaaacacagtag

SEQ ID NO: 244109 - DNA, 1776 bp, synthetic construct
  misc_feature 1..1776: note = Description of Artificial Sequence: Synthetic coding sequence
  source 1..1776: mol_type = other DNA
atggcatctaaatgttccagtgaaaggaagtcacgcacttcactaacgctcaatcaaaaattagagatgatcaagttgtcagaggaagggatgagcaaggccgaaatcggcagacggctcggactcctgcggcagactgtgagccaggtcgtcaatgcaaaggaaaaattcctcaaggaagtaaaaagcgcgacccctatgaatacccggatgattcggaagcgtaatagtctcatcgccgatatggagaaagtcctcgtagtctggattgaggaccaaactagtcggaacatccctctgagccaaagtctgattcaaaataaggccctcaccctgtttaactcaatgaaggccgaaaggggcgttgaagccgcagaggaaaagttcgaggcctctaggggatggttcatgcgctttaaggagcgcagccacttccacaacattaaagcacaaggagaagcagctagcgctgacgtggaagctgcagcttcttacccagaggcactggctaagatcatcgacgaaggtggctacaccaaacagcagatttttaatgttgatgagacagctttttactggaagaagatgccgagccggacatttatagcacgtgaggagaagagtgtgcccggatttaaggccagcaaggacaggttgacactgctgctcggagcaaacgccgctggcgacttcaaactgaaaccaatgctcatctatcatagtgagaatccccgagcactcaagaattatactaaaagtaccctgcccgtcttatataagtggaacagtaaagccaggatgactgctcacctgttcaccgcctggtttacagagtatttcaagcccaccgtggagacctactgcagtgagaaaaaaatcccattcaagattctgctcctgatagacaacgcgccttcccatccccgagccctgatggagatatatgaggagattaatgtcatttttatgcctgctaacactacctcgatcctgcaacccatggaccagggcgtaataagcaccttcaagtcatactacttgagaaatacctttcataaggcactggcagccatggactcagacgtctctgatgggagcggccagtcaaagctcaagactttctggaagggattcaccatcctggatgccattaaaaatatcagggactcttgggaggaggttaaactgagtacactcacgggagtatggaagaaacttatacccaccttgatcgacgactacgaaggctttaagacttccgtagaagaagtatcagcggacgtcgtcgaaatcgcaaaggaacttgagctggaggtggagcccgaagacgtgaccgagctccttcagtcccacgacaagactcttacagatgaggaactgtttttaatggatgcccagcgcaaatggtttctggagatggaaagcacccccggagaggatgccgtgaacatcgtggagatgacaaccaaagaccttgaatactatatcaatctcgtcgataaagccgctgccggttttgaacggatcgactctaacttcgagcgtagtagcacagtgggaaaaatgctgtccaattccattgcatgctacagagagatcttccacgagcgtaaaagccaacttatgcgcaaggctagcccgatgagctactttcggaagctaccacagccaccacagccaagcgctgcgacaacactgacgtcgcagcagccctcgactagcaggcaggaccctccgccagccaaaagagtgcgtcttactgagggctctgactag

SEQ ID NO: 244110 - DNA, 1578 bp, synthetic construct
  misc_feature 1..1578: note = Description of Artificial Sequence: Synthetic coding sequence
  source 1..1578: mol_type = other DNA
atgcttggcaaacgtaagagagtggttctgactattaaggacaagttagatattatcaaaaagttggaagagggcatttcgtttaagaaattatcagtcgtctatggaatcggggaaagtacagtccgagacatcaagaaaaataaggagcgtattattaactatgctaatagttcagaccctacatctggcgtgagcaagagaaagtctatgaaatctagcacatacgaggaactggaccgtgtgatgattgagtggtttaaccagcagaagacggacggtatcccagtgtccggaactatctgtgccaagcaggctaaatttttctttgatgccttgggtatggagggggacttcaacgcatcctcaggatggctgacgcgctttaagcagcgccatgggattcccaaggcagccggtaagggaaccaaactcaaaggggatgaaacagctgctagagaattctgcggaagttttcaggagttcgtggagaaagagaacctgcaacccgagcagatctacggagccgaccagaccgggctattttggaagtgccttccctctcggactctaaccctagaaacagaccagtccacatcaggttgtcggagctcacgtgaacgcattatcattatgtgttgcgccaatgccactggcctgcacaaactcaatctgtgtgtcgtcggtaaagccaagaagcccagggccttcaagggcactgacctgagtaacctgcctgtgacctactatagccagaaaggggcttggatagagcagagtgtatttcgccagtggtttgagaaatattttgtgccacaggtccagaaacatttaaagtcaaagggtctgctagagaaggcggtgctgctactggacttccctccagccaggccaaatgaggagatgctgagctctgatgatggcagaattattgtgaaatatttgcctcctaatgtcacgagtctcattcagcctatgtcacagggggtcctggccactgtaaaacgatactatcgagcaggcctgctgcagaagtatatggatgagggcaatgacccaaagatcttctggaaaaacctcacggtgttggacgctatctatgaagtgtctagggcctggaatatggtgaagagctcaaccatcacgaaggcttggaagaaactgttccctggcaatgaggagaacagtggaatgaatatagacgaaggcgctatcttggctgcgaatctggccacagtgcttcaaaataccgaggaatgtgagcatgttgacattgagaatattgatcagtggttcgacagccgaagctccgactcctcctgtcaagtactcactgatagtgaaagtgctgaggatcagaccaaggccgcagaacaaaagccatcgagcaagtctcggaagaccgaactgaatccagagaaacacatctcacataaggcagctctggagtggaccgagaacctgctcgactatcttgagcaacaggatgacatgttgcttagcgacaagttagtgctgaggcgcctccggaccatcatcaggaaaaagcaaaagattcagaataacaaaaaccattag

SEQ ID NO: 244111 - DNA, 1650 bp, synthetic construct
  misc_feature 1..1650: note = Description of Artificial Sequence: Synthetic coding sequence
  source 1..1650: mol_type = other DNA
atgaataaacggggaaaatacaccactctcaacctagaggaaaagatgaaggtcctgagtcgcatcgaagctggaaggtcacttaaaagcgtgatggacgaatttggcatatcaaaaagcaccttttatgacattaaaaaaaataagaagctaatcctcgattttgttctgaaacaagatatgccactggtgggcgctgagaaacgcaaaaggacgacaggcgcaaaatatggagatgtggatgacgctgtgtacatgtggtaccagcagaagcgctctgctggtgtgccagtgcgaggagtggaactgcaggccgcagccgagaggtttgcccgttgctttggtaggactgactttaaggcctcaaccggatggctgtttagattccggaaccggcatgctatcggtaacaggaagggctgcggtgaacaggtgctgagttctgttagcgagaatgtcgagcccttccgccagaaactgagcatgataatcaaagaagaaaaattgtgtttggcgcagctgtacagcggggatgaaaccgaccttttctggaagagcatgccggagaactcccaggcatcccgtaaggatatttgtttgcccggtaaaaagatcaataaggaacgattgagcgccttcctatgcgccaacgccgatggaacgcataagctgaagtctattataatcgggaaaagtaagcttcccaagtctgtgaaagaggacacctcaactctccctgtgatctataagccaagcaaggacgtgtggtttacgagggagcttttctctgagtggttttttcaaaactttgttccggaagtacggcattttcagcttaacgtgctccgcttccacgacgaggacgtgcgagccttgctgctcttggattcttgtcccgctcaccccagttccgaaagcctgacaagtgaggatggacgtataaagtgtatgttcttccctcataacacctccacccttatacaacccatgaaccagggcgtgatcctgtcttgcaagagactgtatcgatggaagcaacttgaagaatctcttgtgatttttgaggaaagtgacgacgaacaggagaagggtgacaaaggcgtgagcaaaattaagatttataatataaagagcgcgattttcaactgggcgaaaagctgggaagaggttaaacagattactatcgccaatgcttgggaaaaccttctctacaagaaagagcctgaatatgatttccaggggctggaacatggggattatcgcgagattctggagaagtgtggagaactcgagactaaactcgatgacgaccgggtttggctgaatggagatgaggagaaagggtgtttacttaagacaaaagggggtatcacgaaggaagtcgtgcagaaagggggagaggcagagaagcagaccgccgagttcaagctgagcgcagtccgcgagtcactagactatctgttggatttcgttgacgccactcccgaattccaacgatttcatttcacgctcaaagagatgcagcaagagatagtgaaaaaacagtttcaatcaaaaatccattcacgtatcggatctttcttgaagccccgtccacacaacatcaaagactcttttagtggacccagtacgagtggtagtaaccattag

SEQ ID NO: 244112 - DNA, 1650 bp, synthetic construct
  misc_feature 1..1650: note = Description of Artificial Sequence: Synthetic coding sequence
  source 1..1650: mol_type = other DNA
atgaataaacggggaaagtacaccaccctcaatctcgaagagaagatgaaagtgttgtcacgtatcgaagctgggagatctctgaagagtgttatggacgaattcggaatcagtaagagcaccttttatgatatcaaaaagaacaagaagctcattctcgattttgtcctgaagcaggatatgcctctggtaggcgcagaaaagagaaagaggactacaggcgctaagtacggcgatgtggatgacgctgtctacatgtggtatcaacagaagagaagcgcaggggtacccgttcggggagtggagctgcaggccgctgccgaaagattcgcgagatgcttcggacggaccgactttaaagcctcgaccggatggttgttccggtttcgaaaccgccatgctatcggaaatcggaaaggttgcggtgagcaggttctctcttctgtgtccgagaatgtcgagccattcaggcagaaactctccatgatcataaaagaagaaaaattgtgtctggctcaactctatagcggagatgaaacagatctgttctggaaatctatgccggagaattctcaggctagtcgaaaggatatttgcttgcccggaaaaaagatcaacaaagagagactgagcgcctttctctgcgcaaacgctgatgggacgcacaaactgaaatccattattatcggaaaaagcaagcttcctaagagcgtgaaagaggatacttccactctgcccgtgatctacaagccatccaaggatgtatggtttacccgcgagctgttcagcgagtggttcttccagaacttcgttcccgaggtacggcactttcagttaaatgtgttacgcttccatgatgaagatgtgcgggctctactgttgctggattcctgccccgctcatccttcctccgagagtctgacctcagaagatgggaggattaagtgcatgtttttcccgcacaatacatcaactctcatccagccgatgaaccagggcgtaatcttatcctgcaaacgcctctataggtggaaacagctggaggaatccctggtgatttttgaggagagcgatgacgaacaggagaaaggagataagggagtatcaaaaattaagatttacaacatcaagtctgctatctttaactgggcgaaatcttgggaggaagtgaagcaaataacgatcgccaatgcctgggagaatctcttgtacaaaaaggagccagagtacgatttccagggactggagcatggcgactatcgggagatcttggagaagtgcggggaacttgaaactaaattagatgatgacagggtgtggttgaatggcgacgaagagaaagggtgccttctcaagacgaagggtggcattactaaggaagttgtccagaaaggaggcgaagctgagaaacagacagccgagtttaaactgtctgccgttcgggaaagcctcgactacttgctggacttcgtggatgccaccccggagtttcagcgctttcacttcaccctcaaggagatgcaacaggaaatagtgaagaagcagttccaaagcaagatccactcccgcattggatctttcctgaaacctcgtcctcataacatcaaagattccttctccggcccaagtacttccgggtcaaaccactag

SEQ ID NO: 244113 - DNA, 1536 bp, synthetic construct
  misc_feature 1..1536: note = Description of Artificial Sequence: Synthetic coding sequence
  source 1..1536: mol_type = other DNA
atgaataagaggggaaaatacacgaccctgaacctcgaagaaaaaatgaaggttttgagcaggatagaggccggaagatcgttgaagagtgttatggatgagtttgggatttccaagagcacattctacgacatcaaaaagaacaagaagctcattctggatttcgtcctcaaacaggatatgcccctggttggcgctgagaaaaggaaaaggacaactggggctaagtatggtgacgtcgacgatgccgtttatatgtggtatcagcagaagcgcagcgcgggagtgcccgtgcgaggggtggagttgcaggcagccgctgaaagatttgccaggtgtttcgggcgtaccgatttcaaagcttctacgggatggctgtttcgcttcagaaaccggcacgccatcggcaatcggaagggatgcggagaacaagtgctctcctccgtttccgagaacgtcgagccttttcggcagaagctctccatgatcataaaggaggaaaagctctgcctggctcagctctattccggcgacgaaaccgatttattttggaagagcatgcctgagaattcccaggcgtccagaaaggacatttgtctgcccggaaaaaaaattaacaaggagcgcttatctgcgttcctgtgtgccaacgccgacggcacacacaagttgaaaagtatcattatcgggaagtctaagttgcctaagtccgtaaaagaagatacttccaccctgcccgttatttataagcccagcaaggacgtgtggtttacccgggagctcttctcggagtggttcttccagaacttcgttcccgaagtaagacacttccaactgaatgtgcttaggttccatgacgaggacgtacgagccctgctccttctggattcctgtcctgcacacccctcatccgagtccctgactagcgaagacggtcgtattaagtgcatgtttttcccacacaataccagtacgctgatccagccgatgaatcagggcgtgattttatcgtgcaagagactttatcgctggaaacaacttgaagagtccctagtgatatttgaggagtctgatgacgagcaggagaagggtgacaaaggcgtaagcaaaataaaaatatataacatcaaatcagcaatttttaactgggccaagagttgggaagaagttaagcaaattactattgccaacgcttgggaaaatttactttacaagaaagagcccgagtacgactttcaaggtctggagcatggtgattaccgcgagatcctggaaaagtgcggtgagctcgaaacgaaattagacgacgatagagtatggctgaatggggatgaagagaaggggtgcctgcttaagacaaaagggggaatcacaaaagaggtggtccaaaaagggggagaggccgagaagcagactgccgagttcaaactctccgctgtgagagagagcctggattatctccttgacttcgtggacgccaccccagaattccagcggttccattttacattgtgcgaattttctgatgactcctag

SEQ ID NO: 244114 - DNA, 1644 bp, synthetic construct
  misc_feature 1..1644: note = Description of Artificial Sequence: Synthetic coding sequence
  source 1..1644: mol_type = other DNA
atgacatccgctgcgccagccaaaaagccctatcgaaaggcaccgccagaacaccgggagctgcgccttgaaatccccggaagccgccttgagcaggaagaaccgctgaccgatgcagaacgaatgaagttgcttcaggaagagaacgaggaactccggaggcgcctagcctccgcaacccgtagaaccgaggctctggagagggaactcgaaattggacaggattgtctggaactcgaattgggacagagtcgagaggagttggacaagttcaaggacaagttccgtcggctccaaaatagctataccgcatctcaacgtacaaatcaagagctcgaggacaagctccataccttgataaagaaggcagagatggacaggaagacgctggattgggaaatcgtcgagctgactaataagttgctggacgctaagaacaccatcaacaaactcgaggaactgaatgagcgttatagactcgattgtaacttggcagtccagctactgaagtgtaacaagagtcattttcggaatcacaaattcgcagacttgccttgtgaactgcaggatatggttaggaagcacctgcattctggacaagaagctgcatcacctgggccagcaccctctctcgcaccaggggcagtggtgcccacctcagtcattgcgagagtcttagagaagcctgaaagcctactactcaacagcgctcagagtgggtccgcagggagacccctagctgaggacgtatttgtgcacgtggatatgtctgaaggggtgccgggtgaccctgcttcccctccggctccagggtctcctacacctcagccgaatggcgaatgccattccctgggaaccgccagaggctcgccagaagaggaactgcctctgccagccttcgagaagctgaacccataccccaccccgagcccaccgcaccccctgtacccaggtcgtagggtgattgaattcagtgaggacaaggtgagaattccacgaaacagccccctacctaattgcacttatgcgacacgccaggcgatttcactctccctcgtcgaggaagggagcgagagagctcggccttcccccgtgccgagcacccccgcttcggctcaggcttcacctcaccaccagccgtctcccgctcctctgacattgagcgcccctgctagctctgcgagttctgaggaagatttgctagtgtcttggcagcgcgcatttgtggaccgtaccccccctcccgcagcagtggcgcaacgcacggcttttgggcgagatgcgctgccagagctacagcggcatttcgcccatagccccgctgacagggacgaagtagtccaggccccttcagctcgtcccgaagaaagcgagctcctcctccctacggagccggactccggatttccgagagaggaagaagaactgaatctacctataagtcccgaggaggaacgccagtccctccttccaatcaaccgaggtacggaggaaggcccaggtacaagccacactgagggaagggcttggcctctcccctcttcttctcggccacagcggtcgcccaagagaatgggcgttcaccacctgcacagaaaggactcccttacccaagctcaggaacaggggaatctattgaattag

SEQ ID NO: 244115 - DNA, 1644 bp, synthetic construct
  misc_feature 1..1644: note = Description of Artificial Sequence: Synthetic coding sequence
  source 1..1644: mol_type = other DNA
atgaccagcgccgcacccgcaaagaaaccctatagaaaagctccccctgagcaccgcgaactgaggcttgaaataccaggctcgagactcgagcaggaggagcctctgaccgatgctgaacggatgaagctcctccaggaagagaatgaggagctaagacgtcgactggcaagcgctactagacggaccgaagctctagagcgcgagctcgagattggccaggactgcctggaactggagcttggtcagtcccgagaggagctcgacaagttcaaggataagttcaggcgcctccaaaatagttacaccgcatctcagagaacaaaccaagagctggaagataaactccacaccctcataaagaaagcggaaatggacaggaaaactctggactgggaaattgtcgaactcacaaacaaacttctggatgctaaaaacacaataaacaagctggaggaactcaacgagagataccggctcgattgcaatcttgctgttcaactgctgaaatgcaataagagccacttcaggaatcacaagttcgcagatctgccttgcgagctccaggatatggtgaggaagcatctacactccggacaagaagcagcatccccagggccagctcctagcctagcccctggtgccgtcgtgcccacttcagtcatcgcccgagtgttggaaaaaccggagtctctgcttttgaactcagctcagagcggctctgcgggacgtccattagcagaggatgtctttgtccatgtcgacatgtcagaaggggtgcccggagaccctgcatctccccctgcgccaggtagtcccacaccccagcctaacggggaatgtcacagcctagggacagccaggggatcaccagaggaggaactccccctgcctgcgtttgagaaactaaatccctatccaacaccatcaccaccccaccccctgtatcccggaagacgtgttattgaattcagtgaagacaaggttcggatacccaggaatagtccattgcctaactgtacctatgctactagacaggcgataagcctgagtctggtcgaagaaggcagcgaaagggcacgcccatcccccgtgcccagtacaccagccagtgcacaggcttctccacaccaccagccatccccagccccattgaccctctcagcgccagcatctagcgccagtagtgaagaggacttacttgtgtcatggcagagggccttcgttgatcggaccccgcctcctgctgctgttgcacagcggaccgcctttggcagggacgccctgcctgagctgcagaggcacttcgcccatagcccggcagacagagacgaggtagtgcaagccccatctgcacgtcctgaagagtccgagctgttgcttcctaccgaaccggattccgggtttcccagggaagaggaagagctcaacctccccatcagtccagaggaggagagacagagtttgttacccatcaatagggggaccgaggaaggccctgggacctcccacaccgagggcagggcctggccgctcccgtcgagctctaggcctcagcggagccctaagcggatgggagttcaccacctgcaccggaaagatagtctgactcaagctcaggaacagggcaacttactgaactag

SEQ ID NO: 244116 - DNA, 1674 bp, synthetic construct
  misc_feature 1..1674: note = Description of Artificial Sequence: Synthetic coding sequence
  source 1..1674: mol_type = other DNA
atgacatcggcagcacccgctaagaagccatataggaaagctcctcctgagcatcgggaactaaggctggagataccaggctctcgcctggaacaggaagagcctcttacagacgcagaacgtatgaagttgctgcaagaggagaacgaggagctgaggcggagactcgccagcgctacccgtcggacggaagcgctagaacgtgagctagaaattggacaggattgcctggagctggaactgggacagagccgggaggagcttgacaagttcaaggacaagttccggagactgcagaattcatacactgcatcacagagaacaaaccaggagctagaagacaagctgcacactttggcgagtctgagccactcctggattttcgcgattaagaaagctgagatggaccgcaaaactttggattgggagattgtcgagctgacaaacaagttactggacgccaaaaataccattaacaagctggaagaactgaatgagaggtaccgacttgactgtaacctcgcagtccagttactgaagtgcaataagtcacactttagaaatcataagttcgccgacttgccttgtgaactccaagacatggttcggaagcacttgcacagcgggcaggaggcggctagcccaggtcccgctccttccctcgcccctggcgctgtcgtcccaacctccgtcattgctcgtgtgcttgagaagcccgaatccctcctcctcaactcggcacaatcaggctcagcaggacggcctctggctgaggacgtcttcgtgcatgtggacatgagcgaaggagtgcccggtgacccagccagccccccagcgccagggtccccaacaccacagccaaacggggagtgtcattcattagggaccgcgcgagggtctccagaagaagaattgcccctgccagccttcgaaaaactgaatccctatcctactccttccccgccacatcccctgtacccagggcgacgtgtgatcgaatttagcgaggacaaggttcgcatcccccgaaattctccgttgcctaactgtacttacgctactcggcaggccatcagcctatctcttgtcgaggagggtagcgagcgagcgaggccttcaccagtcccatctactcccgctagtgctcaggcctctccccatcaccagccatcccccgcaccgctcacactgtctgcccctgcttcctcggcctccagcgaggaggacctgctcgtctcttggcagcgggcattcgtggacaggacccctccacccgcagccgtggcgcagagaacagctttcggtagagatgcgctccccgaattacagaggcactttgctcatagtcctgccgaccgcgacgaggtggtccaggcccctagcgctaggcctgaagagtccgagctgctgctccccacagagcccgacagtggcttcccacgcgaagaagaagagctcaacttgccaatctcccccgaagaggagagacaaagcctgctgccgatcaaccgcggtacggaagaaggacctggcacctcccatactgaaggcagggcctggcctctgcctagtagtagccggcctcagcgatcacccaagaggatgggggtgcatcatctccataggaaggattctcttactcaagcccaggagcaagggaaccttctgaactag

SEQ ID NO: 244117 - DNA, 1674 bp, synthetic construct
  misc_feature 1..1674: note = Description of Artificial Sequence: Synthetic coding sequence
  source 1..1674: mol_type = other DNA
atgacttccgccgctcctgccaagaaaccatatcgaaaggcgccacctgagcatagagagctgcgacttgagattcctggctctaggctcgagcaagaggaacccctgaccgatgctgagaggatgaaacttctccaggaagaaaatgaggagctgcgcagacgtctggcctctgccactagaagaacagaggccctagagcgggagctggaaattggccaggattgtctggagctcgaactgggacagagccgggaagagctagacaagttcaaggataaattcaggaggctgcagaattcgtacaccgcgagccagagaaccaaccaggaactggaggataaactccacaccttggcctctttgagccactcctggatctttgccataaagaaagccgagatggaccgtaagaccttggactgggagatagtggaactgacaaataagttgttggatgctaagaacaccattaacaagctcgaagaactaaacgaacgctaccgactggattgcaatctggcagtgcagctgctgaagtgcaataaaagccattttaggaaccacaagttcgccgatctgccctgcgagttacaggacatggtgcggaaacatttgcattccgggcaggaggctgcatcacctggacccgcacctagtctggctcctggcgctgtagtgcctacatctgtcattgcccgtgtgctcgagaaacctgagtcactgttactgaactctgcacaatccggaagtgccggaagacccctggcagaagatgtcttcgtgcatgtggatatgagcgagggcgttcccggtgacccagcatcccctcctgcaccgggttccccgactcctcaacctaatggtgaatgtcattcgctgggcacagcaaggggctctccggaggaggagctgcctttgcctgcatttgagaaactaaatccgtacccaacgccctccccgccacacccattgtatccaggccgtcgggtcatagagttttccgaagataaggtgaggatcccacgaaactcacctttgcctaactgtacttacgccactcgtcaggctatctccctgtcccttgtcgaggaggggtccgagcgcgctaggcccagtcctgtcccctctacccccgcatcagcccaggcctctccccaccaccagccgagcccggcaccgctgacattgtccgccccagccagttccgccagcagcgaggaggatttattggtgagctggcaacgcgcattcgtcgaccgaacgccacctcccgcagctgttgcccaacggacagcattcggtcgggatgccttaccggaactgcaaagacatttcgctcactcccctgccgacagagacgaggtggtccaggcaccatctgccagacctgaggaatccgaactcctcctgcctacagagcctgacagcgggtttccccgagaagaagaggaacttaatctgcctatatcaccagaggaggagcgccagagccttttgccaattaatcgtgggactgaagagggaccaggcacatcccatacagaagggagggcctggcccttgcctagcagctcaagaccacagcgttctcccaaacggatgggagtacatcatttgcatagaaaggatagcctcactcaggcccaggagcagggcaatctgctcaactag

SEQ ID NO: 244118 - DNA, 1644 bp, synthetic construct
  misc_feature 1..1644: note = Description of Artificial Sequence: Synthetic coding sequence
  source 1..1644: mol_type = other DNA
atgacatcagccgcaccagcaaagaaaccctaccggaaggctccgccagaacaccgggagctgcgactggagatcccgggaagccgcctggagcaagaagaacccctgactgatgctgagcgcatgaagctcctgcaggaagaaaacgaggagttgcgtcgcaggcttgcgtcagcaactcgccgaactgaggcattagaaagggagctagagattggacaggactgtctcgagctggagctgggccaatctagggaagaactggacaagtttaaggataaattccgaagactgcagaactcatatacagcaagccagcgtaccaaccaagaactcgaggataaactgcacacactgattaagaaagctgagatggaccggaagacactggattgggaaatcgttgagctgacaaataaactcttagatgcaaagaacacaatcaataagctcgaggaactcaatgagcggtatagactggattgtaatctcgccgtgcagctgctaaagtgtaataaatcacatttcaggaatcataagttcgccgatctcccttgcgaattacaggatatggttcgcaaacacttgcactccgggcaggaagcagcttctccgggaccggctccatcacttgcccctggagccgtcgttccaacttccgtgatcgcaagagtcctcgagaaacctgagtcgttgctccttaactccgcacagagtgggtccgcaggccgtcccctggcagaggatgtcttcgttcatgtcgacatgtcagaaggtgtcccaggcgacccagcaagccctccagccccagggtcacctacacctcagcccaacggagaatgccatagcctggggactgcccgagggtctcccgaggaagagttacccttgcccgctttcgaaaagttgaacccatacccaactccctcaccaccccatcctctgtaccctggtcgaagagtgatcgaattctccgaggacaaagtcagaattccacgcaacagcccactgccaaactgcacatacgctacccgacaggccatctctctgtcactcgtggaagaagggagcgagcgcgctcgcccatcccctgtgccgtctacgccagcgtccgcacaagccagtcctcaccatcagccctccccagccccactaaccctatccgcccctgctagttctgcctctagcgaagaggatctgttggtctcttggcagcgggcttttgtggaccggacaccccctccagcggctgtggctcaaaggactgcttttggtcgggacgccctgccggaactgcagaggcattttgcccacagcccagcagacagggacgaagtggtgcaagcccctagtgcccgaccggaggagtccgagctactgctgcccactgagcctgattcaggattcccaagagaggaggaggagctcaatttgcccataagtcccgaagaggaacggcagtccctacttcctatcaaccgcggaactgaagaagggcctgggacatcacataccgaagggagagcttggcccttaccctctagcagcagacctcagaggtcgccaaagcgaatgggggtgcatcacctccataggaaggactcactgacacaagcacaggagcagggcaatttactcaattag

SEQ ID NO: 244119 - DNA, 1644 bp, synthetic construct
  misc_feature 1..1644: note = Description of Artificial Sequence: Synthetic coding sequence
  source 1..1644: mol_type = other DNA
atgaccagcgcagcgccagcaaagaagccttataggaaggcccctcccgaacaccgggaactgagactcgaaatacccggtagtcggctcgaacaagaggagcccctgacggacgcagaacggatgaagttacttcaggaagagaatgaggaattaagaaggagattggcgtctgccaccagacgcaccgaagccctggaaagagagttggagatcgggcaagactgcctcgaacttgagctcggccagtcgcgcgaagaattagataaattcaaagataaattccgtagattgcaaaacagctatactgcctcccagcgcacgaatcaggaactggaggacaaattacacaccctgatcaaaaaagctgagatggataggaaaactttggattgggagatcgtcgagctgactaacaagctgctcgacgccaaaaacaccattaacaaattggaggagctgaatgagaggtaccgccttgactgcaatctggccgtccagctgctcaagtgcaacaagagccacttcaggaaccataaatttgccgatttaccatgcgagttacaggatatggttagaaagcatctccattctggccaggaagccgcaagtcctggcccagccccaagcttggcacctggcgctgtcgttcctacatccgtgatcgctcgagtgctggaaaaaccagaatcactgctgctgaactctgctcagagcgggtccgccggacgacccctcgcagaggacgtattcgttcacgtcgatatgtctgagggcgtcccgggagatcccgcttcccctcccgctcctggtagtccaacccctcagcctaacggggaatgccactcattaggaactgcacggggttcacctgaggaggagctccccctgcccgctttcgaaaagctaaatccctaccctacaccctccccccctcaccccttgtaccccggacgcagggtaatcgaattctctgaggacaaagtgaggatccccaggaattcaccccttccgaactgcacctacgctactcgacaggctatctcactgtccctggttgaagagggttctgagcgcgctcggccaagtccagtcccatctacgcctgcttctgcacaggctagcccacaccatcaaccatcccccgctcctctaacactttctgccccagctagttccgcctctagtgaggaagatttgctggtatcctggcaacgggcattcgttgaccgcaccccacccccagcagccgtggcacagagaaccgctttcggcagggacgccctgcctgaattacagagacacttcgctcactcccctgctgacagggatgaagttgtgcaagccccttccgccagacctgaagaaagtgagctcctattacctacggagcctgactctgggtttcctagggaggaagaggaactgaatttgcccattagccctgaagaagaacgccagagcctgctgccaatcaacagaggcacggaagaagggcctggcaccagtcataccgagggacgcgcttggccattgcccagctcgagtcggccacagagatcgccgaaaagaatgggtgttcatcacctacacaggaaggactcactcacacaggcccaagaacagggcaacctgctgaattag

SEQ ID NO: 244120 - DNA, 1644 bp, synthetic construct
  misc_feature 1..1644: note = Description of Artificial Sequence: Synthetic coding sequence
  source 1..1644: mol_type = other DNA
atgacctctgcagccccagctaagaagccataccgtaaagcaccccctgagcatcgggagttacgcctggagattccaggctcccgactggagcaggaagagcccctcactgatgcagagcggatgaagctgctccaggaagagaatgaggaactgcgtcgacggcttgcctcagctacaaggcgaaccgaagcgctggagagggagttggaaatcggacaagactgtttggagttggaactggggcaatccagggaggagttggataagttcaaggacaagtttaggaggctgcagaatagctacactgcgagccagcgaaccaaccaggagttggaagacaagctgcataccctgataaaaaaggctgaaatggataggaagactctcgattgggaaatcgtcgaactgactaataagctgctggacgccaaaaatacgatcaacaagctcgaagagttgaacgaacgatatcgcctagactgtaaccttgctgttcagctgctgaagtgtaacaaatcacattttcgaaaccataagtttgctgacctaccgtgcgaactccaggatatggtgcgaaagcacctgcactctggccaagaggccgcttcccctggcccagcaccatcgctagccccaggggctgtggtgccaacatcggttatcgcacgcgtactcgagaagcctgaatctttattattgaattccgctcagagcggcagtgctggtagacctctcgccgaggacgtgtttgtgcacgttgacatgagcgagggggtgcccggagaccctgcttcgcccccagcgcctggaagtccgacgccccagccaaacggcgaatgccatagcctcggaaccgcccgaggtagccctgaggaagagctcccattacctgccttcgagaagctgaacccttatccaacccccagcccaccgcatcccctctatcccggtcgacgagttattgagttttcggaagacaaagttcgcatacctaggaacagtcctcttcccaactgcacatacgctacaagacaggccatatctctgagcctcgtcgaggaaggcagcgagcgggcaagacctagcccagtaccttcgactccagcttctgcgcaggctagtccccaccaccagcccagccccgcaccccttactctatcagccccagcgtccagcgctagcagcgaagaagacctgctggtgtcgtggcaacgcgctttcgtagaccgcacacccccaccagcggctgtcgctcagcgaacagcattcgggcgagacgcccttccggaacttcagaggcacttcgcacactccccagcagaccgcgatgaggtagtgcaggcaccctccgcaagacccgaggagtccgagctgctcttacctacagagcctgactcagggttccctagggaagaagaagagctgaacctgccaatcagccccgaagaggagagacagagtctcctgcccattaacagaggcacagaggagggcccaggcacgtcccacactgagggaagagcgtggccacttcctagctcttcccgccctcaacggtcccccaaaagaatgggagtgcaccaccttcaccggaaagattccttgactcaggcccaggagcaggggaatctgctgaattag

SEQ ID NO: 244121 - DNA, 1674 bp, synthetic construct
  misc_feature 1..1674: note = Description of Artificial Sequence: Synthetic coding sequence
  source 1..1674: mol_type = other DNA
atgaccagcgcagctcctgctaaaaaaccttaccggaaggcgcctcccgagcatcgggagcttcggctggaaatccccggaagcaggttggagcaggaagaacctttgaccgatgccgaacggatgaagctcttgcaagaagagaacgaagagctgaggagaaggctcgctagcgccacaaggaggacggaagctctggagcgggagctggagatcgggcaagactgtcttgaactcgagctggggcagagccgagaagagttggacaagtttaaggataaatttcgaaggctgcagaattcctataccgcctcgcagcgaacaaaccaggaactagaggacaagctacatacactcgcatccctttctcactcctggattttcgctattaagaaggctgaaatggatcgaaagactctggactgggaaatcgtggaattgactaataagcttctcgatgccaagaatacgatcaacaagctagaggagttaaatgagaggtatagactggactgcaacctggctgtccagctcctcaaatgcaacaagagtcacttccggaaccataagttcgcagacctgccatgcgagttgcaggacatggtgaggaagcatctgcacagtgggcaggaagccgctagccccggaccagcgccatcgctggcgccaggcgcagtagtgcccacatctgtgattgcgcgagtgcttgagaaaccggagtccttacttctcaactctgctcagtccggaagcgcgggtcgacctctcgcagaggacgtttttgttcacgtagatatgtctgagggcgttccaggcgacccagcatctcccccagcacctgggtcgccaactccccagccaaatggagagtgccacagtctgggcactgcgaggggttcccccgaagaggagttgccactccccgcttttgagaagttgaacccttacccaaccccgtcgcctcctcatcctctctatccagggagacgcgtgattgaattctcggaggacaaggtgaggattcccaggaacagtcccctgcctaattgcacatacgctacacgtcaggcgatcagcttgtcacttgttgaggaaggcagtgagcgggcacggccttcacccgtcccaagtacaccagcttctgcacaggcaagcccccatcaccagcccagcccagccccattgactctgtccgcaccagcgagctccgcttcctccgaggaagaccttcttgtgagttggcagcgcgcattcgtcgaccgtacgccacctcccgcagccgtggcgcaacgcactgcttttggaagagatgcccttccagaactgcagagacactttgctcattctcccgctgatagagacgaagtagtgcaggcccctagtgcaaggccggaagaatcagaactgctccttcctacagagcccgattctggatttccaagggaggaggaagagctgaatctccctatttcaccagaagaagagcggcagtcattactgcctatcaaccggggaacagaggaaggaccaggaacctcccatacagaagggagggcctggcctcttccttccagttctaggcctcaaagatccccgaagagaatgggtgtgcaccaccttcatcgaaaggattcacttactcaagcccaggaacagggaaacttgttgaattag

SEQ ID NO: 244122 - DNA, 582 bp, synthetic construct
  misc_feature 1..582: note = Description of Artificial Sequence: Synthetic coding sequence
  source 1..582: mol_type = other DNA
atgacttccgctgctccagccaaaaaaccctatagaaaggcgcctcccgaacatcgcgagctccgtctcgagatcccgggatcaaggctggagcaggaggaacccctcaccgacgccgaaagaatgaagctgttgcaggaagaaaacgaagagctgcggagacggctggcctccgcaactagacgcactgaggctctggagagggagttggaaatcgggcaggactgcttagagctcgagctcggacaaagtagggaggagctcgacaaatttaaggataagtttcggagactgcagaatagctacaccgcatcccaaaggaccaaccaggagctcgaggacaagctgcacactctggcgtctttgagtcacagttggatttttgccatcaaaaaagccgaaatggataggaagactcttgactgggagatagtggagttgacaaacaaactcctcgacgctaagaatacaatcaacaaactggaagaactgaatgagagatatagactcgattgcaacctggcggtacagctgctcaaatgtaacaaaagccacttcagaaaccacaaatttgcagattag

SEQ ID NO: 244123 - DNA, 720 bp, synthetic construct
  misc_feature 1..720: note = Description of Artificial Sequence: Synthetic coding sequence
  source 1..720: mol_type = other DNA
tgattgttacaagaggaaaacgaggaattgagacgccgattagcatccgctacacgccgtaccgaggcactggagcgggagctggagattggccaggactgcctagagctcgaattgggtcagtctcgagaagaactggacaaattcaaggataagtttcggcgtctccagaacagttatacggcatctcagaggaccaaccaggaactcgaggacaagctgcatacactgataaaaaaagccgaaatggatcggaaaactctggactgggagatcgtggagctgaccaataaactattggatgccaagaacactataaataagctcgaagagctcaatgagagatataggttagactgtaacctcgcagtacagctacttaaatgcaataaaagtcatttccgcaatcacaagttcgccgacgtgagtcggacacatccactccctgcccatattgaccatagcggacactgccggacccctctgactcctgtgtccgcccctctatcagttcttctgtttccactctgtcccccactggcctctatgtctccactcaagcctgtgaacagtgcgactgggtggtgtccagtgtactgtcctggtcctattacctcctcaggcggacccgctctattagtgtcggtaacagagactgagcgggaggatccaggccaggaaggtgaaggttcacagagttatctgcccaaggagtactag

SEQ ID NO: 244124 - DNA, 5246 bp, synthetic construct
  misc_feature 1..5246: note = Description of Artificial Sequence: Synthetic coding sequence
  source 1..5246: mol_type = other DNA
atgtcagctcgggctgctgctgctaaatctactgctatggaggagaccgcgatttgggaacaacataccgttactttgcacagagcccctgggttcgggtttggtatagctatttcgggcggacgagataatccacactttcaatccggggagacctccatcgtgatctccgatgtgctaaaagggggtcctgccgagggacagcttcaggagaacgatagagtagccatggtgaatggggtctccatggacaatgtcgagcatgccttcgcagtacaacagttgaggaaaagcggtaagaacgctaaaatcactatccgcaggaagaagaaagtgcagatccccgtcagcagaccagatcctgaaccagtgagcgataacgaagaggacagttatgatgaagagatccacgaccctagatcaggcaggagcggcgtcgtcaacagaaggtcagaaaagatatggccacgcgacaggtcagcttcacgtgaaaggagcttgagtccccgatcagataggaggagcgtggcttcttcccagccggctaagcccaccaaggtgactctggtcaaatccaggaaaaacgaagagtacggactgcgattggcatcacatatctttgtcaaggaaatttcccaggactctctcgccgctagggacggaaacatccaggagggcgacgtggtgctgaaaattaatggaacggttacagagaacatgtcactcaccgatgcaaaaactctgattgaacgatcaaagggcaagctgaaaatggttgtccagcgtgatgagcgggctaccctcttgaatgttcccgatctgagcgattcaattcacagcgccaacgcttctgaacgagatgacatctcagagattcagtcactggcatcagaccactccggcagatctcatgaccggccaccgagacggagcaggtcccgctctcctgatcagcggtcagagccttctgatcactcacgtcacagcccccagcagccttccaatggcagccttcggtctagagacgaggagaggatttctaagcccggagcagtgtctacccccgtgaaacacgccgatgaccacacgcctaagacagtcgaggaagttacagtcgaacggaatgaaaagcaaactccgtctctgcctgaacctaaacccgtgtacgctcaggtcggtcagccggacgtcgacctgcccgtgagtccatcagacggtgtactgccaaacagtactcatgaagatgggattctccgcccatccatgaagctcgtaaaatttagaaaaggggacagcgtcgggcttcgtttagccggagggaatgatgtgggtatattcgtcgctggcgttttagaagacagccccgcagctaaagagggtctggaggagggcgaccagatcctgcgggttaacaatgtggacttcacaaatattatcagagaggaggcggtgctgttcctgttagacctgcccaaaggagaggaagtcacaattttagctcagaagaagaaggatgtgtacaggcgcatcgtagagtccgacgtgggcgacagtttctatattagaactcattttgaatatgaaaaggagtcaccttacggtctgtcattcaacaaaggcgaggtgttccgagttgtggatactctctataatggaaagttgggcagttggctggcaatccggatcggaaagaatcacaaagaagtggagagagggatcattcctaacaaaaatcgcgcagagcagttggcctcggtgcagtacaccctccccaaaacagccggaggagacagagcggacttctggagattcagaggtcttcggagctccaagaggaacctgcgcaagagccgggaggacctgtccgcccaacctgtgcagacaaagtttcctgcctatgagcgtgtggttctgcgtgaagcgggatttctccgccctgtgaccatctttggacccatcgcggatgtggccagagagaagttggcaagagaagagcccgacatctatcagatagcaaaaagtgaaccacgggacgccggtactgatcaacgctcatctggaatcatccggctgcacacgatcaaacaaataattgatcaggacaagcatgccctgctcgacgtgacgcctaacgccgtagacagattgaactacgctcagtggtacccaatagtggtcttcctcaatccagactccaagcagggagtcaagaccatgcgcatgcgactctgtcctgagagcaggaaaagcgcccgaaaattgtacgaacgctctcataagcttcggaagaacaatcatcacctgtttaccaccaccatcaacctgaattccatgaacgacgggtggtacggggctctgaaagaagccatacaacaacagcagaatcagttagtatgggtgtctgaaggaaaggccgatggagcaacctctgatgacctggatttacatgacgatagactgtcctatttaagcgccccaggtagcgagtactctatgtatagtacagacagccggcatactagcgactacgaggacaccgacactgaaggaggtgcttatacggaccaggagcttgacgaaacactgaatgatgaagtgggaacgccccctgagtcagcaattacacgctcctccgagcctgtgcgagaagactctagcgggatgcaccacgagaaccaaacctatccgccatatagcccccaggcccagccgcagcccatccacagaatagacagcccagggtttaaacccgctagccagcaaaaggcggaggctagtagcccagtgccctacctgtcacctgagacaaaccctgccagttccacatcagcagtcaaccataacgtgaatctaaccaatgtgaggcttgaagaaccaacccccgctccctccacatcgtacagcccccaggcagattctctccggacaccaagtaccgaggcggcacatataatgctgcgcgatcaggagccaagcctttcttctcatgtggaccccactaaggtgtaccgtaaagacccctaccctgaggagatgatgcggcagaaccacgtgctcaaacagcccgctgtcagtcatcctggacacagacctgacaaggagcccaacctcacgtacgaaccccagttaccctatgtggagaaacaggcttcgagggacctggagcagcctacatatagatatgaaagctcctcctatactgaccagttcagtagaaactatgaacacagactccgatacgaggatagggttccaatgtacgaggaacagtggagctattacgatgacaagcaaccatatccgagcaggccaccgtttgataaccaacattcccaggatcttgactccaggcaacatcctgaagaatctagcgaaaggggatactttccacggtttgaggaacctgctcctttgagctacgacagtcgcccacggtatgagcaggcccctcgcgcttccgccctgagacacgaggagcaacccgctccaggctacgacacccacggcaggctgaggcctgaggcccaacctcacccaagcgctggcccaaagcccgctgaaagcaaacagtatttcgagcagtattcccgttcttacgagcaggtgcccccacaggggtttacgtcccgcgcaggacattttgaacctctccacggagctgccgctgtaccccctctcattccttccagtcagcacaagccggaggcactgcccagcaacactaaaccacttccaccgcctcccacacagacagaggaagaagaggaccccgcaatgaagcctcagtctgtattgaccagggtcaaaatgtttgaaaataagcgctcagcctcactggagacgaaaaaggacgtgaatgacacagggagcttcaagcctcctgaagtcgcctcaaagccctccggggctccaattatcggtcctaaacctaccagtcagaatcagttcagcgaacatgacaaaacactctacaggattcccgagccccagaagccccagctcaagcccccagaggacattgtgcggagtaaccactatgacccggaggaggacgaagaatactaccgaaagcagttatcctacttcgaccgccgatcctttgagaataaacctcccgcacatatcgcggcaagccatctctctgaacctgcaaagcccgctcactcacaaaaccaatctaatttctcctcttattcctccaagggcaagcctcctgaagccgacggcgtggataggtcctttggggagaagaggtatgagcccatacaagctacgcccccaccacctcctctgccaagtcagtatgcacagccttctcagccagtcacatccgcctccctgcacatacactccaagggcgcacatggcgaaggaaatagcgtgtctctggattttcagaattctctcgtttccaaacctgatccaccccctagccagaataaacccgcaaccttccggcctcctaatcgggaagataccgctcaagccgctttctacccccagaaatcctttcctgacaaggcacccgtgaacggaactgagcagactcagaagactgtgactcccgcatacaaccgcttcacccccaaaccatataccagctcagcaaggccattcgagcggaagtttgagagcccgaagtttaatcacaacctgctgccttctgaaacagctcataaacctgatctgtcttccaagacccccacgtctcccaagaccttggtcaaatcccatagcttggcccagccaccagagtttgactccggagtggaaacgtttagcatccatgccgagaagccgaagtatcagattaacaacatctctacagtgccgaaggccatacccgttagcccatccgcagttgaagaagacgaagatgaagacggacacacagtcgtggccactgccagagggatctttaattctaacggtggcgtgctgagctcaatcgaaacaggcgttagcatcattattccgcaaggagccatacctgagggggtggaacaagaaatctattttaaagtgtgtagggacaattccatactgccacctctggataaagaaaagggcgagactctcctgagcccactggtgatgtgtggacctcacggcttaaaattcctcaaaccagtggaactgagactgccccactgcgatccaaagacctggcaaaataagtgcttacccggtgacccaaactatctggtcggcgctaactgcgtgtccgtcctgatcgatcattttta

SEQ ID NO: 244125 - DNA, 5007 bp, synthetic construct
  misc_feature 1..5007: note = Description of Artificial Sequence: Synthetic coding sequence
  source 1..5007: mol_type = other DNA
atgtccgcaagagccgcagcagcaaagagcacagctatggaggagacagccatctgggagcagcataccgtcactctgcatcgtgccccaggcttcggtttcggcatcgcaatctcaggaggaagggacaacccgcatttccagagcggggagacttctatagtcatatctgatgtgctgaagggaggcccagccgaggggcagcttcaggaaaacgatcgtgttgccatggtcaacggcgtttcaatggacaacgtggaacatgcgtttgctgtgcaacaacttcgaaaatctggaaaaaatgccaaaatcacgattaggaggaagaaaaaggtccaaatacccgtgagccgaccagaccctgaaccagtgagcgacaacgaagaggatagttacgatgaggaaattcatgacccccgtagtggtagatctggagtggtcaaccgcaggtcagaaaaaatctggcccagggaccgttcagccagcagggaaagatccctgtccccccgaagcgataggcggagcgtcgcctcgagccaacctgccaagccaactaaggtcaccctggtgaagagcagaaagaacgaggaatacggcttacgccttgcttcacatatattcgttaaagagatttcacaggactctctggcagcacgcgacggcaacatccaagagggcgacgtggtgctgaagatcaatgggaccgtaaccgaaaacatgagcctgactgacgcgaaaactctgatcgaaagatcaaaaggcaagctaaaaatggtggtgcagcgggatgaacgggcaactcttttgaatgtgcccgatcttagtgacagtattcactctgccaatgctagcgagagggacgacatttcagagattcagagcttggcgtcagaccactcgggacgctcccacgatcgaccgccacgacgctcccgatccaggagcccggatcagcggagcgagccctcggaccattctcgacactccccgcagcaaccatccaacggttcactgcgttccagagatgaagagcgaatttctaaacctggcgctgtatccacaccggtcaagcatgccgatgaccacacacccaagaccgtagaagaggtgaccgtcgagcggaacgagaagcaaacgccctcactgcccgaaccaaagccggtctacgcccaggtggggcagccagacgtggaccttccagtttctcccagcgatggggtgctgcccaactctacgcacgaggatggcattctaaggcccagtatgaagctggtgaagttccggaagggggattccgtgggcttgcgacttgcaggcggaaacgacgttgggatttttgttgcaggcgtgctcgaggattcgccagccgcaaaggaaggtttggaggaaggagaccaaatcctgagagtaaacaatgtggacttcactaacatcattcgggaagaggctgttctcttcctcctggacctccctaaaggagaagaagtgacaattttagcccagaagaagaaggatgtctatcgacgcattgtcgagtcggacgtgggcgattctttctatattcgaacacactttgagtacgaaaaagagtccccatatgggctgtcctttaataaaggagaagtatttagagtagttgataccctgtacaatggaaagctcggctcttggctggccatcaggatcggcaaaaaccataaggaggttgaaaggggtatcattcctaataagaatagggctgagcagctcgctagtgtccagtatacactgcccaagactgctggcggagaccgtgctgacttttggcggtttagaggtctgaggtcttctaagaggaatctgaggaagtcccgcgaggacctgtctgctcagcccgtgcagaccaagttccccgcttatgagcgggtcgtcctgcgggaggccggattcctgagaccggttaccatctttggcccaatagcagatgtggcccgagaaaagttagcccgagaagagccagatatttaccagattgctaaaagcgaaccgagggatgccggtacggaccagcgctcttccggcatcatccgcctacataccattaagcagatcattgaccaggataaacatgccctgcttgacgtcacaccaaacgccgtcgacaggctcaattatgcacagtggtatcccattgttgtatttctcaacccggactccaagcagggagtgaagaccatgagaatgaggttatgtccagagtcacgcaagagcgcacgcaagttgtacgagcgatcacacaagctccgcaagaacaatcaccatctgttcactacaaccatcaatttgaacagcatgaatgatggctggtacggagcactcaaggaggccatccaacaacagcagaaccagcttgtttgggtgagtgaagggaaagccgacggagcaacctctgatgatctagacttacacgatgataggctttcatacctctccgcaccagggagtgagtattctatgtactcaacagacagtcggcatacaagcgactatgaggatacggacacggagggcggagcgtacacagaccaagagcttgacgagactctcaatgacgaggtcggaactcctccagagtcagccatcacccggtcatcggagcccgtcagagaggacagtagtggaatgcatcacgagaatcaaacctacccgccttattccccacaggctcagccccaacctatccataggatcgacagtccaggatttaagcctgcgtcacagcaggtctataggaaagacccatatcccgaggaaatgatgagacagaatcacgtgctcaagcaaccagcggtgtctcacccaggacatcggcctgacaaagaacccaacttgacctatgaaccccagctcccctatgtggagaagcaggcctcaagggacttggaacagcccacctacaggtacgagagctccagttatactgatcagttttctcggaactacgagcacaggctgcgctatgaagaccgagtaccaatgtatgaagaacagtggagttactacgatgataagcaaccttatcccagtcggcctccattcgataatcaacactcgcaggacctggattcaaggcaacacccagaggagagtagtgaaagaggctactttcccaggtttgaggaacctgcccctctgagctatgactcaaggccacgttatgaacaggcgccaagggccagcgcgttaagacacgaagaacagcccgctcctgggtacgacacacatggtagattgcgacctgaggcccagcctcatccgtccgcgggtcctaaaccagcagagagcaagcagtactttgaacaatacagtcggagttatgagcaggtgcccccacaggggtttacaagtcgggctggccattttgagccactacacggcgctgctgccgtgcctcccctcatacctagtagccagcacaagccggaagccctgccatcaaacaccaagcctctcccccctccacctacgcaaacagaagaggaggaggacccagccatgaagcctcagtccgttctcacccgcgtcaaaatgttcgagaacaagcggagcgcttctcttgaaacaaagaaagacgtcaatgacacaggcagttttaaaccaccagaggttgcttctaagccatcgggagcccctatcatcgggcctaaaccaactagccagaaccagtttagcgagcatgataagactctgtatagaataccagagccccaaaagccccaactcaagccacctgaagatatcgtgcggtccaatcactacgaccccgaggaggacgaagaatactatcgaaagcagctcagttattttgataggaggagcttcgagaataaacctcccgcacacatagctgcttcccacctttccgaacccgctaaaccagcacattctcagaatcaatctaatttttctagttactctagtaaaggcaaaccccctgaagccgacggtgtggataggtcattcggcgagaaaagatacgagcctattcaggccactccaccgccacctccactccctagtcaatacgcacagcccagtcagcccgtgacaagtgcctcattgcatattcactccaagggtgcgcacggagaaggcaactctgtatccctcgattttcaaaattcgctggtatctaagcccgatcctccaccttcgcaaaataaaccggctaccttccgaccgcctaatcgggaggacaccgctcaggccgcattttatcctcagaagagcttccctgacaaggccccagtaaacgggaccgagcagacccagaaaacggtgacccctgcctataaccgatttacccccaagccatacacctcttctgcaagaccctttgagagaaagtttgagtccccaaagttcaaccataacttgctgccaagtgagactgcgcacaagccggacctctcctccaaaactcctacctcccccaagaccttagttaaatcacacagccttgcccagcctcccgaattcgactccggggtggaaaccttcagtatacatgctgaaaagccaaaatatcagattaacaatatatctacagtaccaaaggctattccggtaagtcccagcgctgtcgaagaggacgaggatgaggacgggcatactgtcgtggccaccgcccgtggaatttttaattcaaatggtggggtgctaagcagcattgaaaccggtgtctctattataattccccagggggcaatcccggagggcgtcgagcaggagatatacttcaaagtctgtcgagataacagtatcctgcctccactagacaaagagaagggtgagacactgctgtccccccttgtgatgtgcggccctcatggattgaagttcctaaaacctgtggagctgaggctgccccactgcgaccctaaaacctggcagaataagtgcttacctggggatccaaactatctggttggagccaactgcgtgtccgtgctgatagatcacttctag

SEQ ID NO: 244126 - DNA, 2982 bp, synthetic construct
  misc_feature 1..2982: note = Description of Artificial Sequence: Synthetic coding sequence
  source 1..2982: mol_type = other DNA
atgccagtacgaggagatcggggatttccacctcgccgtgagttaagtggatggctcagagcacctggcatggaggaactgatctgggaacaatacaccgtcacactacagaaggacagcaaaagaggctttggaattgctgtaagcggcggtcgagacaacccgcatttcgagaacggcgagacaagcatcgtgatctccgatgtgctgcctggcggaccggcagacgggctcctgcaggagaacgatagagtagttatggtgaatggcacccccatggaagacgtgcttcacagttttgcggtgcagcagctacgaaagagcggaaaggtcgcggcaatagtcgtaaaacggccaaggaaggtccaagtggctgctctgcaggcgagccccccactggaccaggatgacagggccttcgaagtcatggacgagtttgacggcaggtccttccggtctggttattcagagcgttcacggctgaacagccacggcggtcgttccaggagttgggaggactcgcctgagcggggaaggccccacgaaagagctcgaagccgggaaagggacttgagtagggaccggagccggggtaggtctctggagcggggactggaccaggatcacgctcgcaccagggatcggtcgcgtggccgttccctggagagaggattggatcatgactttggtccctcccgcgaccgtgacagggataggtccagaggacgaagcatagaccaggattacgagagagcataccacagggcgtatgatcctgactacgaaagagcatattctcctgaataccgacggggagcaagacacgatgctcgctcccggggacctcgctctaggtcacgggagcatccgcacagccgctcaccctcccccgaaccacgaggcaggcctggcccaatcggggtgctgctgatgaaatcgagagccaacgaggaatacgggctgagactcggcagccagatctttgtcaaggagatgactcgtacaggactggccactaaggacggtaatttgcatgagggcgacatcattcttaaaatcaacgggacggtcaccgaaaacatgagccttacagacgccaggaagttgatcgaaaagagtaggggcaaacttcagctggtggttcttagagatagccagcagactctaatcaacattccgtcccttaatgatagtgattctgagatcgaagatatttcagaaatcgagtctaaccgctctttctcaccagaggagcgccgacaccagtacagcgattatgactaccattcctctagtgagaaactcaaggagagacctagcagcagagaagatacaccctccagactgtctaggatgggggctactccaacccccttcaaaagcacaggggacatagctggcactgtggtcccagaaaccaacaaagagcctcggtatcaagaagaccctccagcccctcagcctaaagccgctccccgtaccttcttacggccttctcccgaggatgaggccatttatggccctaatacaaagatggtccggtttaagaagggagatagcgtgggcctgaggctagccggaggcaacgacgtaggcatcttcgtcgcgggtattcaggaagggacatccgcggaacaggaagggttgcaagagggcgaccagatcctcaaagtgaacacccaggactttaggggattagtgcgagaggacgctgttctgtaccttcttgaaatcccgaagggcgagatggttacgattttagctcagtcaagagctgatgtatatcgagacatattagcttgcggtcgcggtgatagcttcttcatccggagtcacttcgaatgcgaaaaagagacacctcagagcctggcttttacacgtggcgaggtgtttagggtggtggacacgctatatgacggtaagcttggcaactggctggcggtgaggatcgggaacgaacttgaaaagggactcattcctaataagagcagagccgagcagatggcatcagtacagaatgcccagcgggataatgcgggagatcgggctgacttttggcgcatgcgcggacagagatcaggggtgaaaaaaaacctccgaaaatctagggaagatctgacagctgtggtcagcgtgtcaaccaagtttccagcttatgagagagtgctgttgcgcgaggcagggttcaaacgcccagtggttctgttcggaccgatcgctgacattgcaatggaaaaactcgctaacgaactccccgactggtttcagacagctaagacggagcccaaggatgccggaagtgagaaatctacaggcgttgtgagactgaatactgtgaggcaaataatagagcaggacaaacatgctctgctcgatgtcacacccaaggctgttgacctattaaactacacccagtggttcccgattgtcatcttcttcaatccagattcgcgacagggcgtgaagaccatgaggcagaggcttaacccgactagcaataaatcaagccgaaaactcttcgatcaggccaacaaactcaaaaagacctgtgctcacctgttcaccgcaactatcaacctgaattcagctaatgattcatggtttggaagcttgaaggatacaatacagcatcagcagggcgaagcagtttgggtgtcagaggggaagatggaggggatggacgatgaccccgaagatcgcatgtcatatcttacagctatgggcgctgattatcttagctgcgattctcgcctgattagcgatttcgaggacaccgacggagaaggcggtgcgtacacggacaatgagctggacgaacctgctgaagagcccctagtctctagcataacccggagtagcgagccagtgcagcatgaagaggtgcgcagaggcagaccacgcgcagggacaggggagccaggagtgtttcttgccctcagttggacagcagtatgcagtggatgttgtgggcgtcacagttag

SEQ ID NO: 244127 - DNA, 3132 bp, synthetic construct
  misc_feature 1..3132: note = Description of Artificial Sequence: Synthetic coding sequence
  source 1..3132: mol_type = other DNA
atgccggtccgaggggatcgaggattccctccacgcagagagttgtcaggttggctgcgcgcacctgggatggaagagcttatctgggagcagtataccgtgacccttcaaaaagactcaaagcggggtttcggcatagctgtgtcaggcggacgcgacaacccacatttcgagaatggcgagacctcaattgttataagcgacgtgcttcccggtggaccagcggacggccttctgcaggagaacgacagagtggttatggtgaatggcaccccaatggaggacgtgctccactcctttgctgtgcagcagttacgcaaatccggcaaggtggcagcaattgtcgtaaagagaccacggaaggtccaggttgccgctctgcaggcttcacctcccttagaccaggatgatcgggctttcgaagtaatggatgaatttgatggacgcagctttcgaagtggctattctgaacgcagccgacttaatagtcacggcggtaggtccagatcctgggaagattcacccgagcggggacgccctcacgaacgtgcacgcagtagagagcgggacctgagtcgggatcgctcacggggtcgttctctcgaacgcggtctggatcaagatcatgcaagaacccgcgatagaagtcggggtagatcactcgaacggggacttgatcacgatttcggaccttcccgggaccgtgaccgagatcgcagccggggacgctccatcgatcaagattatgagagggcttatcaccgggcatacgacccagattacgagagagcatatagcccggagtatagacgcggagccagacacgatgcgagaagccgaggacccagatcccgaagtcgggagcatccccattctaggtcgcccagccctgaaccacgtggcagacctgggccaataggagtgttgctcatgaaatcccgggctaatgaggaatacgggctgaggctggggagccagatctttgtcaaggaaatgactcgcacgggactggccacaaaggacggtaacctgcacgaaggcgacataatcctcaagatcaatggaacagtgactgagaacatgagtttgaccgacgcgcgaaagctaatcgagaagtcgcgtggcaagttgcagctggtagtgttgagggactctcagcaaactctcataaatattccgtctctgaacgatagcgattctgagattgaggatatctccgaaatcgaaagtaaccgttccttttccccagaggagcgcaggcaccagtacagcgactatgactatcattcttcgagtgaaaagctgaaggagcgcccttcttcaagagaggacacaccctctcgattaagccgcatgggggctaccccaactccattcaagagtaccggcgatattgctgggaccgtagtgcccgagacaaataaagagcctaggtatcaggaagatccacccgcacctcagcccaaggcggctccaagaacgttcctacgcccttctcccgaagacgaggctatctacggtcctaacactaagatggttcggttcaagaagggcgatagtgtgggactccgcctagcagggggtaacgacgtaggtatctttgtggctggcattcaggaaggaacctccgcagagcaggaaggactccaggagggagaccagatcttgaaggtgaacacccaggatttccggggactagtccgcgaagacgctgtgttgtacttactggagatccccaaaggcgagatggtcacaattctggcacagtccagagcagatgtatatagggacatcctcgcgtgtggtcggggtgacagcttctttatacgctcccatttcgagtgtgagaaagagacccctcagagccttgcctttaccagaggcgaagtctttcgcgtggtggacactttgtatgacggcaagctcggaaactggctggccgtgcgcatcgggaatgagctggagaaaggtctgatacccaacaaatcacgcgctgaacaaatggcgagcgtccagaatgctcagagggataatgctggtgatagagcagatttctggcggatgagaggtcagcgctctggagtcaagaaaaaccttcgaaagtcaagagaggatctcaccgctgtggtaagtgtaagcacgaagttcccagcctacgagcgggtgctcctaagagaggccggatttaagcgccctgttgtgctgtttggccctattgctgatattgcaatggaaaagctcgcgaatgagctcccggactggtttcaaacggctaaaactgagcccaaagacgccggatcagagaaatccacaggtgtggtccgcctcaacacggtcaggcagattattgagcaggacaagcacgcacttctggatgtgactcctaaggcagtggatcttctgaattatacccaatggttcccaatagtgatcttttttaaccctgatagtcgacagggggtcaagaccatgcggcagaggttgaacccgacctccaataagtcgagccgaaaactctttgaccaggccaacaaactcaaaaagacctgcgcacacctcttcactgcgactattaacctgaactccgccaatgatagctggttcggttctctcaaagacacaatccaacatcaacagggggaagcggtgtgggtgagtgagggaaagatggagggcatggatgacgatccggaggatcgcatgagctacttaactgccatgggggctgactatctgtcctgcgacagtaggctcatttccgatttcgaggataccgatggagagggaggagcttataccgacaacgagctcgatgagcctgcggaagaacctttagtctcttcaattacgcggtcctctgagcccgtgcaacacgaagagatagaaattgcgcagaagcatccggatatatatgcagtgcccatcaagacacacaagccagatccaggtactcctcagcatacaagctctagacctccagagccccagaaagctcctagcagaccgtatcaggatactagaggctcctatgggtctgatgcagaagaggaagagtatcgccagcagttgtccgagcacagtaagcgaggatactacggacaaagcgccaggtatagagacacagagctgtag

SEQ ID NO: 244128 - DNA, 3573 bp, synthetic construct
  misc_feature 1..3573: note = Description of Artificial Sequence: Synthetic coding sequence
  source 1..3573: mol_type = other DNA
atgccagtgaggggcgataggggtttcccaccgagacgcgaactttctggctggctacgagccccaggaatggaggaattgatttgggaacagtatacagtcacattgcaaaaagactccaagagagggttcggcatcgccgttagcgggggacgcgacaatccgcactttgaaaacggggaaacttccatcgtgatatctgacgtgctgcccggtggcccagccgatgggctgctccaggaaaacgacagagtggttatggttaacggcaccccaatggaggacgtgctgcacagcttcgctgtgcaacagttaaggaagtcaggaaaagtggccgctatcgtggtcaaacgtcccagaaaagttcaagtcgccgcactacaggctagtccgccacttgaccaggatgaccgtgccttcgaagtgatggacgaatttgacggcaggtcttttcgctccggctacagcgaaaggtcaaggttgaattcccacgggggtcggtccagaagctgggaggactctccagaaaggggccgtccccatgagagggctagaagcagagaaagagatttgagccgcgaccgctctcgaggcagatcactggaaagggggctggatcaggatcacgcacggacgcgggacaggtcgcgcggaaggtcacttgagaggggccttgaccacgacttcgggccatcccgcgacagggatcgggatcgttcgcggggtcgttcaatcgatcaggactatgaacgggcatatcatagggcctacgatcctgactacgaaagggcctatagccctgaataccggagaggtgcgaggcacgatgcgaggtcccgtggccctaggagcaggtcccgtgaacacccgcactcaaggagcccctctcccgagcccagaggaaggcccggacccattggtgtgctgctcatgaagtccagggcgaacgaggagtatggcctgaggctcgggagccaaattttcgtgaaggaaatgactcgcaccgggctcgcaacgaaggacggcaacctccacgaaggagacattatccttaaaatcaacggtactgtcaccgagaacatgagtttgaccgatgctcgtaagctcattgagaaatcacgcggaaagctgcagctagtcgtgctccgagatagtcagcaaaccctgattaacattcccagtctgaatgactccgacagtgaaatagaggatatcagcgaaattgaaagcaatcgatccttcagccctgaagagcgaagacatcagtacagcgactacgactaccactcttcttccgagaagcttaaggagagaccgagcagcagggaagataccccatccagattgtcccgcatgggggctacccctaccccctttaaatctaccggagatattgccggtacagtggtccctgagaccaacaaggaaccacgatatcaggaggacccaccagcccctcaacctaaggctgctccaagaaccttccttcgaccctccccagaagatgaagcaatttacggcccaaacacgaaaatggtgcgcttcaaaaaaggagacagcgtgggactccgattggcaggcggaaacgacgttgggatcttcgtagctggtatccaggaagggacatcagcagagcaagagggcttacaggaaggcgaccagattctgaaggtgaacactcaggattttagaggccttgttagggaagacgccgtcttgtacctgctggaaatccctaagggggaaatggtcactattctagcgcaatctcgagcggacgtgtaccgtgatattttagcttgcggaagaggggattccttcttcattcggtctcacttcgaatgcgagaaagaaactccacaatccctggcattcacgaggggagaggtattcagagttgtcgacacactgtacgacgggaaactcgggaattggttagctgttcgcattggcaacgaattggagaagggtctgattcccaacaagagtagggccgagcagatggcaagtgtccagaatgcacaacgcgataatgctggagacagagccgatttttggagaatgcgagggcagaggtctggcgtgaaaaagaacttacgtaaaagcagggaagatttgaccgctgttgtctcggtctccaccaagtttcctgcgtatgaaagagtgctcctacgcgaggctggtttcaagagaccagtggttttatttggccctatcgccgatatcgcgatggaaaaactggccaacgagcttcctgactggttccagacagcgaagactgagccaaaggacgcaggtagcgaaaaatcaacaggtgtggtaagattgaacacagtgcgccagatcattgagcaggataaacatgccctgctagacgtaacaccaaaggcggtagatttactgaactacacccaatggttcccgattgtcatattcttcaacccggactcacgccagggcgtgaagacaatgaggcagagactcaatcctacctcaaacaaatcatctcgcaagctctttgatcaagccaacaagcttaaaaaaacctgtgcacacctgttcacagccaccattaacctcaatagtgccaacgattcctggttcggctcactgaaggatacaattcagcatcagcagggagaggccgtctgggtatccgagggcaagatggagggcatggatgacgaccctgaggacagaatgtcgtacctgacagcaatgggcgctgattacctgagctgtgatagccgcctgatcagcgattttgaagatacggacggcgagggcggagcctacacagacaatgaattggacgaaccagctgaggagccgctcgtctcatccataacaagatctagcgaaccagtacagcacgaagaatcgatccgcaagccttctcccgagccaagagcacagatgcgcagagcagcctcatctgatcagttaagggacaatagcccccctcccgctttcaaacctgaacctccaaaggccaaaacacagaataaagaggagtcttatgatttctctaaatcatatgaatataagtcgaatccttcagccgtcgctggtaacgaaacgccgggagcatccactaaagggtatcctccccctgtcgctgccaagcccacattcgggcgttctatcctgaagccatctacccctattcctccccaagagggcgaagaggtgggagagtccagtgaggaacaggacaacgcccctaaatctgtgcttgggaaggtcaagattttcgagaagatggaccacaaggctaggctccagagaatgcaggagttacaggaggcccaaaacgccaggatcgagatagcccagaaacaccccgatatctatgccgttcctattaagacacacaaacccgaccctggcacgccacagcatacaagctcaaggccccctgagccgcagaaagcaccgagtcggccatatcaagacacccgaggtagctacggatcggacgccgaagaggaggaataccgtcagcagttgtccgaacactctaaacgagggtactatggccagtctgcacgttatagagacaccgaactctag

SEQ ID NO: 244129 - DNA, 306 bp, synthetic construct
  misc_feature 1..306: note = Description of Artificial Sequence: Synthetic coding sequence
  source 1..306: mol_type = other DNA
atggaggagctgatatgggagcagtacacagttacactccagaaagactccaaacggggttttggaatcgcagtctcaggcggacgggacaatccgcactttgaaaacggcgaaacctctattgtgatttctgatgtcttgccgggtggcccagcggacggtctcctgcaggaaaacgaccgtgtagtgatggtgaatgggacacctatggaagacgtactgcattccttcgccgtgcaacaactgagaaaaagtggaaaagtcgccgctatcgtctctactggcttcgctttctctctgccatag

SEQ ID NO: 244130 - DNA, 486 bp, synthetic construct
  misc_feature 1..486: note = Description of Artificial Sequence: Synthetic coding sequence
  source 1..486: mol_type = other DNA
atggaagagctgatctgggagcagtacacagttacgttgcagaaagacagtaaaagaggcttcggcattgctgtttccggaggtagggacaaccctcattttgaaaatggcgagacaagcattgttatctccgatgtgttgcctggtgggcctgctgacggcctcttgcaggaaaatgatagggtagttatggtgaatgggacaccgatggaggatgtcctccatagcttcgccgttcagcagctgaggaagtcaggaaaagtggcagccatcgtagtcaaacgcccaaggaaggttcaggtcgctgcgctccaagcctctccgcctttagaccaggacgatagagctttcgaggtgatggacgagtttgatggcagatccttcagatccggctactctgagcgaagccgcctgaatagccatggcggaaggtccagatcctgggaggatagcccagagagaggtagacctcacgaaagggcctag

SEQ ID NO: 244131 - DNA, 3063 bp, synthetic construct
  misc_feature 1..3063: note = Description of Artificial Sequence: Synthetic coding sequence
  source 1..3063: mol_type = other DNA
atggaggagctcatatgggagcagtataccgtcactctccagaaggattccaagagggggtttggaatcgccgtctctggaggtcgggacaaccctcattttgagaacggtgagacatctattgtaatctccgatgtcctccctggcggtcctgctgatgggttgcttcaggagaatgacagggttgtgatggtgaatggaactccaatggaagacgtcctgcacagttttgccgtgcagcagttgcgcaagtctggtaaggttgctgccattgtggtcaagcgacctcgcaaggtacaggtcgcggctctgcaggcttcacctcctttggaccaagatgatcgggctttcgaggtcatggatgagtttgatggcaggtcctttaggtccggttactctgagcgatctcggctcaacagccacgggggaaggtcacgcagttgggaggactctcctgagagaggcagaccgcacgagagggcacgtagcagagaacgagacctgtcacgagatagatcccggggtcgcagtctggagcgcggtctggatcaggatcacgcccgaacgcgcgacaggtcacgaggtcgatccctggagaggggtcttgatcatgacttcggacctagccgagacagagacagagaccggtctaggggaaggtccattgaccaggactatgaaagggcgtatcaccgggcatatgaccctgactatgagcgagcttattcccccgaatatcggagaggtgcccgacatgacgctcggtcacgaggccctaggtcccgttcgcgcgaacacccccattcgcgatcccccagtccagaaccaaggggacgaccaggacccattggggtgctgttgatgaagagtcgggcaaatgaagagtacgggttgcgactcggtagtcaaatattcgttaaagagatgacgaggactggactggcgactaaggacggcaatcttcacgagggtgacatcatcttgaagattaacggcactgtaactgagaacatgagtctgaccgacgccaggaagcttattgagaagagccgaggcaaattgcaacttgtggttctgagagacagccagcagaccctgataaacattccaagcctgaacgattctgactccgagatcgaagatatatccgaaatcgagagcaacagatctttctcacccgaggaacgacgtcaccagtactctgactacgactatcactcaagttccgagaagctgaaggagaggccctccagtagagaggataccccttctcggctgagccgcatgggggctacccctaccccattcaaaagcactggcgacatcgccggaacagtggttcccgaaactaataaggaacccaggtatcaggaggacccacctgctccccagcccaaagccgctcccaggacatttctgaggcccagccccgaagatgaagccatctacggacccaacactaagatggtccggttcaagaagggagactccgtagggttgaggttggcaggtggtaatgacgtggggattttcgttgctggaattcaggagggaaccagcgccgagcaagaaggcctgcaagagggcgatcagatcttgaaagtcaacacacaggatttccgcggactggtgagggaggacgccgtgctctacctgctggagatcccaaagggggaaatggttacgattctggctcagtctagagctgacgtttaccgcgatatcctagcatgcggtcgaggcgatagcttcttcatcaggtcacactttgagtgtgagaaagagactcctcagtctctggcttttacacgcggagaagtgttccgtgtagtggacactctgtacgacgggaagctgggcaactggctggctgtcaggatcgggaatgaattagaaaagggactgatccctaacaagagtcgagcagagcaaatggcttcggtgcagaatgcccagcgggacaatgcaggcgatcgtgctgatttctggaggatgaggggacagcggagcggcgtgaagaaaaacctgagaaagagtcgcgaggacctgacagcggttgtgagcgtctcaacaaagttccccgcatatgagcgcgtactcctgcgggaggcgggattcaaacgacccgtggtccttttcggcccaatagcggacatcgcaatggaaaaactagccaatgagctccctgattggttccaaaccgctaaaacagagcctaaggacgccggttctgaaaaaagtacaggcgttgtacggctgaatacggttcgtcagataatcgaacaggacaagcacgcgttactggatgtgacacctaaagccgtggacctgctgaactacacacagtggttccctattgtgatttttttcaatcccgatagccgccaaggcgtcaaaactatgcggcaacgactaaaccctacatcaaacaagagttcccgcaagttgtttgaccaggccaataaactaaagaaaacctgtgctcatctcttcaccgctacaataaacctgaatagcgcgaacgattcatggtttggaagtttgaaagacaccatccagcaccaacagggcgaagccgtgtgggtgagcgagggcaaaatggaaggtatggatgacgatccagaggacaggatgagctatcttaccgcaatgggtgccgattacctgagctgtgacagccggctgatctccgactttgaggatactgacggggagggcggtgcttacactgataatgagctcgacgagccagccgaggaaccactggtgagtagcataacccgctcatctgagcctgtgcagcacgaagaaattgaaattgcacaaaaacatcccgatatttacgccgtgccaatcaagactcacaagcctgaccctggcacacctcagcatacgagctctcggccacccgagccacaaaaagctccgtcacgcccttatcaagatacccgcggttcttacgggagtgacgctgaggaggaggaatataggcagcaactgagcgaacactcaaagagaggctattacggccagagtgccaggtatcgggacactgaactgtag

SEQ ID NO: 244132 - DNA, 3474 bp, synthetic construct
  misc_feature 1..3474: note = Description of Artificial Sequence: Synthetic coding sequence
  source 1..3474: mol_type = other DNA
atgaaaacagcgcaggcactgcaccgcatgtggattcaggcggtaaaaaaactgcggagatggaaaggcagggcacctggtatggaagagctcatctgggagcaatacactgtcacactacagaaagattcaaaaaggggattcggaatagccgtgtcagggggacgcgacaatcctcactttgaaaatggcgaaactagcattgttatctccgatgtgcttcctggagggccagcagatgggctgctgcaagagaacgaccgcgtggtgatggttaatggaacaccaatggaagacgtgctgcattcgtttgcagtgcagcagcttaggaaaagcggaaaagtggccgctatagtggtgaagcggcctagaaaagtgcaggtcgccgctctacaggccagccccccactggatcaggacgatcgcgcttttgaggtcatggatgaattcgatggaaggtccttcaggagcggctactcagagcggagtagactgaatagtcacggaggtagaagcaggtcgtgggaggactcacctgagcggggacggcctcatgagagagccaggagtcgcgaaagggacctcagcagggacaggtcgaggggacggtctctggaacggggactggaccaggaccacgctcgaacacgcgaccggtctcgaggacgctccctcgagcggggactggaccatgatttcgggccaagtcgggaccgagaccgagaccgttccagagggaggtccatcgaccaggattacgagagggcctaccatcgggcatatgatcctgattatgaaagagcgtattcccccgaatatcggaggggagcaagacacgacgcaaggtcgaggggtccacggtccagatcccgagaacatccgcacagtcgtagtcctagtcctgagccaagaggacgccctggacccattggagtcctgctaatgaagtctagggcaaacgaagaatatggtctgagactggggagccagattttcgtgaaagaaatgaccagaaccggcctggcaaccaaggatgggaatctccacgagggagatattatcttaaagatcaatggtaccgtgaccgagaacatgtcattaacggacgcacgcaaattaatcgagaagagcaggggtaaactccaactggttgtgctgcgagattcacagcagaccctgatcaacataccttctctcaacgatagcgactctgaaatcgaagacatcagcgagatagagagcaaccgtagcttctcgcccgaggagaggcggcaccagtattctgattatgattaccactcatcttctgagaagctcaaagagagaccctcatcgagggaagacaccccctcccggctgagcagaatgggtgccactccaacgccatttaaatctacaggcgacattgcaggtactgtcgtcccagagacgaacaaagagcccagatatcaggaggatccgccagcccctcagcctaaggctgcacctagaacattcctccgcccttccccagaggatgaagctatttacgggcctaacacaaagatggtccgcttcaagaagggtgactctgtgggacttcgtctggccggtggcaacgacgtaggtatattcgtggctggtattcaggaaggtactagtgcggagcaggagggcctgcaagagggcgaccaaatcttgaaggtcaacacacaggacttcaggggcctggttcgcgaagatgccgtgctgtatctgctggagatcccaaaaggtgaaatggtgaccatcctggctcaatccagggctgatgtgtatagagatattcttgcttgcgggcgaggcgactctttcttcataagatcccacttcgagtgcgagaaagagaccccacaatcactggccttcacacgcggtgaggtttttagagtcgtcgataccctgtacgatgggaaactgggaaactggctagctgtgagaatcgggaatgagctggagaagggtctgataccaaataagtctagggctgagcagatggccagcgtacagaatgcccagagagacaacgcaggtgacagagccgacttctggaggatgcgtggacaacgctccggtgtcaagaaaaacctgaggaaaagtagagaggacttgaccgccgtggtgagtgtttccaccaagtttcctgcatacgagagagtgttactccgagaagctgggtttaaaaggccagtggtgctatttggaccgattgcagacatcgcaatggagaagctggctaatgagctcccagattggtttcagactgctaaaacagagcccaaggatgctggctcagagaagagcactggggtcgtcagactcaacactgttcggcaaataattgaacaggataagcacgcgctgctcgacgttacgccaaaggccgttgaccttctgaactatactcagtggtttccgatagttatatttttcaacccagattctcggcagggagttaaaactatgaggcaacgtttaaatcccacttctaacaagtcatctcgcaaactatttgatcaggctaataaattaaagaagacctgcgctcacttattcacagctacaattaacctgaactcggcgaatgactcttggttcggcagcctgaaagatactatccagcatcagcagggcgaagccgtgtgggtgtcagagggcaaaatggaggggatggacgacgatcccgaagacagaatgtcatatctgaccgccatgggcgctgattatctatcttgcgattctcgcctgattagcgacttcgaggacacagacggagaagggggagcctataccgataatgagcttgacgagcctgctgaggagcctctagtgagttccatcacgcgttccagcgaacctgtgcaacacgaagaagcgaagacacagaacaaagaggagagttacgacttcagcaaaagctatgagtataagtcaaatccctccgccgtcgccggaaatgaaacaccaggagcatccacgaaagggtacccaccacccgtggcagcaaagccgacctttggacgttcaattttgaaaccatctacacctatccctcctcaggagggagaggaagtgggcgaatccagcgaagaacaggacaacgcccctaagtcagtattgggtaaggttaagatcttcgagaaaatggaccacaaagccaggcttcaaagaatgcaggaattgcaggaagcccagaatgcaaggatcgagatcgcacagaagcaccctgatatctacgcagtgcccattaagactcacaaaccagatccgggaacacctcagcacacatcaagtcgtcctcctgaaccccaaaaggcaccttccagaccataccaggatacccgcggatcctacggcagcgacgcagaggaggaagaatatcggcagcaactgtccgagcacagcaaacgcggatactatggacaatccgcgcgatacagagacacagagctttag

SEQ ID NO: 244133 - DNA, 3666 bp, synthetic construct
  misc_feature 1..3666: note = Description of Artificial Sequence: Synthetic coding sequence
  source 1..3666: mol_type = other DNA
atgaagacagctcaggccttacaccgtatgtggattcaggcggtgaaaaaactccggcgatggaaggggcgagtctcccctagtgcttcttcccctctcgtgtttcccaacctgtccagttgggaaggagaggggtccaaaacaattcttacagcgcctggcatggaggagctcatctgggagcaatacaccgtgaccctccagaaggattccaaacgcggattcggcattgccgtgtccggaggacgcgacaatccgcactttgagaatggtgaaacttcaatcgtgattagcgatgtgctcccaggcggacctgcagacggcctgcttcaagagaacgaccgggtagttatggtgaatggcaccccgatggaggatgttctgcatagcttcgctgtccagcagctgcgtaagagcggaaaggtcgctgctatcgtggtaaagaggcctcggaaagtccaggtggcggcactgcaggcctctccccctctggatcaggacgatcgggcttttgaagtgatggacgagtttgacggacggtccttccgttccgggtactcggaaaggtctcgtttgaactcccatggcggtcggagtagaagctgggaggactcgccagaacgaggcagaccccatgaaagagccaggtcacgcgagcgtgatctctcacgtgatcgatcgcgcggtcggtcccttgagcggggtctcgatcaagaccacgcacgtaccagagatcggtcccgcggacgaagcctggagaggggtctggatcatgacttcggccctagcagggatagagatagagatagaagcaggggccgatcgatagaccaggattatgaaagggcctaccatcgagcctatgatcccgactatgagagggcttattctcccgaataccgaagaggggcaaggcacgatgccagatcccgcggacctcgctctcggtccagagagcatccccactctagatctcccagccctgagccaagggggagacctgggccaatcggtgtgctgctcatgaaaagcagggctaacgaagaatatggtcttcggctgggctcccagatattcgtcaaagaaatgacacgaaccggtctggctacaaaagacggcaatctccacgaaggagacatcatcctgaagatcaatgggactgtgaccgagaacatgagcctgacggacgccagaaagttaattgaaaagtcccgcggtaaactgcagcttgtggtgctgcgtgattcacagcagaccctcataaacatcccatccctgaacgacagtgattcagaaattgaagacatttcggagatagagtcaaaccgtagtttttcacccgaagagcggcgacatcagtatagtgactacgactaccattcctcctccgaaaagttaaaagaaagaccctcctccagagaagatacccctagccggctgtccaggatgggcgctacacccacacccttcaaatcgactggcgacatcgcgggaaccgtagtaccggaaactaataaggagccacggtaccaggaagaccctccagcaccgcagccaaaagcagctcccaggacgttcctgcgcccttcaccagaggatgaagccatctatggtcccaataccaagatggtgagattcaagaagggggattctgtaggcctgagactggcaggaggcaacgatgtgggaatctttgttgccggaatccaggagggcacgtccgcggaacaggaaggtctgcaagaaggagatcagatccttaaagtgaacacccaggattttagaggtctggtgcgggaagatgccgtcctttacctgcttgaaattccaaagggcgaaatggttaccattcttgctcaaagtcgagctgacgtttacagagatatcttggcctgcggccgtggggattcgttcttcattcggtcccatttcgagtgcgagaaggagactccacaaagtctggccttcacccgcggtgaggtgttccgcgtggttgatactttatatgatggaaagttaggcaactggctggccgtgagaatcggcaacgagctcgaaaagggtctgattcctaataagagcagggcggagcagatggcttccgtacagaacgcccagcgagataacgcaggagatcgcgctgatttttggagaatgcggggtcagaggtccggggtgaagaagaatttgagaaagtcgcgggaggacctgacggccgtcgtttctgtgtccacgaaattccccgcttatgagcgtgttctactgcgggaagcaggattcaagcgccctgtagtgctgtttggccctatcgcagatattgctatggaaaaactcgcaaatgagctcccagattggttccaaactgctaagaccgaaccaaaggatgcgggatctgaaaaatcgacaggtgtggtgagactgaacacagtcaggcaaattatcgagcaggataaacacgctttgctcgatgtaaccccgaaagctgtggacctgctgaactacactcagtggtttccaatagttattttttttaatcccgactcaagacaaggtgttaagacaatgagacagcgcctgaatcctaccagcaacaaaagctccagaaagttgtttgaccaggccaacaagctcaaaaagacatgtgcacaccttttcaccgctactattaacctcaattctgctaacgacagttggttcggcagcctcaaggacaccatacaacatcagcaaggcgaagcggtttgggtctccgaagggaagatggagggcatggatgacgatcctgaagacaggatgagctacctgaccgcaatgggcgctgactaccttagttgtgattcccgtcttattagcgacttcgaagatacggacggtgagggcggtgcttatacagacaatgagctcgacgaacctgcggaagagcctttggtttcgtctatcaccaggtcttcggagcctgttcagcacgaggagtctattcgcaagccctcccccgagcctcgtgcgcagatgaggagagctgcctcctccgaccagttacgagataactctcccccacctgcatttaagccggaacccccaaaagccaagacgcagaataaggaggaaagctatgacttctccaagagttatgagtataaatctaaccctagcgccgtggctgggaacgagactcctggggcaagcaccaagggataccccccaccggtagcagcaaaacctactttcgggagatcaatcctgaagccaagcacccccataccacctcaggagggcgaggaagtcggggagagttctgaagaacaggacaatgctcccaaatctgtattagggaaggtgaaaatattcgaaaaaatggaccataaagcaaggttgcagagaatgcaagagttgcaggaagcccagaacgcaagaattgagattgcccaaaagcatccagacatctatgctgtacccattaaaacccacaaacccgaccctggaacgcctcagcatacgtcatccaggcccccagagccgcagaaggcaccaagcagaccctaccaggacacccgcggaagttatggtagcgacgcagaagaggaggagtataggcagcagctctccgagcatagcaaaaggggctattacggacagtctgcaaggtaccgggacaccgagttatag

SEQ ID NO: 244134 - DNA, 2787 bp, synthetic construct
  misc_feature 1..2787: note = Description of Artificial Sequence: Synthetic coding sequence
  source 1..2787: mol_type = other DNA
atggccgtgagattccaggtggccgacatggaagagttgaccatttgggaacagcacacggctactctcagcaaggatcctaggcggggatttggaatagccatcagcggcggaagagacagacctggaggaagtatggtggtcagcgatgtcgtgccaggagggcctgctgagggcaggctacagaccggcgatcacatagtgatggttaatggagtttcaatggaaaacgccaccagcgcttttgcgattcaaatcctgaagacgtgtactaagatggctaatatcactgttaaaagaccacggcgaattcatcttccggcaaccaaggctagtcccagcagccccggtcgacaggacagcgacgaggatgacggccctcagagggtcgaggaagttgatcaggggagagggtatgatggcgattcttctagcgggtctggaaggtcctgggatgagcggagcagaaggccaaggcctgggagaaggggccgagcagggtcccacggaaggaggagccccggaggtggatccgaggctaacggactggctctggtcagtggtttcaagcgccttcccagacaggatgtgcaaatgaagccggtgaaatccgtgctggttaaacgccgagattcagaggagtttggcgtaaagctgggaagccagatctttattaagcacattactgacagtggattagccgctaggcatagaggactacaggagggagacttaattctgcagatcaatggtgtctccagccagaatttatcactgaacgatacaaggaggctgatcgaaaaatccgagggcaaactcagcctcctggtgctgcgtgataggggccaatttctggtcaacatccctcccgcagtgagcgacagtgactccagtcccctggaggatatttccgacctcgcatcagagctgagtcaggctcctccctcacacattcctcccccacccaggcatgcacagcgtagtcctgaagccagtcagactgacagccctgtggaaagcccacggctgagaagggaatccagtgtcgacagccggacgattagcgaacctgacgagcagcgaagcgaactgccacgcgagagctcatacgacatctacagggtgcccagcagccaatcaatggaggaccggggttattcccccgacacgcgagtggttagatttctgaaggggaaaagtattgggttgagacttgccggtgggaacgatgtgggaatcttcgtgtctggcgtgcaggcgggaagccccgctgatggtcagggtatccaggaaggtgaccagatattacaggtgaatgacgtgcccttccaaaaccttacccgtgaggaagccgttcagttcctgctagggctgccacccggagaagaaatggaactggtgactcagcgcaaacaggacatcttctggaagatggttcagtctcgtgtgggagattcgttctacatccgcacacatttcgaattagaaccatctccacccagcggacttggattcactcgcggagacgtgtttcatgtgctggacaccttgcacccaggcccaggccaatcacacgctagaggagggcattggctggccgtgagaatggggagggacctgcgggaacaagaacggggtatcatacccaatcagagcagggccgaacagttggcctctctcgaagccgcacaacgcgctgtgggggtgggcccaggatcatcagccggtagtaacgctcgtgctgagttctggagacttcggggactcagacgaggggctaagaaaaccactcagcgctcacgtgaggatctgtccgcacttacacgccaggggcgatatcccccttacgagagagttgtcctgagagaagcatccttcaagcgcccagttgtgattctcggtcctgtagctgacattgcgatgcagaagctgaccgccgaaatgccagatcagttcgagatcgctgaaaccgtatcacgaactgacagcccatctaagatcatcaagttggatacagtgagggtcattgccgagaaggataaacacgccttgttggatgtaaccccgtccgccattgagcggctcaactatgtgcagtactatccaatagtcgtgttttttatccccgagagcaggcctgccctcaaggcacttcggcaatggctagctccggcttcgcggcgatctaccaggcgcctgtacgcccaagcacaaaagctgaggaagcattcaagccatctctttacagctactatccctctcaacggaaccagcgacacttggtaccaagaactcaaggccataattagagaacagcaaaccaggccaatctggactgcagaggatcaactggacggttctctcgaggacaacctggatctgcctcaccacggccttgccgatagcagcgccgacttatcatgtgacagcagagtgaacagcgactacgagactgacggcgaggggggtgcatacactgatggtgaggggtataccgacggcgaaggtggtccttacacagacgtggacgatgagccacctgctccagctctggccaggtctagcgagcccgtgcaggccgacgagagccagtcaccgagggatagaggaagaatcagcgcccatcagggcgcacaggtggattcacgacaccctcagggacagtggaggcaggacagcatgcggacgtatgaacgggaagctctgaaaaagaagtttatgagagtgcacgatgccgaatcaagtgatgaagatgggtacgactggggtcctgccaccgatctgtag

SEQ ID NO: 244135 - DNA, 2859 bp, synthetic construct
  misc_feature 1..2859: note = Description of Artificial Sequence: Synthetic coding sequence
  source 1..2859: mol_type = other DNA
atgaatctgtgcggattgatgccaatatttcctgcacccttagatcaagtggcagatatggaggagttgacaatttgggagcagcatacagccaccttgagtaaggatcccaggcggggattcggcattgcaataagcggtggaagagaccgccctgggggatcaatggtcgtttcggatgtggtgcccggagggcctgcagaagggaggctgcagacaggcgaccacatcgtaatggtaaacggagtctcaatggagaacgcaacaagcgcattcgcaatccagattctgaaaacctgcaccaagatggctaacattactgtgaaaagacctcggagaatacatttacccgctaccaaagccagtccttccagcccaggaaggcaggattccgatgaggatgacggaccccaaagggtcgaggaagtggatcaaggtagaggatacgacggcgactcttcgagtggcagcggcagaagctgggacgagcgctcacgacgtcctcgcccaggacgacgcggtcgagctgggtctcacggcagaagatctcccggaggcggatcagaagccaatggcctggccctggtttctggtttcaagcgactacctcggcaggacgtccaaatgaagcccgtgaagtcagttctcgtgaaaaggcgagattccgaagagttcggcgtcaagttgggttctcagatattcatcaaacacattaccgacagtggtctggcagctagacaccgagggctacaagagggtgacctgattttacagataaacggggtgagctcacagaatctttcactcaacgatacgcggagactaattgagaaatctgagggtaaactctcgctcctagtgttgagggatcggggtcagtttctcgtgaatatcccaccggctgtaagcgactctgactccagtccgcttgaggagggtgtgacaatggccgacgagatgtcatctcctcctgctgatatttccgacttggcctcagagctcagccaagcacccccatcgcatatccctccgccaccacggcacgcccagaggagtcccgaggcgtctcagaccgactctccggttgagtcccccagattgcgcagagagagtagtgtcgactcaaggacgatatccgagccggacgagcagcgaagtgaactgcccagggagtctagctacgacatttacagggtcccctccagtcagagcatggaggacagggggtactctccagacacacgcgtggtgaggttcctcaaggggaagtcgatcggtctgagactcgctggcggaaacgacgtcgggattttcgtgtccggggtgcaggcaggatctccagctgacggacaaggaattcaggaaggggaccaaattctacaagtcaacgatgtgcctttccaaaacctcacccgcgaagaggccgtgcaattcctgttgggtctgcctcccggagaggaaatggaactcgtgactcagaggaaacaggatatcttctggaaaatggtccagtctcgggtgggagactcattctatatcagaacacattttgagctggagccttcacctccttctggcctgggattcacgagaggggatgtctttcacgtccttgacacactgcaccccggaccaggtcagtctcatgctcggggaggccactggttggctgtccgcatggggagggacctgcgggagcaagaacggggaattatccctaaccaatcaagagcggaacagctggccagtttggaggcggcacagcgggctgtcggcgttggccctggttcaagtgccggtagcaatgctcgcgctgagttctggcgtctccgcggactgaggcgcggagccaaaaaaacaacccagcgaagcagggaagatctctctgccctgaccaggcagggacgttaccccccttacgagagggtagtcctacgtgaagccagcttcaaacgtccagtcgtgattctaggtcctgttgccgatatcgccatgcaaaaactgacagcagaaatgcctgatcagttcgagatcgcagagacagtatctcgaaccgactcgccttccaagattatcaaattggacacagttcgggtgattgctgagaaagacaagcacgctctactggacgtgactccaagcgctatcgagaggctcaactacgtgcagtattaccccattgtagtgttcttcatccctgagagcaggccggctctcaaggctttacgccagtggctggcaccggcaagccgccgttcgacaaggcgtctttatgcccaggcccaaaaactccggaagcactccagtcatttgtttaccgccaccatccctttgaacggaacgtctgacacctggtaccaggagctgaaagcgattatccgcgagcagcagacaagaccaatatggacagccgaggaccagttggatggctccttggaggataatctggacctcccacaccacgggctggccgactccagtgctgatcttagttgtgatagccgtgtgaatagcgattatgaaacagatggcgagggaggcgcttataccgacggagaaggatataccgacggtgagggcggaccatacaccgacgtcgacgatgagccacccgcacctgctttagcaaggtcttctgagcctgtgcaggctgacgagagccagagtccgagggaccgcggaagaatctctgcccatcaaggggctcaagtggacagcagacatccccaaggccaatggagacaggactctatgcgtacctacgaacgcgaagccctgaagaagaagttcatgcgtgttcacgatgcggagtcctccgatgaggacggctatgactgggggcctgccactgacctatag

SEQ ID NO: 244136 - DNA, 2802 bp, synthetic construct
  misc_feature 1..2802: note = Description of Artificial Sequence: Synthetic coding sequence
  source 1..2802: mol_type = other DNA
atggaggagcttaccatctgggagcagcacactgctacactgagtaaggacccacggagaggattcggaatcgccatttcagggggaagagataggcccggtgggtcaatggttgtgtccgatgtcgttcctggtggaccggctgagggccgactgcaaacaggagaccatattgtgatggttaatggcgtgtcgatggagaacgctacctccgcgttcgcaattcagatcctgaaaacttgcacgaagatggcaaatataactgtaaaacggccaagaagaattcaccttcccgctacgaaagccagcccttcatcgccaggacgtcaggattctgacgaggatgacggtccacagcgagttgaagaagtcgaccagggcagggggtacgatggggacagctcctctggtagcggacgctcatgggacgaaaggtccagaaggccgaggccgggaagaagaggcagggccggatcccacggcagacgctcaccaggcggagggtctgaagccaacgggctggctctggtgagcgggtttaagaggttaccaagacaggatgtccagatgaaacctgtgaagagtgtgctggtaaaaaggagggattccgaggagttcggggtgaagctggggagccaaatttttatcaaacacattacagatagtggtctggctgcgaggcaccgagggttacaggagggggacctgattctacagatcaatggcgtctcttcccagaacctgtcattgaatgacacaaggcgccttatcgaaaagtccgaaggaaaactttcactcctcgtgctcagggaccgtggtcagtttctggtgaacattcctccagctgtatctgactcagactctagcccgctggaagaaggcgtcacgatggcagatgagatgtctagccctcctgccgacattagtgatctcgcttctgaattgtcgcaggccccacctagccatatcccccctccaccaaggcatgcgcagcgtagtcccgaggctagtcaaaccgattcgccagtggaatctcctagactgcggcgagaatcgtccgtcgacagccgcaccatcagcgagcccgatgagcaaaggtctgagcttcccagggagtcatcttacgatatctacagggtcccttcctctcaatccatggaagatagaggatactctcctgatactcgcgtcgtcagattcctgaaaggaaagtctatcggattaagacttgctggcggtaatgacgtggggatttttgtcagtggtgtgcaggccggaagtcccgctgacgggcagggcatccaggagggagaccagatcctgcaggtcaacgacgtgcctttccaaaatctgacacgtgaggaagctgtccagtttctgcttggactgccacccggagaggaaatggagctggttacgcagcggaagcaggatattttctggaaaatggtgcaatcccgcgtgggcgactcgttctacataagaacgcacttcgagcttgaaccgtcgccaccgagcggcctgggctttaccagaggtgatgtgttccatgtgctggacacactccacccgggtcctggacagagccatgccaggggtgggcattggcttgccgtgcgaatgggtcgagatctgcgcgaacaagagcgtggtattatacccaaccaatcgcgggcagagcagcttgcatcactggaagccgctcaacgtgcagtaggcgtaggccctggaagttctgccggttccaatgccagagccgagttctggcgacttcgtggcctgcgcaggggcgcaaagaaaactacacagcgatccagagaagatcttagcgcactgactagacagggcagataccccccttacgagcgtgttgtcttacgggaggcgtctttcaaaaggcctgtggtcattttaggacctgtggcggatattgccatgcagaaattaaccgccgaaatgccagaccagttcgagatagcagagacagtgagtcgcactgactctccatcaaagattattaagcttgacacagtgcgagtgattgctgaaaaggataaacacgcgctcctagatgtgacaccaagcgccattgagagactcaactatgtccagtactatccaatcgttgttttcttcatccccgaatccagaccagcactgaaggctctgagacagtggctggcccctgcttcaagacggagcactcgacgcctgtatgcccaggcgcagaagctgcgcaagcactcatcacatttgtttacggcgacgatacccctaaacggcacctccgacacgtggtatcaggaactgaaagccatcatccgggagcagcagacaagacccatttggacggcggaagatcagctcgacggcagtcttgaagataatctggatcttcctcaccacgggctcgccgactcttcagccgacctttcttgcgatagccgcgtgaattcagattatgagaccgacggtgaaggtggggcatacacggatggcgaggggtacacggatggagaaggtgggccatatacggatgttgatgacgaacccccagctcctgctctagccagatcgtccgagccagttcaggctgatgaaagccaatcgcccagagatagaggtaggattagtgctcaccagggggcacaagtagacagtcggcacccccagggacagtggagacaggattcgatgagaacctacgagagagaggccttgaagaagaagtttatgagggtgcacgacgccgagtctagtgatgaggacggatatgactgggggccagcaaccgatctgtag

SEQ ID NO: 244137 - DNA, 2652 bp, synthetic construct
  misc_feature 1..2652: note = Description of Artificial Sequence: Synthetic coding sequence
  source 1..2652: mol_type = other DNA
atggtggtttctgatgtggtgcctggaggacccgctgaaggacgccttcagacaggagatcacatcgttatggttaatggggtgagcatggagaacgctacctcagcctttgcgatccaaattctcaagacctgtaccaagatggcgaacataactgtgaaacgaccacgacggatacatctccctgccacaaaggctagcccttcttcaccaggccgacaggacagcgatgaggatgacggtcctcagcgcgtggaagaggtggaccaaggacgcggatacgacggtgacagtagctcagggtctgggaggagctgggacgagaggtctcggcgtcctaggccaggcaggaggggtagggccggatctcatggacgcaggtcgccgggtggtggcagcgaagccaacgggctcgctctggtctctgggtttaaaagactgcccaggcaggacgtgcaaatgaagcccgtcaagtccgttctggttaagcgcagagactccgaggagtttggggtcaaactgggatcccagatcttcatcaaacatatcacagactccggtttggccgctcgccaccggggattgcaggagggtgatttgatcctgcagattaatggcgtgtcctcccaaaatctgtctctcaatgatacccggagactcatagagaaatcagaagggaagcttagtctactcgttctaagagataggggccagttcctggtcaacatccctcccgctgtgtctgactccgatagctctcccttagaggatataagtgatctggcctctgagctgtctcaggcccctccctcacatatcccacccccacccagacatgctcaacggtcgccagaggctagtcagacagatagtccagtggaatcccccaggctcagaagggaatcgagtgttgattctcgaactattagtgaacccgatgagcagcgcagtgagttgcccagggagtcctcatatgatatttatagagtcccgagttcccagagtatggaggacaggggttactctcctgataccagagtagtgcgttttctaaaggggaagtcgatcggtctgcgcttggctggaggtaacgacgtgggcattttcgtgtccggggtccaggccggatctcctgctgacggccagggcatccaggaaggagaccagatactgcaggtgaatgatgtgccattccaaaatctgacacgcgaagaggctgttcagttcctgctcggcctgcccccaggagaggaaatggagttggttacccagcgcaaacaggacatcttttggaagatggtccagagccgagtcggggattctttctatattagaacccactttgaattggaaccatccccacccagtggcttaggcttcacaaggggcgacgttttccatgtgctcgacacactgcaccctggcccaggtcaatcacatgcccgtggtggacattggttggctgtgcgaatgggacgcgacctccgagagcaggaacgcggtattattccaaaccagtcccgggctgagcagctggcttcactggaggcagcacagcgcgcagtgggcgttgggcctgggagcagcgcaggcagtaacgccagagcagagttctggcggctccgaggcctgcggaggggggctaagaaaacgactcagaggtctagggaagacttaagtgcactgacaagacaagggcgatatcccccatatgagcgggtggtactgcgggaggcctcattcaagcggccagtcgtgatcctcggacccgtggccgacatcgcgatgcagaaattaaccgccgagatgcccgaccagtttgagatagcggaaaccgtttctcgaacagacagtccatctaagattatcaagctggacaccgtacgtgtgatcgctgagaaggacaagcacgccttgctggacgtgaccccctcggcgatcgagcgactgaactatgtacagtactaccctatcgtggttttcttcattcccgagtccaggcctgctttaaaggctctgcgccagtggcttgccccagcttcccgaagatctacccgcagactgtacgctcaagcgcagaaactgcgcaagcactcaagtcacctttttactgccactataccactcaatgggacttccgatacatggtatcaggagctgaaggcaatcattagagagcagcaaacaaggccgatttggacagcggaagaccaattggatggttcactcgaggacaatttagatctgcctcaccacgggctggccgattccagcgccgacctaagttgtgattcccgcgttaactccgactacgagaccgacggggaagggggtgcttacacggacggggagggctacacggatggcgaggggggaccctacacagacgtagacgatgagcctcctgccccagcactggcaagaagttcagaaccagtgcaggcggatgagtcacagagtccacgggacagaggcagaatttcagcgcaccagggcgcacaagtggattcacggcacccccaggggcaatggcggcaggattctatgaggacctacgagagagaggccctcaaaaaaaaattcatgcgggtgcacgacgccgagagcagcgatgaggatggctacgactggggccctgctactgatctatag

SEQ ID NO: 244138 - DNA, 2760 bp, synthetic construct
  misc_feature 1..2760: note = Description of Artificial Sequence: Synthetic coding sequence
  source 1..2760: mol_type = other DNA
atggaggaactcacaatctgggagcagcataccgccactctcagcaaagatcctcggagaggatttgggatcgctatcagcgggggacgggacaggccaggcggttcaatggtggtgtccgacgtcgtcccgggaggcccagccgaagggaggctccagacaggtgatcacattgttatggtgaatggagtgtccatggagaacgcaaccagtgcctttgccattcagattttgaagacatgtaccaaaatggccaacattacggtgaagaggcctaggcggatccacctccccgcaaccaaagcatctccctcgagccccggaaggcaggattctgacgaagacgacgggccacaacgagtggaggaagtagaccagggtcgtgggtatgacggagacagttctagcggaagcggcaggtcgtgggatgaaagatcccgacgtccccgaccaggacgcagaggcagagctggatctcatggacgtaggtcgcctggcggtgggagtgaggcgaacggcttggccctggtctcagggtttaaacgactgccaagacaggatgtgcagatgaagccagtgaagtcagtgctcgttaaaagacgcgacagtgaagaatttggcgtgaagctgggaagccagatctttatcaaacacataacagacagcggactcgcggcacggcacagggggttgcaggagggcgatctcatacttcaaatcaatggcgtttcaagtcagaacctgagcctcaacgatacacgacgcctgatcgagaagtccgagggcaaactttctctcctcgttctccgggatcgcggacagtttctggtaaacattcccccagccgtcagcgatagcgactctagccccctcgaggacatcagcgacctggcctctgaattgagtcaagcccctccatcgcacatccccccaccacctcgccacgcccagaggagccccgaggctagccagacagattctcccgttgagtcccctagactgcggagagagtcaagcgtggattcccgaaccatttccgagcccgacgagcaaagaagcgagctcccaagagagagcagttatgacatttatcgagtgccctcctcacagtctatggaagatcggggatattcaccggacacgcgggttgtccgcttcttaaagggcaagtctataggcttgagactggcgggaggtaacgacgtggggatattcgtgtcgggcgtgcaggctgggagcccggcagatgggcaaggaatccaagagggtgaccagatattacaggtgaacgatgtgccatttcagaatttaaccagggaagaggccgtccagtttcttctcgggcttcctcccggagaagagatggaactcgtgacccaacgcaagcaggatattttctggaagatggtccagtccagggtgggcgatagtttttatatccgaacccactttgagcttgaaccatcacctccttcaggcttgggctttacgcggggtgatgtcttccatgtcctagataccctccacccaggccctggtcagtctcacgcgagggggggtcattggctcgccgtgaggatggggcgagatctcagggagcaggagcgagggatcattcccaatcaatcccgagctgagcagttagcgtctctggaagccgcacaacgggctgtaggtgtagggccaggctccagcgccggatcaaatgctagagcagagttttggcgcctgcgagggcttagacgtggggcaaagaaaactacgcaaagatcccgggaagacctgtccgccctcacacgtcaggggcgttaccctccctacgagagggtggtgctgcgggaagcatcattcaagcggcctgtcgtcattctcggtccagttgccgacatcgctatgcaaaaactgactgccgaaatgccggatcagtttgaaatcgctgaaaccgtaagtaggaccgattcaccttctaaaattatcaagctggacacggtccgggtgatcgccgagaaggacaagcacgctctgcttgatgtcacccctagcgctattgaacgtctcaattatgtgcagtattaccccattgtggtcttcttcattcctgaatcaagacccgctcttaaagccctccggcagtggctggcaccggcatcccgcagatctactaggcgcctgtatgcgcaggctcagaagctgcgtaaacatagcagccatctgtttacagctacgattcctctaaatggcacttctgatacttggtaccaagaactgaaagcgatcatacgggagcagcagacacgacccatttggacggcagaagaccaacttgatggttccttggaggacaaccttgacctgccccaccacggcctggctgattcatcagccgacctcagctgcgactccagagtaaattctgattatgaaacagatggtgagggaggggcttataccgacggcgaggggtataccgacggggaaggcggaccttatactgatgtggatgacgagcccccagcacccgcactggcccgatcgagcgagcccgtgcaagctgatgagagccagtcccccagagatcgtgggcgaatctcagcccaccaaggggctcaggttgacagtaggcacccccagggccaatggcgacaggattccatgcggacctacgagagagaggccctaaagaagaaattcatgcgcgtccacgacgctgagagtagtgacgaagacgggtacgattgggggcctgcaacagatctgtag

SEQ ID NO: 244139 - DNA, 1623 bp, synthetic construct
  misc_feature 1..1623: note = Description of Artificial Sequence: Synthetic coding sequence
  source 1..1623: mol_type = other DNA
atggtgaggacagatggccacactctcagtgaaaaacgcaattaccaggtgactaattcaatgtttggcgcaagcaggaaaaagtttgtggaaggggtggatagtgactaccacgatgaaaatatgtactactcacagtcctctatgtttcctcacaggagcgaaaaagacatgctcgctagtccctcaacatctggccagctgagccagtttggtgccagcctatacggacagcagagcgcgctgggcctgcctatgagggggatgtccaacaatacaccccaactgaatcggagcttgagtcagggaacacaactgccttctcacgtaacccccacaactggggtgccaactatgagtttgcacacacctccctccccctcacgaggaattcttcctatgaatcccaggaacatgatgaatcattctcaagtaggacagggcattggcataccctcccgcaccaatagcatgtcatcaagcggcctaggcagtccaaacaggtcgtctccttctatcatttgtatgcctaagcagcagccctctaggcaaccattcacagtgaacagcatgtctggattcgggatgaaccggaatcaagctttcggcatgaataactcgttgtcaagtaatatttttaacggcacagatggatctgagaacgtaaccggactcgacctgagcgactttcctgcactcgcagaccgcaatcgtagggagggttcgggcaaccccacacctctgattaatcctttggccggaagagctccatacgtgggcatggtgacaaagccggctaacgaacagtctcaggacttcagcatccacaacgaggacttccccgcactgccagggagtagctataaagatcccactagctctaatgacgattctaaatccaacctcaacacttcaggcaaaaccacgtcctccacggatggtcccaagtttcctggcgacaagtcatctaccacgcagaacaataatcaacagaaaaaaggcattcaagtgctgcccgacgggcgagtcactaacattcctcaggggatggtcacagatcagtttgggatgatagggcttctcaccttcatacgcgcagccgagaccgatcccggaatggtgcaccttgcgttgggcagtgatctcaccaccctcgggctgaatttgaatagtccggagaacctgtatcccaagttcgcgagcccctgggcctcctctccatgtcggcctcaggatattgactttcatgtcccgtccgagtacttaacaaacatccatattcgcgacaagctagctgcaataaagcttggcagatacggagaagacctgctgttctatctctattacatgaatggcggagacgtcctccaactcctggcggctgttgagctgtttaatcgggattggaggtatcacaaggaagagagagtttggataactcgagcacccggaatggagccaactatgaagacgaacacctatgagcgcggaacttactatttcttcgattgcttaaactggcggaaagttgccaaagagtttcacctggagtacgataaattggaggagcgcccacacttaccgtccacgttcaactataaccctgctcagcaggctttttag

SEQ ID NO: 244140 - DNA, 3627 bp, synthetic construct
  misc_feature 1..3627: note = Description of Artificial Sequence: Synthetic coding sequence
  source 1..3627: mol_type = other DNA
atggatctgcacatgatgaattgcgagctgctcgccacctgctcagccctggggtatctcgagggcgacacatatcataaggagcctgactgtcttgagtcagtaaaagacctgatccggtacctgaggcacgaagatgaaacaagagacgtgagacagcaactgggtgccgcacaaattctgcagtccgacctactcccaatattaacacagcaccaccaggacaagcctctgtttgatgccgtgatccggcttatggtcaatttgacccaacccgcactgttgtgctttgggaatctaccgaaggaaccatcttttcgacaccacttcctgcaggtgctgacctacctccaggcgtacaaggaagcatttgctagtgaaaaggccttcggggttttatctgagacattatacgagttacttcagttaggttgggaggagaggcaagaggaggacaaccttctgattgaacgaattctgctacttgttcgtaatattctgcatgtgcccgctgatctggatcaggaaaaaaagatagatgacgacgcgagcgcccatgatcagctactctgggctatccacttgtccggtttggacgacctgctgttattcctagcatctagttccgcagaggaacagtggagcctacacgtgctcgagatcgtgagcctgatgtttagggatcaaaaccccgagcagttggccggagtcggtcagggcagactggctcaagaaagaagtgctgactttgcagaattggaggtactgcggcaaagggagatggccgagaagaaaaccagagccctgcagaggggaaaccgacactcccgctttggcggatcatatatcgtgcagggccttaaaagtattggcgaacgcgacctcatcttccataaaggtcttcacaaccttagaaactatagttccgatctcggcaagcagccgaaaaaggttcccaagagacggcaggccgctagggaactgtccatacaacgcagaagcgcgctgaacgttcgactgtttttacgggacttctgctccgagttcctagaaaactgttacaatagattgatggggagcgtcaaggatcatctactgcgggagaaggcccagcagcacgatgaaacttattacatgtgggctctggccttttttatggcgttcaaccgagccgcatcctttagaccgggactggtctccgagaccctctccgtaaggacattccatttcatagagcaaaatttaacgaattattatgagatgatgctcacagacaggaaagaggcggcaagctgggctcgacgcatgcacttggctttgaaagcctaccaggagctgttggcaaccgtcaatgagatggacatttcacccgatgaggctgtgagagagagtagtagaataataaagaacaacatcttctacgtgatggaatatcgagaactgttcctcgccttgtttaggaagtttgacgaaagatgtcagcctaggtccttcctgagggacctggtcgagactactcacctcttcctgaagatgcttgagcggttttgtcggtcccggggtaatctggtagtgcaaaataaacagaagaagagacggaaaaaaaaaaagaaggtgctggatcaggcaatcgtgtccggtaatgtcccatccagcccagaagaggttgaagcagtgtggccagcactcgctgagcaacttcagtgctgcgctcagaacagcgaactgagcatggattcagtggtcccgtttgacgccgcatctgaggttcccgtcgaagagcaacgggcagaggccatggtgcggatccaagactgcctcttggcaggccaagcaccccaggccttgacacttctgcgctcagctcgtgaggtttggccagagggagatgtttttggctcccaggatatttcccccgaagaggaaattcagctactgaagcaaattctttctgcccctctccccagacagcagggacccgaagagcgcggagccgaggaggaggaggaggaagaggaagaggaggaagaggaactacaggtcgtccaggttagcgaaaaggaatttaactttctcgactacttgaagcggtttgcctgcagtaccgtcgtgagagcttatgtgctgttactgcgctcttatcagcaaaatagcgcacacactaatcactgtatcgtaaagatgctgcacagactcgcacacgatctaaaaatggaggccttactgttccagctctctgtcttctgtctgtttaacagactcctgtcagacccagctgccggagcctacaaggaactggtgacatttgcaaaatatatcctcggaaaattttttgccctggcagccgtaaatcagaaagcctttgtggagctgctcttttggaaaaatacagctgtagtcagagagatgacagaagggtacggaagcctggatgacaggagctcaagccgtcgcgctcctacttggagtcctgaagaagaagctcatctgcgggagttgtatctggcaaataaagatgtggagggccaggatgtggtggaagcaattctcgcgcacttgaatactgtcccaagaacccggaagcagattatccaccaccttgtgcagatgggactagcagattccgtgaaggacttccaaagaaagggaacccacatcgtgctgtggaccggcgaccaagagttggagctgcaacgtctgttcgaggagtttagagattccgacgacgtgcttggccatatcatgaagaacatcaccgcaaaacgctcacgcgcacggatagtggacaaactcctcgccctgggtttagtggccgagaggagggaactgtacaagaagcgacagaaaaagctggcctcatccattttacctaacggcgcagagtcactgaaagatttctgccaggaggacctagaggaagaggagaatctgcctgaggaggacagcgaggaagaggaggaggggggaagcgaggcagaacaggtgcaaggttccctcgttctgagtaatgagaatttgggacagtctctgcatcaggaaggattctcaatcccattactttggctccaaaattgcttgatcagagcagctgatgacagggaagaagacggttgcagccaggcagttcccttagtacccctcacggaggagaatgaggaagcaatggaaaatgaacagttccagcaactcctgcggaagctgggggtacggcctcctgcctctggtcaagagactttctggcgcatacctgcgaagttatctcccacgcagctgagaagagccgctgcctcattgagccagcccgaggaagagcagaagctgcaaccggagctgcagcccaaggtacctggagagcaggggagtgatgaggagcattgcaaagagcacagggctcaagctttgagggccctattattggctcataaaaagaaggcaggcctggcttctccagaagaggaggatgcggtcggtaaggagccacttaaggcggctcctaagaagcggcagctgttggattctgatgaagaacaggaagaggacgaggggaggaatagagccccagagttaggagcaccaggtattcagaagaaaaaacgctatcagatagaagatgatgaggatgattag

SEQ ID NO: 244141 - DNA, 906 bp, synthetic construct
  misc_feature 1..906: note = Description of Artificial Sequence: Synthetic coding sequence
  source 1..906: mol_type = other DNA
atgctggaaccccaggagaatggcgttattgacctgcccgactatgagcatgttgaggacgagacatttcctccctttccccctcccgctagtccagagcgtcaagacggggaggggaccgaaccagatgaggaaagcgggaatggcgctcccgtgcgggtgccgcctaaacgcaccgtcaagcgaaatattcccaaactggatgctcaaagactgatctccgaaagaggactgcccgctctgagacatgtgtttgataaggcaaagttcaagggtaaagggcacgaggccgaggatctcaagatgttgatccggcacatggaacattgggcccacaggctcttccctaaacttcagttcgaggattttatcgaccgagtcgagtacctgggatccaaaaaggaggtccaaacgtgcttgaaaagaattagactagacctgcccatcttgcacgaagactttgtgtcgaataatgatgaggtagccgaaaataatgagcacgacgtgactagcaccgagttagacccattcctcactaatctcagcgagtccgagatgttcgcttcagaattgagccgttcccttaccgaggaacaacagcagaggattgagaggaataagcagctggccctggaacgacgccaagcaaagttgctgagcaattcacaaacacttggaaatgatatgctgatgaatactcctcgtgctcacaccgtggaggaggtcaacactgatgaagatcagaaggaagagagtaacgggctcaacgaagatatactggacaatccttgcaacgacgcaatcgctaatacgctgaatgaggaggaaactttgctggaccaatcattcaaaaatgtgcagcagcagctggatgctacatcccgaaacatcactgaggccagatag

SEQ ID NO: 244142 - DNA, 603 bp, synthetic construct
  misc_feature 1..603: note = Description of Artificial Sequence: Synthetic coding sequence
  source 1..603: mol_type = other DNA
atgctcattaggcatatggagcattgggcacaccgcctgttccccaagctacagttcgaggattttatcgacagggtcgagtatctgggctccaagaaggaagtgcagacgtgcctgaaaaggatccgcctggacttgcccatcctccatgaagattttgtgtctaacaacgatgaagtagcggagaataatgagcatgacgttacttctaccgaattagaccctttcctgactaacctgagtgagtcggaaatgttcgccagtgaactgtcccgaagcctgaccgaggagcaacagcagcgtatcgaacgcaacaaacagcttgccctggagcgcagacaggctaagcttttgtctaactcccagactctgggcaacgatatgctgatgaacactcctcgggctcacacagtggaggaagtgaatactgatgaggaccagaaggaggaatctaacgggttgaacgaggacatactggataatccatgcaatgacgccattgctaacactctaaacgaagaagagacgctgcttgaccagagtttcaagaatgtgcagcagcagcttgacgccacttccaggaatatcacagaggcaagatag

SEQ ID NO: 244143 - DNA, 537 bp, synthetic construct
  misc_feature 1..537: note = Description of Artificial Sequence: Synthetic coding sequence
  source 1..537: mol_type = other DNA
atgatgatccacgggttccagagttctcatcgggacttctgctttggtccgtggaaacttactgccagtaaaacacatatcatgaaaagcgctgatgtcgaaaagctggcagacgagttgcatatgccatccttgcctgaaatgatgttcggagacaacgttttacgtattcagcacgggagtggttttggcatcgagtttaacgcaacggatgctcttaggtgtgtcaacaactatcagggaatgctgaaagttgcttgcgcagaggagtggcaagagagccggacagagggggaacactcgaaagaggtgattaagccttacgattggacctacactacagactataaaggcaccctcctcggggagtcactaaaactgaaagttgttcctacaacggaccacattgacaccgagaaactcaaagccagagaacagattaagttcttcgaagaggtgctgcttttcgaagatgagttgcatgaccacggtgttagctctctttctgtcaagatccctgggggaggccatctgtag

SEQ ID NO: 244144 - DNA, 819 bp, synthetic construct
  misc_feature 1..819: note = Description of Artificial Sequence: Synthetic coding sequence
  source 1..819: mol_type = other DNA
atgatgatccatggctttcagagttcccaccgcgatttttgcttcggcccatggaagctgacagcatcgaagacccacatcatgaaatctgctgacgtggagaagttagccgacgagctccacatgccatcactcccagaaatgatgttcggcgacaatgttctgagaatacaacatggctcgggcttcggaattgaatttaacgctactgatgctttgcgttgtgtgaataactaccaaggaatgctgaaggtggcgtgtgccgaggagtggcaggagagccggaccgagggggaacatagtaaggaggtgattaagccctatgattggacttacactactgactataaggggacattactgggggaatccctgaagttgaaggtcgtccctactacagatcacatcgataccgagaagctgaaagccagagaacagatcaagttctttgaggaggttctgctgtttgaagatgagctgcacgaccatggagtgagctctctttctgtgaagatcagggtgatgccttcctctttctttctgctgttacgattcttcctacgtatcgacggagttctgatacgcatgaacgatactaggctgtatcatgaagccgataagacctatatgctgcgcgagtacaccagtcgcgagagcaagatctcctcactcatgcacgtgcccccatccctgtttacggagccaaacgagatttctcaatacttgccaatcaaagaggccgtttgcgaaaaactgattttccctgagcggattgatcctaatccagccgactcccagaaaagtactcaggtggagtag

SEQ ID NO: 244145 - DNA, 1143 bp, synthetic construct
  misc_feature 1..1143: note = Description of Artificial Sequence: Synthetic coding sequence
  source 1..1143: mol_type = other DNA
atgacagaagaggttattgtgatcgccaagtgggattacactgctcagcaggaccaggagctggatatcaaaaaaaatgagcgcctgtggctgctggatgattccaagacctggtggcgcgtgcggaacgccgcaaatcgcaccgggtatgttccctccaactatgtcgagcgaaagaactctttaaagaaaggcagccttgtgaaaaatctcaaagacacattggggttgggtaagacgaggaggaagacgagcgccagggacgcctcccccaccccatcgactgatgcggagtaccctgctaatggatcaggcgcagatcgcatttacgaccttaacataccagcgttcgtcaaatttgcctacgtggctgaaagggaggacgagctgtccctggtaaaggggtctcgggtcaccgtcatggaaaaatgcagcgacgggtggtggagagggagctacaatgggcaaatcggctggtttccaagcaactacgttcttgaggaggtggatgaagccgcagccgaatccccgagtttcctgtccttaaggaaaggtgcctccctatctaatggacagggatcccgagtgcttcacgttgtgcagactctgtatcccttctcttcagtgactgaggaagagttaaactttgagaaaggggagaccatggaagtgatcgagaagccggaaaacgaccccgaatggtggaaatgcaagaacgcgagaggccaggttggactagtaccaaaaaactacgtggtggtgttgtctgatggccctgctttgcatcccgcacacgcaccgcagatcagttacacgggcccatcctcctccggacggtttgccggtcgggaatggtactatggcaatgtgaccaggcaccaggcagagtgcgctttaaacgagcggggagtggagggtgactttctgatcagagatagtgaatctagcccctccgatttttccgtgtccctcaaagcgtccggaaagaacaaacacttcaaggtgcagctcgtggacaacgtttactgcatcggacagagaaggttccatacaatggatgaattagtggagcactacaaaaaagcacccatcttcactagcgagcacggcgagaagctgtatttagtcagggctctccagtag

SEQ ID NO: 244146 - DNA, 756 bp, synthetic construct
  misc_feature 1..756: note = Description of Artificial Sequence: Synthetic coding sequence
  source 1..756: mol_type = other DNA
atgatctacacaatgaaaaaggtgcacgccctgtgggccagtgtgtgcctgctccttaacttggcgccagcccctcttaacgctgactcggaagaagacgaggaacacactatcatcaccgacaccgagctgcctcctctaaagctgatgcatagcttctgcgcctttaaggctgacgatggcccttgcaaagccataatgaagcgatttttttttaatatcttcactcggcaatgtgaagagtttatctacgggggatgtgaaggaaatcaaaaccgcttcgagtccctagaagagtgtaagaaaatgtgtacaagggacaacgcaaataggattatcaaaactacattacagcaggagaagccagatttttgtttcttggaagaagaccccggtatttgcagaggttacataacacggtatttctacaataaccagactaagcaatgtgaacgcttcaagtatgggggttgcctggggaatatgaacaattttgaaaccctcgaggagtgtaagaatatttgcgaagacggtccaaacggatttcaagtcgacaactacggcactcagctgaacgctgtgaataactcccttacaccccaatcaacgaaagtgccttctctgtttgtgacaaaggagggaaccaacgatggatggaaaaacgccgcacacatatatcaggttttcctgaatgcattttgtatccacgcctctatgttctttctagggttggactcaatcagctgtctctgttag

SEQ ID NO: 244147 - DNA, 915 bp, synthetic construct
  misc_feature 1..915: note = Description of Artificial Sequence: Synthetic coding sequence
  source 1..915: mol_type = other DNA
atgatttacactatgaagaaggtccacgcgctctgggccagcgtgtgcctgctgttgaatttggcccctgccccactcaacgcggattctgaggaagatgaagaacacacaattatcacagatactgagttgccgccacttaaacttatgcactccttctgtgccttcaaagccgatgacggcccttgcaaagccatcatgaaaagattcttctttaacattttcacccggcagtgcgaagaattcatttacgggggatgtgaaggcaatcagaatcggtttgaatctttggaagagtgtaagaagatgtgcaccagggataacgcgaatagaatcattaaaactacactccagcaggaaaagccagatttttgttttctcgaggaagacccaggaatatgccggggatacatcacacggtatttctataataaccagacaaaacagtgcgagcgctttaaatatggcggatgcttggggaacatgaataattttgaaactcttgaggaatgcaagaatatttgcgaggatggaccaaatggttttcaggtggacaattacggcactcagcttaacgccgtaaacaattcacttacaccacagtcaaccaaggtgccatccctctttgagtttcacgggccatcatggtgtcttactccagccgatcgcggactctgtcgggctaacgagaaccggttctattacaactccgtgatcgggaaatgcagaccctttaagtattctgggtgtggagggaatgagaataattttacctcaaaacaagagtgtctgcgagcgtgcaaaaaagggttcatccagcgcatctctaagggcggactcatcaaaaccaaacgtaaacgtaagaagcaaagagtgaagatcgcttatgaagagatattcgtcaagaatatgtag

SEQ ID NO: 244148 - DNA, 756 bp, synthetic construct
  misc_feature 1..756: note = Description of Artificial Sequence: Synthetic coding sequence
  source 1..756: mol_type = other DNA
atgatctacacaatgaagaaagtccatgcattgtgggcctcagtgtgtctgctccttaacctggcaccagcccctctaaatgcagacagtgaggaggacgaagaacacacaattattactgacaccgaattgccacctctgaagctgatgcacagcttttgtgcttttaaggctgacgatggaccatgcaaggcaattatgaaacgattcttttttaatatcttcaccaggcagtgtgaggagtttatctatggtggatgcgaggggaaccagaacaggttcgagagcctggaagagtgtaagaagatgtgcactagggataatgctaatcgcatcatcaagacaaccctgcagcaggagaagcctgacttctgtttccttgaagaggatcccggaatctgccgaggctacatcactagatacttctacaacaatcagacaaaacagtgcgagcggttcaagtatggcggttgcctcggaaatatgaataatttcgaaactttggaggagtgcaaaaacatatgtgaggacggaccgaatggattccaagtcgacaactatggcacccaactgaatgccgtgaataactccctgacaccacagagtactaaggtaccctctttgtttgtgaccaaagagggaacaaacgacggatggaaaaatgccgctcatatctaccaggttttcctgaatgcgttttgcattcacgcaagtatgttcttcctggggctggacagcatctcttgtctgtgctag

SEQ ID NO: 244149 - DNA, 231 bp, synthetic construct
  misc_feature 1..231: note = Description of Artificial Sequence: Synthetic coding sequence
  source 1..231: mol_type = other DNA
atgatctatactatgaaaaaggttcatgccctgtgggccagcgtgtgcctcttgctgaatctggcgcctgcaccactgaacgccgactccgaggaggatgaggagcatacgatcatcactgacacggagctcccgccattgaagctgatgcattcgttctgtgcttttaaggccgacgatggcccttgcaaggcaatcatgaaaagatttttcttcaatatcttcacatag

SEQ ID NO: 244150 - DNA, 186 bp, synthetic construct
  misc_feature 1..186: note = Description of Artificial Sequence: Synthetic coding sequence
  source 1..186: mol_type = other DNA
atgatttacactatgaagaaagtccatgccctctgggcatcggtgtgcctgctcttaaatctggcgcctgctcctctaaatgctgacagtgaagaagacgaggagcatacaatcattaccgataccgaactgccccctctgaagctaatgcattcattctgcgcgtttaaggctgatgatggctag

SEQ ID NO: 244151 - DNA, 321 bp, synthetic construct
  misc_feature 1..321: note = Description of Artificial Sequence: Synthetic coding sequence
  source 1..321: mol_type = other DNA
atgatctacactatgaaaaaggtccacgcattatgggcatccgtgtgtttactgctgaacctcgccccagcaccactcaatgccgacagcgaagaggacgaggaacataccataattaccgatacggagctccctcccttaaaactgatgcactccttctgtgccttcaaagctgacgatggaccatgcaaagccatcatgaagcgattcttttttaacatcttcacccgtcagtgtgaagaatttatctacgggggatgtgaaggtaaccagaaccgatttgaatctctcgaggagtgtaagaagatgtgtacacggtag

SEQ ID NO: 244152 - DNA, 867 bp, synthetic construct
  misc_feature 1..867: note = Description of Artificial Sequence: Synthetic coding sequence
  source 1..867: mol_type = other DNA
atgatatatacaatgaaaaaggtgcatgcattgtgggctagcgtctgcctgctattgaatttagcgcctgctccattaaatgcagatagcgaagaggacgaggaacacaccattatcacggacaccgaactcccacctcttaaacttatgcactccttttgtgctttcaaggcagacgatggaccctgcaaggccatcatgaagaggttctttttcaatatctttaccaggcagtgtgaggaatttatctacgggggttgtgagggcaatcagaacaggttcgagagcctcgaggagtgcaaaaaaatgtgcacccgtgacaatgcgaatcgtatcatcaagactacactgcagcaggagaagccagacttttgttttttagaggaggaccccggaatttgtcgcggttatattacccgttacttttacaacaatcaaacgaaacagtgcgaacgcttcaaatacggcggatgccttggtaacatgaataactttgagactctggaggagtgtaaaaacatctgtgaagacggcccaaacggtttccaagtggacaattacggaacacagctaaatgccgtcaacaattccttaacacctcagtcaaccaaggtgccttccctgttcgaatttcacggacctagctggtgtctcacacctgctgacagggggctctgtcgggcaaatgagaatcgcttttactataactcagttataggcaaatgcaggccttttaagtactctggctgtggaggaaacgaaaacaatttcactagtaagcaagaatgcctcagagcatgcaaaaaaggattcattcagcggatctctaaggggggtctaatcaaaacgaagcgcaagcgcaagtag

SEQ ID NO: 244153 - DNA, 321 bp, synthetic construct
  misc_feature 1..321: note = Description of Artificial Sequence: Synthetic coding sequence
  source 1..321: mol_type = other DNA
atgatctacacaatgaagaaggtgcacgctctctgggcatcagtgtgtttactactcaatctagcccctgccccactgaacgccgactcagaggaggacgaggaacataccatcataactgacactgaactgcccccactgaaactgatgcactcattttgcgctttcaaagcggacgacggcccatgtaaggctattatgaaaagattctttttcaacatcttcactcggcagtgtgaggaattcatttatggcggatgtgaaggaaaccagaacaggttcgaatctctagaggaatgtaaaaaaatgtgcactcggtag

SEQ ID NO: 244154 - DNA, 318 bp, synthetic construct
  misc_feature 1..318: note = Description of Artificial Sequence: Synthetic coding sequence
  source 1..318: mol_type = other DNA
atgatctacaccatgaagaaagtgcatgccctgtgggcttccgtatgtcttctcctgaacctggccccagcccctctcaatgctgactccgaggaggatgaggagcataccattattaccgatacggagctgccgccactgaagcttatgcatagcttctgtgcctttaaggcagatgatgggccttgcaaggcgatcatgaagagattctttttcaatatattcactcgacagtgtgaagagttcatttacgggggatgtgaagggaaccagaatcgatttgagtctctggaggagtgcaagaagatgtgcacctag

SEQ ID NO: 244155 - DNA, 966 bp, synthetic construct
  misc_feature 1..966: note = Description of Artificial Sequence: Synthetic coding sequence
  source 1..966: mol_type = other DNA
atgggtgagcctcagggctccatgaggatccttgtcacgggcggaagcggcctagtgggtaaggcgattcagaaggtggtcgccgacggcgctggactaccaggcgaggattgggtgttcgtgtcatcaaaagacgccgatctaacagataccgcacagactcgggctctctttgaaaaggtgcaacccacacacgtgatccatctggcagctatggtgggaggcctctttcgcaacatcaaatataatttagacttttggcgtaagaacgtgcatatgaacgacaacgtacttcattctgcttttgaggtgggggctagaaaagtggtttcttgtttgagcacgtgcatcttcccagacaaaaccacatatcctatcgacgagaccatgattcacaatgggccaccacacaattccaactttgggtacagctatgcgaagcgaatgatcgatgtgcaaaaccgcgcatatttccaacagtacggatgtaccttcactgccgtcattccaaccaacgtgtttgggccacacgataattttaatatcgaggatggccacgtgttacccggtctgatccacaaggtgcacctcgctaagagctctggaagtgcactgactgtctggggtaccggaaaccctcggcgacagttcatctattccctagacttggcccaactcttcatttgggtgctgagggagtacaacgaggtggaaccaatcattctgtcggtgggagaggaggacgaggtgtcaattaaggaagcagctgaggctgtggttgaagctatggattttcacggtgaggtcacttttgacactaccaagagtgatggccagtttaaaaaaactgcttccaacagcaagctcaggacgtaccttcccgactttagattcacacccttcaagcaggctgtcaaggagacatgtgcttggttcacggacaactatgaacaggcgagaaagtag

SEQ ID NO: 244156 - DNA, 360 bp, synthetic construct
  misc_feature 1..360: note = Description of Artificial Sequence: Synthetic coding sequence
  source 1..360: mol_type = other DNA
atgggcgagccacagggttctatgcgcatcctggttaccggtggatctgggctggtcgggaaagctatccagaaagtggtggccgacggggctgggcttcctggtgaggactgggtttttgttagctccaaagacgctgatttgacggatacagctcagacgcgggcactctttgaaaaagttcaacctacccacgtaattcatctcgccgctatggtcgggggactgttccgcaacattaaatacaacttggacttctggaggaaaaacgtacatatgaatgacaacgtcttgcacagtgcgtttgaggtgggcgcacgaaaggtggtttcctgcctgtcaacctgtatcttcccttag

SEQ ID NO: 244157 - DNA, 807 bp, synthetic construct
  misc_feature 1..807: note = Description of Artificial Sequence: Synthetic coding sequence
  source 1..807: mol_type = other DNA
atgggcgaaccccaggggtctatgagaatcctggttaccggaggttccggacttgtcggaaaggcaattcagaaagtagtggccgatggggctggtctccccggagaggattgggtttttgtgtcttccaaggatgctgacctgactgacaccgcccaaactcgtgccttgtttgaaaaggtacaacctacccacgttatccatttggcggcaatggtaggtggcctgttcaggaatattaagtacaacctggacttttggcggaaaaacgtgcacatgaacgataatgtgctgcactctgccttcgaggtgggggctaggaaagttgttagttgcctgtcgacttgcatcttcccagacaagaccacataccctatcgacgagaccatgatccataatggcccacctcataatagcaattttggatatagctatgctaaaaggatgatcgatgtgcagaacagggcttatttccagcagtacggctgcacgtttacagcagtcatcccgaccaatgttttcggaccccacgataactttaacatcgaagacgggcatgtactccccggtctaattcacaaagtgcacctggcaaaatctagtggcagtgccctgacagtctggggtacaggcaatcccagacgacaattcatctattctctagacttggcccagctgtttatatgggttctgcgcgaatataatgaggtggagcctatcattctgagcgttggcgaggaggatgaagtctctattaaagaggcagcagaagcggtggttgaggcaatggattttcacggagaatag

SEQ ID NO: 244158 - DNA, 966 bp, synthetic construct
  misc_feature 1..966: note = Description of Artificial Sequence: Synthetic coding sequence
  source 1..966: mol_type = other DNA
atgggggagccccaagggtcaatgcgtatcctggttacgggcggatccggcctcgtcggtaaggctatacagaaggtggtggcagacggtgctggtctccctggggaagattgggtgttcgttagctcaaaggacgcagacctgactgatacagcacagacacgcgctctgttcgaaaaagtgcagccaacgcacgtcatccatttggccgcaatggtcggtggactcttccgcaatattaaatataacttagacttctggcgaaagaacgtccacatgaatgacaatgtactccattccgcatttgaggtaggagctcggaaggtggtcagttgtttgagtacctgcatatttcccgataaaactacctaccccatcgacgaaacaatgatccataatggcccaccccataattctaacttcggatattcatatgccaagagaatgattgatgtgcagaatcgagcctacttccagcagtatggctgcacattcactgcagtgatccccaccaatgttttcgggcctcacgacaacttcaatatagaagacggccacgtgctgcccggactgatccacaaggtgcatttagcaaagtctagtggttctgctctcacggtttggggtactggtaatccacggaggcagtttatatactccttggacctcgcccagctattcatctgggttctccgcgagtacaatgaggtagaacctatcatcctcagcgtcggcgaagaagatgaggtgtctataaaagaagctgcagaggcggtggtcgaggccatggatttccacggcgaagtgaccttcgacacaaccaaatcagacggccagtttaaaaagactgctagtaatagcaagttacggacttacctgcctgatttcagattcaccccatttaaacaggctgtgaaagagacatgcgcatggttcactgacaattacgagcaagccagaaaatag

SEQ ID NO: 244159 - DNA, 597 bp, synthetic construct
  misc_feature 1..597: note = Description of Artificial Sequence: Synthetic coding sequence
  source 1..597: mol_type = other DNA
atgggcgagccccagggcagtatgaggatcctagtgaccggcggatccggactcgtaggcaaagctatccagaaggtggtcgctgacggcgcaggcctgccgggagaagattgggtgtttgtgtcatcaaaggacgcagatctgacagatacggcccagacaagagctctgttcgaaaaagtacagccaacccatgtgatccacctcgcagccatggttgggggactattcagaaatatcaagtacaacctggatttttggcgcaaaaatgtacacatgaacgataacgtgctgcattccgcattcgaagtaggggcacggaaggtggtgtcatgtctgagcacatgcatcttccccgacaaaacaacataccccatagatgagaccatgattcacaatgggcctccgcataactcaaactttggctactcttacgcaaagcggatgattgatgtccagaaccgcgcttacttccagcagtacgggtgtacatttaccgcagttatacccacaaacgttttcggaccccatgataattttaatatcgaagacgggcacgtgttgcccggtctcatccataaggtccacctcgcctag

SEQ ID NO: 244160 - DNA, 2658 bp, synthetic construct
  misc_feature 1..2658: note = Description of Artificial Sequence: Synthetic coding sequence
  source 1..2658: mol_type = other DNA
atggtggaaaaaagttccattgatgaaaattctatttctctggagaaggaagtacgacacgtccaagaacagaatttggatattctaaagactgatctgagcttgaaaagcttttctgaggagatctactctgagtcctgtgccttgcttcctacttcgtctgccgacattgaggagactgatctttccgaaaagtcttgccctctcgagaacgggggacgcagctccatcagccacctaaaaaaggcagcctccgaagaaaagccactcggcgtcggtgaaatggaggaagaatgtactcttgaaccagagctggcagcgtttccaaaacaggatggtggaacccaggagtacacagatgcaacactggaggaccacagaggcgacgtgcaggaagctgataccctccatcggcagctgtcactgtctcaatgctttcctttactgatgacagaggagcaacaaaaccccggagagcagatcagtacaaatatccacgcctccggcgaagaaaaatgctacgaggaagttcaggtacagaacgaggcctcctttagcaccctcgagggagagatgattgagacctcttttagtcagaatatcccaaagctcgatgaggcgcacaccacagaggcagccgagagcgagacttctctaacccaatatctgctagcggcagggaagcgtgaggttcccgagaccaaagacacgcgagaccaggctaaattggtgcagtcagaatctattacctccatggaggtcgaggaggtaacctttaacacggtctatgagtactataatcagaagcaagagagcctcgggagacccctctctccggaatctgacatctccataggcgtcggctccactacatcggaggagattagcgagctggatcagttttatacgccaccctcctctgtagagtacttcgaatccccaaaaagccctgatctgtacttcaatccaagcgatataacgaaacagtccagcatccacagcggaggcgaaacagttgaacgttacagtacacccctcggggaagtggccgagagatattctacaccaagtgagggagaggtgggagaaagatacagcacccctcccggtgaaacacttgagaggtactcaacccctcctggtgagaccctggagaggtattctactcctccaggtgaagcgcttgaacgatattccattcctacggggggtcctaaccccaccggaacgtttaagacttacccctctaaaatcgagcgggaggacggcacccctaacgaacacttctatactcccactgaagagcggggtagcgcttacgaaatatggagatccgatagctttgggacacctaatgaagctattgaaccaaaggacaacgaaatgcccccatccttcattgaacccttgaccaagcggaaggtgtacgaaaacaccacactgggattcatcgtggaagtcgaagggctcccagtgcccggtgtcaagtggtacaggaataagagcctcttggaacctgacgaaaggattaagatggaacgtgtgggtaacgtctgcagtctggaaatttctaatatccaaaagggggaggggggagagtatatgtgtcatgctgttaatataatcggtgaggccaaaagtttcgcaaacgtcgatatcatgccgcaggaggaacgggtggtagcgctacctcccccagtcacccaccagcatgtaatggagttcgatctcgaacacactacttcctctaggactccaagccctcaggagatcgtgctcgaggtggagctgtcagagaaggacgtaaaggaattcgagaagcaggtcaagattgtgacagtgcctgaatttactcccgatcataaaagcatgatcgttagtctcgatgtgctaccctttaattttgtggaccctaatatggattctcgtgagggtgaagacaaagagcttaagattgacttggaagtgttcgagatgccccctcgcttcataatgcccatttgcgatttcaagatccctgagaactctgatgccgtttttaagtgcagcgtgatcgggattcccacgcctgaggttaaatggtacaaggagtatatgtgcatcgaaccagataatataaagtacgttattagcgaggagaaaggatcccatactctcaaaattagaaacgtctgtttgtcagacagtgctacttaccgctgcagagcagtgaactgtgttggcgaagcaatttgtagaggatttctaaccatgggggattctgaaatatttgcggtgattgccaaaaaatccaaagtgaccctctccagcctgatggaagagttagtcctaaaaagcaattacaccgattcttttttcgagttccaggttgtggagggccctcctaggttcattaaaggaatttcggactgctacgcaccaataggaaccgcagcctattttcagtgcctcgtcaggggtagccctaggccaaccgtgtattggtataaggatggaaaactagtgcagggcaggaggtttaccgttgaggaaagcggtacaggcttccataacctctttatcactagtcttgttaaatctgacgagggagagtatcgctgcgttgccacaaacaagagtggaatggcagaatcgtttgcagcgctcaccctcacatag

SEQ ID NO: 244161 - DNA, 16815 bp, synthetic construct
  misc_feature 1..16815: note = Description of Artificial Sequence: Synthetic coding sequence
  source 1..16815: mol_type = other DNA
atgaccacacaggcacctactttcactcaacccttacaaagcgtagtagtgttggagggatctactgccacattcgaggctcatattagcgggtttcctgtgcctgaggtgagctggttccgggacggtcaggtgatctcaacttctaccctgcctggagtccagataagtttttctgacggacgcgctaagctcactatacccgcagtgaccaaagccaattccggtcgctactccctgaaggctaccaatggcagtggtcaggcaacttctactgctgagctcctggtgaaggccgagaccgcacctccgaatttcgttcaacgcctgcagagtatgaccgttaggcaagggagccaggttcggctacaggtgcgggtaaccgggattccaacgcccgtagtgaaattttatcgggacggagctgaaattcaatcaagcctggactttcagatcagccaagagggagacctctatagtttgctgatagcggaagcctaccccgaagattctggaacgtactcagtgaacgccaccaatagtgtgggccgagccaccagtactgccgaactcctggttcaaggcgaggaggaagtgcccgctaaaaagactaagaccattgtgtccactgcacagatttcggagagtcgccagacaaggatcgagaagaagatcgaggcacattttgacgctaggtccatcgccacggttgagatggtcatcgatggcgcagccggacagcaactcccgcacaaaacacccccacgcatccccccaaaaccaaagtcccgctcccctaccccgcctagcattgccgctaaagcgcagttagctcggcagcagtcaccatcaccaatccgccactctccaagccctgttaggcacgtacgggcacctaccccgtcaccagtacgttcagtgtcgccagcagcacgaatctccacttctcctatccggagcgtgcgtagccccctactcatgcggaaaactcaggcctccacagtggccaccggccctgaagtgcccccaccctggaagcaggaaggctacgtggcaagctcctccgaagccgaaatgagagagactaccttgacaacctccacccagatccgcactgaagagcggtgggaaggcaggtacggcgtgcaggaacaggtgacaatcagtggtgcagccggagccgctgcttccgtttcagccagtgcctcttatgctgccgaagctgtggctactggagcaaaggaagttaaacaggacgccgacaaatccgcggctgtggctactgtggttgccgctgtcgacatggccagggtgcgggaaccagtgattagtgctgttgagcaaacggctcaacgcaccacaaccacggctgtccacatccagccagcgcaggagcaggtaagaaaagaagccgagaaaactgcggtcacaaaggtcgtcgtggctgcagacaaggctaaggaacaggaactaaagagcagaaccaaggaggtgattacaaccaagcaagaacagatgcacgtgacccacgagcagatacgaaaggagaccgaaaagacattcgtgccaaaggtcgtgatcagtgcagcaaaggctaaggagcaggagacgagaatctccgaggagatcaccaagaagcagaagcaagtcacccaggaggccattcgacaggagacagagattactgctgctagcatggttgtggtggcaacagcaaagtctacaaagctggagaccgtgccgggtgctcaggaggagaccaccacccagcaagatcaaatgcatctaagttatgaaaagattatgaaagaaacaaggaagacagtggtgccgaaagtcatcgttgctacccctaaagtcaaagagcaggacttggtgagcagagggagagaagggatcaccacaaagcgagaacaggtacagattactcaggagaagatgaggaaggaggccgagaaaactgctctttccacaatcgccgtggcgacagccaaggccaaggaacaagaaacaatcctgaggacccgcgaaaccatggccaccagacaggaacagatccaagtgacccatggtaaagtagacgtaggtaaaaaagctgaggccgtagccaccgtggtcgccgcagtcgatcaggccagggtgagggagcccagagagccaggacacctggaggagtcatacgcacagcagacaacgctggaatacggctacaaagagaggatatctgccgctaaggtggctgaacccccacagcgccctgctagcgagcctcacgtggtccccaaggctgtaaaacctagggtgatccaggcgccatctgaaacccatatcaaaacgacagatcagaaaggaatgcacatcagctcccagattaaaaagaccacggacctcactacagaacgcttggtccacgtggataaaagacccaggaccgcgtctccccattttactgttagcaagattagcgtgcccaaaaccgagcacggatacgaggcgagcattgcgggatccgctatcgctaccctgcaaaaggagcttagtgcaacgtcttccgcccagaagattacaaagagtgtcaaggccccaaccgtcaagccctcagagacacgagtccgcgcagagcctacgcccctccctcagttcccattcgccgatacaccagacacgtacaaaagcgaggccggtgttgaagtgaaaaaggaggtgggagtgtccattactggtacaaccgttcgcgaggagcgttttgaggtgctgcatggccgagaagccaaagtaacggagacggctagagtgccagctccagttgaaattcccgtcactccgccaaccctggtgagcggacttaagaacgtgacggtgatcgagggcgagtcagtgacgctggaatgccacattagcggttacccctctccgaccgtcacgtggtatagggaagattaccaaatcgagagttcaatcgatttccagatcacatttcagtccggcatcgccagactcatgattagagaagctttcgccgaggacagcgggagattcacctgtagtgctgttaacgaagcaggtacagtttctacctcgtgctacctggcggtgcaggtaagcgaggagtttgagaaagaaaccactgctgtgaccgagaagttcacaaccgaggagaagcgcttcgtcgaatcccgagatgtagtgatgacagatacatctttgaccgaagagcaagccggaccaggcgagcctgccgcaccctatttcatcaccaagcctgttgtgcaaaagctcgtggaagggggaagtgtcgttttcggctgccaggttggcggaaatccaaagccccacgtctactggaaaaaatccggagtaccactgaccactgggtaccgatacaaagtgtcctacaataagcagacaggcgaatgcaagctggttattagcatgaccttcgccgacgacgccggagaatatacaattgtggtccgtaacaagcacggggagacttctgcaagcgccagcctgttagaagaggccgactacgaactcttgatgaagtctcagcaggagatgctctaccaaactcaggtcactgcattcgtccaggaaccgaaggtgggagagactgctcctggatttgtatatagcgagtacgagaaggaatatgaaaaggaacaggccttgattcggaaaaagatggctaaggacacggtggtggttagaacctacgtggaggatcaagagtttcacatctcctcattcgaagaacgtctaatcaaggagattgaatacagaattatcaagaccaccctcgaagaactcctggaagaggacggagaggaaaagatggccgtggacatttccgagtcggaagcagtagaatcagggttcgacagccgaattaagaactaccgaattctcgaaggaatgggggtaacttttcactgcaaaatgagcgggtacccactcccaaaaattgcttggtacaaggatggcaagcggattaagcacggcgagcgataccagatggattttctccaggacgggagagcaagtcttagaattccggtcgtgctgcctgaggacgaaggcatctacacagccttcgccagcaacatcaaaggtaacgccatctgctccggaaagctttatgtggagccagctgctccacttggtgccccaacgtacattccaacacttgaacccgtcagtcggatccgtagcttgagtcccaggtccgtttcgcggtcacctatacgcatgtcgccagctagaatgagtccagcacgcatgagtcctgccaggatgtcccctgccagaatgtcaccaggtcgacgtttagaagagactgatgaatcacagctagaaaggttgtataagcctgtcttcgtcctgaagccagtctcctttaagtgcctggaagggcagacagccaggtttgaccttaaagtagtcggaagacctatgcctgaaacattttggtttcatgatggacaacagatagtgaacgattatacacataaggtcgtgataaaggaggacggtactcagagtctgatcatcgtccccgcaacccctagcgacagtggcgaatggacagtggtggcgcagaaccgcgcaggacggtctagtatttctgtgatcctaacagttgaagccgtcgaacatcaagttaaacctatgttcgttgagaaactgaagaacgtgaacatcaaggagggttcgcgattagagatgaaggtacgcgctacagggaaccctaaccctgacattgtctggttgaaaaactccgacataatcgtgcctcacaaatacccaaagatcagaatcgaaggcacaaagggcgaagcagctctcaaaatcgactcaactgtgtcccaggactctgcctggtataccgctactgcaatcaacaaagcgggacgggacacaactaggtgtaaggtcaatgtggaagtggagttcgccgaaccagaacccgagcgcaaactcatcattcccagaggaacttaccgggcaaaggagatcgccgctccggagctcgagccgctgcatctaagatatgggcaagaacaatgggaagaaggggacttgtacgataaggagaaacagcaaaagcccttttttaaaaaaaagctgacctctcttaggctgaagcggtttggccctgctcactttgagtgtcgattaactcccatcggtgatcctacaatggtcgtcgagtggctacacgacggcaaacccctggaggccgcaaaccggctgagaatgatcaatgaattcggttattgctcgctcgattacggggtggcctattccagagattcaggaataatcacatgccgggcaaccaataaatacggcacggatcatacctcagccacactgatcgtgaaagacgagaagagcctggtggaggaaagccaactcccagaaggccgaaaaggtctgcagcgaatagaggagcttgaaaggatggcacatgaaggcgctcttaccggagttacgactgaccagaaggagaagcagaaaccggatatcgttctgtaccctgagccagtccgcgtactcgagggcgaaaccgcccgattccgatgtcgggttacaggttacccacagcctaaggtaaactggtacctcaatggtcagctaatcagaaaaagcaagcgcttccgagtccggtatgatggcatccactaccttgacatagtcgattgcaaatcgtacgatacaggtgaagtcaaggtcactgcggagaaccctgagggcgtgatcgaacataaagttaagcttgagatacagcagagagaagatttccggtctgtgctgaggagagctcctgagccacgccctgaatttcacgttcacgagccaggtaaactgcaatttgaggtgcagaaggtggatcgcccagtggacaccacagaaaccaaagaagtcgtgaagctgaagcgcgctgagaggatcactcacgaaaaagtgcccgaagaatctgaggaactaagaagcaagttcaagcgcagaacagaggagggctattatgaagctatcacggctgtggaactgaagtctcggaagaaagacgagagttacgaagaactccttcgtaaaaccaaagatgagttgctccactggactaaggagttaaccgaggaggagaagaaggcccttgctgaggaaggcaagattacaatcccaaccttcaaaccggataaaatcgaattgtccccctctatggaagccccaaagatcttcgaaagaatacagagccagactgtcgggcaggggagcgacgcgcacttccgcgttagagtggtaggaaaacctgatcccgagtgtgaatggtataagaacggagtgaagattgaaaggtctgaccgcatctattggtactggcctgaggataacgtttgcgagctggtgatacgcgacgttactgccgaggacagcgcgagtatcatggtcaaagccatcaacatagctggtgaaaccagctctcatgcttttttgctcgtccaggccaaacagcttattactttcacgcaagaactccaggacgttgtggctaaggagaaggacaccatggccaccttcgagtgtgagacatccgaaccttttgtcaaagtgaagtggtacaaggacggaatggaggtgcacgaaggtgataagtatcggatgcatagtgacaggaaagtgcacttcctgtccatccttactattgatactagcgacgccgaagattattcttgtgtactggttgaggacgaaaatgttaaaaccacagccaaactgatcgttgagggcgctgtggtggagttcgtgaaagagctgcaggacatcgaggttccggaaagctactctggtgagctggagtgcattgtgtcccccgagaacattgagggcaagtggtatcataacgatgttgagcttaagagtaatggaaagtacacgatcacgtcaaggagaggaagacagaacctgactgtgaaagatgtcaccaaagaagatcagggcgagtatagctttgtgattgacggaaaaaaaactacctgtaaattaaagatgaagcctagacctatagccatcttgcagggcctgagcgatcaaaaggtatgtgaaggcgatattgtccaacttgaggtgaaagtgagtttagaatcagtagaaggggtctggatgaaagacggacaggaggtgcagccatctgatcgggtgcatattgtcatcgacaaacagagccacatgcttctgattgaggacatgaccaaagaagacgctggcaattactcttttactattcccgcattgggtcttagtaccagcggcagagtttcagtttactccgtggacgtgattacccctcttaaggacgtgaatgttattgaaggaacaaaagcggtgctcgaatgtaaagtttcagtccccgatgtgaccagtgtgaaatggtacctaaacgacgaacaaatcaagcctgatgatcgggtccaagctattgtgaaagggacaaagcaacgtctggtgatcaacaggacccacgcttctgacgaaggtccatacaaactcatcgtcgggcgtgtggaaaccaattgcaatttaagtgtcgagaagattaaaattatacgcggtctgcgcgatttaacttgcaccgaaacccagaacgtcgtctttgaggtggagctctcccacagtggcatcgacgtgttgtggaactttaaggacaaggaaattaagccttccagcaagtacaagatcgaggctcatggcaaaatctataaactcacagttctgaatatgatgaaagacgatgagggaaaatacacattctacgccggtgaaaatatgacaagtggcaagttaactgtggccggtggggcaatatcgaagccgctgaccgaccagactgtggccgagagccaggaagccgtatttgaatgtgaagtggctaacccagattctaagggagaatggctgagggatggtaaacacctcccactaacgaacaacatacgctccgagtccgatggccataagcgcaggctgattatagccgctaccaaattggacgacatcggtgaatacacttacaaggttgccacctcaaaaacatctgcaaaattaaaagtggaggctgtcaaaatcaagaaaacactgaagaacctgacggtgacagagacccaagacgccgtctttaccgtggaactgacgcatcctaacgtaaaaggggtccaatggatcaagaacggagtggtgctcgaaagcaatgagaagtacgccatcagtgtgaagggaactatctacagtctccgtataaaaaattgtgcaatagtggatgaaagcgtttatggcttcagattgggcagattaggtgcatcagccaggctgcacgtggagactgtgaagattataaagaagcctaaagacgtcaccgctcttgaaaacgccactgtcgctttcgaggtgagcgtatctcacgacaccgtccccgtcaagtggttccataagagcgttgagatcaagcctagcgacaaacatcgactcgtgtcagagcgcaaagtccacaagctcatgctccagaacatttcaccatcagatgcaggggagtacacggctgtagttggtcagctcgagtgtaaagccaagctcttcgtggagactttacatatcaccaagactatgaaaaacatcgaggtacctgaaaccaaaactgcgtcctttgagtgcgaggtctcgcattttaatgtgccttccatgtggttgaaaaatggggtcgaaattgagatgagcgagaagtttaagatcgtggtgcagggaaaactccaccagctcattattatgaataccagcaccgaagactccgcggaatatacctttgtgtgtgggaatgaccaagtgtctgcaactcttacagttacgcctataatgataacaagcatgttgaaagatatcaacgcagaggagaaagatacaattactttcgaagtcaccgtgaattatgagggcattagctataagtggctcaagaatggcgtggagattaaatctactgataaatgccagatgagaacaaagaaactgacccatagtttaaacatcaggaatgtccacttcggagatgctgccgactacacattcgtggccggtaaagccacaagtaccgctacgttgtatgtcgaggccaggcacatcgaatttcggaaacatataaaggacataaaagtcctggagaagaaacgcgctatgtttgaatgcgaagtctcagaacccgatatcacggttcaatggatgaaggacgaccaggagctacaaatcaccgatcgcatcaagatacaaaaggagaaatacgtgcaccgactgctcatcccttctactaggatgtctgatgcaggaaagtacactgtagtcgccggtggcaacgtatccactgcgaaactgttcgttgagggcagggatgtgaggattagaagcattaagaaggaagtccaggttatcgaaaagcaaagagctgtagtggagtttgaagtcaatgaagacgacgttgatgcacactggtataaagatggcatcgagattaacttccaggtccaggagcgccacaaatatgtggtggaacgaagaattcacagaatgttcatctcagaaacacgccagtcagatgctggcgagtatacgtttgtggctgggagaaatcggagttccgttactctgtacgttaatgctcctgagcctcctcaggtgctgcaggagctgcagcccgtaacagtccagagcggcaaaccagctagattttgtgcggttatttccggtaggccgcaaccaaaaataagctggtacaaggaggagcagttgttgtctaccgggttcaaatgcaagtttttgcatgatggacaggaatacacattactgctgatcgaggcgttccctgaggacgccgctgtgtatacttgtgaagccaagaatgattacggagtcgcaaccacaagtgcctcgctgagcgtggaagtccccgaggtggtctcccctgaccaggaaatgccagtgtaccctccagcaattatcacacctctgcaagatacagtcacttctgaaggtcaaccagcacggtttcagtgtagagtaagcgggactgacctgaaggtttcttggtactcaaaagataaaaagatcaaaccttctcgattttttagaatgacccaatttgaggatacctatcagctagaaattgccgaggcctatcccgaagatgaaggaacgtacacattcgtggccagcaacgcggtaggtcaggtgagttcaaccgctaacctgagcctcgaggcccctgaatcaatcctccacgaaaggatcgaacaggaaatcgagatggaaatgaaggagttattcagcgagggcgaaagcgaacacagcgagagagatacgcgggacgcatttagcgatagtgaagacatcgaccacaagagcatggcagctaagcgctacgcctcacgaatcagcagcacctcctcgtggcctgaatactttaagccctcttttacgcagaaactcacattcaagtacgtcctggagggtgaacccgtcgtcttcacatgccgattaattgcctgtccaacaccagagatgacttggttccacaacaaccgtcccatcccgaccggcttgcgcaggataataaaagctgaaagtgatctgcaccaccatagcagctctctggaaatcaagcgggtccaggacagggattctgggagctacaggctcctggcaatcaactctgaaggcagcgcagaaagcacagccagtctgttggtcattcagaaaggtcaggacgagaaatacctggaatttctgaagagagccgagagaacccacgagaatgttgaagccctcgtggagcggggtgaggatcggatcaaagtagacttgagattcacaggctcccctttcaacaagaaacaagatgttgagcagaagggtatgatgcgcaccattcacttcaagacaatgagctctgccaaaaagactgactatatgtatgacgaagagtacctggagagcaagtccgacatccgcggatggttaaacgtgggggagagtttcttagacaaggaaaccaaggtgaagttgcagaggctcagggaggcacgcaagaccttgatggagaagaaaaaactgtcgcttctggatacttcttctgaaatcagtagtcggacacttagatccgaagcctcagacaaggatattctgttcagccgagaagacatgaagatccggtccatgagcgatctggcagaatcctataaggtagaccactcagcagaaagcatagtccagaaccctcatgccttgtcgaaccagatggatcaaaatatagaatccgaggagctgcccaccagcttccaaacaatcgtggatgaagaaatcttccagacagagatccgaatgtcacaggaggctctagttaaggagtccctacccaaagaccacctctatggagaaatactggtgaacgaaaatactcaggctcggggtcaactcgaagagatcatggcaaatactacaattggcgagtcatctacctacataacaaatgtttgcgaaaaagaggaggtttacgaaacacccgagaatgtgagccaagcaattactccacatgcaagcgagagcttcggaaccctggtcaacgtggaggagtccgaagaaattgcttcagaaagaattaagaaagatgatttgagggaacttcagctctcagcgagcacacgtatcgacgaatttaaaacagagcaaaaggaagagaatatgcggttctttgaaaactccttccgaaagaggcctcagagatgcccaccgagtttcttgcaggagattgagtcgcaagaagtttacgaaggggactcctgtaacttcgtctgtcactttcagggttacccgcaaccgatagttacatggtataacaacgatatgccaattcctcgaaatcagaacttcattatccactctctcgagaactactccattctgactctgtcctctgtgcatcaccagaatgaaggttcaataacatgtgtgcttttcaatcagtatggaacggtgaagacaacctcaatgcttaaggtcaaggccaagcaaaagcatgacgtgaaggcccataaagtgccagtcttccacgactacctggatgaggaagaggagctggccctggtcttcgaccaggcaaagggtgcccacccctccatgtcccaggaggggcagacaaaccttcaccttcttaaaacaaaccccccagtaccacccagcggggataccgaactcctgagcttccccgttgaaattcaggttactgctgctaccccgatccctgaacaggacaaagagtcgaaagaggtttttcagaccgaggagctggagcctaaagctatgccccaggaccaggtcacccaaagccctaagcataggttcgttttcctgtctgacatcacaaacgaaccacctaagatgctgcaggagatgccgaagcatgccaggtgccgcgagggcgactctatcatcctcgagtgtttaatttccggagagcctcaaccagtggtaacctggttccaaaacggcgtgctgctgaagcaaaatcagaagttccagtttgaggaagttaactgttcacatcagctgtatatcaaggacgtaaacagtcaggactcaggaaaatacaaatgcgtggctgagaataattccggggcagtggagagtgtgtccgacctcacagtggaaccagttacttaccgagaaaattctcagtttgaaaacatcggggagatctatggaaagtattctcgagaccagcaattgcaggaccaaggcgagtcagtgcgagctcacttttacgactatcccgcaggccctttcacgccctggacgaacgttaaggaatattccgttcgggattattttcagtcactcgagaccatagaacagatcgatcagaaagagcaggtacgatgtattcctagtcgtgagaagattccgaggttcgtacatggggcaagccggaccattaagatctcaaaacctattcgcgcagagttcattcagtgccaagctgagggcaaggagcggcatgtctccgagaagtcgaagcttcaccaagccgaggggacagtgtatcctttcgtcgacgatttttctgacgtcacgatcaagaaggagatcagaaataatttcggcaaactgggacggagcgaaaaggagaatgttcaggagtgtgctcagagtgattatctcccaaatattcactccgagcggatcagcgacagctataatacaaaagactcctctgcgatcgtgtacgaggagtctctcggggaagaaatccattaccccggtaaaaaagtgaagcatcgcattatcgagtttgaaaaacttcatgtggaaaaaggggtgctggaaaagcggccaacaagaactagcatcgtaaatccccctcagaagaagatcgacgacaaggcattttcccttaaacagagagagtctcgctcttccaatctgaacgcaaacatgtatcaagccgagaaaatgagccctaacacagaaagtgatagctccaatattgccattaacctgaaattgctgtcttctcaaacacacaaggaatttgacgcccaggagcgcgaacaacaggaaaaaatctctctcatcgataagcccgctatttctaagagggctgagcacgaaagccccatcaccttcgacctgaagcagtttcatactcagattaaacatacagatgtcaaattccaagagctagattctgggcaacccgaagaagcttatttcaaaatacagcaccccgctgacacagagaacatcgtgttcgatttgaagcaaatgtacagccacatcggggacccagcactggaatttcagggtcaggagaccagggagcaacaggaaatccattacaaagagaaaatccccagccctgaaactctgcagcctgatactcacaacatctctaaatcggtccagaataatgtgttcgcgtctcaggaaatctcttcttcccaagaactatccaatagaacaatggtggaaaagtcatctatcgatgaaaattccatctctcttgagaaggaggttcgccacgtccaggaacagaaccttgacattctgaagactgatctgtctttgaagagtttcagcgaggagatctacagcgagagctgtgcgttgctgcctacttcctcagccgatatagaagagaccgacttgtcggagaaaagctgtccactagaaaatgggggacgttctagcataagccatctcaaaaaggccgcaagcgaagagaagcctctgggagttggagaaatggaggaagaatgcaccttagaacccgaactagcagcttttccaaagcaggatgggggaacgcaggaatacaccgatgcaacattagaggaccataggggggacgtgcaggaggccgacacactgcaccggcagctgtccctttcccagtgcttcccactgctgatgaccgaagagcagcagaatcccggtgagcagattagcactaacatccatgctagtggcgaggaaaagtgttacgaggaggttcaagtccagaatgaggcctcattttctaccttagagggtgaaatgattgaaacctcctttagccagaacatccctaagttggatgaggctcatacgaccgaggctgccgaatccgagacctcactgacacaataccttctcgctgctgggaagagagaggtgccagaaaccaaagatacacgggaccaggcgaaactcgtccagagcgaatccatcactagcatggaagtggaggaggtcactttcaacacagtttatgagtactacaaccagaagcaggaatcgctggggagacctctgtccccagaaagcgacatttcgataggtgtgggctcaacaaccagtgaagagatttctgagctggatcaattttatacccctcccagcagtgtggaatattttgagtcgccaaagtcaccagatctctatttcaatccctcagacatcaccaagcagtctagcatccacagcggtggagaaacggtggagcgatattccacacctctgggtgaggtcgctgaacgatattctaccccgtcagagggagaggtgggtgagagatattctacgcctccgggagagactcttgaacgctattcaactccacccggtgaaacactggagaggtacagtactccacctggggagaccctggaaaggtattccactcccccaggcgaaaccctggaacgctactctacacctcctggcgaaacactggagcgatactctacaccacccggagaggccctcgaacggtactccatcccaactgggggtcctaatccaactggtaccttcaaaacgtatccttccaaaatcgagagagaagatggcactcctaatgagcatttctacacccccactgaggagaggggctccgcatacgaaatatggcgtagcgattcttttggaacacccaacgaagctattgagcctaaggacaatgaaatgccaccttcttttatcgagcccctcactaaaaggaaagtttacgaaaataccacgctggggttcattgtggaggtggaggggctccccgttccaggtgtgaagtggtataggaataaatccctgctggaacccgacgaaagaatcaaaatggaaagggtcggaaacgtgtgctcactggaaatcagtaatatccagaaaggcgagggcggagaatacatgtgtcacgctgtgaatattatcggggaagctaagtcatttgccaacgtggacattatgccacaggaagaacgggtcgtggctctgcctcccccagtgacgcaccagcatgtcatggagttcgacctggaacatacaacctcctcacggaccccctccccgcaggaaatcgtcctggaggtggagctttctgaaaaagatgtaaaagaatttgaaaaacaggtgaagattgttacagttcccgagttcacgcccgatcataaatccatgattgtgagcctagacgtcttaccttttaactttgtggacccaaacatggactctcgggaaggggaagacaaggaattaaagatcgacctcgaggtgttcgagatgcccccaagatttatcatgcccatttgcgatttcaagatacccgaaaactcagacgctgtgttcaagtgctcagttatcggcatccccaccccagaggtgaagtggtacaaagagtatatgtgtatcgagcctgacaatattaagtacgtgatctccgaagagaagggctcccatacattaaaaatccggaacgtctgtttgagcgacagcgccacctatcgctgtagggccgttaactgtgttggagaggcaatctgtagaggatttctgacaatgggcgactcggaaatattcgcagtgatcgctaagaagtccaaggttaccctgtcaagcctgatggaagagttagtgttgaagtctaactacaccgatagttttttcgagttccaagtcgtagaaggccctcctcgatttattaaaggtatcagcgactgctacgctcccattgggacagccgcatacttccagtgcctggtcagaggctcccccaggcccacagtgtactggtacaaagatggcaagcttgttcagggcagaagattcaccgttgaagagagtggcacagggtttcacaacttattcattaccagtctggtgaaatccgacgagggcgaatacagatgtgttgctacaaataagagtggaatggctgagtccttcgcggcactaaccctgacatat

SEQ ID NO: 244162 - DNA, 1419 bp, synthetic construct
  misc_feature 1..1419: note = Description of Artificial Sequence: Synthetic coding sequence
  source 1..1419: mol_type = other DNA
atgtacatctacgaagcgagtgaggaagcagtcctagaggagaaggtgcttgtcacgcaaccccagaagacgaagcccaagctggccaaggtgcccgagcctcctaagaaagtcgtcccagaggataagatctatgtgaccattcctaaaaagagggaaacccccgctacgaaggagccagacaccactaggggcattttccctgaggtggagccccctgaggccattccggagattcctgaacatccccctacagaggaattcgaagtgttcaaagaggttatccctgagggggagactcccatcgttaaacgaaggaaaaccccctctcccacagcccctgaagccatgaaggaggtggtacctgaaatgaagatcttcgaggacgtgcccgaggaacccgagaccccccgaatgaaaacgcccgaagctccccaagagatcatccctgcaaagaccgtgccaagtaaaaagcgcgaaccaccttctgtaaaggttccagaggccctgcaggagattgttcccgagaaaaaaacactagtcgtgccgctcaggaagccggaagtcttaccagacgaggtcccagaggcacttcgcgaggttgtgccagaaaaaaaggtgcaccccccacagagagccgaggtggttcccgttaaggtgcatgaggccccaaaggaaatcatacccgagaagaaggtcagtgtggtgccgccaaagaaaccagaagtgccaccggttaaagtccccgaggcaagcaaggaagttattcgtgaagaaaaggtacccttagcaccacccaaggaacccgaggtcccccctgtgaaagtaccagagccgccaaaggaggtcgtccccgagaagaaggctccggtagccccacctaaggaacccgaggttccacctgtgaaggtaccagaggcaccgaaagaagtcgtcccagaaaaaaaggtccctgtgcccccacccaaaaaacccgaagttccaccaaccaaggtcccagaggtgcctaaggctgctgtgccagagaaaaagctgccagaagccatacctcctaagcccgagtcacccccaccagaggtgcccgaggtcttacccccaaaggaggttgtgcccgagaagaaggtgcccgttcctccagcaaagaaaccagaggctcctccaccaaaggttccagaagcccctaaagaagtcgttctggagaagaaagcctcagtcgccgtgcctaaaaaacccgaagcaccacgtgcaaaggtgcccgaagcagctcaggaggtcgttcccgaaaagaagatccccaaggcccctatcaagaagcctgaagccccagccgtcacggttccagaggtgccacaggagattgtgccagagaagaagaccctggtacttcccaaaaaaccagaggtccccccagtcacctag

SEQ ID NO: 244163 - DNA, 1122 bp, synthetic construct
  misc_feature 1..1122: note = Description of Artificial Sequence: Synthetic coding sequence
  source 1..1122: mol_type = other DNA
gtagtaccagaaaagaaagtcccactggtcgtgcctaagaagcccgaagcaccacctgctaaagttccagaggtaccaaaagaggtcgtgccggagaagaaggttgcggtgcccaaaaaacctgaagtgccccctgcaaaggtgcctgaggtgcccaagaagccggtgttggaagagaagcccgctgtgccagtgccagagcgggctgaaagcccaccacctgaggtgtacgaagagcccgaagagatcgctccggaagaagaaattgcacccgaagaagagaaacctgtacccgtagctgaagaagaagaacccgaagtccctccgccagccgtgcccgaagaacctaagaagatcatacccgagaagaaggtccccgtaattaagaaacccgaggccccacctcctaaagaacccgagatgcctaagaaagttgtgcccgtgaagaaggtgcctaccgtgaaaaagccagaaacccccgctgccaaagtaccagaggttcccaagaaactggtgccagtgaaaaaagaacccgtgccggtcaccaagaaacctgaagtgcttcctgaaaaggttccgaaggtgccagagaagataatacctgaaaaggaagtatctgttcccattcctgctgagccagaggtgccgcctgctgaagtggaagagacgcccgaagagattatctacgaggagaaggcctccatcaccatcggaagaaaggaaactccccctgtagaagagcgggagattgaaaagtatattaaaccagaggagccggagccggaaccacagcccgaggaaattcctgtaaaggaaccagaaccagaaaaagtcattgagaagccaaagttaaagcccagaccgccacctcccccaccggcaccaccaaaggaggatgtgaaagagaagatcttccaattaaaggcaattcccaagaaaaaggtccccgaaaagcctcaggtgccagagaaggtagagctcaccccattaaaagtgcccgagccaccacctccgaaacctgtcgaggaagtcgaggtccctaccgtgactaagcgagaacggaagataccggaacccaccaaagtgcccgagatcaaaccagcgattccactcccggcttag

SEQ ID NO: 244164 - DNA, 543 bp, synthetic construct
  misc_feature 1..543: note = Description of Artificial Sequence: Synthetic coding sequence
  source 1..543: mol_type = other DNA
aaagtacccgaagttccaaaaaaacctgtgctggaggagaaaccagccgtgccggtgccagagcgcgcagagtccccaccccctgaggtctacgaggagccagaggaaatcgctcctgaagaggaaattgcgcctgaagaggagaagccggtgcctgtagccgaggaggaagagcccgaggtgcctcctcctgccgtaccagaagagccaaagaagatcattcctgagaagaaagtgcccgttatcaagaagcccgaggcgcctcctccgaaggagcccgagcctgagaaggtgattgaaaaacccaagctgaaacccagacctccccctccccctccagcccctcctaaagaagacgttaaggagaagatctttcaactgaaggccattcctaaaaaaaaggtcccagagaaacctcaggtacccgaaaaggtcgaactgacacccctgaaggtcccaggcggtgagaagaaggtgagaaaactgctgccagaaaggaagccagagcccaaggaagaagttgtacttaagagcggtatatag

SEQ ID NO: 244165 - DNA, 438 bp, synthetic construct
  misc_feature 1..438: note = Description of Artificial Sequence: Synthetic coding sequence
  source 1..438: mol_type = other DNA
gaagacacatatcagttggagatcgcagaagcgtatcctgaagacgaaggaacctacacgttcgtggcctcaaacgccgttgggcaagtcagctctacagcaaacctctctctcgaagcccctgagagtattctgcatgagagaatagaacaagaaattgagatggagatgaaagaactgttttcagaaggtgagagcgaacacagcgagcgggatacccgagacgctttctcagacagcgaggatatagatcacaagtccatggccgcaaaaaggtatgcctctaggattagctcaacctcaagctggcccgaatacttcaaacctagcttcactcagaagctcacctttaaatatgtgcttgagggagagccagttgtctttacttgtcgacttattgcttgtcctacccccgagatgacctggttccacaattag

SEQ ID NO: 244166 - DNA, 546 bp, synthetic construct
  misc_feature 1..546: note = Description of Artificial Sequence: Synthetic coding sequence
  source 1..546: mol_type = other DNA
atgttcttcgccagtcacactgaagaggaggtttccgtcacagttcctgaggtgcagaaggaaatcgtgacagaggaaaagatacatgtagccatctccaagcgcgttgagccgccacctaaggtgcctgagctgcctgagaagccagccccagaggaagttgctcccgtacctatccctaagaaggtggagccacccgcacctaaggttcctgaagttcccaagaagcccgtgcctgaggagaaaaagcctgtaccagtgcccaagaaggagccagcagcacctcccaaagtccctgaagtgcctaagaaacccgtgcccgaagagaagatccctgtccctgtagctaaaaaaaaggaagccccaccagccaaggtgccagagatacctaagaagaaggtccccgaggagcgcaaacctgtaccacgtaaggaagaggaagtgcctcccccaccaaaagtgcccgctttaccaaaaaaaccagtgccagaagagaaggttgctgtgccagtgcctgttgcaaaaaaggcccctccacccaggtag

SEQ ID NO: 244167 - DNA, 2490 bp, synthetic construct
  misc_feature 1..2490: note = Description of Artificial Sequence: Synthetic coding sequence
  source 1..2490: mol_type = other DNA
gtcgaggaatttattaaactagagcagcatcgggttgaggaggaacaccgggtagaaaaagtgcaccgcgtcatcgaagtattcgaggctgaggaggtggaggtcttcgagaagccaaaagcccctccaaaggggcctgaaatctccgaaaagatcattccccctaagaaaccccctactaaagtagtccccaggaaggagcccccagctaaagtccctgaagtcccaaaaaaaatcgtggtcgaagagaaagttagagttccagaggaaccaagagtgcctccaaccaaggccccagaagtacccaagaaaatcgtgcctgaggaaaaagtccgagaagccgtgctgaagaaaccagaagtgcccccagccaaagttcccggaatgccaaagaagagtgtgcaggaggagaagtccccaatcgtgatttccgaggacacggagatgtatatctacgaagcgtctgaagaggccgtcctggaggaaaaggtgctggtaacccagcctcagaagaccaagcctaagctggcaaaggtcccagaacccccaaaaaaggtggttcccgaagacaaaatttacgtgacaatcccaaaaaaacgagagacaccagctactaaggaaccagatacaacacgcggtatctttcctgaggttgagccccctgaggctatcccagaaatccccgaacatccaccgactgaggaattcgaggtttttaaggaggtgatccccgaaggcgaaactcctatcgtgaaacggcgaaagaccccctccccaactgctcctgaagccatgaaagaggtggttccagaaatgaaaatcttcgaagacgtgcctgaagaacccgagacaccgcgaatgaaaactccagaggcccctcaggaaatcatccccgctaagacagtaccctccaagaagagggagccccctagcgtgaaagtccccgaggctctgcaggaaatcgtgcctgagaaaaagacactggtggtgccattgaggaagcctgaagtcctccctgacgaagtgccagaagcactgcgcgaggtcgtccccgagaagaaagtgcacccaccacagcgagccgaggtggttccggtgaaagtgcatgaggcaccgaaagagatcatacccgaaaagaaagtgtcagtggtgcccccaaagaaaccggaggtgccccctgtgaaagtccctgaagcttccaaggaggtaatcagggaggaaaaggttccgttggccccacctaaggaacccgaggtgccaccagtcaaggtccccgagccccctaaagaagtggtcccagagaagaaggctcctgtcgccccacccaaagaacctgaagtgccccctgtgaaagtgcccgaggctccaaaggaagtggtccccgagaaaaaggtacctgtgccgcctccaaagaagcctgaggtgccaccgacaaaggtgccggaagtccccaaggccgcagtcccagagaagaagctccccgaggcaatcccacctaaacctgagagccctcctcctgaggtgcccgaggtactccctccgaaagaggtcgtgccagagaagaaagtgcccgtcccacccgctaagaaacccgaggctccaccgcctaaggtaccagaggcaccaaaggaggtggtgcttgagaagaaagcgtccgtagctgtgcccaaaaagcctgaagctcctcgggctaaagtacccgaggctgctcaggaagtcgtgccggagaaaaagatccccaaggcgcctattaaaaaacccgaggcacccgctgttacggtgcctgaagtccctcaggaaatcgtgcccgaaaagaaaactctggtactgcctaagaagcctgaagttccccctgtcacagtgcccgaggctcccaaggaggtcgtcctggagaagaaggtgcccagcgcgccaccaaagaaacccgaagtcccccctgttaaagtcccagaggccccaaaggaggtggtgccagagaagaaagtgcccgtgccgcctccaaagaaaccagaggtacctcccacaaaggtgcccgaggtgccaaaggccgctgttccagagaagaaggtcccagaagcgattccacctaaacctgaatcacccccaccagaagtgcctgaagtcctgccccctaaagaggtggtgcccgaaaaaaaggtacctgtacctccggctaagaagccggaggcacctcctccgaaggttccagaggcgcctaaagaggtggtcctggagaagaaagcctctgtcgccgtgcctaagaagcccgaagccccacgagccaaagtcccagaagccgcacaagaggtcgtaccagaaaaaaagattcccaaggcgcctatcaaaaaacctgaggcccctgccgtcacagttcccgaggtacctcaagaggccgcagagaaggagatcccagtagctcctccaaaaaaacccgaggcgccaatcgtccctgtgcccgaagcccaggaggtggttccagagaagaaatag

SEQ ID NO: 244168 - DNA, 504 bp, synthetic construct
  misc_feature 1..504: note = Description of Artificial Sequence: Synthetic coding sequence
  source 1..504: mol_type = other DNA
atggctacctccgaactctcctgcgaagtttcagaggagaactgtgaacggagggaggcattctgggctgagtggaaagaccttacattgtccacccgaccggaagagggctgtagtctccatgaggaggatacacagagacatgaaacctaccatcagcagggccagtgccaggtcctggttcagcgaagcccctggctcatgatgaggatgggaatcttaggtaggggcttacaggagtatcaactcccttaccagcgcgtattacccctgcctatctttactccggctaaaatgggcgctaccaaggaggaacgtgaggacactccaatacaactgcaggagttactggcactggagacagcgctgggagggcagtgcgttgaccgccaggaagtggccgagatcactaaacaactgcccccagttgtgccggtgagtaagcctggagccctgcgcagaagcctttctcggagcatgagccaggaggctcaaagaggatag

SEQ ID NO: 244169 - DNA, 744 bp, synthetic construct
  misc_feature 1..744: note = Description of Artificial Sequence: Synthetic coding sequence
  source 1..744: mol_type = other DNA
atggctgggggagtgctgcccctcagaggactacgcgctctgtgccgcgtgctcttgtttctgtcacagttctgcattctgagcggtggagagcagtcacaggctcttgcccagagtataaaggatcctggcccaaccaggaccttcacagttgttccacgggctgcagaatccactgagatccccccttatgtgatgaaatgcccctcgaatggcttgtgtagccggctgcccgcagactgcatcgattgcacaaccaacttttcctgcacctacggaaagcccgtgacattcgattgtgccgtcaagccctctgtgacatgtgtagaccaagatttcaagagtcaaaaaaatttcataattaatatgacttgtaggttttgttggcagttgcccgagactgactacgagtgcacaaactcaacatcttgcatgacggtaagttgtccgcgtcagcgataccccgcaaactgtactgttagggaccacgtccactgtctaggaaaccggaccttcccaaagatgctgtattgcaattggacaggcggttataagtggagtacggcgttagccttaagtattacgcttgggggtttcggcgctgatagattctacctgggccaatggcgcgagggcctcggaaagctttttagcttcggcggtctgggtatatggacgttaatcgatgtgttacttataggcgtcggctatgtggggcctgccgatggctccctgtacatatag

SEQ ID NO: 244170 - DNA, 666 bp, synthetic construct
  misc_feature 1..666: note = Description of Artificial Sequence: Synthetic coding sequence
  source 1..666: mol_type = other DNA
atggctggcggtgttctgcccctacgcggattgcgagctctctgccgcgttttgctgtttttgtcacagttctgcatcctgagcggaggcgaaagtaccgagatccccccttacgtgatgaagtgcccatccaatgggctctgctctcgcttacctgcggattgtattgactgcacaacaaatttctcatgtacgtatggcaagcccgtgacattcgattgtgcagtgaaaccttcagtgacttgtgtggaccaggacttcaaaagccagaaaaacttcatcattaatatgacttgtagattctgttggcagctgcccgaaaccgactacgagtgcacgaattccacctcttgcatgactgtctcctgtcccagacaaaggtatcctgccaactgtacagtgcgcgaccatgtccactgtctgggtaatcggaccttcccaaaaatgctgtattgtaactggaccggcggatacaaatggagtaccgctctggcattgtcgatcactctgggcggatttggcgcagaccggttctatcttgggcagtggagagaaggcctcggcaagctttttagcttcggcggactagggatctggacgttaatcgatgtattactgattggcgtcggctacgtgggaccagccgacgggtccctttacatatag

SEQ ID NO: 244171 - DNA, 1251 bp, synthetic construct
  misc_feature 1..1251: note = Description of Artificial Sequence: Synthetic coding sequence
  source 1..1251: mol_type = other DNA
atggcatcaagttcagggtcttccccaagaccggctccagatgagaacgagttcccctttggttgccctcccacagtctgtcaggatcccaaggagcctagggcgctttgctgcgcaggctgtctttctgagaaccctcgtaacggggaagaccaaatatgtccgaaatgtagaggcgaagacttacagtccatcagccccggatccagacttagaacacaagaaaaggcccaccccgaggtggccgaggccggaattggatgtccttttgcaggggtgggttgttctttcaagggctcgccccagtcggtccaagaacacgaggtgacctcccagactagtcatctgaatctgctgcttggattcatgaagcagtggaaagctcgattgggatgcggcctggaatcgggcccaatggccctggaacagaatctgtccgatcttcagctgcaggctgccgtcgaagtagccggagacttggaagtggactgttaccgagctccttgctctgagtctcaggaggagctcgccttacaacacttcatgaaggaaaaactgctggccgagctcgagggcaagctgcgggtgttcgaaaatatcgttgcggttctaaataaagaggttgaagcgagtcatctggcactcgcaacgagtatccatcagtcacagctggacagagaacgaatcctgtctttggaacaacgagtggtggaactccaacagaccctcgctcagaaagaccaggcccttggcaagctggagcagagcttgcgtttgatggaggaggcaagtttcgatggaacctttctttggaaaatcaccaatgtgacgcgtagatgccacgagtcagcttgcggaaggacagtgagtctatttagcccagctttttacacagccaaatatggttacaagttgtgcctgcgcctctatctgaatggcgacggaaccggcaagcgaacccacttgtctctttttattgtgattatgaggggagaatatgatgctctgctgccttggcccttcagaaacaaggtcacgtttatgttactggaccagaacaaccgcgaacatgcgatcgatgcatttagacctgacctgtctagtgcctccttccaaaggcctcagtcagagactaatgtagcgtcaggctgcccactatttttccctctttcgaaactccagtcgccaaagcatgcgtatgtcaaagacgatactatgtttctgaaatgtatcgtcgagacaagcacatag

SEQ ID NO: 244172 - DNA, 1251 bp, synthetic construct
  misc_feature 1..1251: note = Description of Artificial Sequence: Synthetic coding sequence
  source 1..1251: mol_type = other DNA
atggcatcttcatctggctcctccccccgtcctgctcctgatgaaaatgagtttcctttcggttgcccacccacagtgtgtcaggatcccaaggagcctcgagccctgtgctgcgccggatgtctgtccgaaaatcctcggaacggcgaggaccagatatgccccaagtgtcggggtgaagatctgcagtctatatctcccggtagcagactgcgaacgcaagagaaagcacacccagaggtcgcagaggcaggaatcggatgtcctttcgctggagtcggctgcagttttaaaggctcaccgcaatccgtgcaggaacacgaggtgactagccagacatcccacctgaatcttctgctgggttttatgaaacagtggaaggctaggctcgggtgtggactggagtccggcccaatggctctcgagcagaaccttagcgacctccagcttcaagcagcggtcgaggtggccggtgatctcgaggtcgattgctacagggcgccatgttccgagtcccaggaagagttagcactccagcacttcatgaaggagaagcttctggcagagctcgagggaaaactgcgcgtatttgagaatatcgtagctgtgttgaacaaggaggtggaggcctcccacctagctttagcgacttccattcaccagagtcagctggatagggagcgtatcctcagcttagaacaacgggtcgtcgagctgcagcaaaccctggcacagaaagaccaggcactcggaaagctggaacagagcctgcgcctcatggaggaagcttcattcgacggaactttcctgtggaagattacaaacgtcaccaggcggtgtcatgaatccgcatgtgggagaactgtgtccttgtttagccccgcattttataccgcaaagtatggctataagctgtgtctgcgactctatctgaacggggacggtactgggaaacgcactcatctgagcctctttatcgtaattatgcgcggtgagtatgatgctttgctgccttggccatttaggaacaaagttacctttatgctgctggaccagaacaatcgcgagcatgccatcgacgcattcaggcctgaccttagcagcgcctcctttcagaggccacagtcagagacaaacgtcgccagtggctgcccactgttcttccctctgtctaagttgcagtcccctaagcacgcatacgtcaaggacgacacgatgtttctcaaatgcattgtcgagacctcaacttag

SEQ ID NO: 244173 - DNA, 885 bp, synthetic construct
  misc_feature 1..885: note = Description of Artificial Sequence: Synthetic coding sequence
  source 1..885: mol_type = other DNA
atgaagcagtggaaggctcgactgggatgcggactggagtccggcccaatggccctcgagcagaatctcagcgatctgcaacttcaggccgcagtggaggtggccggagatttggaagttgattgttaccgggcaccgtgttccgaatcacaggaagaattagcgctgcagcatttcatgaaagaaaaactactggccgaactggaagggaaactgagagtctttgaaaacattgtggccgtcttgaataaggaggtagaggctagccacttagctcttgccaccagcatacatcagagccagctcgaccgcgagaggatactgagcttggaacagcgggtggtcgagcttcagcagaccctggcgcagaaggaccaggctcttgggaagctagaacagtcacttaggttgatggaggaagcatcctttgacggtactttcctgtggaagatcacaaatgtgactcggagatgtcatgagagcgcctgcggtcgaacggtgtctctattctcccctgctttttatacggccaagtacggatataagctgtgcctccggttgtacttaaacggggatggcactggtaagaggacacacctgtctttgtttatcgtaatcatgagaggcgagtacgacgccctgctgccgtggccttttcggaacaaggtaacgttcatgttgctggaccaaaacaacagagagcatgcgatcgacgctttccgcccagacctctcctccgcaagtttccagaggccacagagtgagaccaacgtcgcttctggctgccctctgttcttccctctgtccaaactccagagccccaaacacgcctatgtcaaggacgacactatgttcttaaagtgtatcgtggagacatccacgtag

SEQ ID NO: 244174 - DNA, 2076 bp, synthetic construct
  misc_feature 1..2076: note = Description of Artificial Sequence: Synthetic coding sequence
  source 1..2076: mol_type = other DNA
atgaacgctgccgtggtccgcagaacacaagaagccctcggaaaggtgatccgcagacccccactaacggagaagctgcttagtaaacctcctttccgatatctccacgacatcatcaccgaagtcattaggatgaccggttttatgaaggggctatatacggacgccgagatgaaatccgacaacgtgaaggacaaagatgccaaaataagcttcctgcagaaggccatcgacgttgtggttatggtgtcgggggaacccttgctagcaaagccagcacggatagtggcagggcatgaacccgaaagaactaatgaactgcttcagatcatcggcaaatgctgtctgaataagctttccagcgatgatgcagtgaggagagttctggcgggtgagaagggcgaagtcaaaggaagggcttccttaacttcacgctcccaggagctcgataacaaaaacgtgcgggaggaagaatcaagggtgcacaagaacacggaggataggggcgacgccgaaatcaaggaaagatcaacaagccgcgatagaaagcaaaaggaagagctgaaagaagacagaaagccacgcgagaaggataaagacaaggagaaggctaaggaaaacggaggcaatcgtcacagggaaggtgaacgggagcgggctaaggccagggcccgtcccgataacgagcgccaaaaagacaggggaaatagagagagagatcgtgacagcgagcgcaaaaaggagacagagagaaaaagcgagggtggtaaagaaaaggagagattgagagatcgtgatcgcgaacgcgatcgggataaagggaaagaccgagacagaaggcgcgttaaaaacggcgaacacagctgggatctcgatcgagaaaagaatcgagagcatgacaagcctgaaaaaaaatctgccagctctggcgagatgtccaaaaaactgtccgacggtacctttaaggacagtaaagcagagacagagacagaaatctctacacgcgcatcaaagtccctgactacaaagactagtaaaagacggagtaagaattcggtcgaggggaggaaagaggacaatatcagtgccaaatccctggacagtatcgtgtccgggattaacaatgagcctaaccaggagaccacaacctcagaaatcggcacaaaagaagcaaacattaactcaacgtcaatttcagatgataactcagccagtcttaggtgcgagaatattcagcccaatcctactgaaaagcagaaaggggatagcacatccgatgccgagggcgacgctggcccagccggacaggacaagtcagaagtgccagaaaccccagaaatccccaatgagctgtcttctaacatacgccgtatccccaggccagggtcagctcggcctgcccctcccagggtaaagcgtcaggattcaatggaggccctccagatggataggagcgggagcgggaaaaccgttagcaacgtcataacagaatcccataactcagacaacgaagaggacgaccaatttgtggtggaagctgccccacagctgtccgagatgagcgaaatcgagatggtcaccgctgtcgaactggaagaagaggagaagcatgggggtctcgtaaaaaagatcctcgagacaaagaaagattatgagaagctccagcagagccctaagcccggagagaaggaacgctcgctttttgaaagtgcatggaagaaagagaaggatatagtgtcaaaggaaatagaaaaactcaggacaagtatacagaccttgtgtaagagcgccctgcctctagggaaaatcatggattacattcaggaggacgtcgatgcaatgcagaacgagctccagatgtggcacagtgagaaccgtcaacacgctgaagctttgcagcaggaacagcgtattaccgattgtgcagtggagcccctgaaagccgagttggccgagctcgagcagctcatcaaagaccagcaggacaagatctgcgctgttaaggccaatattcttaaaaacgaggaaaaaatacaaaagatggtgtatagcatcaaccttacctcacgcagatag

SEQ ID NO: 244175 - DNA, 1878 bp, synthetic construct
  misc_feature 1..1878: note = Description of Artificial Sequence: Synthetic coding sequence
  source 1..1878: mol_type = other DNA
atgaatgccgcagtggtgcgacggactcaggaagctctggggaaagtgatccgcaggccaccattaaccgaaaaactcctgtccaagcccccattccggtacctccacgatattatcacggaagtgatcagaatgaccggcttcatgaagggcctgtacactgatgctgagatgaaaagtgataacgtgaaggacaaagatgctaagattagctttttgcagaaggcgatcgacgtggttgttatggtctctggggagcctctgctggctaagcccgctagaatagtagctggacacgaacccgaacggactaatgaactcctccaaatcataggaaagtgttgccttaataagctttctagcgacgacgccgtccgtcgggtactcgcaggggagaaaggggaggtcaaaggcagggcttcgctcacatctaggtctcaagaattagataacaaaaacgtgcgtgaggaagagtctcgggtacacaaaaacaccgaagatcgcggtgacgcagaaattaaggagcgatctacttcaagggatcgcaagcagaaggaggaactgaaagaagaccgtaagccacgagagaaggacaaggataaggagaaagcaaaagaaaacggtggtaaccgtcaccgggagggcgaacgcgaacgcgcaaaggccagggccaggccagacaacgagcgacagaaagatcgagggaaccgggagcgggaccgcgacagcgagcggaaaaaagagacagaacgcaaaagcgagggtggcaaagaaaaggaaagattacgggacagagacagggagcgggatagagacaagggcaaagaccgggacaggaggcgggtgaagaatggcgagcactcgtgggacttagatcgggaaaagaatcgagagcatgacaagcccgaaaagaagtcggcatccagcggagagatgtctaaaaaactttccgatgggacatttaaggattcaaaggcggaaaccgagaccgagattagcacccgagcgtcaaaatctctgaccacaaaaacctcaaagcggagatctaaaaacagtgtggaaggtgattccacaagcgatgccgagggcgacgccggtccagcagggcaggacaagagtgaggtgcccgagactcccgaaataccaaatgagttatcctccaacatccggcgaatccccaggcctggtagtgcgcgtcccgcacctccaagggtgaagcgacaggacagtatggaagccctgcagatggaccggagtgggtccggcaagacagtcagtaatgtaatcaccgagtcccacaattctgataatgaggaggacgatcagtttgttgtggaggccgcaccccagctgtccgagatgtctgagatcgagatggtgacagccgtggagctggaggaggaggagaaacacggcggattggtgaaaaagatcctcgagaccaaaaaggattatgaaaagcttcagcagagtcccaaaccaggcgagaaagaacgttctttattcgaatccgcttggaagaaagagaaagacatcgtgagtaaagagattgagaagctgcgtacttctattcaaacactgtgcaaatctgcgctgcccctaggtaagattatggattatatccaggaagacgtggatgctatgcagaacgaacttcagatgtggcactcggagaacaggcagcatgctgaagcactccaacaggaacagaggatcactgattgcgcagtggagcctttaaaggccgaactcgctgagttggagcagctcatcaaagatcagcaggataagatttgcgccgtgaaggctaacattttaaagaatgaagaaaaaatccaaaaaatggtctattcaattaacttaacctcccgccgatag

SEQ ID NO: 244176 - DNA, 2076 bp, synthetic construct
  misc_feature 1..2076: note = Description of Artificial Sequence: Synthetic coding sequence
  source 1..2076: mol_type = other DNA
atgaatgcagctgtggttcggcgaactcaagaagccttgggcaaggtcattcgcagaccccctctaacggagaagttacttagcaagccaccattccggtacctccacgatataattacagaggtgatcaggatgactggctttatgaaaggactatacactgacgcagagatgaaaagcgacaatgtgaaggataaggacgccaaaatttcgtttctccagaaggcaatcgatgtagtggtcatggtgtccggtgaacctctccttgctaagccagctcgaattgtagcaggccatgagcccgaacgaacgaatgaactgctgcagattatcggcaaatgctgtttgaacaaactgtcgagcgacgatgcagtgcgccgagtgcttgccggagaaaagggcgaagtgaagggaagggcatcgctgaccagccgctcccaagaactggataataagaatgtgagggaagaggaatctagggtacacaaaaataccgaggatcggggagacgcggagatcaaggaaaggagcacttccagggacagaaaacagaaagaagagttgaaggaggaccggaagccgagagaaaaagataaggacaaagagaaagcgaaagagaatggaggcaataggcaccgagaaggcgagagagaaagagctaaggccagagctaggcccgacaatgagagacagaaggaccggggtaatcgggagcgcgacagagactctgagagaaaaaaggaaactgagcgcaagtccgaagggggaaaggagaaggagcggctccgggatcgagacagggagcgcgacagagacaagggaaaggaccgagatcgccgtcgggtgaaaaacggagagcatagttgggacctggatcgcgagaagaatcgagaacacgacaagccagagaaaaagtctgcatcctccggggagatgtcaaaaaagctaagtgacggcaccttcaaagattccaaggctgagacagagactgagatcagtacccgcgctagcaagagcttgacaacgaagactagcaagagacgcagcaaaaactccgtcgagggccgtaaagaggacaacatcagcgccaaatcactggattccattgtaagcggtataaacaatgagcctaaccaggagacgacaactagcgagatcgggacaaaagaagctaatatcaacagcacctctatctccgatgacaatagcgcatctctgcgctgcgagaatatacagccaaatcctacggagaagcaaaagggtaagaacggatctgagagagaaggagacgccggacccgcaggtcaagacaaatctgaggtgcccgaaacgcctgagatcccaaacgagttatcgtctaatatccggaggattcctaggcctggctcggccagaccagcacctccccgtgtgaagagacaggatagtatggaggctcttcagatggaccgatccggcagtggaaagacggtaagcaatgttattactgagtctcacaatagcgacaatgaagaggacgatcagttcgtggtagaagctgcaccccagctaagcgagatgtccgaaatcgaaatggtcaccgctgtggagctcgaggaagaagaaaagcatggtggactggttaaaaagatcctagaaaccaagaaggattacgaaaagctacagcaaagtccaaagccaggcgagaaagagaggtccctcttcgaatctgcatggaagaaagaaaaagatatagtgagcaaggagatagagaaactcagaactagcatacagaccttgtgcaagtccgcccttcccctaggaaagatcatggattatatacaggaggacgtggacgccatgcagaatgaactccagatgtggcattctgagaacaggcagcacgcagaagctctgcagcaggagcagaggatcacagactgtgcggtggagcccctcaaggcggagcttgctgagctcgagcagcttatcaaggatcagcaagataaaatttgtgctgttaaagccaatatcttaaagaacgaagaaaagatccaaaagatggtttactccattaatctgacctcacggagatag

SEQ ID NO: 244177 - DNA, 1878 bp, synthetic construct
  misc_feature 1..1878: note = Description of Artificial Sequence: Synthetic coding sequence
  source 1..1878: mol_type = other DNA
atgaacgctgcagtggtgcggagaactcaggaggctctgggtaaggttattcgacgaccacctctcacggagaagctgctctcaaaaccgccattcagatacctccacgacatcattactgaagtgattaggatgactggattcatgaagggcctgtacacagacgccgagatgaaatccgacaacgttaaagacaaggacgctaaaatttcctttctccagaaggctatcgacgtggtggtcatggtctccggagagcccctgctcgccaaacccgctaggatcgtggccggtcacgagcccgagaggaccaacgagctcctgcagattatcggcaaatgttgcctgaacaaactatcttctgatgatgcggttaggcgtgtgctcgccggtgagaagggcgaagtgaagggcagagcatccctgactagccggagccaggagctcgataacaaaaacgtgagagaagaggagagcagggttcacaagaacactgaggacaggggcgacgcagagataaaagagaggagtacatcgcgagatcgcaaacagaaggaagagctgaaagaggatagaaagccacgcgaaaaggataaagacaaggagaaggcaaaggagaacgggggaaatagacatcgggaaggggagagggagagggccaaggccagggctcggccagataacgagcggcaaaaagatcggggaaatcgtgaacgggatcgcgattcagaaaggaagaaagagaccgaacggaagtctgagggaggcaaagagaaagagagactccgcgaccgcgatagagagcgagatagagataagggtaaagaccgggatcgacggagagtcaaaaacggcgaacacagctgggaccttgatcgcgagaaaaatcgagaacatgataaacccgagaaaaaaagcgcaagcagcggtgaaatgagcaaaaagttatcggacggcacatttaaggattcgaaagccgaaactgagaccgaaatcagtacaagagctagcaaaagcctgaccacaaagacaagcaaacggaggagcaaaaacagcgtcgaaggaaccgccaaactgatcctggagggcgacgccggaccagcgggacaagataaaagcgaggtgccagaaacccccgagattcccaatgaactttccagtaatattcgccgtattcccaggccgggaagcgctagaccagctccaccacgcgtgaaacggcaagatagtatggaagcccttcaaatggaccggtcaggctccggcaagaccgtcagcaacgttatcaccgagagtcacaactccgacaacgaggaggatgatcaattcgtcgtcgaggccgcaccacagctgtctgaaatgtcagaaatcgagatggttacagccgtcgaactggaagaagaggagaaacatggcggactagtgaagaaaattctcgaaactaagaaagattacgaaaaactgcagcagtcgcctaaaccaggagagaaggagcgaagtctctttgagtccgcttggaaaaaagagaaagatatagtgagtaaagagatcgaaaaactgcgcacctcaatccaaactttgtgtaagtctgcactgccactagggaaaatcatggattatatacaagaagacgtggacgcaatgcagaacgaacttcaaatgtggcactccgagaatcggcagcatgccgaagcactgcaacaggagcaacgcatcacagattgtgctgtggaaccattgaaagccgagctggcggagctggaacagctgataaaagatcagcaggataagatatgcgccgtgaaggccaacattctgaaaaatgaggagaagattcaaaagatggtctactccatcaacctcaccagtcgccgatag

SEQ ID NO: 244178 - DNA, 1674 bp, synthetic construct
  misc_feature 1..1674: note = Description of Artificial Sequence: Synthetic coding sequence
  source 1..1674: mol_type = other DNA
atggcctacagcgaagaacacaaagggatgccgtgtgggttcatacgccagaatagcggtaattccatctctctagactttgaaccatcaatcgagtatcagttcgttgagagactggaagagaggtataagtgcgctttttgtcacagcgtgttacataatccccatcaaacgggttgcggccatcgcttctgccagcattgtatcctaagcctgcgcgagctgaacacggtgccaatatgtccggtggataaggaagtgattaaaagccaagaagtgtttaaagacaactgttgtaagcgcgaagtgttaaatctgtacgtctactgcagtaatgcgcctggatgcaatgcaaaggtgatattggggagatatcaagaccacttacagcagtgcctgtttcagccggttcaatgcagcaatgagaagtgccgcgaaccagtactgagaaaggaccttaaagaacacttgagcgcatcctgtcagttcaggaaagagaagtgcctgtattgtaagaaagacgtggtggttattaatctccaaaatcacgaggagaacctgtgtcccgagtacccagtgttctgccccaacaattgtgcaaaaatcatcctaaaaaccgaagtcgatgagcatctcgctgtgtgtccagaggccgagcaagattgtcctttcaaacactacgggtgtgctgtgactgacaagcggagaaatttgcaacagcatgagcacagcgcgctgcgcgagcatatgagactggtcttggagaaaaacgtgcagctggaggagcagatttccgacttgcacaagtccctggaacagaaggagtcgaaaattcaacagctggccgaaacaataaagaagttggaaaaggaattcaaacaatttgcccaattgttcggcaagaacggatcttttttacctaatatccaagtcttcgcttctcatatagataagagcgcatggctcgaggctcaggtccaccagttgttacaaatggtcaatcagcagcagaacaagtttgacctccggccactaatggaagctgttgacactgtaaagcaaaagatcacccttttggaaaataatgaccagcggcttgctgttttagaggaggagacaaataagcacgatacacatattaatattcataaggcccaactgtctaagaatgaggagcgcttcaagctcctagaaggtacctgctacaatggaaagctaatctggaaagtaaccgattacaagatgaaaaagcgggaagccgtggatgggcacacggtgtccattttttctcaatccttttacacaagcagatgcgggtacaggctgtgcgctcgagcatacctcaatggggacggctctggtcggggaagccacctgtccctatattttgtggtaatgcgcggtgagttcgattcccttttacagtggccgttcaggcaacgtgtgacccttatgctgttagatcagtctggcaagaaaaacatcatggaaacgtttaaacctgaccccaatagctcatcattcaagcgaccggatggcgaaatgaacattgcctcaggctgcccccgatttgtagcacactctgtactggagaatgccaaaaacgcttatattaaagatgacactttgtttcttaaagtggccgtggacctgacagacctcgaagatttatag

SEQ ID NO: 244179 - DNA, 1674 bp, synthetic construct
  misc_feature 1..1674: note = Description of Artificial Sequence: Synthetic coding sequence
  source 1..1674: mol_type = other DNA
atggcttacagcgaagaacataaaggcatgccctgtggatttattaggcagaacagtgggaattcaatttcactggacttcgagcctagtattgaatatcagttcgtggagaggctggaggaaagatataaatgtgctttctgtcatagtgtgctacataaccctcatcagacaggttgtggccatcggttttgccagcactgcatcctctcactgcgggagctcaacacagtccctatctgccccgtggacaaagaggtaatcaaatcacaggaagtgttcaaggataattgctgcaagcgggaggttttaaacttatacgtctactgcagcaatgctcccggttgcaatgcaaaggtgatactggggaggtaccaagaccacttgcagcaatgcctttttcaacccgtccaatgctccaatgaaaaatgtcgggagccggttcttaggaaggacttgaaagaacatctgtcagcctcttgccaattccgcaaggaaaagtgtctatactgtaaaaaagacgtcgtggtcattaatcttcagaaccatgaggagaacctgtgccccgagtacccggtgttttgtcctaacaattgcgccaagatcattctgaaaaccgaagtggacgagcatttggccgtgtgcccagaagctgaacaggattgtccattcaagcactacgggtgtgccgtcacagacaagcgcagaaatctccagcaacacgagcactctgctctccgcgaacacatgagactcgtgctcgaaaagaatgttcagctggaagagcagatcagcgacctgcataagagcctggagcagaaagagtcaaagattcagcaactcgctgagaccattaagaaactagagaaagaatttaagcagtttgcccagcttttcgggaaaaacggaagcttcctcccaaatattcaggtattcgcaagccatatagacaagtccgcatggctggaagctcaggtgcaccagctgttacagatggtgaaccagcagcagaataagtttgacctgagacctttgatggaggctgttgacactgtaaaacagaaaatcactctgctggagaataacgaccaacggctggcggtgctggaagaggagaccaacaaacatgacacccacattaacatacacaaagcccagctttccaagaacgaggagcgatttaagttactggaggggacatgctataacggcaaactcatctggaaagtaaccgattacaaaatgaaaaagcgggaggccgttgacggccacaccgttagtattttttctcaatccttctatacgagtagatgcggttaccggctgtgcgctagggcctatttgaatggggacggctccggcagaggctcccacctctctctatactttgtggtgatgcgcggagaattcgatagtctcctgcagtggccctttagacagcgggtcacacttatgctacttgaccagtccggcaagaagaacattatggaaacatttaagcccgacccaaactcctcctcttttaagcgacctgacggcgagatgaatatagcaagcgggtgccctaggttcgtggctcacagtgtcctggaaaatgccaagaatgcatacatcaaggacgacacattgttcctgaaggtggccgtggatttgactgacctggaggacctttag

SEQ ID NO: 244180 - DNA, 1674 bp, synthetic construct
  misc_feature 1..1674: note = Description of Artificial Sequence: Synthetic coding sequence
  source 1..1674: mol_type = other DNA
atggcgtacagtgaagagcataaggggatgccctgcggcttcattcgacagaactcggggaacagtatatcactggacttcgagcctagtatagaatatcagttcgtcgagaggctagaggagcgctacaaatgcgcattttgtcacagcgttctgcacaatccccaccagaccgggtgtggccatagattctgccagcattgcatcctctcgttacgtgaattgaacacagtgccaatttgtccggtggataaagaagttattaagtctcaggaagtgtttaaagacaattgttgtaagcgtgaagtgttgaacttatatgtgtactgtagtaacgcaccgggatgtaacgccaaggtaattctcgggaggtatcaggaccacctgcagcagtgcctgttccagccagttcagtgctccaacgaaaagtgcagagagcctgtgcttagaaaggatctgaaggaacacctcagtgcgagctgtcagtttaggaaagaaaagtgcctgtactgtaaaaaagatgtggtagtgattaacctacagaaccatgaggagaatttgtgtcctgagtatcctgtgttttgtcctaataactgcgctaagatcatcctcaaaacagaagtggatgaacatctggctgtgtgccctgaggcagagcaggattgccctttcaaacattatggctgtgccgttacagacaaaaggaggaacctgcagcagcatgaacactcagccctgagagagcatatgagattggtactggaaaagaacgtgcagctagaggagcagatcagtgatctccataagtctctggaacagaaggagagtaagattcagcagctggctgagacgataaaaaaattggagaaagaattcaagcagttcgctcagctgttcgggaaaaatgggtcctttctacccaatatacaggtcttcgcatcccacattgacaaaagcgcatggctagaggcccaggttcaccaactgcttcagatggtcaaccaacaacaaaacaaattcgacttaagaccacttatggaagccgtggacaccgtaaaacagaaaattacacttcttgaaaataacgatcagcggctcgcagtgttggaggaggaaaccaataaacatgatacccatataaatattcataaggctcagctttcaaagaatgaagaacgatttaagctcctggaaggtacctgttacaatgggaagctgatttggaaagttaccgactataagatgaagaagagggaggccgttgacggacacacggtgagcatcttttctcagtctttttacaccagccgctgtggttacagactatgcgccagagcctacctgaacggcgacggctcgggtcgcggatcccatttaagcttgtacttcgtggtgatgagaggtgagttcgatagcctattgcagtggcctttccggcagcgtgttaccctcatgcttttggatcagtccggtaaaaaaaatataatggagaccttcaagccagacccaaatagctcctcatttaaaaggccagacggcgagatgaacatagcttccggctgcccgaggtttgttgctcacagcgtcctggaaaacgcgaagaatgcctatatcaaggacgacacgctcttcctcaaggtagctgtcgacttgacagatttggaagacctgtag

SEQ ID NO: 244181 - DNA, 1356 bp, synthetic construct
  misc_feature 1..1356: note = Description of Artificial Sequence: Synthetic coding sequence
  source 1..1356: mol_type = other DNA
atggcttactctgaggaacataaaggaatgccttgcgggttcatccggcaaaattctggaaattctattagtctggacttcgagccgagtattgaataccagttcgtagaaagattggaggaacgctataagtgcgctttctgccattcagttctgcataaccctcaccaaaccggctgcgggcaccgattctgccagcactgcattttatccttgcgagaactcaatacagttcccatttgtcccgtggataaagaagttatcaagtctcaggaggtgttcaaagataattgttgcaagcgcgaagtgctcaacctgtatgtctattgcagcaacgctccaggatgtaacgcgaaagtgatactcggcagataccaagataaacgaaggaatctccagcagcacgaacacagcgcactgcgagagcatatgcggttggtgcttgaaaagaacgttcaactggaggagcagatttccgacctccacaagtctcttgaacagaaggagtccaaaatccaacagctggccgaaacaatcaaaaaactggagaaggaatttaaacagtttgcacagctgtttggcaagaacgggagcttcctgcccaatattcaagtgttcgcctctcatatcgataagagcgcctggcttgaggctcaagtacaccagctgcttcagatggtgaaccagcagcaaaacaaattcgacctgcgcccactaatggaagctgtggacaccgtcaaacagaaaattacgctgctcgaaaacaacgaccaaagactggcagtgcttgaagaagaaaccaacaagcatgatacccacattaatattcataaggctcagctttctaagaacgaggagcgttttaaactgctggagggaacctgttataatggaaaacttatttggaaggtgaccgattacaaaatgaagaagcgggaggccgtagacgggcacacagtgtccattttctctcagagcttctacacctctagatgcggatacaggctctgtgctcgtgcatacctgaacggggatggctcaggtcggggaagtcacttatccttgtactttgttgtcatgaggggggaatttgatagccttctccagtggcccttccggcagcgagtgacgctgatgcttctggaccagagcgggaaaaagaatatcatggagacctttaagcctgatcccaattcttcgtctttcaagcgtccagacggggagatgaacatcgctagcggctgccctcggtttgttgcgcattcggtcctggaaaatgcaaaaaatgcgtatatcaaggatgatacccttttcctgaaggtcgccgttgacctgactgatctggaggacctgtag

SEQ ID NO: 244182 - DNA, 1569 bp, synthetic construct
  misc_feature 1..1569: note = Description of Artificial Sequence: Synthetic coding sequence
  source 1..1569: mol_type = other DNA
atgtctctgctcaactgtgagaattcttgtgggtccagtcaaagcgagtccgactgctgtgttgcgatggccagtagctgtagcgcagtgactaaggacgacagtgtgggtggaaccgcttcgaccgggaacctgagcagtagctttatggaggaaatacagggatatgacgtagaattcgatcctccactggagtccaaatacgagtgcccaatctgtctgatggctctgcgagaagccgtacagaccccctgtggccatcggttctgcaaggcatgtattatcaagtctatacgagacgccggtcataaatgccccgtggataacgaaatcctcctcgagaaccagctcttcccggacaacttcgccaagagggagattttgagcttaatggtaaaatgtcccaacgaaggatgtttgcataaaatggaattaaggcatctggaggatcaccaggcgcactgtgagttcgcactgatggattgcccacaatgtcagcgaccttttcagaagttccatattaacatccatatcttgaaagactgccccaggcgccaggtgtcttgcgacaattgcgccgcaagcatggcgtttgaagataaagagatacacgatcagaactgccctctggccaatgtgatctgtgagtactgcaatactatccttataagggagcagatgcctaaccattatgatctagactgtccaactgccccaatcccatgcactttctcaacatttggctgccacgagaaaatgcagaggaatcacttggctagacatctacaggagaatacccaatcccacatgcgtatgttggcccaggctgtgcacagcctgtctgtcattcccgattctggatacatctctgaagtgcgcaattttcaggaaacaattcaccagcttgagggaagactcgtcaggcaggatcatcagattcgcgagctaactgccaagatggagacccaatcaatgtatgtaagtgagctcaaacgtacaatcagaactctggaggacaaggttgcagaaatcgaggcacagcaatgcaacgggatctatatttggaaaattggaaattttggcatgcacttgaagtgtcaggaagaagaaaaaccggtcgtcattcatagtcctggattttatacggggaagcctggatacaaactttgtatgagattacacctgcagctcccaactgctcaaaggtgcgcaaattacattagcctatttgtccatactatgcaaggagagtacgattcccacctgccatggccttttcaggggaccatccgcctgacaatactggatcagtcggaggcgccagtgagacaaaatcatgaggagataatggatgcgaaaccagaactgctggcattccagcgtccaacaatcccccgtaatccgaagggttttggatatgtgactttcatgcacctggaggcgctgcgccaaagaacgtttataaaagatgacacacttctcgtgagatgtgaggttagtacaaggtttgacatgggatcgctccgacgagaggggttccagcctcgcagcaccgacgcgggagtctag

SEQ ID NO: 244183 - DNA, 1569 bp, synthetic construct
  misc_feature 1..1569: note = Description of Artificial Sequence: Synthetic coding sequence
  source 1..1569: mol_type = other DNA
atgagcctactgaattgtgaaaatagctgcggatctagtcagtctgaatccgactgctgtgtggcaatggcttcatcgtgttcagctgtgactaaggacgactctgtcggtgggacggcttccacggggaatctctcctcttccttcatggaggagatccagggatacgacgtggaattcgacccaccactggagagcaaatatgagtgtcccatatgcttgatggctctgcgcgaggcagtgcagacgccatgtggccatcgattttgcaaagcctgcattatcaaatccatcagagatgcaggccataagtgcccagtggacaacgagatccttctggaaaatcaactgttcccagacaacttcgctaagagggagattctaagcctgatggtgaagtgccccaacgaaggctgcttgcacaagatggaactgcgacacttagaagaccaccaagctcactgtgagttcgctcttatggactgcccgcaatgtcagcgaccttttcagaagttccacattaacatccacattttaaaggattgtcccagaaggcaggtaagctgtgataactgtgccgctagcatggctttcgaagataaagaaatccatgatcaaaactgccccctggccaacgtgatttgcgagtactgtaacaccattttaataagagagcagatgccgaaccactatgatctagattgtcctacagctccaatcccttgcaccttttcaactttcggctgccatgaaaaaatgcaacggaaccacctggcccgacatctgcaggagaatacacagtcccacatgcggatgctggcccaagctgtgcacagcctgtccgtaattccagattctgggtacatttctgaggtgcgtaacttccaggagaccatccatcagcttgaggggcgacttgtgagacaagaccaccaaatacgagaactaaccgcaaagatggagactcaatcaatgtatgtgagcgagctcaaaagaactattaggaccttagaagacaaagtagcagagatagaggctcagcaatgtaacggtatatacatctggaaaatcggcaatttcggaatgcatctaaagtgtcaagaagaggagaagcccgttgtcatccactcccctgggttttacacaggcaagcctggctacaagctctgcatgcgactgcatcttcagcttccaactgcgcaacgctgtgccaactatatcagcttattcgtgcatacaatgcaaggggagtatgacagtcatctgccctggccgttccaggggactatacgtttgactatcctggaccagagcgaggcaccagttagacaaaaccacgaggagattatggacgcaaagcctgagctgctggccttccaacggcctactatacctcggaatccaaagggattcggatacgtgacctttatgcacttggaagccctaaggcaacgtacctttatcaaggatgacaccttgctggtgagatgtgaagtcagcacacggttcgatatgggaagtttgaggagggagggatttcaaccccgaagtacggacgccggagtgtag

SEQ ID NO: 244184 - DNA, 2013 bp, synthetic construct
  misc_feature 1..2013: note = Description of Artificial Sequence: Synthetic coding sequence
  source 1..2013: mol_type = other DNA
atgtcatcagggaaaagcgccaggtataatcggttttccggtggcccatccaacctccccacgcctgacgtgacaaccggaactagaatggagactacattcggacctgccttctcagctgtgaccacgatcacaaaagctgacggcaccagcacgtacaaacagcactgtcgcacccctagctcctctagcacgcttgcctatagccctcgggatgaggaggattcaatgccccctatttccactcctcgaaggtccgatagcgccatctctgttaggtcactgcactcggaatccagtatgtcgctccgatcaaccttttctctcccagaggaggaggaggagccggaacctctcgtctttgccgagcaacctagcgtaaagttatgctgccagctgtgttgtagtgtgtttaaagatcctgtgatcacaacctgtggccacaccttctgccgcagatgcgccctgaagtcggaaaaatgccccgtagacaatgtgaagctgacagtggtggtcaacaacatagcagtcgccgagcaaattggcgagctgttcatacactgcagacatggatgtagagtcgctgggtcaggtaagccacctatttttgaggtggacccgcgtggctgcccattcacgataaagttgtccgcgaggaaggaccacgaggggagctgtgactaccggccagttcggtgtccaaacaatccgtcttgcccgccattactacgcatgaacctggaggctcacctgaaggagtgcgagcacatcaagtgcccccattctaaatatggatgcacattcattggaaaccaagatacgtacgagactcatctggagacatgccgcttcgagggtctgaaggaattcctgcagcagaccgatgatcgatttcacgagatgcacgtggctctggcacagaaagatcaggagatcgcttttctccgctccatgttggggaagctgagcgagaaaatagatcaattggaaaaaagcctggagctaaagttcgatgtgctcgacgagaatcaatctaaactgtccgaggacctgatggaatttaggagagatgcgtccatgctgaatgacgagctcagtcacattaatgctcgcctgaacatgggcatcctgggctcctacgatccccagcagatttttaagtgcaagggtacatttgtcggtcatcagggtcccgtgtggtgtctatgcgtgtattctatgggcgatttactgttcagcgggagtagtgataaaactattaaggtctgggacacttgcactacatacaaatgtcaaaaaaccctcgagggccacgatggaattgtgttagcactttgcatccaggggtgcaaactgtacagcggaagcgccgactgcaccattatcgtgtgggatattcaaaatttgcagaaagtcaatacaatcagggcacacgacaatcctgtatgtactctcgtgtcctcccataacgtgctgttctccggcagtttaaaagcaataaaagtgtgggacatcgtgggcactgagctaaagctgaagaaagagcttacagggttgaatcactgggtgcgggcacttgtcgctgcacagtcctacctgtatagtgggagttatcagactatcaagatatgggacatcaggaccctggactgtatacacgtgctgcagacgtccgggggatctgtctacagcatcgccgtgactaatcaccacatcgtatgtgggacttatgagaatttaattcacgtatgggacattgaaagtaaagagcaggtgcgaacgctgaccggccacgtgggaactgtttacgctttggccgtaataagtacacctgaccagaccaaggtctttagtgcaagctatgacaggtccttgagagtctggtccatggacaacatgatttgcacgcaaactctgctgcgtcaccagggcagtgttactgcgttagctgtttcaaggggccgtttattttcaggggcagttgactccacagtgaaggtgtggacctgttag

SEQ ID NO: 244185 - DNA, 2115 bp, synthetic construct
  misc_feature 1..2115: note = Description of Artificial Sequence: Synthetic coding sequence
  source 1..2115: mol_type = other DNA
atggcccgtgagcttcgagccctccttctttgggggcgtagattgaggcctttgctgcgcgcacctgcactagccgcagtgcccggtgggaagcctatcctctgtcctagacgcacaaccgctcagctggggcctcgcaggaaccccgcatggtctcttcaggcaggaagactgttttcgacgcagacagcagaggataaggaggagcccctgcattcaattatcagcagtaccgagtctgttcagggatctacatcaaagcatgagtttcaagctgagaccaaaaagctgctggatatcgttgctaggtcactatatagtgagaaggaagtcttcatcagagagcttatttctaacgccagtgacgccctcgagaaactcaggcacaagctggtgagtgacgggcaggccttaccagagatggagatacacttgcagaccaatgccgaaaagggtacgatcaccattcaagacacaggcatcggcatgactcaggaggagctagtgagtaacctcgggaccattgccaggagcgggtctaaagccttcctggatgcattacagaaccaggccgaagccagctctaagattattgggcagtttggcgttgggttttactcggccttcatggtagctgatcgtgtcgaagtgtattcgcgcagcgcagcgcctgggtccctgggatatcagtggctttcggatggctctggtgtcttcgagatcgcagaggcatcaggagtgaggaccggaactaagatcataatccatctgaagtccgactgcaaggagttctccagcgaggcccgtgtgagagatgtggttaccaagtattcgaacttcgtttcattccctctttacctgaatggtagacgcatgaataccctgcaggccatctggatgatggaccccaaggatgttcgggagtggcaacatgaagaattctaccggtatgtggctcaagcccacgacaagcccagatacacgttacattacaagaccgacgcacccctcaatatacggagcattttctatgtgcctgatatgaagccctcaatgttcgatgttagccgcgagttgggaagtagcgtggccctatacagccgaaaagttctcatccagaccaaagctaccgatattctgcccaaatggttacggttcattcggggagtcgtcgattccgaagacatccctctcaatctatcccgggaactcctccaagagtccgctctgatccgtaagttacgggacgtgctgcaacagagattaatcaagttcttcattgaccagagtaaaaaagacgccgaaaaatacgcgaaattcttcgaagactacggtctcttcatgcgtgaaggaatagtgactgcaactgagcaggaagtaaaggaagatattgccaagctgcttaggtatgagtcgtccgccctgccttctggccagcttacctcactgagtgagtatgcatcccgcatgcgtgctgggactcgaaatatttactacctgtgcgccccaaatcggcacttggccgaacacagtccctactatgaggcaatgaaaaagaaagacactgaggtcctgttctgtttcgaacagtttgatgaactgaccttgctgcacctacgggagtttgataagaaaaaactcatatccgtggagaccgacattgtggtagatcactataaggaggagaagtttgaggaccgctcccctgcggcagaatgcctcagcgagaaggagacggaggagcttatggcatggatgaggaacgtgctcggaagcagggtcacaaatgtgaaggtgaccctgcggcttgatacgcaccccgctatggttacggttctggagatgggggctgccagacacttcctgcgcatgcaacaactggccaaaacgcaagaggagagggcacaactgctgcaacctactcttgagattaacccaaggcacgccctgataaagaaattaaatcaactgagggctagtgaacctggcctggcccagcttctggtcgatcaaatctatgagaatgcaatgattgccgctggtctcgtggacgacccacgtgcgatggtcgggaggctgaacgaactccttgtgaaagccctggagcgccactag

SEQ ID NO: 244186 - DNA, 1956 bp, synthetic construct
  misc_feature 1..1956: note = Description of Artificial Sequence: Synthetic coding sequence
  source 1..1956: mol_type = other DNA
atggcccgagagctgcgggctctcctattgtggggacggaggctgcggcctttgttacgcgcaccggcactagcagcggtgccgggaggttctacttctaaacatgagttccaagcggagacaaagaagttgctcgatattgtggctcgcagtctgtattccgaaaaggaggtcttcattagagagcttatctctaatgctagtgacgctctggagaagctgcgtcataaactggtcagcgatggtcaggcactgcccgagatggagattcacctacaaaccaacgctgaaaaaggaacaatcaccatccaagatactgggatcgggatgacacaggaggaacttgtgtccaacctcggcactattgcacgttcaggctccaaggccttccttgatgccctccagaaccaggccgaggcgtcatctaagatcatcggacaatttggcgtgggcttctactcagcttttatggtggccgatcgcgtggaagtttatagcagaagcgcagccccagggtcactgggataccagtggttatctgatggatcaggggtgtttgagatagcggaggcctcaggtgtgagaacgggaacgaagatcatcatacacctgaagtcagactgtaaagagttttccagtgaggccagagtgcgggatgtggtgaccaaatattctaatttcgtgagttttcccttatatctgaacggcaggcgaatgaatacactgcaggccatctggatgatggatcctaaggacgtcagagaatggcaacacgaggagttctaccggtatgtggcgcaagctcatgataagcctagatacactttgcattacaagaccgacgctcctctgaatattcggtccatcttttacgtgcccgatatgaaaccttcaatgtttgatgtcagccgagagctgggctcctccgtggctctgtactccaggaaagttctcatccagacgaaagctactgatattctgcctaaatggctccgattcatcagaggcgtcgtagactccgaggatattcccctgaacctctctcgtgagctcctgcaagagtcggccctgatacggaagctccgagatgttttgcagcagaggcttatcaagttctttatagatcagtccaagaaagacgcagagaaatacgccaaattctttgaggactatggactctttatgcgtgaaggtatcgttactgccacagaacaggaagtgaaagaggacatagccaagctactgaggtacgagtcatctgcacttccctctggccagctgaccagcctgagtgagtacgctagtcgcatgagagccggaacaaggaatatttactatctgtgcgctccaaaccgacatttggctgaacactctccgtattacgaggccatgaaaaaaaaggataccgaggtgctgttctgctttgagcagtttgacgaactaaccctgctccatctgagggagttcgataaaaagaaactcatttctgtcgaaactgacatcgttgtggatcactacaaggaggagaaatttgaggacagaagcccagccgcagaatgcttgagtgagaaagaaaccgaagagctaatggcttggatgaggaacgtattggggtcacgggttaccaatgtaaaggtgaccctcagactcgatacccatccagccatggtaacagtccttgagatgggcgcagctaggcactttctcagaatgcagcaacttgcaaaaacacaggaagaacgggcacagctactgcagcccaccctggaaataaatcctaggcatgcgctgatcaaaaagctgaatcagctgagagcgtctgagcccggactggcccaactcctggtggatcaaatctacgagaacgcaatgattgcagcagggctggttgatgatccgcgtgccatggttgggagactcaacgaactgcttgtgaaggccttggagcgccattag

SEQ ID NO: 244187 - DNA, 1911 bp, synthetic construct
  misc_feature 1..1911: note = Description of Artificial Sequence: Synthetic coding sequence
  source 1..1911: mol_type = other DNA
atggagggacgcggtccatacagaatctacgacccaggtggttccgtgccatctggggaggcctcagccgcattcgagcgactcgtaaaggagaactctagactgaaggaaaaaatgcagggcataaaaatgctgggcgagttactcgaggagagtcagatggaagccacccggctgagacaaaaggctgaagagcttgtcaaggacaacgaacttctgcccccaccttctccgtcacttggcagttttgaccccctcgctgagctcactgggaaagatagcaacgtgacagcctcacccactgcacccgcttgcccatccgataagccagccccagtgcagaaaccacccagctcaggcacatcttccgaatttgaagttgtgacacctgaggaacagaactcccccgagtccagctcacacgccaatgctatggctctcggcccattgccccgagaggacggcaacctgatgcttcacctgcaacggctcgagaccacgctctccgtgtgcgccgaggagccagaccacggtcagctcttcactcacctcgggagaatggccttggagtttaataggctggctagcaaggtacataagaacgagcagcggacatccattttgcagaccctttgtgagcagttgcgaaaggaaaacgaggccctcaaagccaaacttgataagggacttgaacaacgcgaccaagctgccgaaagacttcgagaggaaaacctcgagctcaagaagctgttgatgtctaatggaaataaggagggggcttctggcaggccaggctcccctaaaatggaaggcaccgggaagaaagcagtggccggacaacagcaggctagcgtgactgccggtaaagtgcctgaggtcgtggcccttggcgcagccgagaaaaaagtgaagatgctcgagcaacagcgctctgaattgcttgaagttaataaacaatgggaccaacacttcaggtctatgaaacagcagtacgagcagaaaattacagagctacgacagaaactggctgacctgcagaaacaagtgacagacctggaggcagaaagggaacaaaaacagcgagattttgaccgaaaactactactagctaagtcaaagatcgagatggaagagacagacaaagaacaactgactgccgaagctaaagaactgaggcagaaggtcaagtacctccaggaccagttaagccctctgacgagacagagagaataccaggagaaagaaattcagaggcttaataaggcacttgaggaggcattatccatccagactcccccaagcagccctcctaccgcttttgggagtccggagggggcaggcgcacttttgcgaaagcaagaactggtcactcagaacgagctactgaagcagcaagtcaagatcttcgaagaggactttcagcgagaacgctcggaccgagaaagaatgaacgaagaaaaggaggagctgaaaaaacaagtggaaaaacttcaggcccaggtgactctctcgaacgcccagttaaaggccttcaaggacgaagagaaggctcgggaagcattgagacaacagaagagaaaagctaaggcttccggggaacggtatcacgtggagccacatccagagcatctgtgcggagcctacccctacgcctatcccccaatgccggctatggtcccccaccatggattcgaggactggagccaaattagatacccccctccacctatggctatggagcaccctcctcccctccccaacagtcgcctctttcacctaccagagtatacctggcgcctgccttgtggcggagttcggaatccaaaccagtcctcccaggtgatggaccctccaaccgcacggcctaccgaacccgaatctcctaagaatgaccgtgaaggccctcagtag

SEQ ID NO: 244188 - DNA, 1911 bp, synthetic construct
  misc_feature 1..1911: note = Description of Artificial Sequence: Synthetic coding sequence
  source 1..1911: mol_type = other DNA
atggagggaaggggtccttacagaatctacgaccctgggggatccgtgccttcaggggaggcttccgccgcttttgaacgcttggttaaagaaaacagccggctgaaagaaaagatgcagggtattaagatgttgggcgagcttctagaagaatctcaaatggaagccacccgccttcgtcagaaggccgaagagctggtgaaggataatgaactgctacctccacccagcccttcattgggttcgtttgaccccttggcagagttaactggcaaggattccaacgtgacagcttctccaacagccccagcctgtcccagcgataagccagctccggtccaaaagccaccttccagcggaacttcatccgagttcgaagtggtaacaccagaagagcaaaacagccctgagagttcctcccacgcgaatgctatggccttgggaccgctcccacgtgaggatgggaaccttatgttgcacctgcagcgcttggagacgacattgagcgtctgtgctgaggagcctgaccatggccagctgtttacccatttggggagaatggcgctggaatttaaccgattagcaagcaaagtgcacaaaaatgaacagcgcacttccatcctacaaacattgtgtgaacagctgagaaaagagaacgaggctctcaaggccaaactggacaaagggctcgaacagcgagaccaggctgccgaacgcttaagagaggagaacttggaactcaaaaaattgctcatgtctaacggtaacaaggaaggcgcttccgggagacctggatctccaaagatggaaggaaccggtaaaaaggccgtcgcagggcagcaacaggctagtgttacggccggaaaggtgcccgaggtcgttgcgctgggtgcggctgaaaagaaggtgaagatgttggaacagcaaagaagtgaactgctcgaggtcaacaaacagtgggaccagcactttcgctccatgaaacaacagtacgaacagaaaattacggaattgcggcagaaacttgccgatcttcagaagcaggtcaccgatctcgaagctgagcgagaacagaagcagagagactttgatagaaaattactgctcgccaagagtaaaatagagatggaggaaaccgacaaggagcaactcaccgcagaggctaaggagttgcgccaaaaagttaaatacctccaggatcagctttcacccctcacacgacagagggagtaccaggaaaaggagattcaacggctgaataaggcactggaagaggcactaagcatacagacccccccttcgagcccacccaccgcgttcggcagtcctgagggagcaggtgcccttttacggaagcaggagttggtcacccagaacgaattactgaaacagcaggtgaaaatctttgaggaagacttccagagggagcgcagcgaccgggagagaatgaacgaagaaaaagaagagctgaagaaacaggttgagaagctgcaggctcaggtaacgttgtctaacgcacagcttaaggctttcaaggacgaggagaaagcacgggaagccctgcggcaacagaaacgcaaggctaaagcaagcggcgaaagataccacgttgagccacacccggaacacctgtgtggagcgtatccctatgcctacccccctatgccagcaatggtgccccatcatggcttcgaggactggagccagataagataccctcctcccccaatggccatggaacacccacctcctttaccaaattctcgactatttcacctgccagagtacacctggcggttgccctgcggtggagtgcggaaccctaaccagtcatcccaagttatggacccaccaactgcacgacccacagagcctgagagcccaaaaaatgatagagagggaccacaatag

SEQ ID NO: 244189 - DNA, 1590 bp, synthetic construct
  misc_feature 1..1590: note = Description of Artificial Sequence: Synthetic coding sequence
  source 1..1590: mol_type = other DNA
atgttgggagaactgctcgaagagagccaaatggaggctacgcgactgaggcagaaggctgaggagctggtgaaggataatgaattacttccccctccatccccgtcactgggctccttcgatcccctggccgaactaaccgggaaagactccaatgtgaccgcctcacccacggctcccgcttgtcccagcgacaagcccgcacccgtgcagaaaccaccaagttccggaacctcctccgagttcgaagtagtgactccggaggagcaaaacagtcccgagtctagctctcacgccaacgccatggcactggggcctctgccaagggaagatggaaatttgatgctccatcttcaacgcctggaaactactttaagcgtttgtgctgaggaacccgatcacgggcagctgtttacgcacctgggcaggatggctttggaatttaaccgcctggcttccaaggttcataagaacgaacagcgcacctctatcctacagaccctgtgcgagcagcttaggaaggaaaatgaggcccttaaggctaagctcgataaaggcctggagcagagagaccaggccgcagagcgattaagggaggagaatctcgagctgaagaagctgcttatgtccaacggaaacaaggagggcgcttcaggtcggcctggcagccctaagatggagggaacgggcaaaaaagccgttgccggtcaacagcaggcttccgtaacagctggcaaagtcccggaggttgtggcactcggtgctgcagagaagaaagtgaagatgctcgagcagcaacggtccgaactccttgaagtaaataagcagtgggatcagcactttcggagtatgaagcaacaatatgaacagaaaatcacagagcttcggcaaaagctagcagacctgcagaaacaggtcacagatctggaggcagaaagagagcagaaacagcgggattttgataggaaattgctcttagctaaatctaagattgagatggaggaaacagataaagagcagctgaccgctgaggcaaaagaacttagacagaaagtgaaatacctacaggaccaactgtcaccgctgacacggcagagagagtatcaggaaaaagagatccaaagactcaataaggccctggaagaagccctgagcattcaaacacctccgagcagcccccctaccgcattcggaagccccgaaggcgctggggctctgcttcggaaacaggagctagtgacccagaacgagttgctcaagcaacaggtcaagattttcgaagaggactttcaaagggagcggtctgatcgagaacggatgaacgaagaaaaggaggagctgaagaagcaggtggagaagttacaggctcaggtgaccttgagcaatgcacagcttaaagctttcaaagatgaggagaaggcacgggaggctctgagacagcagaaacggaaggcaaaacctgagtacacgtggcggctgccttgtgggggtgtgagaaacccgaaccagtcatcacaggtcatggacccgccaaccgcccgtcccaccgagcccgagtcacccaagaacgatagggagggtccgcagtag

SEQ ID NO: 244190 - DNA, 1908 bp, synthetic construct
  misc_feature 1..1908: note = Description of Artificial Sequence: Synthetic coding sequence
  source 1..1908: mol_type = other DNA
atggaaggccgtggcccataccggatttacgatccaggaggatctgtgcccagtggagaggcctcagccgcttttgagcgtctcgttaaagaaaattcccgcctgaaagagaagatgcagggaatcaagatgctaggcgagcttctggaggaatcacagatggaagcaacacgactgagacaaaaggcagaagagctcgtgaaggataatgagctgttaccacctccttcgccttcgctgggcagctttgatcctctggccgagctgaccggcaaggatagcaacgtgaccgcttctcccacagccccagcctgtccttctgacaagcctgcacccgtgcaaaagcctcctagctctggaaccagctcagaattcgaggtggtgactccagaggaacagaacagccccgagtcttctagtcacgccaatgcaatggctctgggcccactgccacgagaagacgggaacttgatgctgcacctgcagcggttggagaccaccttgtctgtctgcgccgaggagcccgatcacggacagctgtttacgcacctgggtcggatggctctcgaattcaataggctggcttccaaagtgcataaaaatgaacagcggacaagcatactgcagacactatgtgagcagctcagaaaagaaaacgaggccctgaaagccaagctggataaaggcctggaacaacgagaccaggctgcagaaaggttgcgagaagaaaacttagaactgaagaaattgttgatgagtaacggcaacaaagagggcgcttcaggtcgccctggctctccaaagatggaagggactggaaagaaggctgttgcaggccaacagcaggcctccgtgactgcaggaaaagtaccagaagtcgtggccctcggcgctgccgaaaagaaggtgaaaatgctggagcaacaaagatctgagttgcttgaggtgaacaagcagtgggaccagcactttcggtcaatgaagcagcagtacgagcagaagataaccgagctgagacaaaagcttgcagatctgcagaagcaggtcaccgacctggaggcggaacgggaacaaaaacagagggacttcgacagaaagctgctactcgccaaatcaaagatcgagatggaggaaactgacaaggaacagctgactgctgaagctaaagagcttaggcagaaggtcaagtatctccaggaccagctcagtcctctgactcgtcagcgggaataccaggagaaagagattcaacgcttgaacaaagcactggaggaggcgttgtcaatacagacgcccccaagctcaccgccaaccgcctttggctcccctgaaggcgctggtgcactgctgaggaagcaagaacttgtgactcaaaacgaactgttgaaacagcaggtcaaaattttcgaggaggattttcagagggagcgatccgatcgtgaacgaatgaacgaggaaaaggaagagctgaagaaacaagttgagaagctgcaggcgcaggtgacattatcaaatgcgcagcttaaggcgtttaaagacgaagagaaggctagggaggccctacgtcagcagaagagaaaagctaaggcctctggtgagcgctatcatgtcgagccacaccccgaacacctctgtggggcttatccttatgcctatcctcctatgccagcaatggtgcctcaccatgggttcgaggattggtctcagataaggtatccgcctcctccaatggcaatggaacatcccccacccctaccgaactctcggctcttccacctgcccgagtatacctggaggctgccgtgcggaggcgttcggaaccctaaccagtcatctcaggtgatggacccgcctacagccagacctacggaaccagaacccgctgatttacggctgccacggaattag

SEQ ID NO: 244191 - DNA, 1479 bp, synthetic construct
  misc_feature 1..1479: note = Description of Artificial Sequence: Synthetic coding sequence
  source 1..1479: mol_type = other DNA
atggaggccacacgcctgcggcagaaggccgaagagctggtgaaagataatgagctcctaccccctccttcaccctccctgggaagcttcgaccccctcgccgagctgaccggcaaagatagtaacgtaaccgcaagtcctacagccccagcttgtcccagcgataagcctgctcccgtgcagaagcccccaagttcaggcacctcttcagaatttgaagtcgtcacccccgaggagcagaatagcccagaatcctcgagccacgcgaatgccatggcgcttggaccactgcccagggaggatggcaacctgatgttacacctgcagcgtttggaaacaactctctcggtatgtgcagaagagccagatcacggccagctgtttactcatctgggaaggatggcactggaattcaaccggctggctagcaaagttcataaaaacgagcaacggacaagcatcctgcagaccttatgcgaacaactgcgtaaggaaaacgaagccctgaaggcaaagctggataagggactggaacaaagagatcaggcagctgaaagattacgggaagagaacctggaactcaagaaactcttgatgtcaaatgggaacaaggagggagcgtccggcaggccgggtagccctaagatggaaggaaccggtaagaaagcagtggcaggacagcaacaggcaagcgtgacggccggaaaagtgcccgaagttgtcgctcttggcgctgccgagaagaaagtgaaaatgctggaacagcaaagatctgagttattggaggtcaacaaacagtgggatcagcatttccgttctatgaagcagcaatacgagcagaagatcaccgaactgcggcaaaagctggcggatctccagaaacaggtgacggatctggaagccgaaagagaacaaaaacaaagagacttcgatcggaagctcctgctggcaaaatcaaagatcgaaatggaggaaactgataaagaacaactcaccgcggaggcaaaggaactccggcagaaggtcaaatatctacaggatcaactgagccctctgactagacaaagggaataccaggagaaagagatacagaggttaaataaggcgttggaggaggcattgagtatccaaaccccacctagctccccacctacagctttcggttctcccgagggtgctggggctctcctgcgtaagcaggaactggtaacacagaacgaactcttgaaacagcaggtcaagattttcgaggaggattttcagcgagagcggtccgatagggagcgtatgaatgaggaaaaagaagaactgaaaaaacaagtggagaagctccaggctcaagttacactctccaacgcccagcttaaggcatttaaagacgaagagaaagcccgtgaagctttacggcaacaaaagcgtaaggccaaaggaacccatagaggctgcccccgtcatctgcccgagcggaaagttaaatag

SEQ ID NO: 244192 - DNA, 435 bp, synthetic construct
  misc_feature 1..435: note = Description of Artificial Sequence: Synthetic coding sequence
  source 1..435: mol_type = other DNA
atggaaggtcggggaccctatagaatctatgatcccggtgggtctgttccctccggggaggccagtgcggcttttgaacgattggtcaaagaaaatagccgattgaaagagaaaatgcaggggattaaaatgttgggtgaacttttggaagaaagtcaaatggaggccactagactgaggcagaaggctgaagagctcgtgaaggacaacgagctcctgccccctccatcaccttctctaggctcattcgacccacttgctgaattgaccggtaaggatagtaacgtgactgccagtcctaccgctccagcctgtccatctgacaagcctgctccagtgcagaagcccccaagcagtggcacctcctctgaattcgaagtggtgacaccggaggagcaaaattcaccagagtcgtcttctcacgcgaacgcctag

SEQ ID NO: 244193 - DNA, 1752 bp, synthetic construct
  misc_feature 1..1752: note = Description of Artificial Sequence: Synthetic coding sequence
  source 1..1752: mol_type = other DNA
atggaagccaccagactcaggcaaaaagcggaagaattagtgaaggataatgaactgttgccaccaccttctccttccctgggcagtttcgatcccctggcagagctaaccggcaaagactcgaatgtaacagctagccccactgcacccgcttgtcccagtgacaagcccgcacctgtgcaaaaacctccttcatctggaacctcaagcgaattcgaagtcgtaaccccagaagagcagaacagcccggaaagctctagtcacgccaacgctatggccttaggacccctgcctcgtgaagatggtaacctgatgttgcacttacagcgccttgaaacgactctctccgtgtgtgcagaggaacctgaccatggacagctgtttacccacctgggacggatggcactcgagtttaatcgtttagcaagcaaggtacataaaaacgaacaaagaaccagcatcctacagacactatgcgaacagttgcgcaaagaaaacgaagctttgaaagcaaaacttgataagggcctggaacagagagatcaggccgctgagcggctacgcgaagaaaacctggagcttaaaaaactgctaatgtcaaacggcaacaaagaaggagctagcggtcggccaggaagtcccaagatggaaggcaccggaaagaaggcggtggcaggacagcagcaggccagtgtgaccgctggaaaagttcccgaggtggtggcgcttggcgctgccgagaagaaagtgaagatgttagaacagcagcgtagtgagctgctggaggtcaataagcagtgggatcagcacttcaggtcaatgaagcaacaatatgagcagaagatcacagagctgcgccaaaagttggctgacttacagaagcaggtcacagatctagaagccgagagagagcagaaacagcgcgattttgaccggaaattgctgctcgccaaatctaagatcgagatggaagaaacagacaaggaacagctgacagccgaggcaaaggaattgcgtcagaaagtgaagtatcttcaggatcagctatctcctctaaccagacaacgcgagtatcaagagaaagagatccagcggttgaacaaagcgctcgaagaggctctgtcaatccaaacacctccatctagcccccctacagcattcggctccccggagggcgcaggagccctgcttagaaaacaagaactggtcactcaaaatgagttgctcaagcagcaagtaaagattttcgaggaggacttccagcgcgagaggtcggaccgggaacgaatgaatgaggaaaaagaagaactgaaaaaacaggtggaaaagctgcaggcacaggtgacccttagcaatgcccaattgaaagcttttaaggacgaagagaaggctagggaagccctgagacagcagaaaagaaaggccaaagcttccggcgaaagatatcatgtcgaaccccatcctgaacacctgtgcggtgcctatccctacgcataccctccaatgccggctatggtcccccaccacggcttcgaggattggagccagatccgttatccgccacccccaatggctatggaacatcctcccccattgcccaatagcaggctcttccatttacctgagtacacatggcggctgccctgtggtggcgttaggaatccaaaccagagttcacaagtcatggacccgcctactgccagaccaaccgagcccgagtccccaaagaacgatagagaaggcccacagtag

SEQ ID NO: 244194 - DNA, 402 bp, synthetic construct
  misc_feature 1..402: note = Description of Artificial Sequence: Synthetic coding sequence
  source 1..402: mol_type = other DNA
atggagggtcgcggtccatacagaatttacgatcccggagggtctgttccttccggggaggcgtccgcagcattcgagcgcctggtgaaagaaaattctcgactgaaagagaagatgcaaggaattaagatgctcggcgaactgttagaggaatctcagatggaggccacccgcctgcgccaaaaagccgaggaacttgtaaaggataatgaactcttgccacccccttccccttccctgggctcatttgatcccctagcagagctgaccgggaaagatagtaatgtcaccgccagccccactgccccagcttgtcctagtgacaaaccggctcccgtccaaaagcctccttctagtggcacatcgagcgaattcgaagtggtgacacccgaagaacagtag

SEQ ID NO: 244195 - DNA, 1911 bp, synthetic construct
  misc_feature 1..1911: note = Description of Artificial Sequence: Synthetic coding sequence
  source 1..1911: mol_type = other DNA
atggagggcaggggaccctacaggatctatgaccctggcggaagcgtgcccagcggggaggcgtctgctgcatttgaaaggttagtcaaggaaaactctagactaaaagagaagatgcagggcattaagatgctcggagagctacttgaagagtcccagatggaggcaacacgtctgcgccagaaagctgaggagctcgtgaaggataacgaactcttgccgccaccctctccgagccttgggagtttcgatcccctggcagaactaaccggcaaggactccaatgtcactgcatcaccgactgctcctgcttgcccatcagataagcccgctcccgtgcagaagccccctagctcaggtacttccagcgaattcgaagtcgtaactcctgaggaacagaactctccggagtcatcaagccacgcgaatgccatggccctgggtcctctacccagagaggacggcaacctgatgctccatcttcagcggctggagactacactgtccgtgtgcgccgaggagccagatcatggtcagttgtttacacatctgggacgaatggcactggaatttaacagacttgcttcaaaagttcataaaaacgagcaaaggacatctatcctacaaaccctgtgtgagcaactcagaaaggagaacgaggccctgaaggccaagctcgataagggcctagagcagagggaccaggcagccgagagactgcgagaggaaaatcttgagttgaagaagcttcttatgtccaacggaaacaaggagggagcctccgggaggccagggtcccctaagatggagggcacaggcaagaaagcagtcgctgggcagcagcaggcttctgttacagccggaaaggtgcctgaggtcgtcgcccttggtgccgcagagaaaaaggtgaaaatgttggagcagcagagatctgagctactggaggtaaacaaacagtgggatcaacacttcagatccatgaagcagcagtacgaacaaaagattaccgagctgcgccaaaagttggccgacttgcagaaacaggtgacagacctggaggctgagcgcgaacagaagcaacgggatttcgatcgcaagttacttctcgcaaaaagtaagatagagatggaggagactgataaggaacagcttactgctgaagctaaagaactgaggcagaaagttaaataccttcaggaccagctttctccgctgactcggcagagagagtatcaagaaaaggagattcagcgcctcaataaagcactggaagaggcgctgagcatccagactcccccttcgagtcctccaaccgcttttggaagtccggaaggcgctggcgcacttctgcgaaaacaagagctggtcactcagaacgaactattgaaacagcaggttaaaatctttgaagaggacttccagcgagagcggtctgacagagagaggatgaatgaagaaaaagaggaacttaaaaagcaagtggaaaagttacaggctcaagttaccctgagcaatgcacagctgaaagcatttaaagatgaggaaaaggcaagggaggcattaaggcagcagaagcgaaaagcaaaggctagcggggagagataccacgtggagccacacccagagcacttgtgtggggcatatccttacgcatatccacctatgccagccatggttcctcaccacggctttgaggattggagtcaaatccggtaccctccccctccaatggctatggagcacccgcctccgttacctaactctagactgtttcatctccccgagtacacttggaggctcccttgtggcggagttcgaaacccaaatcaaagttcccaagtgatggatccacccactgcgaggcctaccgagcctgaatcccccaaaaatgaccgtgaggggcctcaatag

SEQ ID NO: 244196 - DNA, 774 bp, synthetic construct
  misc_feature 1..774: note = Description of Artificial Sequence: Synthetic coding sequence
  source 1..774: mol_type = other DNA
atggaagctacccgcctgaggcagaaggcagaagagttggtcaaggataatgagctgcttcctcctccatcccccagtctgggatctttcgacccactggctgaattgaccgggaaagatagcaacgtgaccgcgagccccactgcgcctgcctgtcctagtgacaagcccgctcctgtgcagaagccaccgtcttcaggcacatcctcagaattcgaagttgtcacccctgaagagcagaactctcccgagagctccagtcatgccaacgctatggcactcggtccacttccccgtgaagacggcaatctcatgctgcaccttcagcgcctcgagacaaccctcagcgtttgcgccgaagaacctgatcacggacagctattcactcacctgggacgcatggctttagagtttaaccggctggcaagtaaggtccacaagaatgagcaacgcaccagcatcctgcagaccctgtgcgaacagctcaggaaggaaaacgaagctctcaaggctaagctcgataagggcctcgaacaacgtgaccaggctgctgagcggctccgtgaggaaaatctggagctcaaaaaattgcttatgtccaatggaaacaaagagggggcatccgggagacctggtagccctaaaatggagggcaccgggaaaaaagccgtagcagggcagcagcaggccagcgttacagctggcaaagtcccggaggtcgttgcactgggcgcagctgagaaaaaggtgaaaatgctcgagcagcagcgctag

SEQ ID NO: 244197 - DNA, 1911 bp, synthetic construct
  misc_feature 1..1911: note = Description of Artificial Sequence: Synthetic coding sequence
  source 1..1911: mol_type = other DNA
atggaggggagaggtccctatcgcatatatgaccccggaggatccgtgccatcaggtgaagcgagcgctgcctttgaacgcttggtcaaggaaaatagccggctaaaagagaaaatgcaaggaattaaaatgcttggagagctgctcgaagagtcacagatggaagccacccgactccgccagaaagccgaagaactagtcaaggataatgagctgctccctcccccatcaccgtctttgggaagctttgatccgttggcagaattgacaggcaaggacagcaatgtgaccgcgtcccctaccgcaccagcttgcccgagtgataagcccgctcctgtccagaaaccaccatcatctggcacgtctagtgagttcgaggttgtgacgcccgaagaacagaattcccccgagtcctctagccacgctaatgctatggcactcggccctcttccccgagaggatggaaacctgatgttacacctacaacgcctggaaaccacattgagtgtctgtgcagaggagcccgatcatggacagttattcactcacctgggaagaatggcgctcgagtttaatagactggcttccaaagtacacaagaacgaacagagaaccagtattttacagacattgtgcgagcagctacgcaaagaaaacgaagctttaaaagctaagttggataaaggcttggaacagcgtgaccaggcggctgagcgcctgagggaagagaatttagaactgaagaaactactgatgagcaatggcaacaaggaaggcgcttctggtcgccctggaagccctaaaatggagggcacagggaaaaaagcggtcgctggacagcagcaagcgagcgtcactgcgggaaaggtgcctgaagtggtggccctgggagccgctgagaagaaggtgaagatgctggagcaacagagatctgaacttttggaagtgaataagcaatgggaccagcatttcaggtctatgaaacagcagtatgaacagaaaattacagagctccgtcagaagctggccgacttacagaaacaggtgacagacctggaagcagaacgcgaacagaagcagcgtgacttcgaccgtaaattgttactcgctaagtctaagattgaaatggaagagaccgacaaggaacagctgaccgctgaagccaaagagctaagacagaaggtcaaatacctccaggatcagctctcccccctgacaagacagagggagtaccaggagaaagagatccagagattgaataaggcacttgaggaggccctgagcatccagactccgccttcatccccacctacggcattcggctctcccgagggcgcaggagcattgctgcgaaagcaggagctagtcacccagaatgaacttctcaagcagcaagtgaagatctttgaagaggattttcagcgcgaaaggtccgatcgcgagaggatgaatgaagagaaagaggagcttaagaaacaagtggagaagcttcaagcccaggtgaccttgtctaatgcacagttgaaggcatttaaagacgaggagaaagccagggaagcactaaggcagcaaaaaagaaaagcgaaagcctctggggagcggtatcatgtggaaccccatcccgagcacctctgcggcgcttacccttacgcctacccgcctatgcctgccatggttcctcaccacggattcgaagactggtcccagattcggtatcctccgccacccatggctatggagcacccccctccgttacccaattcacggttgtttcatcttccggagtacacatggagattaccgtgcggaggtgtcagaaatccaaaccagtcttcccaggtgatggatccaccaaccgcccgtcccacggagcctgagtcacccaaaaacgacagagaaggccctcaatag

SEQ ID NO: 244198 - DNA, 1719 bp, synthetic construct
  misc_feature 1..1719: note = Description of Artificial Sequence: Synthetic coding sequence
  source 1..1719: mol_type = other DNA
atggagggcagggggccatatcggatttacgatccaggtgggagtgtaccaagcggagaggcctctgcggcttttgagcgtctagtgaaggagaacagtcgactgaaggagaagatgcaggggatcaagatgcttggggaacttctagaggagtcccagatggaagccactcgtttgcggcagaaagctgaggaactggtgaaagacaacgaattgctgcctcccccttctccatccctcggctccttcgacccactggccgaacttaccggaaaggatagtaatgttaccgcatctccaacggcaccggcttgcccaagcgacaagcctgcccctgtgcaaaagcctccatccagtggcacctcaagcgagttcgaggtcgtcactccagaagagcagaactcacctgaatcttcctctcatgccaatgctatggctctcggacccctgcccagggaagatggaaacctgatgttacatctgcaacgcttggagaccaccctgtctgtatgtgctgaggagcccgatcacggacagctgtttacccatctgggaaggatggccctcgaattcaaccggcttgcgtcaaaggtgcacaagaatgaacaaagaaccagcattctccagactctgtgtgaacagctgagaaaggagaatgaggccctgaaggccaagcttgataagggacttgaacagcgcgatcaggccgctgaacgtcttagagaagaaaatctcgaactgaaaaaattactaatgagtaatggcaacaaggagggtgcaagcggcaggccaggtagcccaaagatggaagggactggtaagaaggctgtggccggacagcaacaggcctcggtgaccgccggtaaagtgcccgaagtcgtcgcccttggggctgccgagaagaaagtgaagatgcttgagcagcagaggtccgaactcttggaggtgaacaagcagtgggatcaacatttccgtagtatgaaacagcagtacgaacaaaagatcactgagctcaggcaaaagcttgcagacctgcagaaacaggtaacggacctggaggctgaaagagagcaaaagcaaagagacttcgatcgaaagcttctacttgcaaagtccaaaattgagatggaggagacagataaggagcagctgacggcggaggctaaagaactccggcagaaagtgaagtatctgcaagatcagctatctcctctgacccggcagcgggaataccaggagaaagagatccagcgccttaacaaggcactcgaagaggcactgagtattcagaccccgcctagctccccccctacggcattcggatccccagaaggtgctggtgctctgttgcgaaaacaagaattagttacccagaacgagctgctgaaacagcaggtgaaaattttcgaagaggattttcagagggagaggtctgaccgtgagagaatgaatgaggaaaaggaagagctgaaaaagcaggtcgagaaactgcaggcacaggtgaccctgtccaatgcacagcttaaggcatttaaagatgaagaaaaagcacgagaggcactgaggcagcagaaacgcaaggcaaaaccggagtatacatggcggctgccttgcggaggggtgcgaaaccccaatcagtcgagccaggtaatggatcctccgactgccaggcccacagaacctgaatcgcctaaaaacgaccgggaagggccacagtag

SEQ ID NO: 244199 - DNA, 1908 bp, synthetic construct
  misc_feature 1..1908: note = Description of Artificial Sequence: Synthetic coding sequence
  source 1..1908: mol_type = other DNA
atggagggccgtggaccttacaggatttatgacccgggtggcagcgttccatccggagaggcaagcgcggcattcgaacgcctcgtcaaagaaaattcgcggctcaaggagaagatgcagggtattaaaatgctgggcgagctgctggaggaatcacagatggaagcgacgcgactcaggcagaaggccgaggagctggtcaaagacaacgagctgctgcctccacccagtccctcactgggcagtttcgacccgcttgccgagctgactggtaaggatagcaacgtgactgcttcacccactgctccggcttgcccctcagacaagccggctcccgtccagaagcctccttcttccggtacatctagtgagtttgaggtggtcacaccagaagaacagaactcacccgaatcatcctctcatgctaacgcaatggccctgggccctctgcctagagaggacggcaatctcatgctgcacttacagaggctagagaccactctctcagtctgtgcggaggaacctgaccacggacagctgtttacacacctaggtcgtatggccctggagtttaatcggcttgcgagtaaagtccataagaacgagcagagaaccagcattctgcagactctgtgcgagcaactgaggaaggaaaatgaagctctcaaggccaagctggataagggacttgagcaacgcgatcaagcagcagagcgtctccgcgaagaaaacttagaacttaagaagctcctcatgagtaatgggaacaaggaaggggcaagcggcagaccaggctctcctaaaatggaaggaacaggcaagaaagcagttgccggtcaacagcaggcatccgtcaccgcaggaaaagtgcccgaagtcgtcgccttgggtgctgccgaaaaaaaagtgaaaatgttagaacagcagcggtcagagctcctcgaggtcaacaaacagtgggaccagcactttcggagcatgaaacagcagtatgagcagaaaattacagaactacggcagaaacttgcagacctccagaaacaggttactgatctggaggctgaaagggaacagaaacagcgcgacttcgatcgtaagctcttgctggcaaaaagcaaaatcgagatggaggagacagataaggagcagttgacagccgaagccaaagaattgcggcagaaggtgaaataccttcaagatcagctttcccctctaacccgccagagagaatatcaggagaaagaaatccaacgactcaacaaggcattggaagaagcgctatccatacaaacaccacctagcagccctcccaccgccttcgggagtcccgaaggtgccggagcactactcagaaaacaggaacttgtcacccaaaatgaactgttaaaacagcaagtgaaaatattcgaggaggatttccagagagagaggagcgatagggagagaatgaacgaggagaaagaagaactgaaaaaacaggtcgaaaaacttcaagctcaggtcaccttgtctaacgctcagcttaaggccttcaaggatgaggagaaggcgagagaagcacttcggcagcagaaacgcaaagctaaagctagcggggaaagatatcatgtggagcctcatcccgagcacttgtgtggcgcttacccctatgcttatccgcctatgccggctatggtgcctcatcacggctttgaggattggtcccaaattcggtaccccccaccacccatggccatggaacatccgcctccgctgccgaacagtaggctattccatctgccagaatatacctggcggctgccctgcggcggtgtcagaaaccccaatcagtccagccaggtgatggatccccctacagctcggccaactgagcccgagcccgcagatcttcgcctgccaaggaactag

SEQ ID NO: 244200 - DNA, 1671 bp, synthetic construct
  misc_feature 1..1671: note = Description of Artificial Sequence: Synthetic coding sequence
  source 1..1671: mol_type = other DNA
atggaaggcaggggtccctaccgaatctacgaccctggcggaagcgtccctagcggagaggccagcgctgcctttgagcgtcttgtgaaggaaaactccagattgaaggaaaagatgcagggcatcaaaatgctaggagaactgctggaggagagtcagatggaggccacccgactgaggcagaaagctgaggaactcgtaaaggataatgagcttctccccccaccctctcctagcttgggctccttcgatcccctggctgagctgacaggaaaagactccaacgtcactgccagtcctacagcgcctgcctgtccttccgacaaaccagccccagtgcagaaacctcccagtagcggcacatcttcagagtttgaagtcgttactccagaggaacaaaactccccagaatcctctagccacgccaacgctatggccctagggccacttcccagagaagatgggaacctgatgttgcatctgcagaggctcgagaccactctctcagtgtgcgccgaggagcctgatcacggccagctgttcactcatctgggtagaatggccttggaatttaaccggcttgcatcgaaagttcacaaaaacgaacagcgaacttccattcttcagaccctttgcgagcagctgcgcaaagagaacgaggccctgaaggccaagctggataaaggcctggagcagagggatcaggctgcagaacgcctgagggaagagaatctcgagctgaagaagctgctgatgtccaatggtaataaggagggcgcttcaggccgacccggaagtccaaagatggagggcactggcaaaaaagctgtggccggtcagcagcaagcatccgttaccgcaggaaaagttcccgaagtagtggccctcggagccgctgagaaaaaagtgaaaatgcttgagcaacagcgtagcgaattgctggaggtgaataagcagtgggatcaacacttccgatctatgaagcagcagtatgagcagaaaatcaccgaactgagacagaagctagccgacctgcagaagcaggtcacggatctagaggctgagcgagagcagaaacagcgagactttgaccgcaagttgttgcttgccaagtcaaagatcgaaatggaagaaaccgacaaagaacagctaacagccgaggctaaggagttgcgacagaaggtgaagtacctccaggatcagctgagccccctgactaggcagcgcgaataccaggaaaaagagatacaaaggctgaacaaggctctggaggaagcgctgtcaattcagacacccccttccagtcctcctaccgccttcggttctcccgagggggcaggtgcactcctgcggaagcaagaattggtcactcagaacgaacttcttaaacagcaggtgaagatctttgaagaagacttccagagggagcgtagcgatcgagagcgaatgaatgaggagaaagaggagctgaagaagcaggttgagaagctgcaggcccaggtaaccctcagtaacgcacagctgaaggcctttaaggacgaggagaaggcgagggaagcgctgaggcagcagaaaaggaaggctaagtcgctgcaaaagatgaccgttaggggtctctccgagacaaggctgtgtcacctcgcccctccgtcgtcatgcagggcctcctag

SEQ ID NO: 244201 - DNA, 1797 bp, synthetic construct
  misc_feature 1..1797: note = Description of Artificial Sequence: Synthetic coding sequence
  source 1..1797: mol_type = other DNA
atgcaagggattaaaatgctgggagaactcctcgaggaatcacagatggaagcaactcggctgagacagaaagctgaagaactggttaaagataacgaattgctcccacctcccagtcctagtctcggatcttttgatccccttgctgaattaaccgggaaggattccaacgtgaccgcaagccctaccgcacctgcttgcccttctgacaagcctgcaccggtacagaagccaccaagtagtggcactagcagtgaatttgaggttgtcacgccagaagaacagaacagccccgagtccagcagccacgccaacgcaatggccttagggccactgcccagagaggatggtaacctgatgctgcacctgcagcggctagaaactacactgagtgtgtgcgctgaggaacccgatcacggtcaactcttcacgcacttaggacgaatggctcttgagttcaaccgcctggcctcaaaggtacacaagaacgaacagcgcacatcaatactccagactctctgtgaacagctgcgcaaggagaacgaggcacttaaggccaagcttgacaagggcctcgagcaaagagaccaggccgcagaacgcctgcgcgaggaaaatctggaactcaaaaagctcttgatgagcaacggcaataaggagggagccagcggacgaccgggatcccctaagatggagggaaccggaaaaaaggccgtggccggacagcagcaggccagtgtgacggcagggaaagtcccagaagtcgtggccttgggggcagcagaaaagaaggttaagatgttggaacagcagaggagcgagctgttagaggtgaacaagcagtgggaccagcattttagaagcatgaagcagcaatacgaacaaaaaatcaccgagctgcggcaaaagcttgcagacctccagaagcaggtgaccgatctggaagcagagcgtgagcaaaagcagcgtgatttcgaccgcaagctgctcctcgcaaagtctaaaatcgagatggaggagacagataaggagcagctgacagctgaggccaaggaattacgacaaaaggttaaatacctccaggaccagcttagtcctctgacacgccagagggagtaccaggagaaggagatacagcgactgaacaaagctttggaggaggccctgtcaattcagacacccccatccagccctcccactgcattcgggagtcctgaaggtgcgggagccctgctgcgcaaacaggaactagtgactcagaatgagcttctcaaacaacaagttaaaatctttgaggaagatttccagcgagaacggtcagaccgtgagaggatgaatgaagagaaagaggagctgaagaaacaggtggagaagcttcaagcgcaggttacacttagcaacgcgcagctgaaagcatttaaagacgaagagaaggctcgagaggccctgagacagcagaaacggaaggctaaagcatcgggcgagcggtaccacgtagagccacacccggaacacctctgcggcgcatatccatacgcttatcccccaatgcccgctatggtacctcaccacggcttcgaagattggagccaaattaggtatccaccccctcccatggcaatggagcacccgccaccgttgccaaacagtaggctatttcacctgcccgaatacacttggaggttaccttgtggtggggtgcggaaccccaatcagtcttctcaggtcatggaccctccaactgcaaggcctacggaacccgagtccccaaaaaatgaccgggaaggaccacagtag

SEQ ID NO: 244202 - DNA, 1542 bp, synthetic construct
  misc_feature 1..1542: note = Description of Artificial Sequence: Synthetic coding sequence
  source 1..1542: mol_type = other DNA
atgctcggggaactcctggaagagtctcagatggaggcaacaaggctgcgtcagaaagccgaagaattggtgaaggataatgagttgcttccacccccaagccctagcctgggctccttcgacccactcgcagaacttacaggaaaagatagcaatgtgacagcatcccctacggcccctgcctgtccttccgacaaaccggctccggtgcagaaaccgccttccagcggcacctcctccgaatttgaagttgtaacccccgaagagcagaactcccccgagtcttctagtcacgccaatgctatggcgttaggccctctgccccgtgaggacggcaatctgatgttgcacctgcagcggctggagacaaccctaagcgtttgcgcagaagagccagatcatggccaactgttcacccatcttgggcgtatggccctggaatttaatcgtctggcatccaaggttcacaagaatgaacagcgcacctccatattgcagaccctgtgcgaacaactcaggaaggaaaacgaggccctcaaagcaaagctggacaaagggctcgaacagagagaccaggccgctgagcgacttagagaggagaatcttgagctgaaaaagctgctgatgtctaacggtaataaggagggagcatcaggcaggcccggtagtcctaaaatggagggaactggaaaaaaagcagtggcaggacagcaacaggcctcggtcacagctggaaaagtcccagaagttgtggctctcggggcagcggagaagaaggtcaagatgctggaacagcagaggagcgaactcctggaagttaacaaacagtgggatcagcatttcaggtccatgaaacagcaatatgaacagaagatcacggagctaagacagaaacttgccgatttacagaagcaggtgacagacctagaagctgagagagagcagaagcagcgcgatttcgaccgaaagctgctcctagccaagagtaagatcgagatggaagagaccgacaaggaacaactgacggccgaggccaaagagctgagacagaaggtgaagtatttacaagaccagctaagccctctcacgaggcagcgggagtatcaggagaaggagatccagcgattaaacaaggcactagaggaggctctgagtatccagacacctccttccagcccgccaacagcttttgggtcacctgaaggggctggcgcactgctgcgtaaacaggagctggtgacacagaatgagctcctgaaacagcaggtgaagatttttgaggaggactttcagcgcgaacgctcagaccgggaacgtatgaatgaggagaaggaggaactgaaaaagcaggtcgaaaagttgcaggcccaagtaacccttagcaacgcccaactaaaagccttcaaagacgaggagaaagctcgtgaagccctaagacagcagaagaggaaggccaagtcgcttcagaagatgactgtccgaggtctaagtgagacccgactttgtcacctagctccaccaagttcctgtagggcctcatag

SEQ ID NO: 244203 - DNA, 1509 bp, synthetic construct
  misc_feature 1..1509: note = Description of Artificial Sequence: Synthetic coding sequence
  source 1..1509: mol_type = other DNA
atgctgggagaactgttggaagaaagtcagatggaggccacaagattacggcaaaaggcggaggaactcgtcaaggataatgagctcctgccccctccctcaccaagcctgggatcgttcgatcctttagccgaattgacaggcaaggatagtaacgttaccgcatccccaacagccccagcttgccccagcgataagccagccccagtgcagaagcctccttcaagtggaacaagttcggagtttgaggtcgtgactcccgaagaacagaactctccagaatccagcagccacgctaatgcgatggccctagggcctctacctagagaagacggaaatctgatgctgcatttgcagcgcctggaaactacgctgagtgtgtgcgccgaggagccagatcacgggcagctgtttacgcacctgggtagaatggccctggagtttaaccgtcttgcctccaaggtgcacaagaatgaacagaggacatccatcttacaaacactctgtgagcagctgcgcaaagaaaatgaggcccttaaggccaagcttgataaggggttggaacagagagatcaagccgctgaaagattgcgcgaagagaatcttgaactgaagaaactcttgatgtcaaacgggaataaggaaggagcgagcggcaggccagggagcccaaagatggaaggaacgggaaagaaagctgtggcaggacagcaacaggcgtctgttacggcagggaaggtgccagaagtagttgctttgggggcagccgaaaaaaaagtgaagatgctagaacagcagagaagcgagttgctggaggtgaataagcaatgggaccaacacttccgcagtatgaagcaacagtacgagcagaaaataactgagctgaggcaaaaattagcggacctccaaaagcaagtgaccgatttagaggcggagagggagcagaagcagagagactttgacagaaaactgcttctagctaagagtaagattgaaatggaagagacagataaagagcagctcactgccgaggcaaaggagctcagacagaaggtcaaatatctccaggatcagctcagccctctgacccgccagagggaataccaggaaaaagagattcagagattgaacaaggccctggaagaggcactgtctattcagacccctccaagtagccctccaacagccttcggctcccctgagggcgctggcgctctgctgagaaagcaggagctggtcacgcagaacgagctcctcaaacaacaggtcaagatcttcgaggaggactttcagcgcgaacgtagcgatcgagagcgcatgaacgaggagaaggaggaactgaagaagcaggtggagaagctacaggcccaggttacactgtcgaacgcacagcttaaggctttcaaggatgaggagaaggctcgggaggctctaaggcagcagaagagaaaagctaaagggacccaccgcggttgccctcgacacctgccagagcgcaaggtcaagtag

SEQ ID NO: 244204 - DNA, 1290 bp, synthetic construct
  misc_feature 1..1290: note = Description of Artificial Sequence: Synthetic coding sequence
  source 1..1290: mol_type = other DNA
atgtcgcgagaccctggaagcggcggatgggaagaagccccacgcgcagccgctgcgctatgtactctataccacgaggccggtcagagacttaggaggcttcaggatcaacttgctgctcgtgacgcccttattgccaggctgcgggcacgactggccgctctggaaggagacgccgctcctagcctcgtggatgcactgctcgagcaggtcgcacgttttagggagcagctccgccgacaagagggcggagctgccgaggctcagatgaggcaggagattgagaggttaacagagagactcgaggaaaaagaacgcgagatgcagcagctcctcagccagccccaacatgagcgtgagaaggaggtggtgttgctgcggcgttccatggctgagggggaaagggctagggctgccagcgacgtgctgtgtcgctctctcgcaaacgaaactcaccagctcagacggactctcaccgctacagcccatatgtgtcagcacctggccaaatgtcttgacgaacgccagcatgcccaacgtaatgtaggggagcgcagtccggatcagtctgagcacaccgatggacacacctcggtgcaatcagtcatcgaaaagctccaagaggagaataggttgctcaagcagaaggtgacccacgttgaggacctaaatgccaagtggcagcgctataatgcttcgagggacgagtacgtgagggggctgcatgcacaattgcggggtttgcagattccacacgaacctgagcttatgcggaaggaaataagccggctgaacagacagctcgaagagaagattaatgactgcgccgaggtgaaacaagagctggcagcttctagaaccgccagagatgccgcactcgaacgggtccagatgttggaacagcagatacttgcttacaaagatgattttatgagcgagagagctgatagggagagggcccagtcgcgaatacaggagttagaggaaaaggtggcttccctgttacatcaggtaagctggcgccaggattctagagagccagatgcgggacggatccatgcaggatccaaaaccgccaagtacctggccgctgatgcactcgaactgatggtaccagggggatggagacctggcactggcagtcaacagcccgaaccccctgctgaggggggtcacccaggggctgcgcagagagggcagggagatcttcagtgcccacactgtctgcagtgtttttctgacgagcaaggcgaagaacttctcaggcacgtggcggagtgttgtcagtag

SEQ ID NO: 244205 - DNA, 969 bp, synthetic construct
  misc_feature 1..969: note = Description of Artificial Sequence: Synthetic coding sequence
  source 1..969: mol_type = other DNA
atgcaacaattactctctcaaccgcagcacgaaagggagaaagaggtcgtgctcctgcgcagatccatggctgagggagaaagagccagggccgcatcggatgtcttgtgtcgttctctcgccaacgaaacacaccagctcagaagaacacttactgctactgcacatatgtgtcagcatctggctaaatgtttagatgagagacagcacgcccagaggaatgtgggagagagatctcccgatcagtctgaacacactgatggacatacatcagttcagtcggtgattgagaagttgcaggaggaaaaccgtttgctgaagcagaaggtcactcatgtggaagatcttaacgctaagtggcagcggtataacgcaagccgagatgagtacgtacggggattacacgcacagttgcggggtctgcagattccccacgagcccgaactgatgcggaaggaaatctccaggctgaatcgacagctggaagagaaaatcaatgattgcgctgaggtgaagcaggagctcgccgcaagcaggaccgcccgagatgctgccctcgagagagtccaaatgctcgagcagcagatactcgcatataaggatgatttcatgtctgagcgcgcagatagggaaagggcccaatcccggatacaggaactggaagagaaagtcgcgtctctattacaccaagtcagctggcgccaagatagtagggagccagacgccggtagaatacatgcagggtctaaaacagctaagtatctggcagctgatgctcttgagctgatggtgcctggcggttggcggccaggcaccggcagtcagcagccagagccccctgctgaaggcggacaccctggagctgctcagcgagggcagggagatctgcagtgtccacattgcttacaatgttttagcgacgagcagggcgaggaacttctgaggcacgtggccgagtgctgtcaatag

SEQ ID NO: 244206 - DNA, 837 bp, synthetic construct
  misc_feature 1..837: note = Description of Artificial Sequence: Synthetic coding sequence
  source 1..837: mol_type = other DNA
atggccgaggcccgatctcagccttctgcgggaccccagctcaacgcactccctgatcacagcccgctgctgcagcctggccttgcagcccttcggagaagagcaagagaagcgggagtcccactggcccctctacctctgaccgattcatttctactgaggtttctcagagcgagggatttcgatcttgacttggcctggagactcctgaaaaactattacaagtggagagctgagtgcccagaaatctctgcagacttgcacccacggagcataataggactcctaaaagccggataccacggtgtgttaagaagcagagacccaactggttcaaaggtgctcatttaccggattgctcattgggacccaaaggtgttcacagcttacgacgtgttcagggtctccttgatcacaagcgagctgatcgtgcaggaagtggaaacacaacggaacgggatcaaggcaatttttgatttggaggggtggcagttctcccatgcattccaaataactccttccgtcgccaagaagatcgcggcagtactgaccgacagttttccgctgaaggtcagggggatccatcttatcaacgagccagtcatctttcatgccgtcttttctatgatcaaaccgtttttgactgagaagattaaggagcggatacacatgcacgggaataactacaaacagtccctgctgcagcattttcccgatatattacctctggagtacggaggggaagagttcagtatggaggacatttgtcaggagtggaccaatttcataatgaagagtgaagactacttgagttcaatatctgagagcatacagtag

SEQ ID NO: 244207 - DNA, 2361 bp, synthetic construct
  misc_feature 1..2361: note = Description of Artificial Sequence: Synthetic coding sequence
  source 1..2361: mol_type = other DNA
atgaccagcatcttccatttcgctattatattcatgctgattctgcagatcagaatccagctgtccgaggaaagcgagtttctcgtagacagatctaagaatgggctgattcatgttccaaaggacttgtcacaaaaaactaccattctgaacatttctcagaactacatcagtgagctttggacctcagatatattgtctctcagcaagttgcgcattctgattatctctcacaatcgtatccagtatttagatatctctgtgttcaagttcaaccaggagctggaatacctggatctttcccataataaactggtaaaaatctcgtgccatcccaccgtgaacttgaaacatctcgatctgtccttcaacgccttcgacgcccttcctatctgcaaggagttcgggaacatgtcccaactgaagttcctgggactgagtaccacccatcttgaaaagagctcagtcttgcccatcgcacatcttaacatctcaaaggtccttcttgtcctcggcgagacgtacggcgaaaaggaagatccggaagggctgcaggacttcaacaccgagtccctgcacatcgtattcccaacaaataaggaattccattttattctggacgtgagtgtgaagaccgtagccaacctggagctttcaaacatcaaatgtgtcctcgaggacaacaagtgtagttattttctgtctattctggcaaaactacagacaaatcctaagttgagcaatctgaccctgaacaatatcgaaaccacttggaattcattcattcgcatcctacagctggtctggcacacaacagtctggtatttctctattagcaacgtgaagctgcagggccagctcgacttccgcgactttgattactcgggaacgtctttgaaagcgctgtctatccaccaggtggtatctgacgtattcggtttcccacagtcgtacatctacgaaattttctcaaatatgaatatcaagaactttacagttagtgggactcggatggtgcacatgttgtgcccttctaagatttcacccttcctacacctcgacttttctaataacttgctcaccgatactgtgttcgagaactgcggccatctcaccgagctggagactttgattctccagatgaatcagttaaaggaactcagcaaaatcgctgagatgactacccagatgaaatctctgcagcagttggatatctctcagaactcagtttcgtatgacgagaaaaagggcgattgcagttggaccaagtctcttctgtctctcaatatgtcctcaaacatcttaacagatacgatttttcgatgtttgcccccaagaataaaggtgttagacctccatagtaataaaatcaaaagcattcctaagcaagtggttaagctcgaagctctccaggagttgaatgtggcctttaatagcctcaccgacctgccaggatgcggctctttcagtagcttaagcgtgctcatcattgatcacaactcagtcagtcaccccagcgcagatttttttcagtcatgtcagaagatgcggtctatcaaagcgggtgacaatcctttccaatgtacttgtgagctcggggaattcgttaaaaacatcgaccaggttagctcagaggtgctggaagggtggccggattcgtacaagtgtgactaccccgagtcctaccgtggaacgttactaaaggactttcatatgagcgagctctcctgcaatatcacgctcctcattgtgactatcgtagccaccatgctagtgttggctgtcaccgtcacctccctgtgcagttacctcgatctcccatggtacctcagaatggtttgccagtggactcagacgaggcgtcgtgccagaaatatcccgctggaggaactccagagaaaccttcaattccacgcattcatcagttacagtgggcatgatagcttctgggtgaagaatgagcttttgccaaacctcgaaaaggaaggaatgcagatttgtttacacgaaaggaacttcgtccctggaaagtccatcgtggagaatattatcacctgcattgagaaatcatacaagtcaatatttgtgctatcacccaactttgttcagtctgaatggtgtcattatgaactgtactttgctcatcacaatcttttccacgaaggttctaacagccttatcctaatactccttgaacctatccctcagtatagcatacctagtagttaccacaagctgaagagccttatggctaggaggacctatctggagtggcctaaagagaaatcaaagaggggcctattttgggctaacctcagggcggcaattaatattaaattgactgaacaagccaagaagtag

SEQ ID NO: 244208 - DNA, 2361 bp, synthetic construct
  misc_feature 1..2361: note = Description of Artificial Sequence: Synthetic coding sequence
  source 1..2361: mol_type = other DNA
atgactagtatcttccatttcgcaatcatttttatgctcatccttcaaattcggatccaactcagtgaggaatccgagtttttagtggaccgctccaaaaatggcctgatacatgtgccaaaggatctcagtcagaagaccaccatacttaatataagtcagaattacattagcgaactttggacatcagatattctgagcctgtcgaagttacggatccttattatctcacacaaccgcattcaatatctggacattagcgtctttaagttcaaccaggaactcgagtacttagatttgtcccataacaaactcgttaagatctcatgccaccccactgttaacctgaaacatttagatttaagcttcaacgcctttgacgccctccccatctgtaaggaattcgggaatatgtcccagctgaagttcttgggactgagcaccacgcatttggagaagtcatccgtgctccccatagcgcacttgaacataagcaaagtcctgctggtcctcggagaaacctatggagagaaggaggaccccgaggggttacaagacttcaatacggagtcgctgcatatagtgttccctaccaacaaggaattccactttatactcgatgttagcgtgaagactgtggcgaacctagaactctcaaacataaagtgcgtgctggaagacaataagtgctcttacttcctgtcaattctggctaagctgcagacaaaccccaagctgagcaatcttacacttaataatatcgagactacctggaacagttttatcaggatcctccagctcgtttggcacactaccgtctggtatttttcaatctccaatgtaaagttacagggccagctggactttagggacttcgattactcaggaacatctctgaaagcactgagcatccaccaggtggtgagtgatgtgttcggctttccacaatcctacatttatgagatcttctccaatatgaacattaagaacttcaccgtttcgggaactcggatggttcatatgctatgtccctcaaagatttctccatttctgcatctcgatttctctaacaaccttttgacagacaccgtgttcgagaattgtgggcatctgacagaactggagactctcatcctgcagatgaatcagctgaaggaactgtccaagatcgccgaaatgaccacgcagatgaagagcctacagcagttggacatcagccaaaacagcgtgtcctacgatgaaaaaaagggtgactgctcctggacaaaatctttgctgtcactgaacatgagctccaatattctgacagacactattttcagatgtctcccacccagaataaaggtactagatttgcacagcaataaaatcaaatctataccaaagcaggtggttaaattagaagctttgcaggaactgaatgtcgcattcaactctctgactgatctgccagggtgcggaagtttttcgtccctgtctgtcttaattatcgaccataattccgtgagtcatcccagtgcggacttttttcaatcctgtcaaaagatgagaagcataaaggcaggggacaaccctttccaatgcacctgcgagctgggcgagtttgtgaagaacatcgaccaggttagtagcgaagttttggaaggctggccagatagttacaaatgcgattaccctgaatcctatcgcggtacattactgaaagactttcacatgagtgaactgtcatgtaacattaccctgctaattgtcacaattgtagcgaccatgctcgtactggccgtgactgtgacatctctgtgtagttaccttgatctgccctggtacctgaggatggtatgccagtggacccagactcgtcggcgtgcaagaaatattccactagaggaacttcaaaggaatctgcaattccacgccttcataagttactccggccacgatagtttctgggtcaagaacgagctgctgcccaatctcgagaaggaaggcatgcaaatttgtttgcacgagcggaactttgtccccggaaaatcgattgtggagaacattatcacctgtatcgaaaaatcctataagtcaatctttgtgttgagtcctaatttcgtgcagtcagagtggtgtcactacgaattatactttgcccaccacaatctcttccatgaaggcagcaacagtcttatattgatattactcgagccaattccccagtatagcattccctcctcttaccacaagttgaagtcactcatggcacgtaggacttatctggagtggccgaaggagaaatctaaaagaggcttattctgggctaatctccgcgctgccattaacattaagctgactgagcaagccaaaaagtag

SEQ ID NO: 244209 - DNA, 486 bp, synthetic construct
  misc_feature 1..486: note = Description of Artificial Sequence: Synthetic coding sequence
  source 1..486: mol_type = other DNA
atgacaagcatcttccattttgccataatcttcatgctcatcttgcagatccgtattcaactttctgaggaatccgagtttctggtggatagaagtaaaaatgggctcatccacgtgccaaaagacctgtcacaaaagacaactattctaaatatctcccaaaactatatttccgagctctggaccagtgatatactatctctaagtaaactgcgtatcctgatcatctcccacaatcggatacagtacctagacatcagtgtcttcaagtttaatcaggagttggaatatctggatctgtctcataacaaattagttaaaatcagttgccaccccactgtgaatctgaagcacctggatctgtcattcaatgcctttgacgcgctgccaatctgtaaggagtttggaaacatgtctcagttaaagttcctaggactgtctaccacgcatctggaaaaatctagcgtccttcccatcgcgcactag

SEQ ID NO: 244210 - DNA, 147 bp, synthetic construct
  misc_feature 1..147: note = Description of Artificial Sequence: Synthetic coding sequence
  source 1..147: mol_type = other DNA
atgaccagtatattccacttcgctatcatcttcatgttaattttgcagatcagaatccagctttccgaagaaagcgagtttctggtggaccgcagcaaaaatgggctcatacacgttcccaaggacctaagccagaagactacctag

SEQ ID NO: 244211 - DNA, 72 bp, synthetic construct
  misc_feature 1..72: note = Description of Artificial Sequence: Synthetic coding sequence
  source 1..72: mol_type = other DNA
atgacatcaatcttccacttcgcgatcattttcatgctcatactgcaaatcaggatccaactctccgagtag

SEQ ID NO: 244212 - DNA, 273 bp, synthetic construct
  misc_feature 1..273: note = Description of Artificial Sequence: Synthetic coding sequence
  source 1..273: mol_type = other DNA
atgaccagtatattccatttcgccatcatatttatgctgatcctccaaatccgcatacagctctcggaagagtcagagtttttggtggacaggtcaaagaatggcctcattcatgttcccaaagacctctcccagaagacgacgatcctcaacatttctcagaattatattagcgaactgtggacatcagacattctcagtctgtcaaaactgcggatactcatcatctcccataatcggatccaatacctggatatttctgttttcaagtag

SEQ ID NO: 244213 - DNA, 2355 bp, synthetic construct
  misc_feature 1..2355: note = Description of Artificial Sequence: Synthetic coding sequence
  source 1..2355: mol_type = other DNA
atgccccacacactgtggatggtgtgggttcttggagtgataatcagcctctccaaggaggaatcgtctaatcaggccagcctgtcttgcgaccgaaacggcatctgtaaaggcagttctggctccctcaatagcatacctagcgggctaactgaagctgtgaagtcactcgacctctccaataaccgcatcacatatatcagcaactcagacctccagagatgtgtgaatcttcaggctctcgtgcttacaagcaacggcattaatactatagaggaggatagcttttcgagcttaggaagcctcgaacatctggatctgtcatacaactacctaagtaacctttcctcatcatggtttaaacctctctccagtctgacattcctgaacctgctgggcaatccctataaaactctgggcgagacttcgttgttctcccatttgacgaagctacaaattcttagggttgggaacatggacacattcactaagattcagcgcaaggactttgccggtctaacatttctggaagagctggaaatcgatgccagcgacctgcagtcttatgagcccaaatcactgaaatctattcagaatgtttcccacctgatccttcacatgaaacagcatatcctgctcttggaaatttttgtggatgtgacgtcatccgtcgagtgtctcgagctgagagacactgatctggatacgttccacttctcagaattgagcaccggagaaactaactccctgataaagaagtttacgttccgcaatgtgaaaatcactgacgaaagtttgttccaggtaatgaagctgctcaatcaaatttctggcctacttgaactggagttcgatgattgcacgcttaacggggtgggcaatttccgtgccagcgacaacgacagagtgattgatcctggcaaggtggagactttaaccatcagaagattacatatcccgaggttttacttgttctatgatctgagcacactgtattcattgaccgaacgagtgaagcgtattactgtcgagaacagcaaagtgttccttgtcccatgtctgctgtcccaacacttaaaaagtcttgaatacctggacttatctgagaacttgatggtggaggagtacctaaagaattctgcatgtgaagatgcctggccaagccttcagacactaatcctgcggcagaatcatttggctagcctcgagaagactggggagacccttctcacactgaagaatttaaccaacattgacatctctaaaaattccttccattcaatgcccgagacctgccagtggcccgagaaaatgaaatatctgaacctgtcttccactaggatccattccgttaccggatgcattccaaaaaccctggaaattcttgacgtgtcaaataacaatctcaatttgtttagccttaacctgcctcagctgaaagagttgtacatttctcggaacaagctcatgaccctccctgatgcgagcctgcttcctatgctcctggttttgaaaattagcaggaacgctattacaacattctctaaagagcaactggattcctttcataccttgaaaaccttggaggcgggaggaaacaattttatttgcagctgcgaattcttatctttcacacaggaacaacaggcccttgccaaggtgttgatagactggcccgctaactacctatgcgattcaccgtcacacgttcgagggcaacaggtccaagatgttcggttgagtgtgtccgagtgccacaggacggctctagtgtctgggatgtgctgtgccctgtttctcctcatcttgcttaccggagtgttgtgccaccgctttcacggcctttggtacatgaaaatgatgtgggcttggcttcaagccaagcggaagccaaggaaggccccttcccgaaacatttgctatgacgcatttgtctcctattccgaacgggacgcatactgggtggaaaatctgatggttcaggaactcgagaattttaatcctccattcaaactctgcttacacaaacgggacttcattccaggtaagtggataatagacaacattattgattctattgaaaagtctcacaagaccgtgttcgttctttcagaaaacttcgtcaaatccgagtggtgcaaatatgagctggactttagccacttccggctcttcgatgagaataacgatgctgctatcctgattctcttagaacccatcgaaaagaaggccatacctcagaggttttgtaagcttcggaaaattatgaacaccaaaacttatctcgagtggccgatggatgaagcccagagggaaggattctgggtaaacctgagggctgccatcaagtcttag

SEQ ID NO: 244214 - DNA, 2715 bp, synthetic construct
  misc_feature 1..2715: note = Description of Artificial Sequence: Synthetic coding sequence
  source 1..2715: mol_type = other DNA
atgaggcagaccctcccatgcatctatttctggggtggactgctgcccttcggaatgctctgcgcctcgtctactaccaagtgtaccgtgtcacacgaagtggcagattgtagtcatctgaaactgacccaggtgccggatgatctccccaccaacattaccgtgctaaacttgactcacaatcaactgaggaggctccctgccgctaattttaccagatactcacagttaacctcccttgatgtagggtttaatacaatcagcaaactggagcctgaactgtgtcagaagctgcctatgttgaaggttctgaatctgcagcacaacgagctctcccaactctctgataagacattcgcattttgcacaaatcttactgagctccacctcatgtcaaacagcatccagaaaatcaaaaacaatccttttgttaaacagaaaaatttgatcacactagacctttcccataacggcctgtcaagcaccaagttaggaactcaggtgcagttggagaacctccaagagctgctcctttctaacaataagatccaagccctcaaatctgaagaactggacattttcgcaaacagcagtctaaaaaaactggagctctcaagcaaccagatcaaggaattttctcccggatgctttcacgcaatcggaaggctctttggactgtttttgaacaacgttcagctcggtccttctttaactgaaaaactgtgtttggagctggccaatacttccattagaaacctgagcctgagcaactcccagctctcaactacatcgaatactacgttcctcgggctgaagtggacaaatctgaccatgctggatctgtcctataataaccttaacgtcgttgggaatgattcattcgcatggttgccacagctcgaatatttctttctggaatataacaacatccagcatctgttcagtcactccctccacgggttatttaatgtcaggtacctcaacctaaagcggtcttttactaagcaaagtatctctcttgcgagtttgcctaagattgatgacttttctttccagtggcttaagtgcctggagcacttgaacatggaggacaatgatatcccgggaattaagagcaatatgttcacgggcctgattaatctgaaatatctgtccctgtcaaattctttcactagtctaaggacactgaccaatgaaacctttgtaagtctggctcactcccccctccacatcttgaacttaactaagaacaagatttccaagatcgagagtgacgcattttcctggctcggtcacctggaagttctcgacctagggcttaatgaaatcggtcaggaactcactggtcaggagtggaggggattagaaaatatctttgagatttacctgtcttacaacaaatacctgcagctcaccagaaattccttcgctttggtcccatcactgcagaggctgatgctgcgccgagtagctttgaaaaatgttgattcctcccctagccccttccagcccctccggaatcttacaatccttgatctatcaaacaacaatatagccaacatcaatgatgacatgcttgaggggctagaaaaacttgaaattttggacctacagcataataacctggcccgactctggaagcacgccaaccccggtggcccaatctacttcctgaagggcctcagccatctccatattcttaacctagagagcaacgggtttgacgagatccccgtcgaagtgttcaaagacctgtttgaactgaagatcattgacctcggtctgaacaatctaaacacattgcccgcatctgtttttaataatcaggtcagtttgaagtctctgaacttacagaagaaccttatcacctctgttgaaaaaaaagtgttcggccctgcattccgcaatctcacggagctggatatgagatttaacccgtttgattgcacttgtgaaagcattgcctggttcgtgaattggattaacgaaacccataccaacatacccgaactctctagtcactacctgtgtaatacacctcctcattaccatggcttccccgttagactcttcgacacgtccagctgcaaggatagtgcaccctttgagctgttttttatgatcaacacctctatcctgctgatatttatttttatagtacttctgattcacttcgaagggtggagaattagcttctactggaacgtgagcgtgcaccgtgtcctggggttcaaggaaatcgatcggcaaacagagcaatttgaatacgcagcatatatcatacacgcctataaggataaggattgggtctgggaacacttctcttctatggagaaggaagaccaaagtctcaagttctgtctggaagagcgcgatttcgaggccggtgttttcgagctggaggccattgtgaacagtataaaacgatcaaggaaaattattttcgttatcactcatcaccttctgaaggatccactttgtaaacgcttcaaggtgcaccacgcagttcagcaggctatcgaacagaacctggattcaatcattcttgtctttctcgaagagatccctgactacaagctgaatcacgcgttatgccttcgtaggggcatgttcaagagtcactgcatccttaactggcccgttcagaaggagaggatcggggctttccggcataaactgcaggtggctttggggtccaaaaactcggtccattag

SEQ ID NO: 244215 - DNA, 1884 bp, synthetic construct
  misc_feature 1..1884: note = Description of Artificial Sequence: Synthetic coding sequence
  source 1..1884: mol_type = other DNA
atgcttgatttgtcctacaacaatctaaacgttgtgggcaacgatagttttgcctggctgccacaactggagtatttctttcttgaatacaacaacatacagcatctgtttagccacagtctacacggcctgtttaacgttcggtacctaaatctgaaaaggtccttcaccaaacagagcatatctttggcgtcactacctaagatagacgatttttccttccaatggctgaaatgtttggaacatttgaatatggaagataatgatattccaggtattaagagcaatatgtttaccgggcttatcaacctcaagtatctgtcactttcaaatagtttcaccagcttgcgcactttgactaatgagacatttgtctccctggcacactcaccactccacatcctcaaccttaccaaaaataagattagtaaaattgagtccgacgccttctcatggctgggccatctggaggtgcttgacctaggattgaacgaaattggtcaggaactaactggccaggaatggcggggattagagaatatcttcgagatttatctgtcgtacaataagtatctgcagctaacacgcaacagttttgcgttggtgccatccttacagcggctcatgctgaggagggtcgcactgaaaaacgtcgattcgtccccatcgccatttcaacctctcaggaacctgaccattttggatctctccaataataacatcgctaacatcaatgacgacatgctggaaggccttgaaaagcttgaaatactagacctgcagcacaacaacttggctcgtctatggaagcatgcaaatccaggaggccctatatacttcttgaagggtctgtcacacctacatattttaaatcttgagtccaatggcttcgatgagatcccagtggaagtgttcaaagatctttttgagctcaaaattattgacctcggacttaataacctgaataccctccccgcaagcgtctttaataaccaggtttccttaaaaagcctgaacctgcagaagaacctcattaccagcgtcgagaaaaaggtgttcggcccagcgttccgcaatctcacggagctggatatgagattcaatccctttgactgcacctgcgaaagcattgcttggttcgtgaactggatcaatgagacacacacaaacattccggaattatcaagccactacttgtgtaatacaccaccacactaccacggctttccagtgcgcttatttgatacaagctcttgtaaagacagcgctcccttcgagctgttttttatgattaatactagcattctattaatttttatctttatcgtgctgctcatccactttgaaggttggaggatatcattctattggaacgtatctgttcacagggtgttgggtttcaaggaaattgataggcaaacagaacagtttgaatatgccgcttacatcatccacgcttataaggacaaggactgggtatgggaacattttagtagcatggagaaggaagaccagagtctgaagttttgcctggaggaacgggactttgaggctggcgtgttcgagctagaagctatcgttaactctatcaagagatctcggaaaattattttcgtgataacccatcatctcctgaaagacccactctgcaagcgcttcaaagtgcaccacgccgtgcaacaggctatcgagcagaacctcgattctataatcctagtgttcctggaggaaatccctgattataagctcaatcatgccctgtgtttacggagggggatgtttaaatctcactgcatcctgaactggccagtccaaaaggaacgcattggtgcttttcgccataagctgcaagtggcattaggctctaaaaacagcgtgcattag

SEQ ID NO: 244216 - DNA, 2613 bp, synthetic construct
  misc_feature 1..2613: note = Description of Artificial Sequence: Synthetic coding sequence
  source 1..2613: mol_type = other DNA
atgcggcaaactctgccgtgtatttacttctggggcggtttgttgccctttggcatgctatgcgccagctctacaaccaaatgtacagttagccatgaagtcgccgactgctctcacctgaaacttactcaggtgcctgatgacctgcctactaatattacggtcctgaaccttacgcataatcagcttcggcgattaccagcagctaactttacacggtatagtcagctgacttctctggacgtgggatttaacaccatctccaagctcgaaccagagctgtgccagaaacttccaatgctgaaggttctgaatctccagcataacgagctcagccagctgtccgataaaaccttcgccttttgcaccaaccttaccgaacttcacctcatgtcgaattcaattcagaagataaaaaataatccctttgtgaaacaaaagaatctgatcactctggatctgtcacacaatggtctgtccagtactaaattagggacgcaggtgcagttggagaacctgcaagagcttttactgtctaataacaagattcaggcattaaaatcagaggaacttgacatcttcgcaaattccagccttaagaaactcgagcttagctcaaatcagattaaagagttctctccaggatgcttccatgctatcggtcgattgtttggtttgtttctgaataacgtgcagttaggcccatccctcactgaaaagctgtgcctggaattggctaacaccagcatacggaacttatcattatcaaacagccagttgtcaaccacttctaacaccacctttcttggcctcaagtggaccaacctgaccatgctcgatctatcctataacaaccttaatgtggtgggtaacgattcttttgcctggctaccccagctcgaatacttttttctcgaatataacaacatacagcacctcttctcccacagcctgcatgggctgttcaacgtgcgatatctgaacctgaaacgttcctttaccaagcagtctatcagccttgcatctcttcccaagatagacgatttttctttccaatggctgaagtgcctcgaacacttaaacatggaagataatgatatccctggtatcaaatcaaacatgtttaccggcctgataaatctgaagtatctatccctgagtaactcattcacttcgctccgaacgctgacaaatgaaacattcgtgtccctggcacattctcccttgcatatattaaatctaaccaaaaacaagatcagtaagattgagtcagatgctttttcctggctgggccaccttgaggtgctcgaccttggcctgaatgagattggacaagagttgaccggccaggagtggcgcggacttgagaatatctttgaaatttacctctcttacaacaagtacttacagctcacaaggaacagtttcgcactggtcccaagcctccagcgcctcatgctaaggagagttgccctgaaaaacgtggacagctccccttcaccttttcagcctcttcggaacctcacaattttggacttgtctaataacaacatcgcaaacattaatgatgatatgctcgagggcctagagaaactggaaatcttagacctgcaacataataacctggcccgactttggaagcacgccaatcccggaggcccaatctacttcctgaaggggctgtctcatttacacatactaaacctggagtcgaatggattcgatgagatccctgtggaagttttcaaggatttattcgaattgaagattatcgacctcggattaaacaatcttaacactctaccggcttctgtctttaacaaccaggttagtctaaagagtcttaatctccagaagaacctaatcacgtcggtcgaaaaaaaagtgtttggacctgccttccggaatttgacagaactggatatgcggttcaacccgtttgactgcacttgtgagagtatcgcctggtttgtaaactggatcaatgaaacccacaccaatatacctgagctctccagccactatctgtgcaacacaccaccgcactatcacggcttcccagttagactgtttgacacctcctcatgtaaagatagcgccccttttgagctgttcttcatgatcaacacttcaatcctgttgatctttatttttattgtactccttatacactttgaaggttggcgtatctcgttctactggaacgtttccgtgcacagggttctgggcttcaaagaaatcgaccgacaaactgagcagtttgaatatgcggcttacatcattcacgcctataaagataaggattgggtgtgggagcatttttcatccatggagaaagaggaccagagcttgaagttttgtttagaagaacgggattttgaggcgggagtgtttgagttggaggccattgtaaatagtattaagcgctctcgcaaaattatctttgtgatcacacaccacctgttgaaagatccgctgtgtaaacgcttcaaagtgcatcacgcagtccaacaggccatcgaacaaaacctggattccatcatcctcgtctttctcgaagagataccagattataagctgaaccacgcactctgcctacgtcgagcgaaatag

SEQ ID NO: 244217 - DNA, 2391 bp, synthetic construct
  misc_feature 1..2391: note = Description of Artificial Sequence: Synthetic coding sequence
  source 1..2391: mol_type = other DNA
atgactaaggataaggagcctatcgtcaagtccttccatttcgtgtgcttgatgattatcatcgttggtacccggatacagttcagtgacggaaacgagttcgccgtagataagtcaaagagaggactcatacatgtccccaaggacctaccccttaaaaccaaagttttggatatgtctcagaattacatcgccgagctgcaggtctccgacatgagtttcctgtccgagttaaccgtcctgaggctctcccataacagaatacagttgctggatctttctgtgtttaaattcaaccaggatctggagtatctggatctgtcccacaaccagctgcagaagatatcctgccatccaatcgtcagctttcggcacctggacctctcatttaacgattttaaagccttaccaatctgcaaagagtttggcaatctgtcccagctgaactttctgggtttgtccgccatgaagctgcaaaagcttgacttactccctattgcccatctgcacctttcatatatactactggacctcaggaattattacatcaaggaaaatgagaccgaatccctccaaatcctgaatgccaaaacactgcacctcgtcttccatccaaccagccttttcgcaatccaggttaacatatcggtgaacacgctgggctgtttacaactgacaaacattaagttgaatgacgacaactgccaggtgtttattaaattcctttccgaacttacgcggggatcaaccttgctgaacttcaccttgaaccatatcgaaaccacttggaagtgtctcgtccgtgtgttccagtttctgtggccaaaacccgtggagtacctgaatatttataatttgaccatcatcgagtccatcagggaggaggatttcacgtactcgaaaacaacattgaaggccctgactatcgaacacattacaaatcaggtgtttctgttctcccagactgctctgtataccgtttttagcgaaatgaacattatgatgctgactatctcagataccccgtttatccatatgctttgcccacacgccccatccacctttaaattcctgaacttcacgcaaaacgttttcactgattcgatcttcgaaaagtgttccaccctggtgaaactggagacattgattctgcagaaaaacggactcaaagacctgtttaaggtgggactgatgaccaaggatatgccatccctcgagatcctggatgtcagttggaactctctagagagcggaagacacaaggaaaattgcacatgggtcgagtctatcgtggtcctgaacctgagcagcaacatgctcaccgactccgtattcaggtgtttaccaccaagaattaaggtcctagatctccattctaacaaaattaaaagcgtgcccaaacaggtcgttaagctagaggctcttcaggaattgaatgtggcgtttaattcactcacggatctgcctggctgtggaagcttctcttctctttccgtgctgattatagaccataactccgtgtcacatccaagtgcagactttttccagagctgccaaaaaatgaggagcatcaaggcaggcgataatccttttcagtgcacctgcgaactgcgggagttcgtcaagaatatcgaccaggtgtcatccgaagtgctcgagggctggcccgatagctataagtgcgattaccctgagagttaccgcggaagcccgctaaaggactttcatatgagcgagcttagctgcaatataacactgctcatcgtgacaattggcgctaccatgctagttttggccgtcaccgtgacaagtctgtgcatctacttggatttgccatggtacctgaggatggtatgccagtggactcagacacgcaggcgagcgcgtaatattcccctggaagaactccagcggaacctgcagttccatgcctttatctcttactccgagcacgatagtgcatgggtgaagtctgaactggtgccttacttggagaaggaagacattcagatctgtttgcatgagagaaatttcgtccccggaaaatcaattgttgaaaacatcattaactgcatcgagaaatcatacaaatccatttttgtgttatctccaaacttcgtgcagagtgagtggtgtcattacgaactgtactttgcccatcacaacctgtttcatgagggctctaataacttgattctgattctgctcgagcctatcccccagaactccattcctaacaagtaccacaaactcaaggcacttatgacccagagaacctatctgcagtggcccaaagaaaaaagcaaacggggtctgttctgggccaatatccgcgctgccttcaatatgaaactgaccctcgttacggagaataatgatgttaagagctag

SEQ ID NO: 244218 - DNA, 2391 bp, synthetic construct
  misc_feature 1..2391: note = Description of Artificial Sequence: Synthetic coding sequence
  source 1..2391: mol_type = other DNA
atgaccaaggataaggagcctatcgtgaagagctttcatttcgtctgcctgatgatcatcatcgttgggacaagaattcagttttctgatgggaacgagttcgcagtagacaaatccaagcgcggattgatccacgtgccaaaggatctgcccctgaaaacaaaagtgctggacatgagtcaaaattacattgccgagcttcaagtgtccgatatgtcattcctctctgagctgacggttctgcgattgtcgcataatcgcattcaactgctcgatctgagcgtgttcaagttcaaccaggatttggagtatcttgacttgtcacataaccaattgcagaaaatctcctgtcatcctattgtgagctttcggcatttagacctgtctttcaacgacttcaaggcgttacccatttgcaaggagtttggcaatctgtcgcagttaaactttctgggactatcagcaatgaaactgcagaagctggacctgcttcctatcgcccatctgcatctctcatacattctactcgatctaaggaattattacatcaaggaaaacgaaacagagtccttacaaatcttgaacgccaaaacactacacctagtattccaccccaccagcctattcgccattcaggtcaacatcagcgtgaatacactggggtgcctgcagctgactaacatcaaactgaatgatgataattgccaggtgttcataaagtttctgtctgaactgacacggggtagcaccctactcaacttcacattgaaccatatagagacaacttggaagtgtttagtcagagtgtttcagtttctgtggccgaagcctgtggagtacctcaacatctacaatctcacgattatagagagtatcagggaggaggactttacctatagtaaaaccacattgaaggccctaaccattgagcatataaccaaccaagtgttcctcttctcacagacagcattgtacaccgtcttttcggaaatgaacattatgatgctgaccatctctgacactccctttatccatatgctgtgtccccatgccccatccacttttaagtttctgaatttcacgcaaaatgtcttcaccgactcaattttcgaaaagtgctctactctggttaagttggaaacactcattctgcagaagaatggactcaaagacctgttcaaggtgggcctgatgaccaaggacatgcccagcctggaaatacttgatgttagctggaacagcctggagtccggtcgacacaaggaaaattgtacttgggtggagagcatcgtggtcttgaatctgtctagcaatatgctgaccgattccgtgttccggtgtttaccccctaggattaaggttctggatcttcatagtaataaaatcaagtcagtgccgaaacaggttgtgaagttagaggcacttcaggagttgaatgtagcctttaactcactgactgacctgcctggatgtggatcattctcctccctcagtgtcctgattattgaccataattctgtttcacatccaagtgcagattttttccagtcttgccagaagatgaggtctattaaggctggagacaatccattccagtgtacttgcgaactgcgtgagtttgtgaaaaatattgatcaagtgtcatctgaagtccttgaaggctggccagatagctacaagtgcgactatcccgagtcttaccgcggatctccattaaaagacttccacatgtctgaactgtcctgcaatattacacttctgatagttacgatcggcgcaactatgctggtgttggctgtgacggtgacaagcctctgtatctatcttgatctgccctggtatctgcggatggtatgccagtggacacagacccggagaagggcacgaaatattcctttggaggagttacaacgaaaccttcagtttcacgcatttatctcatactctgagcacgacagcgcttgggtgaagtcagagttggttccttatctggaaaaggaagatattcagatttgtctgcatgagagaaattttgttccaggtaagtcgatcgttgagaatatcatcaattgcattgagaaatcctacaaatcaattttcgtcctgtccccgaattttgtgcagtccgaatggtgtcactatgaattgtacttcgcccaccataacctatttcacgaaggatcaaacaacctgattctgatcttgctggagccaatccctcagaattccattcccaataaataccacaaactgaaagcactgatgactcagagaacttatctgcagtggccgaaagagaagtctaagcgaggcctgttttgggcaaatatccgagccgcttttaatatgaagctgactctggtcaccgaaaataacgacgtgaagtcctag

SEQ ID NO: 244219 - DNA, 453 bp, synthetic construct
  misc_feature 1..453: note = Description of Artificial Sequence: Synthetic coding sequence
  source 1..453: mol_type = other DNA
atgactaaagacaaggagccgatcgtaaagtctttccattttgtttgtctcatgattattattgtaggaacaagaattcaattttcagacggcaatgaattcgccgtcgacaaaagcaagcggggattgatccacgtgcctaaggaccttccactcaagaccaaggtgttggacatgtcccagaactacatcgctgaacttcaggtttccgatatgagtttcctgtccgagctcacggtgttacggctgtcacataaccggattcagttgctggacctgtctgtattcaaattcaaccaggatctcgagtatctggatctctctcacaaccagctgcagaagatatcttgccacccaatcgtcagtttccgccatctggatctgagcttcaacgacttcaaggctcttcccatttgtaaagagttcggtaatctgagccagcttaacttctag

SEQ ID NO: 244220 - DNA, 1443 bp, synthetic construct
  misc_feature 1..1443: note = Description of Artificial Sequence: Synthetic coding sequence
  source 1..1443: mol_type = other DNA
atgaccaaagataaggaaccaatcgtgaagtcattccattttgtgtgtttgatgataatcattgtggggacccgcatacagttttcggacggaaacgagttcgctgtggataagagcaagaggggcctgatccatgtgccaaaagacttgccattgaaaaccaaagttttagacatgtcccagaattatattgccgaattgcaggtgagcgacatgtcattcctctctgagctgaccgtactgagactctcacacaataggatccaactattggatctaagtgtgttcaagttcaatcaggacttagaatacctagatctgagtcacaaccagctacaaaagattagttgccacccgatagtcagttttcgacatttagacctttcattcaatgatttcaaagccctgccgatctgtaaggagttcggaaatttgagtcagctgaattttctgggactctctgcaatgaagctacagaaactggaccttcttccaatcgcacatctacacctcagctacatattgttggatctacgcaactattatatcaaggaaaacgaaacagaaagtttgcagattctgaacgcaaaaactttgcacttagttttccacccaacctcattattcgccattcaagtcaatattagcgtcaatactctcgggtgtttgcagctcacaaacatcaagctgaatgacgacaactgccaggtcttcataaaattcctgagtgaactcactagaggcagcacgctgcttaattttaccttaaaccatatcgagactacgtggaagtgcctggttagagtattccaattcctgtggccaaaaccggtggagtatctcaacatctacaacctaacgattatcgagtccatccgagaggaagactttacatatagcaagaccaccctcaaagctctgacaattgagcacatcaccaaccaggtcttcttgttcagccagacggctctgtataccgtcttctcagaaatgaatatcatgatgctcacaataagcgatacaccctttatacacatgctgtgtccccacgctccaagcaccttcaaatttctgaactttacccaaaatgtgtttacagatagcattttcgaaaagtgtagtactcttgtcaagctggagacattaatatttgtcctgagccccaattttgtgcaatccgagtggtgtcattacgagttgtattttgcacatcataatctgtttcacgaagggtcgaacaatcttatcctcattctcttagaacctatccctcagaactctatacccaacaagtatcacaaactgaaagccctgatgacccagaggacttacctgcaatggccaaaggaaaaaagtaaaagaggcctgttctgggccaacatacgggctgctttcaatatgaaacttactctggtaaccgaaaacaatgacgttaaatcatag

SEQ ID NO: 244221 - DNA, 276 bp, synthetic construct
  misc_feature 1..276: note = Description of Artificial Sequence: Synthetic coding sequence
  source 1..276: mol_type = other DNA
atgactaaagataaggagccaatagtcaagtctttccacttcgtgtgcctcatgattattatcgtcggaacaagaatacagtttagcgatggtaatgagttcgcagtggacaagagcaaacgcggtctgatacatgttcccaaagacttgcccctcaaaacaaaagtcctggatatgtcgcagaactatattgccgagttacaggtgtccgatatgtcattcctctccgagctcaccgtgttgcgactgtcccataatcgtatacaactcctttag

SEQ ID NO: 244222 - DNA, 3150 bp, synthetic construct
  misc_feature 1..3150: note = Description of Artificial Sequence: Synthetic coding sequence
  source 1..3150: mol_type = other DNA
atggttttccctatgtggactttgaagaggcagatcttgatactcttcaatatcatcttgattagtaagctcttgggtgcccgatggttcccaaagactttgccctgcgacgtgacgctcgacgtgccaaagaatcacgtgattgttgactgcacggataaacacttgaccgagatccccggagggatcccgaccaatacaacgaacctcacactgacaattaatcatatacccgacatctcgccagcctccttccatagactggatcacttagtggagatcgactttaggtgcaactgcgtacccatcccgttgggctcaaagaacaacatgtgtattaaacgcctccagattaaaccccgaagtttctcaggtcttacttatctgaaaagcctgtatctcgatggcaaccagctgctggagataccccaaggccttccgccatccctccagttgctaagtctggaagctaataatatcttcagtatccggaaagagaatctcaccgagttggccaatattgaaatcctttacctcggccagaactgttattacagaaatccctgctacgttagttactccatcgagaaggatgctttcctgaacttgacaaaacttaaggttctcagtctcaaagataacaacgtcactgccgttcccacagtccttccctctaccctcaccgagctgtacctgtataacaacatgatagcgaagatacaagaggacgatttcaataatttgaaccagctgcagatcctggatctgtctggcaactgccctcgatgttataacgcgccattcccctgtgcaccctgtaagaataactccccactgcaaatccccgtgaacgcgttcgacgcattaaccgaattaaaagtccttcggttgcactctaactccctccagcatgtaccacccagatggtttaagaacatcaataagcttcaggagctggacctttctcagaacttcctcgctaaagaaattggagatgcaaagttcctgcacttccttccgtcacttatacagctggatctctccttcaacttcgagctgcaggtgtatcgagcttccatgaacctgtcgcaagcgtttagttccctgaagagcctgaaaatcctccgaatccgcggttacgtcttcaaagagctgaagagctttaacctgtcacctctacacaacctgcagaacctggaagttcttgacctggggaccaactttataaaaatcgctaacctatctatgtttaaacaatttaaaaggttgaaggtgattgacctcagtgtcaataaaatttccccatccggtgacagttccgaagtaggcttttgcagcaacgcgagaacctctgtcgagtcctacgagcctcaggtacttgaacagctccattacttcagatatgacaaatatgcgaggagctgtaggtttaaaaataaggaagcttcctttatgtctgtgaatgagtcatgctacaagtatgggcagacgctggacctgtccaagaatagtatcttctttgttaaaagctcagacttccagcacttgtcatttctgaagtgtctgaacctcagcgggaatctgatctcccagacactaaatgggtccgagtttcagcctttagccgagttgcgttatttggatttttcgaacaacagactggatttgcttcactccaccgcatttgaggaactgcacaaactagaggtgttagacatcagcagtaactcgcactattttcaaagcgagggtattacacacatgttgaactttactaaaaatctaaaggttctgcaaaagctaatgatgaacgacaacgacatcagctcatcgaccagccgcaccatggagtccgagtctctgcggacactggagtttagaggcaaccatctggatgtattatggcgcgagggtgataatcggtacctacaattgttcaagaaccttctaaaattggaggagctggacatctcgaagaattccttgagctttttgccctccggggtcttcgatggtatgccgcctaatctcaagaacctctcactggcaaaaaacgggctcaaatcctttagctggaagaaactgcagtgcctaaagaacttggagaccctggacctgtctcacaatcagctgactactgtgcccgaacgcttgagcaattgctctagatcactgaagaatttgatcctgaaaaataaccagatcaggtctctgaccaagtatttcttgcaggatgcattccagcttcgctacttggatttatcttcaaacaaaattcaaatgattcaaaaaaccagttttccagagaatgtgttaaataaccttaaaatgttgttgctgcaccacaaccgcttcctgtgtacttgcgacgccgtttggtttgtttggtgggtgaatcacactgaagttaccattccctacctggcgaccgacgtcacttgcgttggaccaggcgcacataaaggacagagtgtgatatcacttgacttgtatacttgtgagctggacttaactaacctcatactcttcagtctcagtatttccgtgagcctgttccttatggtaatgatgaccgcatcacacctgtacttttgggatgtgtggtatatatatcatttttgtaaggcgaagatcaaggggtaccagcggctgattagccctgactgttgctatgatgcattcattgtgtacgataccaaagatcctgcagtaactgagtgggtcctggccgaattggtagccaagctggaggacccgagagagaagcattttaatctttgcttagaagagagggactggttacccggacaacccgtcctggagaatctttcccagagtattcaattaagtaagaagacagtgttcgttatgaccgataaatacgctaaaaccgagaactttaagatagccttctatttaagtcatcaacggctgatggacgagaaggtggacgtcatcatccttatctttctagagaagccctttcagaagagcaagttcctgcagctgcgtaaaagactgtgcggtagctctgtcttggagtggcccacgaaccctcaggcacatccctacttttggcagtgtcttaaaaacgctcttgctactgacaaccacgtggcctactctcaggttttcaaagagacagtgtag

SEQ ID NO: 244223 - DNA, 1074 bp, synthetic construct
  misc_feature 1..1074: note = Description of Artificial Sequence: Synthetic coding sequence
  source 1..1074: mol_type = other DNA
atgcggagacaactccgcagtcggagggctccttcattcccatatagctaccgttaccgactcgatgatcccgatgaggctaatcaaaactatctagccgacgaagaagaggaggctgaggaggaagctcgcgtgaccgttgtccccaagtctgaggaggaagaagaagaagaagagaaggaggaagaagaagaggaggaaaaggaagaagaggagggacaaggccagccaacaggaaacgcctggtggcagaaattacaaatcatgtccgaatacctgtgggatccagaacggcgtatgttcttggccaggaccggccagagctggagcttgatattgcttatttatttcttcttctatgccagcctcgcagcggtgatcactctgtgcatgtacacactttttttgacaattagcccatacatccctaccttcacggaacgcgtaaagcctccaggggtgatgatcaggccttttgcccacagtttaaactttaattttaatgtgagcgaaccagatacctggcagcattacgtaatttcattaaacggcttcctgcaaggctacaacgatagcctacaggaagaaatgaacgtcgattgtccacctggccagtattttattcaggacggcaacgaggacgaggataagaaggcctgtcagtttaaacgctccttcctgaagaactgcagcggcctggaagatccaacgttcggctactcaactggccagccttgcatcttgctgaaaatgaacagaatcgtagggtttaggcccgaactcggggaccctgtgaaggtgtcatgcaaagtgcaaaggggagatgaaaatgatatcaggagtatttcctactacccagaaagcgcctcctttgatctgagatactacccatattatggaaaactgactcacgtcaattacacaagtcctttggttgcaatgcatttcacagacgtggtgaagaaccaggctgtgcctgtgcagtgtcaactaaagggcaaaggagtcatcaacgacgtgataaatgacaggttcgtaggaagagtgatattcacactaaacattgaaacatag

SEQ ID NO: 244224 - DNA, 3180 bp, synthetic construct
  misc_feature 1..3180: note = Description of Artificial Sequence: Synthetic coding sequence
  source 1..3180: mol_type = other DNA
atgaaagagagcagcctgcaaaattcgagttgctcactcggcaaagaaacgaagaaggaaaatatgtttcttcagagtagcatgttaacatgcatctttctattaatctctggctcctgcgagctctgtgctgaagagaatttttcaagaagctatccttgcgacgagaaaaaacaaaacgactcggtcatcgctgaatgcagtaaccgcaggttgcaggaagtgcctcaaaccgtgggaaagtacgttacagaattggatttaagcgataattttatcacacacatcactaatgaatcattccagggtcttcagaatttaactaagatcaacctgaaccacaatccgaatgtgcagcaccagaacgggaatccaggaattcaatcaaacgggttaaacattacagacggcgctttccttaacctgaagaacttgcgtgagctgctgctcgaggataaccagctaccccagatccccagcggcctgcccgaatctttaacagaactgtcactgatccaaaacaacatatataacataacaaaggaaggaatctcccgccttatcaatttgaagaatctttacttagcctggaactgttattttaacaaagtctgtgaaaagaccaatatcgaggacggagtttttgagactctcacgaacctggagctcttatcactttctttcaatagtctgtctcacgtgccaccgaagcttccatcttcactacgcaaactcttcctgagtaacacacagatcaaatacatatctgaagaagattttaaaggactgattaatcttaccctgctggacttatcagggaactgtcctaggtgttttaacgccccttttccctgtgtgccatgcgacggtggagcgtcaattaacatcgaccgcttcgccttccagaacttaacccagttgcgctacctaaacctttcctctacctcactgagaaaaattaatgcagcttggtttaaaaacatgcctcatctcaaagtgttagaccttgagtttaactacctggtgggagaaattgcctctggcgcttttctcactatgctgcctcgcctggaaatcttggacttatcgttcaactatatcaagggtagttatccacaacacatcaatatcagtcgcaacttcagcaaactgctgtcccttagggctcttcacctacggggttacgtgttccaggaactgagggaagatgactttcagcctttaatgcagctacccaacttgagcactatcaacctggggataaatttcataaagcagattgacttcaagctgttccagaatttttccaatttggaaatcatttacttgagtgaaaaccgtatcagccccctggttaaagatacccggcagagttacgctaacagttctagcttccagaggcacattcgcaaaaggcgatctaccgattttgaattcgacccccactcaaatttctatcatttcacccggcctttgattaagccacagtgtgcagcctatgggaaggcgttagacttaagcctgaactctatcttctttatcggacccaatcagtttgaaaacctgccagacattgcatgccttaatttgtccgcaaacagtaatgcgcaggtgctctccggtacggaatttagtgctatccctcacgtaaagtacctggatctcacaaacaatcgcttggattttgataacgcttcagctctgactgagctctccgacctcgaggtactggacctgtcttataatagtcactattttcgaatcgccggtgtcacccaccacttagaattcatccaaaatttcacgaacctgaaggtgctcaatctctctcataataatatctacaccttgactgataagtacaatctggagagcaaatctcttgtcgaactggtgttctcaggaaataggctggatatcctatggaatgacgacgataaccggtacatctcaatattcaaaggcctgaaaaacctgactaggctggatctgagcctcaatcgtctgaaacacattcctaatgaagcattcctgaatctgcctgccagccttactgaactacatatcaatgacaatatgctaaaatttttcaactggactctgctgcagcaattccctcgcctcgagttgctggacttgaggggcaataagcttctattcttgaccgactctctgagtgactttaccagttccctccgtactttactgctttcccataacagaatctcccaccttccatctgggtttttatcggaggtatcatccctgaagcatcttgacctgagcagcaatttgttgaaaacaatcaacaaaagtgccctggaaacaaagactacaaccaagctgtcgatgctcgaactccacggcaatccattcgagtgcacctgcgacatcggtgacttccgcaggtggatggacgagcacctgaacgttaagatccctcgcttagtcgacgtgatatgcgccagtccgggtgaccagcgagggaagagcattgtttctctggagcttactacttgcgtaagtgacgtcacagctgtcatcctgttctttttcacgttcttcattacaacaatggttatgctcgcagccctggcccatcatctgttttactgggatgtctggttcatctataatgtgtgtctggcaaaagtcaagggttatcggagtttgtcaacatcccagacattttacgatgcatatattagttacgataccaaagacgcgtctgtcacggattgggtgatcaatgagctccgttatcacctggaagaatcccgagacaaaaatgtgctcctgtgcctcgaggaaagagattgggacccgggactggccataatcgacaacctgatgcagtccatcaatcagtcgaaaaaaaccgtatttgtgcttacaaagaaatatgcgaagtcctggaatttcaaaaccgcattttacttagccctccaacgtcttatggacgagaacatggacgtcataattttcatcctgctggagcccgtcctgcagcatagccagtatctccggctgaggcagcgaatatgcaagtcatccattttgcagtggcctgacaaccccaaggcagaaggactcttttggcaaacgcttcgtaacgtggtactaacagaaaacgactctcgatataataacatgtacgtggatagtattaaacagtactag

SEQ ID NO: 244225 - DNA, 3099 bp, synthetic construct
  misc_feature 1..3099: note = Description of Artificial Sequence: Synthetic coding sequence
  source 1..3099: mol_type = other DNA
atgggcttctgccggtctgcacttcatcccctgtctctgctggtacaggctattatgctggctatgaccctagctctggggacccttcccgcattcctcccctgtgagcttcagccccacgggctggtgaattgtaactggctttttttgaagtccgtgccccacttttctatggcggcacctcggggaaatgtcacatccctatccttgagctcgaaccgcatacaccacttgcacgactcggacttcgctcatcttccatctctgcgccacctgaacctgaaatggaattgtcctcctgtgggcttgtcccccatgcactttccttgtcatatgaccattgagccgtctacatttcttgcggtccccactctcgaagaactgaatttgtcatacaacaatatcatgaccgtgcctgctttacccaaatccttaatttccttatctctgagtcacacaaatatccttatgctagattctgcgagcctagccggtctccacgccctaagatttctgttcatggatggtaattgctattacaagaatccatgccgtcaggcactcgaggtggccccaggggctctcctgggactaggaaacctgactcacctttccctgaagtataacaatctgaccgtcgttcctcggaatctcccttcgagtctggagtacctcctgctgagctacaatcggatcgttaagctggccccagaagatctggctaatctgaccgctttgcgcgtgctggatgtgggaggcaactgccgcagatgcgatcatgcacctaatccttgtatggagtgcccaaggcactttccccagttgcaccctgacacattcagccatttaagccggctggagggcctggtactcaaggattcttcactctcgtggctgaacgctagctggttcaggggcttaggaaacttgcgagtgctggacctgagtgagaattttttgtacaaatgtattaccaagacgaaagcattccaggggttgacacagctgagaaaactgaatttatcctttaattaccaaaaaagagtttctttcgcccacctcagtctagctcctagtttcggcagcttggtggctctgaaggagttggacatgcacggtattttctttcgttcgttggatgagaccactcttcggcctctggcccgacttccaatgctgcagacgttgcgtctccagatgaacttcataaatcaggctcagctggggattttcagggcctttcctgggttacgctacgtggacctctcagataatcggatttctggggcaagcgaactgacggccactatgggagaggcagatggcggagagaaagtttggctgcaacccggtgacctagccccagccccagtggatacccccagctccgaggactttaggccgaattgctcaaccctgaatttcaccctggacctaagcagaaacaatctggttaccgtgcagcccgaaatgtttgcgcagctctctcacctccaatgcctgagattatcccacaactgtatttcccaggcagtcaacggcagtcagtttctccccctaacgggtttgcaggttctcgacctgagtcataataaactggatctgtaccacgaacactcattcacggagctgccgcgactagaggcactagacctgagttataactctcagcccttcgggatgcagggagtgggccacaactttagttttgtcgcccatctccggaccttgaggcacctgtcccttgcccacaacaacatccacagtcaggtgagccagcagctgtgtagcacatctctgcgtgctctagatttcagtggaaatgcccttggccacatgtgggcggaaggggacttatacttacacttttttcaagggctctctggtctcatttggctggatctgtcgcagaatagactgcacactctgttgccacaaacactgagaaatctccccaagagtttgcaagtcttaaggctgcgagataactacctggctttcttcaaatggtggtccctgcatttcctgcctaaactcgaggtattagacctcgccggtaaccagctaaaggcgctgaccaacggctctctccctgcaggtactcgccttcgccgactggatgtgtcttgtaattccatctctttcgtcgcgcctggcttcttcagcaaagccaaggaactgcgggaactgaacctgtccgcaaacgctctgaaaacagtcgatcattcatggttcggccctctggcctcagccctgcaaatcctcgacgtaagcgccaaccctctgcattgtgcatgcggagccgcttttatggactttctcctcgaggtccaggcagccgtgcccggacttcctagcagagttaagtgtggttccccaggacaactgcaagggctcagtatttttgcacaggatctgcgcctgtgtttggatgaagccctgagctgggattgcttcgccctgagtctgttggccgtggccttagggttgggggtaccaatgctgcatcatttgtgtggatgggacttgtggtattgtttccatctgtgcctggcgtggctgccatggcgaggcagacagtccggacgggacgaggacgctctcccatacgacgcattcgttgtgtttgataagacacaaagcgctgtcgcagattgggtgtacaatgaacttcggggacagcttgaggagtgtaggggacgctgggctctgcgcctctgcctggaggaacgcgactggttacctggtaaaaccctctttgaaaacctgtgggcgtcggtatacgggagcagaaagacactctttgtgctggctcatacggatcgcgtgtctgggctactgcgggcaagttttttactcgcacagcaaagactgttagaagaccggaaagatgtggtggtactggtaattctctcccctgatggcagacgttctaggtacgtgcggcttagacaacgcttgtgtcggcagagtgtgctcctgtggccccaccagcccagcggccaacgatcattctgggcacaactgggcatggccctcactagagacaaccatcacttttacaaccgcaacttttgccagggccctaccgccgagtag

SEQ ID NO: 244226 - DNA, 2139 bp, synthetic construct
  misc_feature 1..2139: note = Description of Artificial Sequence: Synthetic coding sequence
  source 1..2139: mol_type = other DNA
atggcatgcactggaccttcattgcccagtgccttcgatattttgggggcagcgggtcaggataagctgctctacctcaaacataagttaaagaccccacgacccggatgtcagggacaggacctgctgcacgctatggtgcttttaaagctggggcaagagactgaggcaaggatttccctcgaggcgctgaaggctgatgcggtcgctaggctcgtggcgcgacagtgggcgggagtggactctacggaagatccagaggaaccaccagacgtttcatgggctgtggcacggctctatcacctgctggcagaagagaagctctgtcccgcatcgctccgggacgtagcgtaccaggaggccgtgcggactctgagctctagagacgaccatagactgggggagctgcaggatgaggccaggaatcgctgcggctgggatatcgcgggagaccccggatccatcagaaccttacaaagtaacttgggctgtctccccccaagcagcgccctgccttcaggcacacggtctttacccagacctatcgatggtgtgtccgactggagccagggctgcagtttgaggtctacaggatctcccgctagcctcgcatcaaacttggaaatttcccagagtcccaccatgccgtttttgtcgttacaccggagcccccatgggccttctaaattatgtgatgaccctcaggcttccctggtccccgagcccgtgccaggtggttgccaagaaccggaagaaatgtcctggccaccctccggggaaattgcatcgccccctgagctcccctccagtccaccaccagggttgcccgaagtggcgcctgacgccacttccacaggactaccggacacccctgcggctcccgagactagcactaactatcctgtcgaatgcaccgagggctctgccggaccacaaagtctgcccctcccaattctagaaccagttaagaatccatgtagcgtgaaggatcagactcccctccagctgtctgtcgaagacacaacatcaccaaacaccaagccttgccctccaactcctacgaccccagagacttctccacctcctccaccaccccctcctagcagcaccccttgcagtgcgcatctcactcctagctcactgttccccagctctctggaatccagtagcgagcagaaattttataattttgtgattttgcatgcccgagctgacgagcatattgcccttagggtgcgcgagaagctggaggctctcggtgtccctgatggagctacgttttgcgaagatttccaggtccctgggaggggagagctcagctgcctgcaggacgccattgaccactccgcttttataatactgctactcacttccaacttcgactgccgcctgagcttacatcaggtgaatcaggccatgatgagcaatcttacaagacagggctcgcctgactgcgtgattcccttcttacctctagagagtagtcctgctcagctcagcagcgacactgcatcactgctatctggcttagtgagactggacgaacactcacagatctttgccaggaaggtggcgaatacatttaaacctcaccggctgcaggctcgcaaggcaatgtggcgtaaagaacaggatacacgggctcttcgggaacaatcccagcacctggatggcgagcgaatgcaggcggcagctctgaacgcagcctattctgcgtatctgcagtcttatctgtcctatcaggcccagatggagcagctgcaggtggccttcggctcacatatgtcctttggcaccggagccccttacggggctcgaatgcctttcgggggacaggtacccctgggggcacccccaccatttcccacctggcctggctgcccccagcccccacctctgcatgcatggcaagcgggtaccccaccccctccttccccacagcctgccgctttcccacagtctctcccatttccacagagtcccgcattcccaacagcaagccccgctccccctcagagccctggactgcagcccctcatcatacatcatgcccaaatggtccagctcggcctgaacaatcacatgtggaatcagcggggatctcaggctcctgaagacaagacccaggaagccgaatag

SEQ ID NO: 244227 - DNA, 3042 bp, synthetic construct
  misc_feature 1..3042: note = Description of Artificial Sequence: Synthetic coding sequence
  source 1..3042: mol_type = other DNA
atggggctgggaaccctgtcgcctcgaatgctggtgtggctggtcgcatccggcatagtgttctacggcgaactttgggtgtgcgctggtttagactatgattatacattcgatggcaatgaggaagataagaccgagactatcgactacaaggacccgtgtaaagcagcggtcttctggggagacattgctctcgacgatgaagatctgaacatattccagattgacaggacaattgatctgacacagaaccctttcggcaatcttggccatacaaccggtggactgggcgaccacgcaatgtcaaagaagcggggagcgctgtatcagctgattgacagaatccgacggatcggattcggccttgagcagaataacaccgttaaaggaaaagtgccattgcaattctcaggtcagaacgagaagaatagggttcctcgagctgccacatcacgtacagaacgaatctggcccggtggcgtcattccttacgtgatagggggaaattttacgggtagtcagagagcaatgttcaaacaagcaatgcgacactgggagaagcatacttgcgtaaccttcattgagcggtccgatgaagaaagttacatcgtgttcacctatcgcccttgcggttgctgttcatacgtggggagaagaggtaacggaccccaggctatttcaatcgggaaaaactgtgacaagttcggaatcgttgtccacgagttagggcacgtcatcgggttctggcacgaacacacaagaccggaccgggacaaccacgttacaattattcgggagaatatccagccagggcaagagtataattttctgaagatggagcctggcgaagttaacagcctgggagagaggtatgattttgacagcatcatgcattacgcacggaatacttttagtagaggtatgtttttggataccatcctgccctctagagacgacaacggcattagaccggctattggccaaagaacgcgcctcagtaaaggtgacattgcccaggcacggaagctctaccgatgtcccgcatgtggagagaccctgcaggagtcgaacggaaatctatctagccccggattccccaatggctaccctagctatactcactgcatatggagggtatccgttactccgggtgaaaagattgtccttaacttcactaccatggatctttacaagtcctctctttgctggtacgattacatcgaggtgagggatggctattggcgaaagtccccactgctaggcaggttttgtggagataagttaccagaagtcctgacctccacagacagtcggatgtggatcgagtttaggagctcgtccaactgggtgggcaagggatttgcggcagtgtacgaagcaatctgcggtggcgagattcggaagaatgaggggcaaattcaatcaccaaattatcctgacgattaccgtccgatgaaggagtgcgtttggaaaattactgtctctgaaagctatcacgtgggtttaaccttccagagttttgagatcgagcggcatgacaactgtgcatacgattatctcgaggtgagggatggaaccagtgagaattctcccctgatcggtcgcttctgtgggtacgacaagcccgaggatattaggagcaccagcaatacactatggatgaaattcgtcagcgacggaacagttaacaaggcagggtttgccgcaaatttctttaaggaagaagatgagtgcgccaagcccgatagaggtggctgcgagcagcgctgcctaaacactcttggaagttaccaatgtgcctgtgaaccaggctatgaactcgggcctgaccgtcgcagctgtgaagcagcctgtggcggtctcctgacaaagcttaatggtacaatcactacaccgggatggccaaaagagtaccccccaaataagaattgtgtgtggcaggtcgtagcaccgacacaatataggatttcggtaaaatttgaattttttgagcttgagggcaatgaggtatgtaaatacgattacgtggaaatctggtcaggcctgtcgtcagagtcaaaactgcacggcaaattctgcggcgctgaggtccctgaagtcatcacctctcagtttaacaacatgagaattgaatttaaaagtgacaacactgtgagtaaaaaaggattcaaggcacacttcttctctgacaaggacgagtgcagtaaagataatggaggatgccaacatgaatgcgtaaacaccatgggctcatacatgtgccagtgtcggaacggattcgtactccatgataataaacacgattgcaaagaggctgaatgcgagcagaaaatacacagcccatctggactgattaccagccccaactggcctgacaagtacccctctcggaaagagtgcacctgggagatctctgcaacccctggacaccggattaaactggcgttcagcgaattcgagatcgagcagcaccaggagtgcgcgtacgatcacttagaggtctttgacggcgaaaccgagaagtcgccaatcctcggacggttatgcggaaacaagataccggacccactggtggcaacgggcaacaagatgttcgtccgattcgtaagcgacgcctccgtccaacggaagggtttccaggcaactcactcaacggagtgcgggggtcggttgaaggccgagtctaagcctcgtgatctatactcacacgcccagttcggagacaataactacccaggccaggtggactgcgagtggctattggttagtgaaagagggtccaggctcgaactgagcttccagaccttcgaagtggaagaggaggccgactgcgggtacgactatgtcgagctgttcgatggacttgatagcactgcagtgggtctcggcaggttctgcggttctggtccacctgaggaaatatattccattggcgattcagtcctcatccacttccatactgacgataccatcaataagaaaggatttcatattcgctacaagtctatcagatatcccgatacgactcacacaaaaaaatag

SEQ ID NO: 244228 - DNA, 1179 bp, synthetic construct
  misc_feature 1..1179: note = Description of Artificial Sequence: Synthetic coding sequence
  source 1..1179: mol_type = other DNA
atgggccttggcacactgagccctcgcatgctggtgtggcttgtggcaagtggcattgtattttacggcgagttatgggtttgtgccggacttgattacgactacaccttcgacggcaatgaagaggacaagaccgagacaattgactataaggatccttgcaaggcagctgtcttttggggcgatattgcattagacgacgaggacctaaacatttttcaaattgatcgcactatcgaccttacacagaatccttttggtaacctggggcacaccacaggcggactgggcgatcacgctatgagcaagaagcgaggggctctatatcagctgatagataggattcggagaatcggtttcggcttggagcagaataacaccgtcaaaggcaaggttccactgcaattctctggtcagaacgagaagaatcgagtccccagggctgccacatcccgcactgagaggatctggcccggaggggtcatcccatacgtaattggcggtaatttcaccggaagccagagggccatgttcaaacaggccatgcggcattgggagaagcatacgtgcgttacattcattgagaggagtgacgaagaatcgtatatcgttttcacttacaggccatgtggctgctgtagctacgtcggtaggaggggaaacggtccgcaagccatttcaataggaaagaactgtgataagttcggcattgtagttcacgaattagggcacgtcattggattctggcacgaacatacacgacccgacagggacaaccacgtgacgattattagggaaaacattcagcctggccaggagtacaacttcctgaaaatggagccgggtgaagttaatagccttggtgaacgctacgacttcgatagcatcatgcactacgcacgaaatacttttagcagaggtatgtttcttgacactatactcccgagcagagatgataacgggattaggccagcaattggacagaggacccggttgagtaagggagacattgcccaggcaagaaaactgtacaggtgccctgcctgtggagagactctacaggagagcaatggtaacctatcttccccaggcttcccaaatggatacccaagctatacccattgtatatggagggtgtcagtcactcccggagagaaagtagtcttctcactctgctag

SEQ ID NO: 244229 - DNA, 3048 bp, synthetic construct
  misc_feature 1..3048: note = Description of Artificial Sequence: Synthetic coding sequence
  source 1..3048: mol_type = other DNA
atgcccagggctaccgccttgggggctcttgtgtctcttctattactgctgccgctgcccagaggtgccggtgggctgggagaacgcccagatgccaccgccgattactctgagttagacggtgaagaaggcacagaacagcagctggaacactaccacgacccatgtaaggcagcggtgttctggggcgatatcgcgttagatgaagacgatcttaagttattccacatagataaggccagggactggaccaagcagacagtaggggctacaggacatagcacaggcggtttagaagaacaggcatccgagagctcccccgacaccactgccatggacaccgggactaaagaagcaggaaaagatgggcgagagaataccacactgctgcattcacctggaactttacacgctgcggctaaaaccttttctcccagagttagacgggcaacaaccagtcgcaccgaacggatctggcccggaggtgtgattccctacgtgataggtggcaactttactgggtcacaaagggccatattcaaacaggcgatgcgccattgggagaaacacacgtgcgtgacattcatcgaacggacagacgaagaatcctttattgtcttttcataccggacctgtgggtgttgctcctacgtgggaaggagaggaggcggaccacaagcgatcagcatcggcaagaactgcgacaagtttggcattgtggctcacgagctcggacacgtggtcggcttttggcatgaacacactcgcccagatcgcgatcaacatgtgacaatcattcgggaaaacatccagccaggtcaggaatataattttctgaaaatggaagctggtgaggttagctcactcggggaaacctatgactttgactcaattatgcattatgcgcgaaacactttctcccgtggggtgttcctagacacaatcttgcctcgccaagatgataatggcgttcgcccaacaataggtcagcgtgtccgcttgtcccagggtgacattgcccaggctcggaaactgtacaaatgccctgcctgtggggaaacccttcaggacacaactggtaattttagtgcccctggattccccaatggctatccaagttacagccactgcgtatggcgtattagtgtgacacctggagagaaaatcgtgttaaactttacgtctatggacctcttcaaatctcggttatgctggtacgactatgttgaagtgagggacggatattggcgaaaagcacctctcctcggtagattctgtggcgataaaatccctgagccccttgtttccacggactcacgcttgtgggtcgagtttaggagttcctccaacatactgggaaaaggcttttttgcagcatacgaagctacgtgtggaggagatatgaacaaggatgcgggacagatccagagccctaattacccagatgattaccgaccatccaaggagtgtgtgtggcgaattaccgtgtccgagggttttcatgtgggccttactttccaagcgttcgagattgagagacatgatagttgcgcttacgactatctggaagttcgagatggccctacagaggagtccgcgctgatcgggcatttctgcggctatgagaagcccgaagacgtgaaaagctcaagcaaccggctgtggatgaagttcgtatcagacggtagcatcaataaggccggattcgcagctaacttttttaaagaggtcgacgagtgttcctggcctgaccatggaggatgcgaacataggtgcgtgaataccctcggttcatataaatgcgcatgcgatccgggttatgagcttgctgctgacaagaaaatgtgtgaggtggcctgcgggggattcatcaccaagctcaatggcactattacctctcctggctggcctaaggagtatcccaccaacaagaattgtgtttggcaggttgtagcccctgcacagtaccgaatcagcctccagttcgaggtgttcgagcttgaaggcaacgacgtctgcaaatatgactttgtggaggtgaggagcggcctctcccctgatgccaaactgcatggccgattctgcggtagcgaaaccccggaggtgattacttcccagtcaaataacatgagggtggagtttaaatccgataacactgtctccaaaagaggattccgggcacattttttttctgacaaggacgaatgtgccaaggataacggcggatgccaacacgagtgtgtgaacactttcggtagttacctgtgccggtgcagaaacggatactggctgcatgagaatggccatgattgtaaagaggccggatgcgctcataagatctcctcagttgagggcaccttggccagtcctaactggcccgataagtatccatcccgaagagagtgtacgtggaatatatcatccacagctggtcaccgggttaaactgacgttcaatgaattcgagattgagcagcaccaggaatgtgcctacgatcacctggaaatgtacgacggaccagacagtcttgcaccgatcttgggaaggttttgcggtagcaagaagccagacccaaccgtcgccagtggttcatcgatgtttctcagattctactccgacgccagcgtgcagcggaaagggttccaggccgtccattcaacagagtgcggtggcagactgaaagccgaggtccaaaccaaggaactgtactctcacgcacaattcggggacaacaactacccatccgaggcaaggtgtgactgggtgatcgtggcagaagacggatatggcgttgagctgactttccgaacttttgaggtggaggaggaggccgattgtgggtacgattatatggaagcgtacgatggttatgatagctctgccccacggctgggtagattctgtgggtcaggtccactggaggagatttactcagccggtgacagtctaatgattcgcttcagaacagatgacactatcaataagaagggcttccacgcaaggtatacttcaacgaaatttcaggacgctttacacatgaagaagtag

SEQ ID NO: 244230 - DNA, 2298 bp, synthetic construct
  misc_feature 1..2298: note = Description of Artificial Sequence: Synthetic coding sequence
  source 1..2298: mol_type = other DNA
atgtcaggcgaccatctccacaatgactctcagatcgaggctgattttagattaaatgatagccacaagcacaaggacaagcataaagacagggagcaccgtcataaagaacataagaaagagaaggatcgagagaagtcgaagcatagcaactcagagcataaagactccgaaaagaagcataaggaaaaagagaagacaaagcataaagacggctcttccgaaaagcataaagacaaacacaaagaccgcgataaagaaaaaagaaaagaagagaaagtccgggcaagcggagatgcgaaaattaaaaaagagaaagaaaacggtttctccagtcccccacagatcaaagacgagcctgaagatgatggatacttcgtacctcctaaggaggacatcaagccgctgaaacggccacgggatgaagatgacgccgactacaagcccaagaaaatcaaaactgaagacaccaagaaggagaagaaacggaagctagaggaggaggaggatggcaaacttaagaagccgaaaaacaaagacaaagacaaaaaagtgcctgaacccgataataagaagaagaagcctaaaaaggaggaagagcagaagtggaagtggtgggaagaggaaagataccccgagggaattaagtggaagttccttgaacacaaggggcctgtgtttgctcctccttacgaacctttgcccgagaatgtgaagttctactacgatggcaaggtcatgaaactgagtcccaaggccgaggaagtcgctacgttcttcgcaaaaatgctggatcatgaatataccacaaaagagatattcagaaagaactttttcaaagactggaggaaggaaatgaccaatgaggaaaaaaacatcattactaacctttcaaaatgtgatttcactcagatgtcccagtacttcaaggctcagactgaggccagaaaacagatgagcaaagaggaaaaactcaaaatcaaagaggaaaacgagaaactcctcaaagagtatggtttttgtattatggataatcacaaggaacggatcgcgaatttcaagatagagccaccaggactattcagaggcagaggcaatcacccaaaaatgggtatgctgaagaggcgcatcatgcccgaagatatcataatcaattgtagtaaggatgccaaagtgccatctccccctcccggtcacaaatggaaggaagtgcggcatgacaacaaggttacatggcttgtgagctggacagagaacatccagggttccatcaagtacatcatgttgaaccctagttctcgtattaaaggagagaaagactggcagaaatatgagactgcccgacgactaaaaaagtgtgtcgacaaaatcagaaatcagtatcgcgaagattggaagtctaaagaaatgaaggtgcggcagcgtgccgtggccctttactttatcgacaagctggccctcagagccggtaatgagaaggaagaaggtgaaaccgcagatacagttggctgctgctcgcttcgggtcgaacatatcaacttgcacccggaattagacgggcaggagtacgttgtggagttcgactttcttggcaaagattccatccgatattataataaggtgcctgtggagaaacgagtcttcaaaaatctgcagctcttcatggagaataagcaacctgaagatgatttatttgaccggctgaacactgggattctcaataagcacctgcaagacctgatggagggactgaccgccaaggtgtttagaacttacaatgccagtattaccctccagcaacaattaaaagagttaaccgccccagacgagaatatccctgctaagattctgagttataatagggccaaccgcgcagtggctatcctgtgcaaccatcaacgcgctccccctaagactttcgagaagtcgatgatgaacctgcagactaagatcgacgccaagaaggagcaacttgccgatgctagacgcgatctgaaatcagccaaagcggacgccaaggtaatgaaggatgccaaaaccaaaaaggtggtggagtctaagaagaaggccgtacagcgactggaagaacagctgatgaagctggaggtccaggctactgatcgtgaagagaataagcaaatcgccctagggacgtcaaaactaaactatctggatcccaggattactgtcgcctggtgcaaaaagtggggggtccccattgaaaaaatctacaataaaacacagcgggaaaaatttgcctgggcaatagacatggccgacgaagactatgagttctag

SEQ ID NO: 244231 - DNA, 1806 bp, synthetic construct
  misc_feature 1..1806: note = Description of Artificial Sequence: Synthetic coding sequence
  source 1..1806: mol_type = other DNA
atgcgcgtggtgcggctcctgaggcttcgagcggcactgaccctgctcggggaagttcccagacgaccggctagccgtggtgtgccaggaagccgaaggacacaaaaaggaagcggcgcacgctgggagaaagaaaagcacgaggatggcgtaaagtggcgccagctcgagcacaagggtccatacttcgcgcctccctacgaacccctgcccgatggagtccgattcttctacgagggccgaccagtacggctgagcgtcgccgcagaagaagttgccaccttctatggacggatgttagaccatgaatatacaacgaaagaggtattccggaaaaatttcttcaacgactggaggaaggaaatggcggtcgaagaacgggaggtgatcaagagcctggataaatgtgacttcactgaaattcaccgctattttgttgataaggcagctgccaggaaggtcctttctcgggaggagaaacagaagctcaaagaagaagctgagaaattgcagcaggagttcggttattgtatactggatggtcatcaggaaaagatcggaaattttaagatcgagcctcccggactctttcgtgggaggggagaccaccccaagatggggatgcttaagagaagaatcaccccggaggacgttgtgatcaattgctctcgtgatagtaaaatcccagaacctcctgccggacaccaatggaaagaggtccgctctgacaacaccgtcacgtggttggctgcctggacagagtccgtacagaacagtattaaatatatcatgcttaacccatgttccaagctgaaaggcgaaacggcctggcagaaattcgagacggccaggcgattgagaggatttgtggacgaaattcggagtcaataccgcgctgattggaaatccagagaaatgaaaacacgccagcgcgctgtcgctctgtactttatagacaagctggctttaagggctggaaatgagaaagaagatggcgaagccgctgacaccgtgggatgctgtagccttagagtcgagcatgtgcagctacacccagaggcagacggttgccagcatgtggtagaatttgatttccttggcaaggattgcattagatactacaatagggtgccagtggaaaagcccgtctacaagaatctgcaactcttcatggagaataaagatcctcgcgacgacctgttcgatagactaacaaccacttcgctgaataagcatctgcaggagttgatggatggcctcaccgccaaggtttttcgcacgtataacgcctcaattactctgcaggagcagctcagagcattgactcgcgcagaggattctatagcagctaaaattcttagctacaatagggctaatcgcgtagtggcaattctatgtaaccaccaaagagccacaccaagcacatttgagaagagtatgcagaatctgcagaccaagatccaggccaagaaggaacaggtcgccgaagccagagccgaattgaggcgtgcacgcgctgagcacaaggcccagggcgatgggaaatctagaagcgtcttggagaagaagcgcagactgctggagaaactgcaggagcaactagctcagctgagtgtgcaggcaacagataaggaagagaacaagcaggtcgccttgggcacctccaagctgaactatctggaccctcggatttctatcgcatggtgcaagagatttcgcgtaccggtagagaagatttactccaaaacccagcgagaacggttcgcgtgggccttggcaatggccggagaggacttcgagttttag

SEQ ID NO: 244232 - DNA, 1512 bp, synthetic construct
  misc_feature 1..1512: note = Description of Artificial Sequence: Synthetic coding sequence
  source 1..1512: mol_type = other DNA
atgctggaccacgagtacaccacaaaggaggttttccggaagaatttcttcaacgactggcgcaaagagatggcggtggaagagagagaggtgattaaatctctggataagtgcgactttacggaaatacatcggtactttgtcgataaggcggcagccaggaaagtgctgagccgggaagagaaacagaagctaaaggaggaagcagaaaaactgcagcaggaatttggctactgtattttggatggtcaccaggagaaaatcggcaactttaagatagagccacccggactgtttagaggtcgcggagaccatcccaagatgggtatgctcaaacgacggatcacgcctgaggacgtggtgattaactgcagtagagactccaaaattccggagccccctgctggtcaccagtggaaagaagttcgttccgacaacacggttacgtggctggctgcatggacagaaagtgtgcagaattcaatcaaatacattatgttgaacccctgctccaaactgaagggagaaactgcctggcagaaatttgaaaccgctaggcgccttcgcggattcgtcgatgagataaggtctcaatatagggcagattggaagtctagagagatgaagacacgacaaagggctgtcgcactgtacttcatcgataaactggctctgcgggctggtaacgagaaagaggacggagaggccgcagataccgtcggatgctgctcacttagagttgaacacgttcagctccatccagaggctgatgggtgccagcacgtggttgagttcgacttcctgggcaaggactgtatcagatactataatagagtacccgtcgagaagcctgtgtacaaaaacctgcaactgtttatggagaataaggaccccagagacgatctgtttgatagactgactacgacctctctcaacaaacacctccaggagttaatggatggattaacagcgaaagtattccgaacctataacgcaagtataaccctgcaagagcagctgagagccttaacaagggccgaagatagcattgcggctaagatcctgtcctataaccgtgccaatagggtcgtagccatcctatgtaaccaccagcgcgctactcctagcactttcgagaagagtatgcagaacctacaaacaaaaatccaggccaaaaaagagcaagtggccgaggcgagagccgagctaagacgtgccagagctgaacataaggctcagggcgatggtaagtcccgcagcgttctggagaaaaagcgtcggctgcttgagaaacttcaggagcagctcgcccagctcagcgtgcaagccaccgataaagaggagaataaacaggtagctctgggtacatcaaagttgaactacctggatcccagaatcagtattgcatggtgtaagcgcttccgggtcccagttgaaaaaatttatagtaagacacagcgggagaggtttgcatgggcgttggccatggccggagaggacttcgagttttag

SEQ ID NO: 244233 - DNA, 1512 bp, synthetic construct
  misc_feature 1..1512: note = Description of Artificial Sequence: Synthetic coding sequence
  source 1..1512: mol_type = other DNA
atgctagatcacgaatatactacaaaggaggtgtttcgtaagaatttctttaatgattggaggaaggagatggctgttgaagagcgggaggtcatcaaatcccttgacaaatgtgatttcaccgagatccaccggtacttcgtcgataaagccgctgctcggaaggttttgtccagggaggaaaaacaaaagctgaaggaggaggccgagaaattgcagcaagaattcggatattgcattctggatggtcaccaggaaaaaataggaaacttcaagatcgaacccccaggtttattcagaggcaggggtgaccatccaaagatgggcatgctgaaacgcaggataacgcccgaggacgtcgtgatcaactgttccagagattcaaaaatacctgagccacctgcaggacaccaatggaaggaggttcggtcggacaataccgtgacatggctggcagcttggaccgagtcagtgcaaaacagcatcaagtatataatgctgaacccatgttcaaaactcaaaggcgagaccgcttggcagaagtttgaaaccgcacggcgactgcgcggattcgttgatgagatacggagccaatacagagccgactggaagagccgagagatgaagacacgacagagggctgtcgcattatattttatcgacaagttggcactaagagccggtaatgaaaaagaggacggggaggccgcagacaccgtaggatgttgctcactgcgggtcgagcatgtccagttgcacccagaggccgacggctgccaacacgtggtagaattcgacttcttggggaaggattgcatcagatactataacagggtcccggtggagaaaccagtctataagaacctgcagctgttcatggagaacaaggatcctcgggacgatctcttcgaccgcctcacgacgacaagcctgaacaagcacctgcaggaacttatggatggacttaccgcaaaagtgtttagaacttataacgcaagtattacgctccaggagcagctgcgcgctcttactcgtgcggaggacagcatagccgctaagatcctatcctataaccgggcaaatagagtggtggctatcctgtgtaatcatcagcgagccacaccatcaacgttcgaaaagtcgatgcagaatctgcagacgaaaatacaggcgaagaaggagcaggtggctgaggcgagggccgagcttaggagagccagggcagagcataaggcccagggtgacggcaagtcccgaagtgtgttagagaaaaaaagaaggttgcttgagaagcttcaggaacaactggctcagctctctgtgcaggccacagataaagaggagaataagcaggtcgccctgggcacgtccaagctcaactacctggaccctcggatctccatcgcctggtgcaaaagatttagggtgcctgtagaaaagatctatagtaaaactcagagggaacgcttcgcgtgggcactagccatggctggcgaggactttgagttctag

SEQ ID NO: 244234 - DNA, 1512 bp, synthetic construct
  misc_feature 1..1512: note = Description of Artificial Sequence: Synthetic coding sequence
  source 1..1512: mol_type = other DNA
atgttggaccatgagtacacgactaaagaagtgttccggaagaacttttttaatgactggcgcaaggaaatggccgtagaggaaagggaggtgattaaatctctggacaaatgcgattttacggagatccatagatacttcgttgacaaggccgctgccagaaaagttctgtcacgcgaggaaaagcagaagctcaaagaagaggcggaaaaactccaacaggagtttggttactgtattcttgacggacatcaggagaagatcggcaacttcaagattgaacccccaggtctcttcaggggacggggtgaccatcctaagatgggaatgctcaagcgccgtattactcccgaggacgtggtgatcaattgttcccgcgactcaaaaattccggagccacccgctggtcatcaatggaaagaggtgcggtctgacaatacagtcacatggttagccgcttggactgaatccgtgcagaattcaattaagtatatcatgcttaacccgtgctctaaactaaagggcgagaccgcatggcagaagttcgagaccgcccgaagactcagagggttcgtagatgagatccggagtcagtatagggccgattggaagtctagggaaatgaaaacccgtcagcgagccgtcgccctctatttcatcgacaagctcgctctaagggcaggaaatgagaaagaagacggtgaggccgctgatacagtgggatgttgttcactgcgggtggagcacgtgcagctacatcctgaggccgacgggtgccaacatgtcgtcgaatttgacttcctggggaaggactgtataagatattacaatagagttccggtcgaaaagcctgtctataaaaaccttcagctgttcatggaaaacaaggatcccagggacgacctgttcgataggttaaccacgacctctctaaataagcatctgcaggagctgatggatggactgaccgccaaagtgttccgtacgtataatgcatcgatcacccttcaggagcagctaagagcacttacccgagctgaggatagcatcgccgctaaaatactctcctataatcgggcaaacagggtcgtcgccatcctgtgcaaccaccagagagccaccccctctacctttgagaagtcgatgcagaatctccagacaaagatccaggcgaagaaggaacaggtcgccgaggcccgagccgagcttcgtcgcgctcgggcagagcacaaggctcagggtgatggaaaaagtcgcagcgtgctggagaagaaacggagactacttgagaagctacaggagcagttagctcaattgagtgtacaggcaacggacaaagaggaaaataagcaggtggctctcggcacatccaagctgaattatttggaccctcgcatatcaattgcctggtgcaaacggtttcgggtcccagttgaaaagatctatagcaaaacccagcgcgaacgcttcgcatgggcactcgctatggcaggggaggacttcgagttctag

SEQ ID NO: 244235 - DNA, 4569 bp, synthetic construct
  misc_feature 1..4569: note = Description of Artificial Sequence: Synthetic coding sequence
  source 1..4569: mol_type = other DNA
atgagtcgcaacgacaaagaacctttttttgtgaagtttctaaagtcctccgacaacagcaagtgtttctttaaggcattggagtctattaaagaattccaaagcgaagagtacttgcagataataacggaagaggaggctctcaaaataaaggaaaacgacagaagtctttacatttgtgatccattctcaggggtggtttttgatcatctgaagaaactaggctgccgtatcgttggaccccaggttgttatcttctgtatgcaccatcaacgctgtgttccccgtgctgagcatcccgtctataatatggttatgtcagatgtcaccatctcctgcacatccttagagaaggaaaaacgcgaagaagtgcacaaatacgttcaaatgatgggcggacgggtgtatcgcgacctaaatgtgagcgtgacacacctcattgccggtgaagtgggtagtaagaaatacctggtggccgcaaatctgaagaaacctatactactgccatcatggatcaaaactctgtgggagaagagccaggagaagaaaattacccgttacacagatattaatatggaagacttcaagtgcccaattttccttggatgcattatttgcgttacggggctttgcggcctcgatagaaaggaagtacagcagctcaccgtgaagcatggaggccaatatatgggccagttgaaaatgaatgagtgcacccacctaatcgtgcaggagcctaagggccagaaatacgaatgcgccaaacgctggaatgtgcattgcgtaacgacacagtggttttttgactccatagaaaaggggttttgccaggacgaatccatttacaaaacagaaccaagacctgaggcgaagactatgcctaacagttccacccctactagccagattaataccatcgattctaggaccctgtccgacgtgtcaaacatctctaatatcaatgcgtcatgcgtatctgagtctatttgtaattctctgaactctaagctggagccaaccctagaaaacctggagaatctggatgtcagcgcgtttcaggccccagaggacctgcttgacggatgtcgcatctatctctgtggtttctcgggacgcaagctggacaaacttcggagactcatcaatagtggtgggggagtgagattcaatcagctgaacgaggatgtgacacatgtgatcgtgggtgactatgatgacgaactgaagcagttttggaacaagtccgcccatcgaccacacgtggtgggtgctaaatggctgctcgaatgttttagcaagggttacatgctgtccgaggaaccatacatccacgcgaactaccaaccagtggaaataccagtaagccataagcctgaatctaaagctgcattgctcaaaaagaagaactccagcttttctaaaaaagattttgcgccttcggagaagcacgaacaggccgatgaggatcttctgtctcagtacgagaatggctcttcaacagtggtcgaggccaagaccagcgaggccagaccatttaacgattccacccatgcggaacctttgaatgattccacacacatttccctccaggaggagaaccaatcaagcgtgtcccattgcgtgcccgacgtctcgaccatcaccgaggaaggcctgttttcccagaaatcttttctcgtactgggattttctaacgagaatgagtctaatatcgctaacataatcaaggaaaacgctggaaagatcatgagcctcctgtctagaactgtagcagactatgcagtcgtaccactgctcgggtgtgaagtggaggccaccgtaggagaagtcgttaccaacacgtggttagtcacatgtattgactatcagacactgtttgatcctaagtccaaccctctgttcacccccgtgcctgttatgacaggcatgacccccctcgaggactgcgtgatatcattcagccagtgtgcgggtgccgaaaaagaatcactcacattcctggctaatctcctgggcgcaagcgtgcaggaatatttcgtgagaaaatcgaacgcaaagaagggaatgttcgcaagcacgcatctaatacttaaggagaggggcggttctaagtatgaggccgcaaaaaaatggaaccttccagctgtgaccatcgcctggctgctcgagaccgctcgcacaggaaagcgggcagacgagagtcacttcctgattgaaaatagcacaaaagaagaaagatctttggagacagaaatcacaaacggtatcaacctcaattccgatactgccgagcaccctggcacacgtctgcagacccataggaagacagtggtgacccctctggacatgaacaggtttcaatcaaaggctttcagagctgtggtgtctcagcacgccagacaggtcgcagcaagccccgctgtgggacagccactccagaaggaaccttccttacacctcgataccccaagcaagtttctctctaaggataaacttttcaagccaagtttcgatgtcaaggacgccctggctgccctggagactcccggaagacctagccaacaaaaacggaaaccttccaccccgctgtccgaggttatagttaaaaatctccaactagccctcgccaattcttccaggaatgctgtggctctctccgccagcccccaactcaaagaggcgcagtcagagaaagaagaagcgcctaagccactgcataaggtagtggtttgcgtctcaaagaaactctcaaagaaacagagcgaattgaacgggatcgctgcctccctgggtgctgactaccggtggtccttcgatgaaaccgtcacccatttcatctaccagggacgacccaatgacaccaatcgcgagtataaaagcgtgaaagagagaggggtccacatcgtgagtgagcactggctgctcgattgtgcgcaagagtgcaagcacttgccggagagtctgtaccctcatacatataacccaaaaatgtcattagatatcagcgccgtgcaggacggcagactgtgtaattccagactgctgagtgccgttagttctacgaaggacgacgaaccagatcccttaattctcgaggagaacgatgtcgataacatggccacaaacaacaaagaaagcgccccatctaatgggtctggcaaaaacgattccaaaggtgtgctgacacaaactctcgaaatgcgcgaaaactttcagaaacaactgcaagaaatcatgagtgcaacgagcattgtgaagccccaaggccagcggaccagcctgtccaggagcggctgtaatagcgcgtccagtaccccggattctacaagatccgcgaggtccggcaggtcacgtgtgctggaggctcttagacaatctaggcaaacagtccctgatgttaacacggagccttctcagaatgagcagattatatgggacgatcctacagcacgtgaggaacgggctcggctagcctctaatctccaatggccctcttgtcctactcagtactccgagctacaggtggatatccagaatctcgaagactcccccttccaaaagccattgcatgacagtgagattgcaaaacaggctgtgtgcgaccccggaaacatccgggtcaccgaggctcccaagcaccccattagtgaggaacttgagacacccatcaaggatagtcaccttattccgaccccacaggctccatccatcgcgtttcctctggccaacccaccagtggcgccacatccacgggaaaaaataattacaatagaagaaactcacgaagaactcaaaaaacagtacatatttcagttaagcagcctgaaccctcaagaacggattgactactgccatttgatcgaaaagcttggcggtctagttattgaaaagcaatgctttgaccctacctgtacacacattgtcgttggtcaccctctgcgcaacgaaaaatacctggcttccgtggcagcaggcaaatgggtcttgcatcgtagctacttagaggcgtgccgaacagccggtcatttcgtgcaggaggaggactatgagtgggggagtagttctatcctcgacgtcctcaccggtataaacgtccagcagcgcagactagcactggccgcaatgcgctggaggaaaaagattcagcagaggcaagagagcgggatcgtggaaggtgccttctccgggtggaaagtgattctgcacgtcgatcaatctagagaggctggttttaagcgcttgcttcaatccggcggtgccaaggtcctgcccggacattcagttccactgtttaaagaggcaacgcaccttttctccgatctcaataagttgaagcccgatgactctggcgtgaacatcgcagaagccgcagcccagaatgtgtattgcttaagaacagaatacatagcagactacctcatgcaggagagtccaccacacgtggagaattactgtttaccagaagctatctcatttatacaaaacaataaggaactggggaccggactctcccaaaagcgtaaggcacccactgagaaaaacaagattaagcgaccacgagttcattag

SEQ ID NO: 244236 - DNA, 3138 bp, synthetic construct
  misc_feature 1..3138: note = Description of Artificial Sequence: Synthetic coding sequence
  source 1..3138: mol_type = other DNA
atgggatcccagccgccacttggcagccccctatctcgcgaggagggggaagccccacctcctgcaccagcttccgaagggagaagacgatcccgccgagttcggcttcgtgggagttgccgtcatagaccaagtttcctggggtgtcgggagcttgcggcaagcgcaccggctcgacctgctccagcttcatcagagataatggccagtgccgcaaaggaattcaaaatggacaatttctcacccaaggccggaactagcaaactacagcagactgtgcctgcagacgcttcccctgattcaaagtgcccaatttgtctggaccgattcgataacgtgagctaccttgaccggtgcctccacaaattctgttttcgctgcgtgcaggagtggtctaaaaacaaagcagagtgtccactgtgtaaacagccctttgactccatcttccactctgtgcgagcagaggacgacttcaaagagtacgttcttcggccatcttataacggctcctttgtgacgccagatcgcagattccgctaccgcacaacccttacccgcgaaagaaacgccagcgtgtacagtccctccggaccagtaaacaggcgcacaacaaccccgcctgatagcggcgtcctgtttgaggggcttggtattagtacccggccaagagacgtggagatcccccagttcatgcgacaaattgcagttcgccgtcccaccaccgctgatgaaaggtctctccggaaaattcaggagcaggatatcatcaatttccggagaactctgtaccgggcaggagcaagagtccggaatatcgaagatggtggccgataccgagatatctcagctgaattctttcgcagaaaccccgcatgtcttcacaggcttgtgccttggttgaagcgagaactgaccgtccttttcggcgctcacggttcactagtcaacatcgtgcaacatatcatcatgtctaacgtgactcgatatgatcttgagtcacaggctttcgtttcagacttgcgaccttttcttctcaatagaaccgaacatttcatacatgaattcatctcttttgcacggtctccattcaatatggccgcattcgatcagcatgccaattatgattgccccgctcctagctacgaagagggatcgcactctgactcatctgtaattactatttcccctgatgaagccgagacccaagaacttgacattaacgttgccactgtcagccaagccccttgggacgatgagacccctggaccaagctactcctccagtgagcaagtgcatgttaccatgtcttcactccttaacaccagcgatagttccgacgaagagctggtcactggcggtgccaccagtcaaattcagggcgtgcagacgaatgatgatctgaataatgattctgatgattcttccgataattgcgttatcgtggggtttgtcaaaccactggctgaacgcaccccggagctcgtcgaattgagttctgattcggaagatctgggttcatatgagaagatggagaccgtgaaaacccaggagcaggaacagagctacagttccggtgactcggacgtgagtagatgcagttcaccccactcagtgctgggaaaagacgagcagatcaacaagggtcactgcgactcatccacgaggatcaagagtaagaaagaagaaaagcgttcaacatctctcagtagcccacgcaatctgaatagtagtgtcaggggggaccgcgtgtactctccatataatcaccggcatcgcaaacgcggtagaagtaggagcagcgacagtcgctcccagagtaggagtggccacgatcagaagaatcaccgaaaacaccatggcaaaaaaagaatgaagtcaaagaggtcccgcagcagggaaagctcccggcctcgcggtaggcgagataagaagcggagccgtacccgggactcttcttggagtcgccgatcacagacactgtctttgagctctgagagcacatcgcgctcacggtcccgatcaagcgatcacgggaagcgacgaagtcgaagcaggaaccgggacagatattacctcagaaacaactacggctcacggtacaagtgggagtatacatactatagtcgcaacaaggaccgagatgggtacgaatctagctataggcgtcgtaccctgtcccgcgctcactactctcgacaatcgtcaagtcccgaattccgggtgcaatcttttagtgagaggacaaacgcgcgaaagaagaacaatcatagtgaacgcaagtattactattacgagcggcacagatcaagaagcctgagctctaaccggtctagaaccgcctctactggtaccgatcgtgtgcgcaatgagaaacctggaggcaagcgcaaatacaagacccgtcaccttgaggggactaatgaagtggcccagccctcaagggaattcgcttccaaggcaaaggactcacactaccaaaaaagctcttcaaaattggatggcaattataagaacgaatccgacacattctccgatagcagaagcagcgatcgcgaaacgaagcacaaacgacgtaagcgcaaaacgcggtcactgagcgtagagattgtgtacgaggggaaggcaacagacactaccaagcaccacaagaaaaagaagaagaagcacaagaaaaaacataagaagcaccatggcgacaacgcgagcagaagccctgtggtgattactatcgactctgacagtgacaaagatagcgaggtcaaggaagataccgagtgtgataattcagggcctcaggatccactccaaaacgagttccttgccccttctttggagccctttgaaacaaaggatgtggtgaccatcgaggctgagttcggcgttcttgacaaagaatgcgacatagctaccttgagcaacaatctgaataacgcaaataaaaccgtggataacattcctccattggctgccagcgtggagcagacattggacgtgcgagaagagtccaccttcgtaagcgacttagagaatcagccctcaaacatcgtctccttgcaaactgagccgagccgacaactgccaagccctaggactagccttatgagcgtctgcctcggcagagactgtgacatgagttag

SEQ ID NO: 244237 - DNA, 2943 bp, synthetic construct
  misc_feature 1..2943: note = Description of Artificial Sequence: Synthetic coding sequence
  source 1..2943: mol_type = other DNA
atgataatggcctccgccgcaaaggaattcaaaatggacaatttcagccccaaggcaggaacatccaagttacagcaaaccgtgccagcggacgcatcacctgacagtaagtgccccatatgtctggatcgtttcgacaatgtctcttacttggaccgctgtctccataaattctgtttccgatgcgtgcaagaatggagcaagaacaaagccgaatgtccactctgtaagcagcctttcgactctatattccactcagtgagagccgaggatgactttaaagagtacgtcctgagacccagttacaacggatcctttgtcacacccgacagaaggttcagataccgcacgactctcacaagggaaaggaacgcctctgtatacagtccctcaggacctgtgaataggcggaccacaaccccccctgattctggggttctgttcgagggactggggatctccacaagacccagggatgttgaaatcccacagttcatgagacagatagccgtgcgacgtcccaccactgctgacgagcggagtctgagaaaaatccaggaacaggatatcatcaactttaggagaaccctctatcgagctggcgcaagagtcaggaacatcgaggatggtggacgctatcgagacatttccgccgagttcttccgcaggaacccggcatgtctgcaccggctggtgccttggttaaaacgcgagctgactgtgctgttcggcgcacacggatcactcgtgaatatcgtccagcatataattatgtctaatgtgactagatatgacctagagagccaggccttcgtgagtgatcttcggccttttctgttaaaccgaactgagcactttatccacgagttcataagctttgccagatcccccttcaatatggctgcctttgaccagcacgcgaattacgattgcccggcaccttcttacgaggaaggttcgcacagtgatagcagcgttattacaatttcccccgacgaggccgaaactcaggagctggatattaatgttgccacagtgtcacaggctccttgggatgatgagacccccggaccaagctacagctctagcgagcaggttcatgttactatgagttctttgttaaatacgtccgactcatctgatgaggagctcgtcacaggaggggctacatctcaaatccagggagtgcagactaatgatgacctgaataatgacagcgatgattctagtgataactgtgtgattgtgggtttcgtgaagcccttggctgagaggactccagaactcgtggagttgagttctgattccgaggacttaggctcatacgagaaaatggaaacagttaagactcaggaacaagaacagagttacagctcaggtgacagcgacgtgtcacggtgcagctcccctcactccgtgctgggaaaggatgaacagattaataagggccattgcgattcaagtacacgaattaagtcgaaaaaggaggaaaaaaggtccacctccctcagctcgccgagaaatctgaatagctccgttcgcggtgaccgggtgtattcaccctacaatcaccgccatagaaagcgtggacgcagtaggtcctccgacagtcgaagtcagtcccggtcggggcacgaccagaagaatcaccgcaaacatcatggcaaaaagcggatgaagtccaagagatctagaagtcgcgaatcttcccgcccacggggtaggcgggataaaaagagatcccggacacgcgactccagctggagtcggcgatcccagacactgtcactgtcctccgaatcgacaagcagatccagatccagatccagtgaccacggcaagaggagaagtagatcgagaaatagagatagatattatctccgcaacaactatggcagtcgctacaaatgggagtatacctattactccaggaataaagatcgcgatggatatgaaagctcatatcgacgccgaactctttcacgggcacactactcaaggcagtcctccagccctgaatttcgggtgcaatcattcagcgaaagaaccaacgcacgcaaaaagaacaatcattcggagcggaaatattactactatgaaagacatcgatctaggtcgctttctagcaaccgaagtcgcaccgcctccacgggaactgatagagtgcgaaatgaaaagcctggtggaaaaaggaagtataagacccggcatctagaaggtacaaacgaagtcgcccaaccatcaagggagttcgcatcaaaagcgaaggattcccactatcagaaaagttcttccaaacttgacggcaactacaaaaacgaaagcgacacctttagtgactctcgttccagtgaccgggaaacaaagcataaacgacggaaaaggaagacccggtccctgagcgtggaaatcgtctatgaaggcaaagccaccgatacaaccaagcatcacaaaaaaaaaaagaagaagcataaaaaaaagcataaaaaacaccatggtgacaacgcttcacggtctcccgtcgtgatcactatcgactctgacagtgacaaggattccgaggttaaagaagatactgaatgtgataactcaggtccccaggatccattgcaaaatgaatttttagcaccttcactcgaaccttttgaaactaaagatgttgttaccatcgaagccgaattcggagtgctcgacaaagaatgtgacatcgcaaccctaagcaacaacctaaataacgcaaataagacagtggacaacattcctcccttagctgcctcagtcgaacagacgttggacgtgcgagaagagtctacattcgtgtcggacctggagaaccagccttcaaacatcgttagcttgcagaccgagccgtctagacaattgccttctcctaggacctccctgatgtcagtgtgcctgggacgtgactgcgacatgagttag

SEQ ID NO: 244238 - DNA, 999 bp, synthetic construct
  misc_feature 1..999: note = Description of Artificial Sequence: Synthetic coding sequence
  source 1..999: mol_type = other DNA
atgaaactggggagggcagtgcttggccttctcctgctggctccttcagtcgtccaagctgttgagcccatttccttgggactcgcccttgcgggagtgctgaccgggtacatttatcccagactgtattgcttgtttgccgaatgttgcggacaaaagaggtccctcagcagagaagcactccaaaaggacctggatgataacctcttcgggcagcacttggcgaaaaagataatcttgaacgctgtattcggctttatcaacaatccaaaacccaagaagccccttacactttcgctgcatggctggacgggaacgggaaagaacttcgtgagtaagattatcgcagaaaatatttatgagggtgggctcaattccgattacgtgcatctgttcgtagccacgttgcactttccgcatgccagcaacatcaccctttataaagatcagttacaactctggatccgaggaaatgtgagtgcttgcgccagatcaatctttatcttcgatgaaatggataaaatgcatgccggtctgatagacgctataaagccattcttagactactatgacctagtggacggcgtcagctatcagaaggctatgttcattttcctgtcgaacgcaggggcagagaggatcacagatgtcgccctggacttttggcgcagcgggaagcagagagaggacattaagcttaaggatattgaacatgcccttagcgtgtccgttttcaataacaagaacagcggtttttggcattcttcactcatcgatcgcaatttgatcgactacttcgtgccgtttcttccactggagtataagcatctcaagatgtgtattcgggtggaaatgcagtctaggggttacgaaatagatgaggacatcgtctcacgcgtggccgaggagatgaccttctttcctaaggaggagcgggtatttagcgataagggttgcaagacagtctttaccaagctggactactactatgacgattag

SEQ ID NO: 244239 - DNA, 906 bp, synthetic construct
  misc_feature 1..906: note = Description of Artificial Sequence: Synthetic coding sequence
  source 1..906: mol_type = other DNA
atgaagctgggtcgggcagttctgggtctgctactgctggcgcctagtgttgtccaggcggtagagcctatcagtctcgggctggccctcgctggtgtgctgacgggttacatttatcctaggttgtattgcctctttgcagagtgttgcgggcagaagagatccctatctagggaggctctgcagaaagaccttgatgacaatctgttcgggcaacatttggccaaaaagatcatcctaaacgccgttttcggctttatcaataacccgaaacccaagaagccacttacactcagtctgttcgtggcaacactgcactttccccatgcctcaaacatcacattatataaagaccagctccagctctggataaggggaaacgtgtctgcctgcgcgagaagcatcttcattttcgacgagatggacaagatgcacgccggactgatcgatgctatcaagccttttctcgattactacgacctcgtagatggagtgtcataccaaaaggcaatgtttatctttctgtctaacgcaggcgctgaacgtatcacggatgtggccctggatttctggcgaagtggaaaacagagagaggacattaaattgaaggacatcgaacacgccctgtccgtatccgtatttaataataagaattctggcttttggcatagttcactgattgacagaaatctgatcgactatttcgtgccctttcttcccctggagtacaagcacctgaaaatgtgtatccgcgttgagatgcagagccggggttacgagattgacgaagatatcgtaagccgggtggccgaggagatgactttctttcctaaggaagaacgtgtcttttctgataagggctgcaagaccgtgtttacgaagctggactactactacgatgactag

SEQ ID NO: 244240 - DNA, 1011 bp, synthetic construct
  misc_feature 1..1011: note = Description of Artificial Sequence: Synthetic coding sequence
  source 1..1011: mol_type = other DNA
atgttacgagccggatggctgagaggggcagcagctctggccctactgttagccgctagagtcgtggccgcattcgaacctattaccgtaggcctcgcaattggagcggcttcagctatcaccggttacctgagctataacgatatctactgccggtttgctgagtgctgcagagaggagaggccactgaacgcttctgctctgaaactcgatctggaagagaaactctttggccagcatttggctactgaagtaatcttcaaggctttgacaggcttcaggaacaacaaaaatcctaaaaaaccgcttaccctctctttacatgggtgggccggtacaggcaaaaatttcgtgagccagatcgttgccgagaacttgcacccaaaagggctcaaatcgaacttcgtgcacctgttcgtgagcacgctccatttccctcacgaacagaagatcaagctttatcaggaccagcttcagaaatggatccgcggaaacgttagcgcttgtgcaaatagtgtgtttatctttgacgagatggataagctgcaccccggaattatcgatgccatcaagcccttcttggactattacgaacaagttgacggtgtttcctacagaaaagcgatctttatcttcctctcaaatgcgggtggggacttgatcacgaagacggcccttgatttctggcgggctggcaggaaacgtgaggacattcagctcaaagacctcgaacctgtcctgtcagttggcgtgtttaacaataagcattcaggcctgtggcattcagggctgatcgataagaatctgattgactattttatcccgttcctgccactggagtatcggcacgtcaaaatgtgtgtcagggcagaaatgcgcgcacggggatccgccatcgatgaggacatcgtgacccgcgtagcagaagagatgacattctttcctagagacgagaagatatattcagacaagggctgcaagactgtccaatctagactagacttccactag

SEQ ID NO: 244241 - DNA, 426 bp, synthetic construct
  misc_feature 1..426: note = Description of Artificial Sequence: Synthetic coding sequence
  source 1..426: mol_type = other DNA
tagcgcgtcgtagcagccttcgaacctatcaccgtgggtctggcgatcggggcagcatccgcaattacaggctacctgtcatataatgacatctactgcagattcgcggagtgctgcagagaagagcgcccactcaacgcatccgctttgaagcttgacctggaagagaagctctttggacaacatttggccactgaagtgatatttaaggcactcacagggttcagaaacaacaaaaaccctaagaagcccctgaccctttcattgcacggatgggccggtactgggaagaacttcgtatcacagatcgtcgcggaaaatctgcacccaaagggacttaagagcaactttgtgcacctattcgtttctaccctgcatttcccccatgaacagaagatcaaactgtaccaaagcagtttgacctag

SEQ ID NO: 244242 - DNA, 918 bp, synthetic construct
  misc_feature 1..918: note = Description of Artificial Sequence: Synthetic coding sequence
  source 1..918: mol_type = other DNA
atgctgcgagccggatggttgcggggagccgctgccttggccctgctgctagctgctcgcgttgtggccgcatttgaacctatcaccgtgggactggccatcggcgctgcatcggcaatcaccggctacttatcatacaacgatatctattgccgattcgccgaatgttgtagggaagaaagaccacttaacgctagtgccttgaagcttgatctggaggagaaactcttcggccagcacctggctacagaagtgatcttcaaagccctaacagggttccggaataataaaaacccaaagaagcccctaacgctgtcacttttcgtatctacactgcatttcccgcacgagcagaaaattaaactgtaccaggaccagctgcaaaaatggattcggggaaacgtatccgcgtgcgctaatagtgtgtttattttcgatgagatggacaaattgcaccctggcatcattgacgcgattaaaccatttctcgactactacgagcaggtggacggggtctcctataggaaagctatctttatatttttaagtaacgcagggggtgatttgatcaccaaaactgccctggacttctggagggcgggacggaagagagaagacatccaactgaaagacttagaaccggtgttatcagtcggcgtgttcaataataagcatagcggcctctggcactccgggctgatagataagaacttgattgactacttcattccttttctcccactggagtaccgccacgtgaaaatgtgtgtgagggccgaaatgcgagccaggggaagcgccatcgacgaggacattgtgacacgcgtcgccgaggaaatgacctttttcccccgtgacgaaaaaatttattccgataagggttgtaagaccgtccaatcccgcctggatttccattag

SEQ ID NO: 244243 - DNA, 1011 bp, synthetic construct
  misc_feature 1..1011: note = Description of Artificial Sequence: Synthetic coding sequence
  source 1..1011: mol_type = other DNA
atgcttcgaggtccctggcgacagctgtggctcttcttcttgctcctgcttcccggagctcccgaacctcggggtgcgtcgcgaccctgggagggaactgatgagcccggttccgcttgggcgtggccaggatttcaaagacttcaggagcagctccgtgccgcaggcgctctcagcaagcgatattggacattgttttcttgccaagtgtggcccgacgattgtgacgaggacgaagaggccgctactggtcccttgggctggagactgccattgcttggacaaagataccttgatctgctgaccacgtggtattgttcctttaaagattgttgtccacgtggcgattgtagaatttccaacaatttcaccggcttagaatgggacctgaacgtgcggttgcatggccagcaccttgtgcaacagcttgtgctaaggaccgtgagaggttacttagagactccacagccagaaaaagccctggccctatccttccatgggtggagcggcacaggaaaaaattttgtggccaggatgttggtcgaaaacctatacagagacggactgatgagcgattgcgtccggatgttcatagctaccttccattttcctcatccaaaatatgtcgacttgtacaaagaacaattaatgtcccaaattcgtgaaacccagcagctgtgtcatcaaaccctgttcattttcgacgaggcggaaaaattgcatccaggtctgttggaagtgctgggaccccacctcgaaagaagggctccagagggacatcgggcagagagtccgtggactatcttcctctttctgagcaacctgcgaggcgatattattaacgaagttgtactgaagctcctcaaagcaggttggtcgagagaggagatcacgatggagcatcttgagcctcacttacaagccgagatcgttgagacaatcggattcagttttctcactactcgatggccacatttggatctccccactagttcagtggccccaacctag

SEQ ID NO: 244244 - DNA, 462 bp, synthetic construct
  misc_feature 1..462: note = Description of Artificial Sequence: Synthetic coding sequence
  source 1..462: mol_type = other DNA
atgcttcggggtccctggagacagctgtggctgttctttctgctgctgctacctggagcacccgagcctaggggtgcgagccgcccatgggaggggactgatgagcccggaagcgcatgggcctggcccggatttcagaggctgcaggaacaattacgagctgccggagccttgagcaagaggtactggaccctctttagttgccaggtttggccagacgactgcgatgaagacgaggaggctgccaccgggcctctcggatggaggctgcccctgcttggccaaagatatctcgacctgctgacaacctggtactgttctttcaaagactgctgtccccgtggggattgtcggattagtaacaatttcaccggtaaaaattttgttgccaggatgctcgtggagaatctatatcgcgatggcttaatgtcagattgtgtgcgtatgttcattgcgacgtag

SEQ ID NO: 244245 - DNA, 1194 bp, synthetic construct
  misc_feature 1..1194: note = Description of Artificial Sequence: Synthetic coding sequence
  source 1..1194: mol_type = other DNA
atgctgcggggtccatggcgccaactctggctgtttttcttgttactgctgcctggcgctccagagcccagaggggcatctcgtccatgggaggggactgacgaacccggttcagcatgggcgtggccgggatttcagaggctgcaggaacaactccgcgcagcaggcgcactatccaagaggtattggactctgttcagttgtcaggtctggcctgatgattgcgacgaggacgaagaagcggctaccggcccactaggctggcggttgccattgctaggacagcggtaccttgatcttcttactacttggtactgctcttttaaagattgttgtcccaggggcgattgtaggataagcaataatttcacaggacttgagtgggacctgaacgttagactgcatggacagcacctcgtccaacagttggtcctgcggactgtgcgagggtacctcgaaacaccccagcccgaaaaggccctggcgctgtcctttcatggatggtcaggaaccgggaaaaattttgttgcccgaatgcttgtggagaatttatatagggacggactgatgagcgactgtgtgcggatgttcatcgcaaccttccactttccgcatcctaagtacgtggacctctataaagagcaattaatgagtcagattcgcgagacgcaacagctttgccaccaaaccctgtttatattcgatgaagctgagaagctgcaccctgggcttctggaggtgctggggcctcacctcgagcggcgagccccagagggacacagggccgagtccccttggaccatcttcctgttcctctcaaaccttcgcggtgatatcataaatgaagtggttctcaaacttctaaaagccggatggtccagggaggagatcacaatggagcacctggagccccacctccaggctgaaatagtagagacaatagataatggattcggacatagtaggcttgtgaaggaaaacctgattgactatttcataccttttctgcctctcgaatatcgacatgtgaggttatgcgctagggacgcgtttttgtctcaggaattactctataaggaagaaaccctcgacgagattgctcagatgatggtgtatgtcccgaaggaggagcagctgttctcatcccaaggatgcaaatcaattagtcagagaatcaattacttcctttcttag

SEQ ID NO: 244246 - DNA, 525 bp, synthetic construct
  misc_feature 1..525: note = Description of Artificial Sequence: Synthetic coding sequence
  source 1..525: mol_type = other DNA
atgggtctctgcgtgccttttgctgtgactacctcattcctcagcttgggtctggagtgggacctgaatgttaggctgcacggtcagcatcttgtacagcagcttgtgctccggacggtgcgcggatacctggaaacgccacagcctgagaaggcacttgcactgtcattccatggatggtcagggacaggaaaaaattttgtcgccagaatgctggtagagaacttgtacagagatggcctgatgagcgactgtgttcggatgtttatcgccacctttcacttcccccatccaaaatacgtggatctgtacaaggagcagctaatgagccagattcgcgagacacagcagctatgtcatcagactttgttcatctttgacgaagccgagaagcttcatcccggtctgctggaggtactgggacctcacctggaacggcgagcgccagagggtcaccgggctgagagcccatggacgattttcctgtttctgtccaatctcaggggtgatattatcaacgaatag

SEQ ID NO: 244247 - DNA, 1866 bp, synthetic construct
  misc_feature 1..1866: note = Description of Artificial Sequence: Synthetic coding sequence
  source 1..1866: mol_type = other DNA
atggaatttcccggtggcaatgacaactatctcacgatcactggcccatctcatcctttcctctccggcgcagaaactttccataccccctcccttggtgatgaggagtttgagatcccacccatatcccttgactcggatccctctttagcggtctccgacgttgttggccactttgatgacttggcggatccctcctcgagccaagatggatcgttttccgcgcaatatggcgtgcaaaccttagacatgcccgtgggaatgacccacggattgatggaacagggcggtgggctgttaagcgggggtttgaccatggatttagaccactccattggaacacaatatagcgcaaaccccccagtgacaatcgacgtgcccatgactgatatgaccagtgggcttatggggcacagccagctgacgaccattgatcaatccgaactgtcctctcaactgggtctgtctctggggggagggaccatcctgccgcctgctcaatctcctgaggacaggctctccaccactccaagtccgacctcttctctgcacgaggatggcgtggaagacttccggcgacaattaccaagtcaaaaaacggtcgttgtcgaggccggtaaaaaacaaaaagcccctaaaaagcgcaagaagaaagacccaaatgagccccagaagcccgtctcagcttacgccctgttttttcgtgatacgcaagcagcgataaaggggcagaaccctaacgcgacctttggtgaagtgtctaaaattgtggccagtatgtgggattctttaggtgaggaacagaagcaggtgtataaacggaaaactgaggcagccaagaaggagtatctaaaggcactggcggcatataaagataatcaggaatgccaggccaccgttgaaacggtagagctggacccagccccaccaagccaaacccccagcccccctcccatggctaccgtcgaccctgcctccccagcccctgctagcattgagccgcctgctcttagccccagcatcgtcgtgaacagcacgctctcctcttacgtcgccaaccaggcctcatcaggcgctgggggacagcctaacattactaaattaatcattacaaagcagatgttgccctcatctataaccatgtcacaggggggtatggtgacagtgattccagctacggttgttacctcacgaggcctacagctgggccaaacgtcgaccgcaaccattcagccctcccagcaagcccagatcgtgaccagatctgtactccaggccgctgcagccgctgctgctgcagcctccatgcagctgccacccccacggcttcagccgcctcctctgcagcagatgcctcagccacccacccaacagcaggtgaccattctccaacagccaccgccacttcaggccatgcagcagccccctccccagaaggtgaggataaatctgcaacagcagcctccccctcttcagatcaagtcagtccctctccccacgctcaaaatgcagacaaccctggtaccgcctaccgtcgagagcagcccagaacgcccaatgaacaattctcctgaagctcatacagtggaggccccttcacctgagaccatctgcgagatgatcactgacgtggtgccagaggtggaatccccatctcaaatggatgttgagctggtgagcggatccccagtggcactttctccgcaacctagatgcgtgcggagtggctgcgaaaatccgccaattgtgagcaaagattgggataacgagtactgctctaacgagtgtgtagtgaagcattgccgggacgtgttcctggcatgggtcgcatctcgaaatagcaacacagtagtttttgttaaatag

SEQ ID NO: 244248 - DNA, 1866 bp, synthetic construct
  misc_feature 1..1866: note = Description of Artificial Sequence: Synthetic coding sequence
  source 1..1866: mol_type = other DNA
atggaatttcccggtggaaacgataattacctcacaataactgggccatcccatccctttctgagcggggctgagacctttcataccccttccctgggagatgaggagtttgaaattccccctatcagcttagacagtgaccccagtttggcagtaagcgacgttgttgggcatttcgatgatctcgcggatccatcttcgtctcaagatgggtccttttcagctcagtacggcgtgcaaacactggacatgcccgtgggaatgacccatggcctgatggagcaaggagggggactcctctctgggggactcacaatggatctcgaccattccattgggactcagtattccgctaatcccccagtgaccatagacgtgcccatgacagatatgactagcggattaatgggccacagtcagctgaccacgattgaccagtccgagctctcttcccagctggggctcagcctaggagggggtacgattttacccccagctcagtcaccagaagatcggcttagcacgaccccctctcccactagttcactgcacgaagatggcgtagaggatttcagacggcagctcccgtctcaaaaaactgtggtagtggaggccggaaaaaaacagaaggctccaaagaaaaggaagaaaaaggaccccaacgagccccaaaaacctgtatccgcttatgcactgttttttagagatacacaggctgccatcaaaggacagaacccaaacgcaacctttggggaggtgtccaagatcgttgctagcatgtgggatagtttgggggaggagcaaaagcaggtgtacaagaggaagactgaggccgctaagaaagagtatctgaaggcgctcgcagcttacaaagacaatcaggaatgccaagccacagtagaaaccgtagagctggacccggctccgcctagccagactccctcccctcctcctatggccaccgtggaccctgcttcccccgctcccgcttccattgagccccctgccctcagtccgagtatcgtcgtaaactccactctgtccagttatgttgccaatcaagcttcaagcggtgccggagggcaacctaacataaccaagttgattatcaccaaacagatgctgccttcctcaatcactatgtctcagggtgggatggtgactgtcattccagctacggtagttacgagtagagggctgcaacttggccaaacctccactgccaccatccagccctctcaacaagcccagattgtgacaaggtctgtgttgcaggccgcagccgcagcagcggctgcagcctccatgcagctccctccacctcgcctccagcctcccccactgcagcagatgccccaacccccaacacagcagcaggtcaccatcctgcagcaaccgcctccactgcaggccatgcaacagccacccccacaaaaggtcagaattaaccttcagcaacaaccccctccactgcagattaagagcgtgccgcttccaacacttaaaatgcagacaactctggtccctccaacagtggagtcgagccccgaaaggccaatgaacaatagccccgaagcacacactgtagaggctccaagtccggaaaccatctgcgagatgatcaccgatgtggtgccagaagtcgagtcaccatctcagatggacgtagagcttgtgtctgggagccctgtagccctgagccctcagcctaggtgtgtgaggtctggctgtgagaatccccctattgtaagtaaggactgggacaacgagtattgctcgaatgagtgcgtggtgaagcattgtagggacgtctttttagcgtgggtcgcctcccggaattcgaatacggttgtgtttgtcaaatag

SEQ ID NO: 244249 - DNA, 1797 bp, synthetic construct
  misc_feature 1..1797: note = Description of Artificial Sequence: Synthetic coding sequence
  source 1..1797: mol_type = other DNA
atggaaaccttccacaccccctccctgggtgacgaggagttcgaaatcccgcctatttcccttgattctgatccgtcactggcagtgtccgatgtcgtgggacattttgacgatctggcggacccttcctcctcacaggatggcagtttcagcgcccagtacggggtgcaaacactggacatgcccgttggaatgacacatgggcttatggaacagggaggcggactgctgtcaggcggactcacaatggacctggatcactccatcggtacgcagtattctgccaatcccccagtaacaatcgatgtgcccatgactgacatgacatccggactcatgggccattctcagttgacaacaatcgaccagtcagagctgtcatcacagctgggcctttctcttggaggcggtacaattcttcctccagctcagtcaccagaagatcggctgagtaccacgcctagtccaacatcttcgctgcatgaagacggcgtcgaagactttcggaggcaactgcccagccagaaaactgtcgtggtagaggctggaaaaaagcagaaggcacccaagaaaaggaagaaaaaagatcctaatgaaccccagaaacctgtatctgcgtacgcacttttcttccgggatacccaagcagctattaaaggccaaaatcctaacgctacattcggtgaagtgagcaagattgtagcaagtatgtgggactcactgggggaggagcaaaagcaggtctataagaggaaaaccgaggcagccaagaaggagtatctaaaagcgctcgctgcatataaggacaaccaggagtgccaagccacagtcgagactgtagaactggaccctgctcctccttcccaaactccttcaccgccaccaatggctactgtcgaccctgctagtcctgccccagccagcatcgagccccctgcgctttctcctagcatagtggtaaatagtacgctgtcctcttacgtggccaaccaggcatcttcaggcgcaggcggtcagccaaacatcacaaagctaattataaccaagcagatgttgcctagcagcatcacgatgtcccaggggggaatggttactgttattcccgctacagtggtcaccagcaggggacttcagcttggtcagacttctaccgccaccattcagccttcccagcaagcgcagattgttactcggtctgttctccaagccgcagcagcggcagcggctgctgcctcaatgcagctccctcctccccgactccagcccccaccgttgcagcaaatgccacagcccccaacacaacagcaagtgaccatcctgcagcaacccccacccctccaagcaatgcaacagccccctccccagaaggtgcgcatcaacctgcagcagcagcctccgcctcttcaaatcaaaagcgtccccttgccaacactcaagatgcagacaacgctcgtcccacctacggtggagagttcacccgagcggcctatgaacaactccccggaggcccacaccgtcgaagcaccttctcccgagactatttgtgagatgatcaccgacgtggtgcccgaggtggagagcccgtcccagatggacgtggagctagtttccggttcgccagttgctctttcaccccagcctcggtgcgtgagaagcggatgcgaaaacccaccaatcgtgtcgaaggactgggacaacgagtactgctcaaatgagtgtgtggtcaagcattgtcgtgacgtcttcctcgcctgggtggccagtcggaactctaacaccgtcgtgtttgtgaaatag

SEQ ID NO: 244250 - DNA, 1650 bp, synthetic construct
  misc_feature 1..1650: note = Description of Artificial Sequence: Synthetic coding sequence
  source 1..1650: mol_type = other DNA
atgaggaacttgaagtcacatctgtctccctggatcctaataccccactggctgagtcagatgtggctggcaactcttatgacctggcagttcttttcgccagacctagatcacagcattggcacacagtacagtgcaaatcctccggtgacaattgacgtgccaatgaccgacatgacatcagggcttatgggccattcccagctgaccacaattgatcagagtgagctctcctcccaactgggcctgagcctaggaggcggaactatcttaccccctgctcaaagcccagaagatcgactgtccacaactccttcacccacaagcagccttcatgaggacggtgtagaggattttagaagacagctgcctagtcagaagaccgtcgtggttgaggctggcaagaaacaaaaagcgccaaagaagcgcaaaaaaaaggatcccaatgagccccagaaaccagtctcagcttacgctctgttcttccgcgacacccaagccgctatcaagggccagaatcctaatgcaaccttcggtgaggtgtccaaaatcgtggcttccatgtgggactcgctcggggaggagcagaagcaggtctacaaacgtaagactgaagcagccaaaaaggagtacctaaaagccctcgcagcctataaagataaccaggaatgtcaggctacggtcgagacagttgaattggaccccgctccgccttctcaaacccctagccctcctccgatggccacggtagatccagcaagcccagcgccagcttccattgagccccctgccctatccccctccatcgtagttaacagcacattgtcttcatacgttgccaaccaggccagctctggcgctggtgggcagcctaacattaccaagttaattatcacgaagcagatgctgccttcttcaattacaatgagtcagggcggaatggttacagtcattccagcaaccgtagtgacctccaggggactgcaacttggtcaaacatccacggctacaatccagccatctcagcaggcacagatcgttactagatctgtgctgcaggccgctgctgccgcagctgctgctgccagcatgcagctgcctcctccgagacttcagcctccaccgctgcagcagatgccgcagcccccaacacagcagcaggtaaccatcctccagcagccccctcctcttcaggctatgcagcagcctccaccccaaaaggtgcggattaacctgcagcagcagcccccaccactacagatcaagtctgtgcccttgccaacattaaaaatgcaaacaactctggtgccaccaaccgttgaaagctcacctgaacggcctatgaataacagtcctgaggcacatacagtcgaggccccttcaccggaaaccatttgcgaaatgatcacagacgtggttcccgaggtcgagagcccgtcacagatggatgtagaattggtgtccggaagtccagtcgccctcagtccccagccacgctgcgtccgctcggggtgtgagaatcctccaattgtatccaaagattgggacaatgagtattgttccaacgagtgtgttgtcaagcactgccgcgacgtgtttctcgcctgggtggccagtcgtaattcgaacaccgtggtgttcgtcaaatag

SEQ ID NO: 244251 - DNA, 1020 bp, synthetic construct
  misc_feature 1..1020: note = Description of Artificial Sequence: Synthetic coding sequence
  source 1..1020: mol_type = other DNA
atgatgccgttctgccacaatattataaatataagctgcgtaaagaacaactggtcaaacgacgtgagagcgtccctgtactccctaatggttttgatcatcctaaccacccttgtggggaacctgattgttattgtgagtatttctcactttaagcagcttcatactccaaccaactggctgattcactctatggctactgtggacttcctgctaggttgtctcgtaatgccctactctatggtgcgaagcgctgagcactgttggtactttggcgaagtgttttgtaagatacacacatcgactgatattatgctatctagcgcctccatattccacctgagcttcatttcaatcgatcggtattacgcagtttgtgacccactgaggtataaagccaaaatgaacattctcgtgatctgtgtgatgatctttataagctggtccgtgcctgcagtcttcgcatttgggatgattttcctggagttaaactttaaaggagcagaagaaatctattacaaacatgtccactgccgaggcggatgttcggtgttttttagcaaaattagcggggtgcttacctttatgacctctttttacatccctggatctatcatgttatgcgtttactaccgcatttatctgattgccaaggagcaggcgagactgatctctgacgctaatcagaagctgcagattgggctggagatgaagaatgggatctctcagtcaaaggaaagaaaagctgtgaaaacattgggcatagttatgggcgtgtttcttatctgttggtgtcccttctttatttgcactgtgatggaccccttcctccactacatcatccctcctacgctgaatgatgttctgatctggtttggatacctcaattcaacgtttaaccctatggtctacgccttcttttacccttggttccgaaaggccttgaagatgatgctcttcggcaaaatattccagaaggacagttcaaggtgtaagctttttctcgagttgagctcatag

SEQ ID NO: 244252 - DNA, 921 bp, synthetic construct
  misc_feature 1..921: note = Description of Artificial Sequence: Synthetic coding sequence
  source 1..921: mol_type = other DNA
atgtattcctttatggcaggctcgattttcattacaatatttggcaatttagccatgattatatctattagctatttcaagcaactgcacacacctacaaattttttgattttatccatggcaattacggacttcctgctgggcttcactatcatgccgtactccatgatcaggagtgttgagaattgttggtatttcgggctgaccttctgcaagatctattactcatttgatttgatgctgtctatcactagcatcttccacctgtgcagcgtggccatcgaccggttttacgcgatctgctacccccttctgtattcgacaaagattaccatcccagtgatcaagagactgttattgctgtgctggtccgtgccaggggcattcgcgttcggagtggttttcagcgaagcatacgcggacggcatcgaggggtacgatattttagtggcttgctcttcttcatgtccggttatgtttaacaaactgtggggaacgaccttgtttatggcaggtttctttacacctgggtccatgatggtgggtatatacgggaaaatttttgcagtcagtcgaaaacacgcccacgccataaacaatctccgagaaaaccagaataaccaggtgaaaaaggataagaaggccgctaaaacactgggcatcgttataggggtgtttctgctctgttggttcccctgcttcttcacaatattgttagaccctttcttaaacttctctacacctgtggttctctttgacgcactgacatggtttggttattttaactcgacatgtaatccgttgatttatggtttcttttatccatggtttcgcagagcacttaaatacattctgctgggcaagatcttcagcagctgttttcataacaccattctctgtatgcaaaaagaaagcgaatag

SEQ ID NO: 244253 - DNA, 1056 bp, synthetic construct
  misc_feature 1..1056: note = Description of Artificial Sequence: Synthetic coding sequence
  source 1..1056: mol_type = other DNA
atggccgtttcctcagaacagcatgaactgtcccacttcaagaggacacaaacaaagaaggagaagtttaactgcagcgagtatggcaaccgcagctgtcccgaaaatgaaagatccctgggcgtgagagtggcaatgtattcctttatggccggtagcatattcatcactattttcgggaatctagctatgatcatctctatcagttactttaaacagcttcacactccaacaaacttcctcatactgagcatggccatcacggacttccttctgggctttactattatgccatattctatgatcaggagcgtggagaattgctggtattttggtttgactttctgtaagatatattactcttttgacctgatgctctctattacatctatctttcatctctgtagtgtggcaattgatcggttttacgctatctgctaccctttgctgtattccacaaagatcactattcccgtgatcaagcggctgcttctgctgtgttggtctgttccaggtgcttttgcattcggcgtggtatttagtgaagcttatgcagatggaattgaagggtatgatatcctggtggcctgttcctcctcctgtcccgtgatgtttaacaaattgtggggtactacactttttatggccggatttttcaccccaggctctatgatggtcgggatttacggcaaaatttttgccgtgagccggaaacatgcacatgctattaacaacctgagggagaaccagaacaatcaagtgaaaaaagataagaaagccgcaaaaacgttagggatcgtgattggtgtgttcctgctatgctggttcccctgcttcttcaccattctcctcgacccttttttgaacttttcaacgccagtggtgctgttcgacgcactgacctggttcggatattttaactcgacttgtaaccctcttatttacgggttcttctacccctggttcagacgggctctgaagtacattctgctgggaaagattttttcttcgtgctttcataatacgatactctgcatgcagaaagagtctgagtag

SEQ ID NO: 244254 - DNA, 921 bp, synthetic construct
  misc_feature 1..921: note = Description of Artificial Sequence: Synthetic coding sequence
  source 1..921: mol_type = other DNA
atgtatagcttcatggcaggttccattttcatcaccatctttgggaacctcgccatgattataagcattagttattttaagcaattgcacacacctacaaattttctgatcctaagcatggctattactgacttcctgctgggtttcacgatcatgccttacagtatgatcagaagtgtggaaaattgctggtacttcgggctgaccttctgcaagatttattactcgttcgacctcatgctgtctattacttcaatatttcacctctgctccgtggctattgatcgcttttatgcgatttgctaccccctactgtactccacaaagataactatccctgtgatcaagagactgttgctgctttgctggtcagtaccgggagcattcgctttcggtgtcgtcttctcagaggcctatgcagacggtatcgagggttatgacatcctggtggcctgctcaagttcctgtcctgtgatgttcaataagctgtgggggaccaccctcttcatggccggattttttaccccaggatccatgatggtaggaatctatgggaagattttcgccgtgtctcggaaacatgcacacgcaatcaacaaccttagagagaaccagaacaatcaagtgaagaaggataaaaaggccgctaaaacgctggggatcgtcataggcgtgttccttctatgttggttcccatgtttcttcacgattcttctggaccctttcttgaatttttccacgccagtggtgctgtttgacgccttaacatggttcggatatttcaatagcacctgcaatcccctcatttacggattcttttacccttggtttcggcgagctcttaaatatattctgctggggaagatcttctcctcatgcttccataatacaatcctgtgcatgcagaaggagtctgagtag

SEQ ID NO: 244255 - DNA, 1038 bp, synthetic construct
  misc_feature 1..1038: note = Description of Artificial Sequence: Synthetic coding sequence
  source 1..1038: mol_type = other DNA
atgagcagcaactcctccctgcttgtagccgtgcaactatgttatgccaatgtgaacgggtcgtgcgtgaaaatcccgttctcccctggtagtagagtgatcttatacatcgtcttcggcttcggcgcagtcctggcagtctttggcaacctgttggtcatgatttccatcctgcatttcaaacaactgcacagcccaacaaactttttagtggcgtcactggcctgtgccgactttctggtgggtgtcactgtaatgcctttctcaatggtgcgtactgtggagtcctgttggtattttgggcgttccttctgtacctttcatacgtgttgtgatgtggccttttgttacagtagtctgtttcacctctgcttcatctcaatagatcggtatattgccgtaactgatcccctggtgtatcccactaagtttactgtaagtgtctcggggatctgtatctcagtgtcgtggatcctgcctctaatgtactcaggcgctgtgttctacacaggagtgtacgatgatggacttgaagaactgtctgatgcactcaattgtattggaggctgccagactgtcgtcaaccagaactgggtgctcacggatttcctatcatttttcatcccgacctttattatgattatcctgtatggcaatatctttctggtcgctcgcagacaggcaaagaaaattgaaaacacgggtagcaaaactgagagcagcagcgagagctacaaggcccgagtggctcgtcgcgagaggaaggcagcaaaaaccctgggggtgacggtagtggcttttatgatatcttggctgccttattccatcgacagtctgatcgatgctttcatgggcttcattacccctgcatgcatctacgaaatttgctgttggtgcgcctactacaattcagcaatgaatcctctcatctacgctctgttttatccttggtttaggaaggcaatcaaggtgatcgttactggtcaggttctaaaaaacagttctgctacaatgaacctgttttccgagcacatctag

SEQ ID NO: 244256 - DNA, 957 bp, synthetic construct
  misc_feature 1..957: note = Description of Artificial Sequence: Synthetic coding sequence
  source 1..957: mol_type = other DNA
gttaacggcagctgcgtgaagatcccattctccccaggtagccgtgtgatcctctacattgtatttgggtttggtgcggttctcgcagtctttggtaatctcctggtaatgatcagtatcctccactttaaacagttgcactcaccaacaaatttcctggtcgcatccctggcttgcgccgacttcctcgttggtgtgaccgttatgcccttttccatggtgcggaccgtggaatcctgctggtactttggacggtcattctgcacgttccatacttgctgtgacgtggcattctgctattccagcctctttcatctttgctttatctcaatcgacaggtacatcgccgtgaccgatccacttgtttatccgaccaaattcacggtgagcgtcagtgggatttgtatctccgtttcgtggattttacccctgatgtactcaggtgcggtgttctacaccggcgtctatgacgatgggctggaggaactgtctgatgccctcaattgcatcggcggatgtcaaaccgtggttaatcaaaactgggtgttgaccgattttctcagtttttttattcctacgttcattatgattattttatatggtaacatttttctggtggctcgacggcaggccaagaaaattgagaataccgaatcctataaggccagggtggcacgacgtgagaggaaggccgctaaaaccttgggcgtcactgtggtggccttcatgatctcctggttaccttattctatcgactctctgattgacgcatttatgggcttcattacccccgcatgcatctacgaaatatgttgctggtgtgcctactacaattctgctatgaatccactgatatacgcccttttttacccgtggttcaggaaggccataaaggtgattgtcacaggccaagtgcttaaaaacagttccgcgacaatgaacttgttttcagaatag

SEQ ID NO: 244257 - DNA, 1410 bp, synthetic construct
  misc_feature 1..1410: note = Description of Artificial Sequence: Synthetic coding sequence
  source 1..1410: mol_type = other DNA
atgcccattcgggctctctgtactatctgttccgatttctttgaccactctcgcgacgttgctgccatacactgtggacataccttccacctccaatgcctgattcagtggttcgaaactgctccaagtcgaacatgcccccagtgtaggattcaagtcggaaaacgcaccatcattaataaactgttttttgatttagctcaagaagaggagaatgtcctcgacgccgagttcctgaagaatgaacttgataacgttcgggcacaattaagccaaaaagacaaggagaagagagactcacaagttattatcgacaccctacgcgacacgctagaggaacggaatgccaccgtggtgagcctgcagcaagcactgggcaaagctgagatgctgtgcagcaccctgaaaaagcaaatgaagtacctggaacagcagcaggacgaaactaagcaggcgcaagaggaggctagaagactcaggtccaagatgaagactatggaacagatcgaacttctcctgcagtctcaaagaccggaggtggaggagatgattagggacatgggagtcgggcagagtgcagtggaacagctggcagtgtactgcgtgtctctcaagaaggagtacgaaaatcttaaggaggccaggaaggcttccggtgaagttgcggacaagttacgtaaagacctgttctcctcccgcagtaaactgcagacagtctattccgaactcgatcaggctaaactggaattaaagtcagcacagaaagaccttcagtctgccgacaaggagatcatgtccctgaagaaaaagcttacaatgctgcaggaaactctaaacctgccaccagtggccagcgagacggttgaccgcctggtcttggagagccccgcaccagtggaggtgaacctcaagcttcgcaggccgtcctttcgcgatgatatcgatctgaacgcaaccttcgatgtggacaccccgccagccaggcctagttcttcccagcacggctattatgaaaaattatgcctcgagaagagccactctcctatacaggacgtgcctaagaagatttgcaaaggaccacgtaaagagtcccagctgtccttgggtgggcaatcatgcgcaggtgagccagatgaggaactcgtcggcgcttttccaatctttgtcagaaacgccattctggggcagaagcagcctaagaggcccaggtctgaatctagttgttccaaggacgtggttagaacggggttcgacggactgggaggtcgaaccaagttcattcaacctacagatactgtgatgattcggcctttgccagtgaagccaaagaccaaggtgaagcagcgggttcgtgtcaagacagtcccctctttgtttcaggccaagctggataccttcctgtggtcatag

SEQ ID NO: 244258 - DNA, 4059 bp, synthetic construct
  misc_feature 1..4059: note = Description of Artificial Sequence: Synthetic coding sequence
  source 1..4059: mol_type = other DNA
atggccagcgactccccagctaggtccctcgacgagattgacctgtcagccctgcgggatccagcaggtatcttcgaattagtcgaactggtgggcaacggcacttatggccaggtgtataaaggccgacacgtcaagactggacaacttgccgctattaaggtgatggatgtgaccggggatgaggaagaagagatcaaacaggagatcaatatgctaaagaagtatagtcaccaccgcaatattgccacctattatggtgcattcattaagaaaaaccccccaggaatggatgaccaactgtggctggtgatggaattctgcggtgcaggatcagtgactgacctgatcaagaataccaaaggaaataccctgaaggaggagtggatcgcctatatatgcagagagatcctgcgcggactatcccatctgcaccagcataaagtgatacacagggatatcaagggccaaaacgtactgctgaccgaaaacgccgaggtcaaactcgttgacttcggagtgtctgcccaacttgataggaccgtcggacggcgtaatacatttatcggtacaccgtattggatggcaccggaggtcatagcctgtgacgagaaccctgacgccacctacgacttcaagtctgatctctggagtctgggcatcactgccatcgagatggcagaaggcgctccaccactatgcgacatgcatcccatgcgcgctctgttcctcattcctagaaacccggcacccagactgaagtcgaaaaagtggtcaaagaaattccagtccttcattgagagctgtctcgtgaaaaaccattcgcaacgccctgcaactgaacagttgatgaagcatccattcatcagggaccaaccaaacgaaaggcaggtgcggatccagcttaaggaccatatcgatcgaacaaagaagaagaggggcgaaaaggacgagactgaatatgagtacagcggaagcgaagaggaggaagaggagaatgatagcggtgagccatccagtatcctcaatttgccaggcgagagcacgttgcggagagatttccttcgcttgcaattggctaacaaggagaggtccgaagcacttcggaggcagcagctcgagcaacaacagcgagagaacgaggaacacaagagacaactgctagccgaacgacagaaaaggatcgaggaacagaaagagcagcgcagacgcctggaggagcagcagaggcgcgaaaaagaacttcgcaagcagcaggaacgcgagcagaggagacactacgaagaacagatgcggcgagaggaagaaaggaggagagccgaacacgagcaggaatacatccgcagacaactggaggaggagcaacggcagcttgagatacttcaacagcagctgcttcatgaacaggctctgctgctcgagtataagcgaaaacagctcgaagaacagagacaggcagagcggctccagcgtcagctgaagcaggagcgcgactatttggtgagcctgcagcaccaacggcaggagcagaggcccgtggaaaaaaagccattatatcactacaaagagggtatgtccccctctgagaaacctgcatgggctaaagaggtcgaggaacgaagcagactgaataggcagtcatccccagccatgcctcataaagtagcaaacagaatctctgatcccaacttgcccccaagatcagagagtttctctatctcaggcgttcagcctgcgcgtaccccccctatgctgagacctgtggatcctcagatccctcacctcgtggccgtcaagtcgcagggcccagcactgacagcctcccagagcgtccacgagcaaccaacaaagggactgtccggctttcaggaagccctgaatgtgacctcccaccgtgtggagatgcccaggcagaattctgatcccactagcgagaaccccccattacccacacgcatcgagaaatttgaccgctcctcgtggctgcggcaagaagaagatattccccctaaagtgccccaacggaccactagcatttccccagccctcgccagaaaaaacagcccaggaaacggcagtgcgctgggaccacgactgggcagtcagcctatccgggcttccaacccagatctgcgcaggactgagcccatcctggaatccccattacaacgaacttcaagcgggagcagcagttcctcctctaccccgtcttcccaaccgtcatcacaagggggatctcagccagggtctcaggccggttcatccgagaggactcgcgtgcgagccaactccaagtccgagggtagccccgtactcccacatgaaccagcgaaagttaagcctgaggagtctcgggacatcaccaggcctagccggcctgcagatctgacagcattagcaaaggagctgagggagctgcggatcgaggaaaccaatcgtcctatgaagaaagttactgactacagctcttctagcgaagaatccgagagctctgaagaggaagaggaagatggagagtcagagactcacgacgggacagtggctgtgtccgacatacccaggctaatacctacaggcgcacctggcagcaatgagcagtacaacgtggggatggtcggtacccacggtctggaaaccagtcacgctgattccttttctggaagcatctcaagagaggggacgctcatgattagggagaccagcggggagaagaagcgaagtggccactcagattccaatggtttcgccggacacatcaacctaccggacctcgtccagcagtcccatagcccagctgggacccccacagaagggctcgggcgtgtgagcacccatagtcaggagatggacagtggaacagaatatggtatggggtcttccactaaagcttcctttactcctttcgttgatcctcgggtctatcagacatccccaacggatgaggatgaagaggatgaagaaagctccgccgcagcgttgtttacatctgagttactgcgacaggagcaggctaaactgaacgaggcacgcaagatttcagtggtgaacgtgaaccctaccaatatcaggcctcattctgacacgccagagataaggaagtacaagaaacgctttaattccgagattttgtgtgcggcactttggggcgtgaatcttttggttgggactgagaacggcctgatgctattggaccgaagcgggcaagggaaggtgtataacctgatcaaccgccgtagatttcaacagatggacgtgctcgaaggtcttaacgtgcttgtgaccataagcggcaaaaagaataagctcagagtgtactacctgtcctggcttcgcaatagaattcttcacaacgaccccgaagttgagaagaaacagggatggattaccgtcggggaccttgaaggctgcatacactataaggtcgtgaagtatgagcgcatcaaattcctcgtgatcgccctcaaaaatgcagttgagatctacgcatgggcccctaaaccctatcacaaattcatggctttcaaaagcttcgccgatctgcagcacaagcccctgctcgtagaccttaccgtggaggagggtcagcggctcaaagtgatattcggctctcataccggtttccatgtgatagacgtggatagcggcaactcctatgacatctacataccctctcacatccagggaaacatcaccccccacgccatagtgattttaccaaaaactgatgggatggaaatgctcgtctgttacgaggatgagggcgtttacgtgaacacctacggaaggatcactaaggacgttgtgctgcagtggggtgagatgcccaccagtgtagcctacatacactccaatcagattatgggctggggggagaaagccatcgaaattcgctccgtggaaaccggacatttagatggggttttcatgcacaagagagcccagagactgaagttcctatgcgagcgtaacgacaaggtattcttcgcaagtgtgcggtcaggtggttccagccaggtgtttttcatgaccctcaatagaaacagcatgatgaactggtag

SEQ ID NO: 244259 - DNA, 3831 bp, synthetic construct
  misc_feature 1..3831: note = Description of Artificial Sequence: Synthetic coding sequence
  source 1..3831: mol_type = other DNA
atggcctcagactctccggctcggtcactggatgagatcgatttgagcgccctgcgggaccccgctggtatctttgagttagttgagctggttggcaacgggacgtacgggcaggtgtataagggaagacacgtgaagacaggacagctagccgcaataaaggtaatggacgtaactggtgacgaggaggaagagatcaagcaggagataaatatgctgaaaaagtactcgcatcaccgcaacatcgccacatattacggcgcttttattaagaagaaccccccaggaatggacgaccagctgtggctggtgatggaattctgtggagctggcagcgtcactgacctaattaaaaatactaaaggtaatacactcaaggaggaatggatcgcttacatttgtcgggagatcctgcggggtctatcgcacttgcatcagcataaggttattcaccgggacattaaaggacagaacgtcctgttgacagaaaacgccgaagtgaagctggttgactttggagtcagtgcccagcttgacagaaccgtggggaggcgcaacactttcattggcaccccctattggatggctccagaggtgatcgcttgtgacgagaacccggacgctacctacgacttcaagtcagacctctggagtctgggaatcacagctatcgagatggcagaaggcgctcctcctctttgcgatatgcatcctatgcgcgcactattcctgatcccgagaaacccggctcctagactgaaaagcaagaagtggtctaagaaattccagtcttttatcgaatcctgtctggtcaagaaccattcgcaacggccagccacagagcaactcatgaagcatcccttcattagggaccaacctaacgaacgacaggtgagaattcagttgaaagaccatatcgacaggacgaagaaaaagcgcggtgagaaagacgagaccgagtacgaatatagcgggtccgaagaggaggaagaagagaacgattccggggaacctagctccatcctcaacttacctggagaatctaccttacggcgtgatttcctgcggttgcagttggctaataaggaacgcagcgaggccctccgcagacagcagctggagcagcagcaaagggaaaacgaggaacataagagacaactgcttgccgagaggcagaagcggattgaagaacaaaaagagcagaggcggagattggaggagcagcaaagacgggagaaggagctgagaaaacagcaggaaagggagcaacgacgacattacgaagagcaaatgagacgtgaggaagaacgcagaagggctgagcacgaacaggaatataaacggaaacagctcgaggaacagcgacaggctgaaagactgcaacgccaactgaaacaggagcgcgactacctcgtctcactacagcatcagcgccaggagcagcggccagtggagaagaagccactttaccactacaaggaggggatgtctccctccgagaagccggcttgggcaaaagagattccgcacctcgtggctgtgaaaagccaaggaccagctctgactgcatcccagtcggtgcatgaacaaccgacaaaaggcctgtctggcttccaagaggctctgaatgtgacttcacaccgagtggagatgccaaggcagaattctgatcctacttccgagaatccacccctacccacacgaattgagaagttcgacaggtcttcttggttacgtcaggaagaagatattccacccaaggtgccccaaaggacaacaagtatctccccagctctagccaggaaaaattctccagggaatggttctgctctgggacccagacttggctcacagcccatacgcgcaagcaaccctgacctccgcagaacagagcctatcctggaatccccgctgcagcggaccagcagtgggagttctagttcatcttctacaccttcgtcccagccctcctctcagggaggcagtcagccgggttcacaagcagggagcagtgaacgtacacgggtccgagctaattcgaagtcggaggggtccccggtactgcctcatgagcctgccaaagtgaagccggaagaatcaagagatataacccgtccaagtaggcccgcaagctataagaaggccatcgacgaggacctcaccgccctggctaaagagctgagagagctgcgtatcgaagaaacaaaccgaccaatgaagaaggtgaccgactatagctcctcttcagaggaatcggagtcttcggaggaagaagaggaggacggagagtccgaaacccacgacggcacagtcgctgtatcagacattccacgcttaattcccacaggcgctccgggatcaaacgaacagtataatgtaggcatggtaggcacgcacggcctggagacctcacatgctgattcattttcagggtccataagccgcgaaggaacactgatgattcgcgagactagcggtgaaaaaaaacggtccggacactcagattcaaacgggttcgccggacacatcaacttacccgaccttgtgcagcagagccacagtcctgcgggaacaccaacagaaggactggggagggtgagtacacactctcaggaaatggattccggtaccgagtacggcatggggtcatctactaaggcctcgttcacaccctttgtggaccctcgtgtgtatcagacatcccctaccgacgaggacgaagaggatgaagagtcttctgccgctgcattattcacctctgaactcctcaggcaagagcaggctaaacttaatgaggcgcgaaaaatcagtgtggttaacgttaatcccaccaatataaggccccacagcgatactcccgagatccgaaagtataagaaaagattcaatagcgaaatcctatgtgctgcactgtggggtgtgaatttactggtcggcaccgagaacggcctgatgcttctggaccgttctggccaaggcaaggtttataacctcatcaacagacgaagatttcaacagatggacgtgctggaaggcctgaatgtgctcgtaaccatctccggtaaaaaaaataagttgcgcgtttattacctcagctggttgcgtaatcgcattctgcataacgacccagaggtggaaaaaaaacagggatggatcaccgttggagatctcgagggttgtattcactacaaggttgtaaaatatgagcgcataaagttcttagtaatcgcactgaaaaatgccgtggaaatatacgcatgggctccaaagccttaccataagtttatggcttttaagagctttgcagatctgcagcataagccccttcttgtggatctcactgtcgaagagggacaacgcctgaaagtcattttcggcagccatacgggtttccacgtgatagacgtggatagtggcaatagttacgacatttacataccttcccatatccaaggtaacatcacgccccacgcaatagtgattctcccaaaaactgatgggatggagatgttagtctgttacgaggacgaaggcgtttacgtcaatacctatggaaggatcacaaaagacgtggtgcttcagtggggggaaatgcccacgagtgtcgcttatatccacagtaatcagatcatgggatggggcgagaaggccatcgagatacgctccgttgagactggccatctggatggagtgtttatgcacaagagggctcagcgattaaagttcctctgcgagagaaatgataaggtgttcttcgcaagcgtgcgtagtggtggcagctcacaagtgttctttatgaccctgaacagaaactctatgatgaattggtag

SEQ ID NO: 244260 - DNA, 3996 bp, synthetic construct
  misc_feature 1..3996: note = Description of Artificial Sequence: Synthetic coding sequence
  source 1..3996: mol_type = other DNA
atggcatcagattcgccagccagatccttggacgagatagatctaagcgcactgcgcgatccagcagggattttcgagcttgttgagctggtcgggaatggcacatatggccaggtctacaagggcagacacgtgaaaacaggccaattggccgcaatcaaggtcatggacgtgaccggcgacgaagaggaagaaattaagcaagagattaacatgcttaaaaagtattcgcaccaccggaacatagctacgtactacggagccttcataaagaaaaacccccctgggatggacgatcaactgtggcttgtcatggaattttgcggagccggatccgtgactgacctaataaagaatacgaaggggaacaccctgaaggaggaatggattgcttatatctgccgtgaaattctgagagggctcagtcacctgcaccagcacaaagtaattcaccgggacattaaagggcaaaatgttctgcttactgagaacgccgaggtcaaactggtagacttcggtgtctccgcacagctggacaggacagtgggccgacgcaacaccttcatcgggactccctattggatggctcccgaggtgattgcgtgcgacgagaatcctgacgccacatacgattttaaaagcgacttatggagcctaggcatcacagcaattgagatggccgagggagctcccccactgtgcgatatgcaccctatgcgcgctctgttcttaatccctcgcaaccccgcacctcgcttaaagtccaaaaagtggagcaagaagtttcagtctttcattgagtcctgtctggttaagaaccattctcagcgaccagccaccgagcagctgatgaaacaccccttcatcagggatcagccgaacgagagacaagtacgcatacagctcaaagatcacatcgacaggacaaagaagaaacggggtgaaaaggatgagacagaatacgagtactcaggtagtgaggaggaggaagaggaaaacgacagcggagagccttcatccatactgaatctgccaggtgagagcaccctgaggagagacttcctcagactacagctggcaaacaaagagcgcagcgaagctcttaggcgacagcagttagagcagcagcagcgcgaaaacgaagagcataaacggcagttactggcagagcgacagaagcgaattgaagaacagaaggagcagaggcgacgcctcgaggaacagcaacgacgcgagaaggagttacggaagcagcaggagagggaacagcggaggcactacgaagaacagatgcggagggaagaggaacgtagaagggccgaacacgaacaggagtacaaaaggaaacagctggaagagcagcgacaggccgaacggctgcagcggcagctgaagcaggagagagattacctcgtttcactacagcaccagcgccaggaacaacgcccagtcgaaaagaagcctctgtaccactacaaggagggcatgtcaccaagtgagaaacccgcatgggctaaagaagtggaggagagatcacggctgaaccgccagtcctcccccgcaatgccccataaggttgccaaccgcatatccgatcctaatcttcctcctcggtcagaatccttctctatatctggggtgcagcctgcgcgaaccccgcctatgctcagacctgtggaccctcaaattcctcacctggtcgctgtgaaatcacaggggccagcattaactgcctcacagtctgtgcacgagcaaccaacaaaaggactgagcggcttccaagaggcactgaatgtcaccagccatagggtggagatgcccagacagaacagcgacccaacaagcgagaatccgcctctgcccaccaggattgaaaagttcgacagatccagctggctgcgccaggaagaggacattccacccaaagtgcctcagagaaccactagcatctctccggctttggccaggaagaacagtccagggaatggctccgccctagggccaagacttgggagccagcccatccgggcaagcaacccggacctgcggagaaccgagccgattctggagagcccactacagaggacctcttcagggtcatctagctcatctagcacgccctcttcccagccgagttctcagggcggaagtcagccagggagccaagctgggagctccgaaaggacccgtgtcagggccaattccaagtccgagggaagtccagtgctaccccacgagcccgcaaaagtaaaaccagaagagagtcgggacatcaccagaccaagcaggccagcctcctacaaaaaagccatagatgaagatctgaccgcactggccaaggaactacgggaactgaggattgaagagactaataggcccatgaaaaaagtcacagattattcctcatcatcagaagagtcagaatcaagtgaggaagaagaggaagatggcgagagcgagactcacgacggcacagttgccgtctccgatatcccaagactgatccctacgggcgctcctggatccaatgagcaatacaacgtggggatggtgggaactcatggcctcgaaaccagccacgccgacagcttcagcggcagcatctctcgggagggcactcttatgatccgggagacctccggtgagaaaaagaggtccggccatagtgactctaacgggttcgctggtcacattaacctcccagacctggtgcaacagtcccactcacccgctggaacgcccaccgaggggcttgggagagtgagtactcatagccaggaaatggattctgggacagaatacgggatggggagctctaccaaagccagctttacaccattcgtggacccccgagtgtaccagacttcaccaacggatgaggatgaggaggatgaggagagtagcgcggcagctttgtttacttcagagctgctgcggcaggagcaggctaaactgaatgaagctagaaagataagcgtagttaatgtaaatccaactaatataaggccgcatagcgacacccccgagatcagaaaatataaaaaaaggtttaactcggaaatcttgtgcgcagctctgtggggggtcaatctgttggtggggacagagaatggcctgatgctgttagatcgctcaggccagggcaaagtgtataatctcattaatcgcaggcgctttcagcagatggatgtgcttgagggtctgaacgttctggtgaccataagtggaaagaaaaataagctgagggtttattatctcagctggttgagaaaccgcattctccataatgatcctgaggtggagaagaaacaaggctggatcacggtgggggatctggaggggtgcattcactataaagtagtcaaatacgagcgcatcaaatttctggtgattgccctaaaaaacgcagtggagatctacgcgtgggctcccaagccctaccacaagttcatggccttcaaatccttcgctgacctccagcacaagcctttgttggttgatctgactgtcgaggagggccagaggctgaaagtcatcttcgggtctcatactggcttccatgtaatagatgtcgactcaggaaattcttacgatatatatatcccgtctcacattcagggcaatatcacacctcatgctattgtgattctcccaaaaacagatggcatggaaatgctcgtttgctacgaagacgagggcgtttacgtgaacacatatggacgtatcaccaaagacgtcgtgcttcagtggggtgagatgcctacatccgtggcctacattcacagcaaccaaataatgggttggggcgagaaggcaatcgagatcaggtccgtcgagactggacacttggacggggtctttatgcacaagagagcccagcgacttaagttcctgtgtgagcgcaacgacaaggtatttttcgcatccgtccgctctgggggttcgtcccaggtgttctttatgacactgaatagaaatagcatgatgaactggtag

SEQ ID NO: 244261 - DNA, 4017 bp, synthetic construct
  misc_feature 1..4017: note = Description of Artificial Sequence: Synthetic coding sequence
  source 1..4017: mol_type = other DNA
atggccagtgactctcctgccaggtccctggatgaaattgacttatcagctctccgggaccccgctgggatctttgaactggtggagctggtcgggaatggcacatatgggcaggtgtacaagggcaggcatgtcaagacaggacagcttgctgcgataaaggttatggatgtaaccggtgatgaagaggaggagattaagcaggagattaacatgcttaaaaaatactcccaccacagaaatatcgcaacctactatggcgctttcataaagaaaaatccacctggaatggatgatcagctgtggctcgttatggagttctgtggagctgggagcgttactgacctgatcaagaacaccaagggcaacacactgaaggaagaatggatcgcctacatctgcagggaaatcctgagggggctgtcacacttgcatcagcataaagtgatccacagggacattaaaggccagaatgtgctgctgacagaaaatgccgaggttaaaatagttgactttggcgtctctgctcagctggaccgaactgtggggagaaggaacacatttatcggcactccatattggatggcccctgaggtcatcgcctgcgacgaaaatcctgacgcgacctatgatttcaagtcagacctgtggagcctgggcatcacagctatcgagatggcagagggcgcacccccactttgtgatatgcatcccatgcgcgcactgtttctgattcctaggaaccctgcgcctagactcaagagcaagaaatggtctaagaaattccagagttttatcgaatcttgcctagtcaagaaccactcccaaagacctgccaccgagcagctgatgaagcacccatttattagagaccaaccgaacgagagacaggtccggatacagctgaaagaccacatcgacagaaccaagaagaagagaggagagaaggacgaaacagagtatgagtattcaggttcagaggaggaagaagaggaaaatgacagcggagaaccctccagcatcctgaacctccctggcgagtccacccttcgaagagatttcctgcgcctccagttggctaataaggagaggtccgaggcactgcgccgacaacagctcgaacagcagcagagagaaaacgaagagcacaagcggcagctactggcggagcgccagaaacggattgaggagcagaaggagcaacggagacgactagaggagcagcagcgccgagagaaggagctgcgaaaacaacaggaacgcgagcaacggcgacactacgaagagcaaatgcgacgggaggaggagaggagacgcgctgaacacgaacaggagtacaagaggaagcaactggaagagcagcgccaagcggaacgcctgcagcgacagctgaagcaggagcgcgactatttggtgtcactgcagcaccagagacaggagcagcggcctgtggaaaagaaaccactataccactacaaggaggggatgtccccatctgaaaagcccgcttgggctaaggaggtggaggagcgtagccgccttaacagacaaagttctcccgcaatgcctcataaggtcgccaaccgtatttctgacccaaacctgcccccacggagcgaaagtttcagtattagtggggtgcagccagcaaggacaccaccgatgctgcgcccagttgatccacagatccctcacttagtggcagtgaaatcacagggcccagccctgaccgcctcccagtctgttcatgagcagccaacaaaggggctgagcggattccaggaagcactaaacgttacaagccatagggtggaaatgcctcgccagaacagcgatcctacctcagagaacccccctctgcccacaaggatcgagaaattcgataggtcatcttggctcaggcaggaggaggatattccccctaaggtcccccagcggaccaccagcatttctcctgctctcgccagaaaaaacagtcctggaaacggctcggccttgggccctcgcctcgggtcacaacctatcagagccagtaatcctgatctgcgccgtaccgagcccatattggagagcccactgcagcggacctctagtggtagttcctcttcatcctccactccgtcctcccagcctagttcccagggcggaagccagcccggaagccaggctggcagctcagagaggacccgcgttagggccaattcaaagtcagaggggtctccagtactgcctcacgagccggctaaggtgaaacccgaggaaagcagggatatcacgcgaccttcaaggcccgctgtaagtgcatttctgagcaagagtttcgaactgctgatctatcaggacttaacagcgcttgccaaagaactgcgcgaactaaggatcgaagaaacaaacaggccgatgaagaaagtgaccgactactctagctcgtcagaggagagcgagtcctccgaagaagaagaagaggatggagagtccgaaacccacgatgggaccgtagccgtgagcgacatacctagactgattcccaccggcgcacccggatcaaatgagcagtacaatgtggggatggtgggtacccacggactcgagacctcacatgcagatagcttctccggctcgatcagtcgtgaaggcactcttatgatccgagaaaccagcggagaaaaaaagaggagcgggcatagcgactctaatggatttgcaggccacattaatttgcccgatctggtgcagcaatctcactcacctgcaggcacgcccacagagggtttagggagagtgagtacacactcccaggagatggacagtggtactgagtatggaatgggaagctccactaaagcgagtttcacgccgtttgtcgacccacgggtgtatcagactagcccaaccgatgaggatgaagaagacgaggagagctccgcggcagccctgtttacaagcgaactgttacgccaggaacaggccaagcttaatgaagcaaggaagatctctgtggtgaacgtgaatccgaccaatattcggccacatagcgacaccccggaaattcgcaaatataagaagcgcttcaactctgagatcctgtgcgctgcattatggggtgtcaatctcctcgtgggaacagagaacggcctgatgttattggataggagtggacagggaaaagtgtacaacctaatcaaccgtagaaggttccagcagatggatgtcctggaaggccttaacgtcttggtgacaatttccggcaaaaaaaacaaactgcgcgtgtactatctgtcatggctccgcaaccggatattacacaacgatcctgaagtggaaaaaaagcaagggtggataacagtcggagatttggagggttgcatccactacaaagtcgtcaagtacgagagaattaaattcctcgtgatagccctgaagaacgccgtggagatatatgcctgggctccaaagccttaccataagtttatggcttttaagagtttcgcagatctccagcacaaacctcttctcgtagatctaaccgtggaggagggccagcggctcaaagttattttcggttcccacactggttttcacgtgatcgacgtggatagtggcaatagttacgacatttatatcccctctcatatccagggcaacataacaccccatgcaattgtcatccttcccaagaccgacggtatggaaatgttggtctgttacgaggatgaaggcgtgtacgttaacacctacggacggatcacaaaggacgttgtgcttcagtggggggaaatgcctacaagcgtggcttacattcattctaaccaaattatgggctggggggaaaaagcaatcgaaatcaggtctgtggagacaggtcatctggatggtgttttcatgcacaagagagcacagcgactgaaatttctgtgcgaaaggaatgacaaagtgtttttcgccagtgtccggagcggcggatcctcccaggtatttttcatgactcttaaccgtaactctatgatgaactggtag

SEQ ID NO: 244262 - DNA, 4083 bp, synthetic construct
  misc_feature 1..4083: note = Description of Artificial Sequence: Synthetic coding sequence
  source 1..4083: mol_type = other DNA
atggcatcggatagccctgcacggagcttagacgaaatcgatctgtccgccttaagggacccagccggaatcttcgagctcgtcgaactggttggcaacgggacgtatggacaggtttacaaggggcgacacgtgaagacagggcagctcgcagccataaaagtcatggacgtaaccggcgatgaggaagaggagattaagcaggagattaatatgcttaaaaaatacagccatcaccggaacatagcaacgtactacggagcttttataaagaaaaacccccctggtatggatgaccagctctggttggttatggagttctgtggggctggcagcgttaccgacctcattaagaataccaagggaaacactctgaaagaggaatggatagcctacatatgcagggagattctgagggggctgagccacctccaccaacacaaagtgattcatagagatattaaaggacagaacgtcctgcttacagaaaacgctgaggtcaagcttgtcgattttggcgtgagcgcgcagcttgaccggacagtgggacgccgtaacacctttattggcaccccttattggatggccccagaggtgattgcatgcgacgagaaccctgacgctacatatgatttcaaatcggatctctggtcactgggaataactgccattgaaatggccgagggagcgcctcctctttgcgatatgcatcccatgcgggctctgttcctgatccctcggaacccggctccacggctgaaaagtaaaaaatggtcaaagaaattccagtcattcattgaatcctgtctcgttaagaatcacagtcaacgccctgccaccgaacagctcatgaaacacccctttatcagggatcagccaaacgagcgccaggtgagaatacagctcaaggatcatattgatagaacaaaaaagaaaagaggagaaaaggacgagactgagtacgagtacagtggatccgaagaagaggaggaggaaaacgatagcggagagccttcttccattcttaatctgcctggggagagtacattaagacgcgacttcttaaggctgcagttggcaaacaaagagagaagcgaggctctgaggcgtcagcaactagagcaacagcaacgcgagaacgaggagcacaaaaggcagcttttggcggagagacagaaaagaatcgaagaacagaaggaacagaggagacgcctcgaggaacagcagaggagagagaaagagttgcgcaagcagcaggagcgcgagcagagaagacactatgaggaacagatgcgtagggaagaagaacggaggcgcgctgagcacgaacaagagtacataaggcggcagctggaggaagagcagcggcagcttgagatacttcagcaacagctcttacacgagcaagcgctccttctggaatacaagaggaaacagctggaagagcagcgacaggctgagagattgcaacgccaattaaagcaggaacgggattacctcgtgtccttgcagcatcaaagacaggagcaacggccagtggagaagaagccactttatcattacaaggaaggcatgagcccaagtgagaaaccagcctgggcgaaggaagttgaagagcgaagccggctcaatcgccagagtagccccgcaatgccacacaaagtagcaaatcggatatcagatccaaatttgcctcccagaagcgagagtttcagcatcagcggcgttcagccggcacgaacacccccaatgctgaggccggtggacccacagattccccatttagtcgcggttaaatcacagggaccagccctgactgcttcacagagcgtccacgagcaacccacaaaaggcctgtctgggtttcaagaagcactgaacgtcaccagccatagagtggagatgccacgtcagaactcagatcccacaagcgagaacccacctctccccacgcggatcgagaaatttgatcgctcatcatggctgcggcaggaggaagatatcccccctaaggttccacagaggactacctccatttccccagccctcgcaagaaaaaacagtcccggaaatggtagcgccctgggaccacggctgggatctcaaccaataagagcctctaaccccgacctgcggagaacagagcctatcctggagtctcccttgcagcggacaagcagcggaagctccagctcgtctagcacgccttcaagccagccctcatctcagggcggttcacagccaggaagccaggcaggaagctccgagcgcacacgagtgcgggcaaactccaaatctgagggaagtcccgtgttaccccatgaacccgcaaaggtgaagcctgaggagtcacgcgatatcactcggccttccaggccagcgtcttacaagaaggcaatagatgaagacctcactgcgttggcaaaggaactgcgggagcttcggattgaagagaccaataggcccatgaaaaaggtcactgactactcttcctcttcagaggagagcgagtctagcgaggaagaagaggaagatggagagtccgagacacacgatgggactgtagcagtgagtgacattccaaggctgataccgacaggagccccagggtccaacgagcagtataatgttggtatggttgggacacacggtctagagactagtcatgccgattccttttcaggctccatctcccgggaaggaaccctgatgattagggagactagtggcgagaagaaaaggagcggtcactctgacagcaacggatttgcaggccacatcaatctgccagatctggtgcagcagtctcactccccagcaggcacacccaccgaagggttaggtcgggtaagcacacacagccaagaaatggattccgggacagagtatggcatggggtcctcgaccaaagcctctttcacaccttttgtggacccaagggtgtaccagacatccccaaccgatgaggacgaagaggatgaagagtctagtgctgcagcgctctttacatccgagttgcttaggcaagagcaggccaagctgaatgaagcgcgtaagatctccgtcgtgaatgtgaatcccaccaacataaggcctcacagcgatactcctgaaatccgcaaatataaaaagcggttcaatagtgagattctctgcgccgctctctggggggttaatctgctagtcggtacagagaatgggctgatgctgctggatcgcagcggacaggggaaggtgtacaatctgattaacagaaggcgatttcagcagatggatgttctggaaggactgaatgtcctcgtgactattagcggaaaaaagaataagctgagagtgtactacctgagctggttgagaaatcggatccttcacaatgatccggaggtcgaaaaaaagcaggggtggattaccgtgggagatctggaggggtgtattcactataaagtcgtgaagtacgagcggatcaagttcttagtgattgctctgaaaaatgcggtcgaaatttacgcatgggctcccaagccttaccacaaatttatggccttcaagtcgttcgcagaccttcagcacaaacctctcctcgtggacctgacggtcgaggagggtcagcgactgaaggttatcttcgggagtcacacgggattccatgtgatcgacgtggattccggcaacagctacgacatctatatccctagtcatatccaaggtaacatcacaccacatgccatagtgattctgcccaaaaccgacgggatggagatgttagtgtgttatgaggacgagggggtgtacgtgaacacttatgggaggatcactaaggacgtggtgctgcagtggggcgagatgccaacaagtgtagcatatattcatagtaatcaaatcatggggtggggagaaaaagccattgaaatccggtccgtggagaccggtcacctcgatggggtgtttatgcataagcgtgctcagcgactcaagttcctgtgcgaaaggaatgataaggtctttttcgcatccgtgaggagcggcggtagttcccaggtcttcttcatgacgcttaaccgtaatagcatgatgaattggtag

SEQ ID NO: 244263 - DNA, 3894 bp, synthetic construct
  misc_feature 1..3894: note = Description of Artificial Sequence: Synthetic coding sequence
  source 1..3894: mol_type = other DNA
atggcgtccgactccccggcacgaagtctggacgaaattgacctcagcgccctgcgtgatcccgcaggaattttcgagctcgtcgagctggtgggaaacggtacctatggacaggtgtacaagggcaggcacgtgaaaacaggccagctagctgctatcaaggttatggacgtgaccggggacgaagaggaggaaatcaaacaggaaatcaatatgctgaagaagtatagccatcatcgcaacatagcaacttattacggggcatttattaagaagaaccctccaggaatggacgaccaactctggctagtgatggagttctgtggcgctggctctgtcacggacctgatcaagaacacaaagggcaacaccctgaaagaggagtggattgcttacatctgcagggaaattcttcgaggcctgagccacttgcaccagcacaaggtaattcatcgcgatataaaaggccagaacgtgctccttaccgaaaacgccgaagtgaagctggtggactttggcgtgagcgcacagttagaccgaactgtgggaaggagaaacaccttcatcggcacaccgtattggatggcgccagaagtcatcgcctgcgacgagaatcccgacgccacatacgactttaaatcagacctttggagcctgggaattacagccatcgagatggctgaaggagcacctcccctgtgtgatatgcatccaatgcgcgctctgttcctgatcccaagaaatcccgctcccagattgaagtccaaaaagtggtccaaaaagtttcaatcctttatcgagagttgtttggtgaagaatcactctcaacgacctgccaccgaacagctgatgaagcatcccttcattcgagaccagccaaacgaacgccaggtaagaattcagttgaaagatcatattgaccgtaccaaaaagaagcggggagagaaggatgagaccgagtacgagtatagcgggagtgaggaagaagaagaagaaaacgacagcggagaacccagctcaattctgaacctccctggcgaatcgacactgcgtcgtgacttccttagactccaactggccaacaaggaaaggtccgaggccctgagacgccaacagttggagcaacagcaaagggagaacgaggagcataaaaggcagctactcgcagaaaggcagaaacgaatagaagagcagaaggagcagaggaggcgactggaagagcagcagcgcagagagaaagaactgagaaaacagcaggagcgagagcagcggaggcactatgaagaacagatgcggcgtgaagaggagcggagaagggctgaacatgaacaagagtacattaggcgacagctggaggaggagcagagacaactggaaatcctgcagcaacagctgctccacgaacaggccctgctccttgagtacaaacggaagcaactcgaggagcagcggcaagctgagcgactgcagcggcaactgaagcaagagcgtgactatttagtgtcactgcagcaccagagacaggagcaaaggcccgtggagaagaagcctctctatcactataaggaggggatgagcccctcggaaaagccagcctgggccaaggagattccgcacctggtggcagtgaagagccagggcccagctctgaccgcctcccaaagcgtgcatgagcagccgactaaggggctgtcagggttccaagaagctctaaatgttactagtcacagagtggagatgccgaggcagaattcagaccctacctccgaaaatcctcccctcccgacccggatagaaaagttcgatcgctcttcctggctgcgtcaggaggaggacatcccaccgaaggtgccacagagaaccacctctatttcacccgctcttgctaggaagaactccccaggcaacgggagcgcacttggcccaagactcggatcccagcctatccgagcatcaaacccggacttacggaggactgagccaatcctcgagtctccacttcagaggactagctccgggtcaagctcatccagttcaacaccctcatcccaaccttcttcgcaaggaggtagccagccaggaagccaggccggaagttcagaacgcactcgtgttagggcaaattcaaagtctgaggggagtccggtcctgcctcatgaacccgcaaaggtgaaaccagaggaatcgcgagacatcacccgacccagcaggcccgcagatttaaccgcactggccaaggaactcagggaactgcggattgaggagactaaccggccaatgaaaaaggtgacagactactcatcttcaagtgaggagtcagaatcatctgaggaggaagaagaggatggagaaagcgagacccatgatggcaccgtcgcggtctctgacatacctagacttatccccacaggggcacccggaagtaacgagcagtacaatgtagggatggtaggaactcatggactggagacgtctcacgctgatagctttagcgggtccatctccagagagggcaccctgatgataagagagacttctggcgaaaagaagcgctcaggacattcagatagcaatggattcgctggacatattaatttaccagatctggtccagcaaagccacagtccagccggtacaccgactgagggactcggcagggtgtcgacccacagccaggaaatggattctgggacagaatacggtatggggtcctccaccaaggccagttttaccccttttgttgatccgcgtgtctatcagacatccccaacagacgaggacgaggaagatgaggagtccagcgcggcagccctcttcacatccgagctgctcagacaggagcaagccaaactgaatgaagccagaaagatttcagtggttaacgtgaaccctactaatattaggccacactctgacactcctgagatacgcaagtataagaagcgatttaacagtgagatcctatgtgctgccctgtggggggtgaacctcctagtcggcacagaaaatggacttatgttgttggacagatccgggcagggtaaggtgtacaacttgatcaatagacgccgattccagcagatggatgtccttgagggtctcaacgtgctggtgaccatttctggaaaaaaaaacaaactgagagtgtactatttgtcatggctgcgcaataggatcctgcacaatgaccctgaggtggagaaaaagcagggttggataactgttggcgacctcgaggggtgtatccattacaaagtggtcaagtacgagcggattaaattcttggtgattgccctgaaaaatgctgttgaaatttatgcctgggccccaaaaccttaccacaagtttatggcgttcaagagctttgcagacctgcagcacaagcccctgctagttgacctgaccgtggaggagggccaacgtctaaaggtgatcttcggcagtcacaccggctttcacgtcatcgacgtggactcgggaaattcttatgatatctatatcccctcacatattcaaggaaacatcaccccacacgctatcgtgatcctgcctaagactgacggaatggaaatgcttgtatgttacgaagatgaaggcgtgtatgtcaatacgtacgggaggataacaaaggatgtagttttgcaatggggcgagatgcccacaagcgtggcgtatattcacagcaaccagataatgggatggggcgagaaagccatcgaaatacggtccgtagaaactgggcatttggacggggttttcatgcacaaaagagcccagagattgaagtttttgtgcgaaagaaatgacaaagtcttctttgccagcgtgaggagcggaggaagctcccaggtgttcttcatgacattaaaccgcaactcaatgatgaattggtag

SEQ ID NO: 244264 - DNA, 3972 bp, synthetic construct
  misc_feature 1..3972: note = Description of Artificial Sequence: Synthetic coding sequence
  source 1..3972: mol_type = other DNA
atggcttccgattcaccagctcggagcctcgacgagattgacctgtcagccttgcgcgaccccgcaggaattttcgagctggtggaactcgttgggaatggcacatatggccaggtctacaaaggcaggcatgttaaaactggccagctcgccgctattaaggtaatggatgttaccggagatgaagaggaggaaattaagcaggaaataaacatgctcaaaaaatattctcaccaccgcaatatagctacgtactacggcgcatttatcaaaaaaaacccccctggaatggatgatcagctatggctggttatggaattttgtggcgcagggagcgtgaccgatcttatcaagaatacaaaaggcaatactttgaaagaagaatggattgcgtatatctgcagggagattcttagagggctaagtcatctccaccagcataaagttatccacagggatattaagggtcaaaacgtgctgttgactgagaacgccgaggtaaagctggtagactttggagtgtccgcacagctcgaccgcaccgtgggcaggcggaatacatttatcggaacgccctattggatggcaccagaagttatagcatgcgatgagaatcctgatgcaacctatgactttaaatctgacctgtggtccttaggcatcactgccatcgaaatggccgagggagcacctccattatgcgatatgcatcctatgagagcactcttcctgatccctcgaaaccctgctcccaggttgaagagcaaaaagtggtctaagaagttccagagttttatcgaatcttgtctggttaagaatcactctcagcgtccggctaccgagcaactgatgaagcatcccttcatcagagaccagcccaacgagcggcaggtgcggatccagctgaaagatcacatcgatcggacgaaaaagaagaggggcgaaaaggacgaaactgaatatgagtactcgggctcggaggaagaggaggaggagaacgatagcggcgaacccagctccattctcaacctgcccggtgaatctacattgcgcagagatttcctcaggctgcagctggctaataaggagcgatcagaggctctgcggagacagcagctggagcagcagcagagagaaaatgaggagcacaagcgccagctactcgcagaacggcaaaagcggatcgaagagcagaaggagcagaggcgcaggcttgaggagcagcaaaggcgagaaaaagagcttcggaagcaacaagaaagagagcaaaggcggcactacgaggagcagatgcggagagaggaggagagacggagagcggagcatgaacaggagtataagagaaaacagctggaggagcaacgtcaggcagagcgcctccagcggcagctgaagcaggagagagattatctggtctcactgcagcatcagagacaagagcaaagacccgttgaaaaaaagcccctgtatcactataaagaggggatgtccccctctgagaaaccggcttgggctaaggaggtggaagaacgctcaagactgaaccgccagagctcacctgcaatgccgcacaaggtcgctaacagaataagtgacccgaacctgcccccacgcagtgagagcttttctatctccggtgtccagcccgcacggacccccccaatgttacgccctgtcgacccacagataccgcatctggtcgcggtcaagagtcagggacctgcgctcactgcgagccagagcgtgcatgagcagccaacaaaggggctctccgggttccaggaagcattaaacgtaacaagccatcgtgtggaaatgccacgccagaactccgatcccacatccgaaaacccaccgctgccaactagaattgagaagttcgacagaagcagttggcttaggcaggaagaggatatacctcctaaagtcccacagcggacaacatccatcagccccgcactcgcaagaaagaactcgccaggaaacgggagcgcactcggaccgcgtcttggatcccagcccattcgcgcatccaatcctgatctgaggaggaccgagcccatcctggaatcccctctgcagagaacttcatcgggcagctcctcttcctcttctaccccctctagtcaaccaagcagccaggggggatctcagcctggctctcaggccggttcatcggagagaacacgcgtccgagcaaatagcaaatccgagggtagcccagttttgccccacgaaccagcaaaagtgaaacccgaggagtctagggacattacgcgcccttccaggcctgcagatctgactgcactcgccaaggagctgcgggaattaagaatcgaagagaccaaccgtcccatgaagaaagtaactgactacagctcctcatcagaagaaagtgagtcctccgaggaagaggaggaagacggagagtccgaaacccatgacggcacagtagctgtaagcgatattcccagactaatccctacaggggcaccgggttcgaatgaacagtacaatgtcggcatggtgggcacccatggactggagacctcacacgccgattcattcagtggtagcatctctagggaagggactctgatgattagagagacatcaggagaaaaaaagagatcaggtcatagtgattctaacgggtttgcaggtcacataaatctgcctgatctggtgcagcaatctcattcccccgctggaacccctacagagggattagggagggtttccactcatagccaagagatggatagcggcacggaatatggcatgggatcctctaccaaagcctcatttacgcccttcgtggatccgcgagtctatcagacatcacctacagacgaggatgaggaagacgaggagagttctgccgctgctctttttaccagtgagttacttaggcaagaacaagccaaactcaatgaggctaggaagatcagtgttgtgaatgtcaatccaacaaacattcgcccacactctgatacccccgagattcgaaaatacaagaagagattcaacagcgagatcttgtgtgctgccctctggggggtgaatctgctcgtaggaaccgagaacggccttatgctccttgaccggagcgggcagggaaaggtgtacaatttaattaaccggcgacgcttccagcaaatggacgtgttagagggattgaatgttctcgttaccattagcgggaagaaaaataaactgagagtctattacttgtcttggctgaggaataggatcctgcacaatgaccctgaagtagaaaagaagcaaggttggatcacagtcggtgatcttgagggatgcatccactataaggtagtgaagtacgaacgcattaagttcttagtgatagccctgaagaacgcggtggagatctatgcatgggcgccaaagccttatcataagttcatggcattcaaaagctttgcggacctgcaacataagcctcttctcgttgatttgactgtcgaggagggccagaggttgaaagttatcttcgggtcccataccggcttccacgtaattgacgtagatagcggcaacagctacgacatttatatccccagtcacatccagggcaatattacgccccacgctattgttattcttcctaaaactgacggaatggagatgttagtttgctacgaggacgaaggagtttacgtgaatacctatgggaggattaccaaggatgtcgtacttcaatggggcgaaatgcccactagcgtcgcctatattcacagtaatcagatcatgggttggggagagaaggctatagagattagaagcgtcgaaaccggccatttggatggtgtgttcatgcataagagggcccagaggctaaagttcctatgcgaacgcaacgataaggtcttctttgccagtgtgcgctcagggggtagtagccaggtcttcttcatgaccctgaacaggaactcaatgatgaactggtag

SEQ ID NO: 244265 - DNA, 3807 bp, synthetic construct
  misc_feature 1..3807: note = Description of Artificial Sequence: Synthetic coding sequence
  source 1..3807: mol_type = other DNA
atggccagtgatagcccggcaaggtccctggacgaaatcgatctgagcgctctccgcgatccggctgggatttttgaactggtggagctggttgggaacggtacatacgggcaggtatacaagggtcgacacgtgaaaactggccaacttgcagcaatcaaagtgatggacgttacgggagacgaggaagaggagattaagcaagaaatcaatatgctgaaaaaatactcacatcaccgcaatatcgctacatactacggcgcttttatcaaaaagaatccacctgggatggacgaccagctgtggttagtgatggaattttgtggcgcaggtagtgtgacggatctaatcaagaacactaaaggaaacaccctgaaagaagaatggatcgcctatatatgcagggagatactccggggtctctctcatctgcaccaacacaaggtgatacatcgggatattaagggacagaatgtgctgctgacggagaacgccgaggtcaagctcgtcgatttcggtgtctctgcccaactcgataggaccgtgggacgccgtaatacattcatcggcactccctactggatggctcctgaggtcattgcctgtgatgagaatcctgacgctacttatgatttcaaatccgatctatggagcctggggattactgcaattgaaatggccgaaggagctcccccattgtgtgacatgcaccccatgagagcactgtttctgatccccagaaacccagcccctcggcttaagagtaagaagtggtctaagaagttccaatcgttcatcgaatcttgtctggttaagaatcacagtcaaagaccagctaccgagcagcttatgaaacaccctttcatccgggaccaacccaatgagcggcaggtgagaattcagcttaaggaccatatcgatcgtacaaagaagaagaggggagaaaaagacgaaacagagtatgaatattctggatccgaggaagaggaagaggagaacgatagtggcgagccttcttcgatcctgaatcttcctggggaaagcactctcagacgcgactttttgcggttgcagctggccaacaaggagcgctccgaggctctgagacgccagcagctggagcaacagcagagggaaaatgaggaacacaagcgccagctgctcgctgagagacagaaaagaattgaagagcagaaagagcagcgaagaaggctggaggaacagcaacgccgagaaaaagagctgcgaaagcagcaagagcgcgagcagagacggcattatgaagaacagatgagaagagaagaggagcgaaggagagctgagcacgaacaggagtataagagaaagcagctggaagaacagaggcaggccgagcgccttcagcgccagctcaagcaggagcgggattacctggttagcctgcagcaccagcgccaagaacagcggcctgtagagaaaaaacccctataccactacaaagaaggcatgtccccatcggagaagcctgcatgggccaaggaaatcccccaccttgtcgcagtcaagtctcaggggcctgcactgaccgctagtcagtccgttcatgaacagccaacgaaagggctgtctgggtttcaggaggctctgaacgtgacctctcacagggtggagatgcccagacagaactctgatccaacaagtgagaaccctccactccccacaaggatagagaaatttgacaggtccagctggctgaggcaggaggaggatatccccccaaaggttcctcagcgaaccactagtattagtcctgccctcgccagaaagaattcaccgggaaacgggagtgcgctcggcccaagacttggatcccagccaatacgcgcatctaatccagatctacgccgaaccgagcccattctggaatcaccgctgcagcggacaagtagcggctcaagctcaagctcctcgaccccctcaagccagccctcttcgcagggcggaagtcaaccgggatcacaggccggaagcagtgaaagaacaagggtccgggcaaattccaaatcggaagggtcaccagtgttaccacacgaaccagctaaggtgaagccggaagaatcacgagacattacgagaccttcccggccagctgacctcactgcactggccaaagagctgagggagttgagaatcgaggagaccaacagacctatgaagaaggtaaccgattattcctcctctagcgaagagagcgaaagcagtgaagaggaagaagaagatggggaatccgaaacgcacgacggtacagtggcggtgagcgacatcccacgcttgattcctaccggcgctcccggaagcaatgagcagtacaatgtggggatggtgggaacgcatgggttagagacctctcacgcagattcattcagtggctcgatttccagagagggaaccctgatgatcagggaaacctccggggaaaaaaagcggagtggccactctgacagcaacggatttgcgggtcacattaatcttcctgatctggtgcaacagtcccattcccctgccggaacgcctactgagggccttggcagagtctcaacgcacagtcaggaaatggactccggcacagagtacggcatgggcagctctacgaaggcatcttttaccccgttcgtggatccgagggtctatcagacatcacccacggacgaggacgaagaagacgaggaatcttccgccgctgccctgtttaccagtgagttactgaggcaggaacaggctaaactcaatgaagcgagaaaaatcagtgtggtcaacgttaatccgacgaacattcgcccacattctgacacgccagagatacgaaagtacaaaaagagatttaatagcgagatactatgtgcggctttgtggggagtgaacctccttgtgggcaccgagaatggtctgatgctcctggaccggagtgggcaaggcaaagtctataatctcatcaatagacgcagattccagcaaatggatgtgctggaggggctaaatgtgctggtaacaatcagcggcaagaagaataaacttagagtgtactatttgtcgtggctgagaaaccgcatactgcataacgatccagaggtggaaaagaagcaggggtggataacggtgggcgacctagagggatgtatccactacaaggttgtgaaatacgaaaggattaagtttctcgtaatcgctttgaaaaacgcggtagagatctacgcatgggcccctaaaccctaccataaattcatggcattcaagagcttcgccgatcttcagcacaagccccttttggtagatctgacagtggaggaggggcagcgtctaaaagtgatattcggcagtcatacgggcttccatgttatagacgtcgacagcggaaactcatatgatatctacatcccatctcatatacagggaaacataactccccatgcaatagtcatccttccaaaaactgatggtatggagatgctggtgtgctatgaagacgagggagtgtatgtgaacacctatggtagaataacaaaagacgtggtgctgcagtggggcgaaatgccgaccagcgtggcctacatacacagtaatcagattatgggctggggtgagaaagctattgaaattaggtccgtggaaacagggcaccttgacggggtctttatgcataagagggctcagaggctgaaatttttgtgcgagcgcaacgataaagtgttctttgcatctgtgagaagcggcggaagtagccaagttttcttcatgaccttaaacagaaattctatgatgaactggtag

SEQ ID NO: 244266 - DNA, 3918 bp, synthetic construct
  misc_feature 1..3918: note = Description of Artificial Sequence: Synthetic coding sequence
  source 1..3918: mol_type = other DNA
atggcctcagactctcctgccaggagtttggatgaaatagatcttagtgctcttagggatcccgctggaatttttgaactggttgagttagtgggaaacggcacttacggccaggtgtacaaaggcaggcatgtgaaaactggtcaattggctgcaatcaaggttatggatgtcactggagacgaggaagaggaaatcaagcaagagattaacatgttgaaaaaatacagtcaccatagaaacatcgccacctattacggtgcattcattaagaaaaaccctccaggcatggatgatcagttgtggttggtgatggagttctgtggcgctgggagcgtgacagacctcatcaagaacacaaagggaaatacactgaaagaggagtggatcgcttatatttgcagggaaatccttcgaggtctcagccatttacatcagcacaaagtgattcatagagacataaagggacagaacgtcttactaaccgaaaatgcggaagtaaagctcgtggattttggagtgagcgctcagctcgaccgtactgtcgggagacgcaacaccttcatcggcacaccatattggatggccccagaggtcatagcctgcgatgagaaccctgacgctacgtacgactttaagtctgatttgtggagtctaggcatcacagccatcgagatggcagagggcgcacctcccttgtgcgacatgcaccctatgagagccctattcctgatccctcggaaccctgcccctcgcctgaagtctaaaaagtggtctaaaaagttccaatcctttatagaatcttgtttagtcaaaaaccacagtcagaggccggctaccgaacagctgatgaagcaccccttcatcagagaccaacccaatgaacgccaggtgcgcattcagctcaaggaccacattgatagaaccaagaaaaagcgaggggagaaagatgagactgagtatgaatatagcggcagtgaggaagaggaagaagaaaacgactcgggagagccgagcagcattctgaacctgcctggagaatctactctgaggcgcgatttcctccgcctgcagctggcaaacaaggagaggagcgaggcgctcaggagacagcagcttgagcagcagcagagagaaaacgaagagcacaagcggcagctcctcgccgagaggcagaagaggattgaggaacagaaagagcagagacggagactcgaggaacagcagaggagggagaaggaactgagaaaacaacaagaacgtgagcagcgcagacactacgaggaacaaatgcgaagagaggaagagagaagaagagccgagcacgaacaggaatatatcagacggcagctggaggaagagcagcgtcaactagaaatcctgcagcagcaactgctacatgagcaggccctcttgctcgagtacaagcgtaaacaactggaagagcagaggcaggcagaacggctccaaaggcagctaaaacaggagagagactacctcgtctctctgcagcaccagcgtcaagaacaacgacccgtggagaagaagccattgtatcactacaaagaaggaatgagtccgagcgagaaacctgcctgggctaaggagatcccacatctggtagccgtgaaatcccaagggccagccttgaccgctagccagagtgtccatgaacagcccaccaaggggctgtctggtttccaggaggcgctcaatgtgacatcacacagagtcgagatgccaagacagaactcagacccaaccagcgagaatccgccactgccaaccaggattgaaaagtttgataggagttcatggctcaggcaagaagaggacattccgccaaaagttcctcagcggaccaccagcatcagccctgcccttgccaggaagaacagcccaggaaatggatccgcgctgggcccacgcctagggagccagcccatccgggctagtaatcctgacttgcggaggactgagcctattctggaaagccccctccagcgcacatcatctggcagtagtagttcctcctccacgccgtcatcccaaccatcaagccagggaggatctcagccagggtcacaagccggttccagtgagcggacccgggtaagagccaacagcaagtccgaaggaagcccggttttgccccacgagcccgcaaaggtcaagcctgaagaatcgcgtgacataactcggcctagtagacccgcaagctataaaaaggctatagatgaggatctgactgcactggctaaagagctgcgcgagctgaggatagaggaaacgaaccgtcccatgaaaaaagtcacggactactcgagttcatccgaggaatccgaatccagtgaggaagaggaggaggatggagagtccgaaacccacgacggcaccgttgcggtctcagacatccctaggctgatccccaccggagcacctggctctaatgaacaatacaatgtcggcatggtcggcacacatggactagaaacctcccatgctgatagcttctctggatcaattagcagggaggggaccttgatgataagggaaacatctggagagaagaagaggagcgggcacagcgattcaaacgggttcgccggacacataaacctccctgatcttgtacagcagtcacatagccccgctggcactccgaccgagggattaggcagagtgagcacccatagccaggagatggactccgggactgagtatgggatgggctcaagcactaaggcctcatttaccccttttgtggaccccagagtgtatcagacaagccctacagacgaggacgaagaagatgaagaatcttctgcagctgccctgtttacaagcgagctgctccgacaggagcaggctaagctgaacgaggctagaaagatctccgtcgttaacgttaacccaacgaacatcagacctcactcagatacccctgagattcgcaagtacaagaagaggttcaactctgaaatcctctgcgctgccctgtggggagttaacctgctggtgggaactgaaaatggtttgatgctgcttgaccggagcggacagggaaaggtgtataatctgatcaacagacgccgtttccagcagatggatgtgcttgaaggattaaacgtgcttgtgaccattagcggtaagaagaacaaactgcgagtgtactacctgtcatggctgcgcaacagaattctgcacaatgaccctgaggtggagaagaagcaggggtggatcaccgtcggtgatcttgaagggtgtattcactataaagttgtcaagtatgaaaggatcaagtttttggttatcgcactgaaaaacgccgtggagatatatgcctgggccccaaaaccgtatcacaagttcatggctttcaaaagttttgccgacctccagcacaaaccgctcctggtcgacctgactgtagaagaggggcagaggctgaaggtgatcttcgggtcacacaccgggttccacgtgatagatgttgactcgggaaattcatacgacatttatattccctcccacatccagggcaacatcaccccacacgccatcgttattctccccaaaacagacggaatggagatgctggtttgttatgaggacgaaggcgtctacgtgaatacgtacgggagaatcactaaagatgtggtgctccagtggggcgaaatgcctacctcagtcgcctatatccattcaaatcagattatggggtggggcgaaaaggctattgagattcggtccgtcgagaccggacatttagatggagtattcatgcacaaacgcgcacagaggctgaagttcctttgtgagcgaaatgataaagtcttctttgcgagtgtgagaagcggcggatcatcgcaggtctttttcatgacccttaaccggaattcaatgatgaattggtag

SEQ ID NO: 244267 - DNA, 3939 bp, synthetic construct
  misc_feature 1..3939: note = Description of Artificial Sequence: Synthetic coding sequence
  source 1..3939: mol_type = other DNA
atggcctccgattcccccgctagatctctggacgagattgatctctctgcactacgcgaccctgctgggattttcgagctggtcgagcttgttggaaatgggacatatggccaagtgtataaaggacggcatgtgaagacaggacagcttgctgccataaaggtgatggacgtgaccggggatgaggaagaggagataaaacaggagattaacatgctgaaaaaatatagccatcatcgcaacatcgctacctactacggagccttcattaagaaaaatcccccaggcatggatgaccaactgtggctggttatggaattttgtggagcagggtctgtgactgatttaattaaaaacacaaagggtaatactttaaaggaagagtggattgcatacatttgtcgggagatactgaggggcctgtctcacttgcatcagcataaggtgatccacagagacattaaaggacagaacgttctattaacggagaatgctgaggtgaagatagtggactttggcgtgagtgcccaactggaccgtaccgtcggtaggcgcaacactttcatcgggacaccatactggatggccccagaagtgattgcatgtgacgaaaaccccgacgccacgtacgatttcaaatccgatctgtggtccctggggatcactgctatagagatggccgaaggcgctccccctctgtgtgacatgcacccgatgagggccttatttcttatcccccgaaatccagcccctcggctgaaaagcaagaaatggagcaaaaaatttcagtcatttattgagagctgtcttgtcaaaaatcattcccaaaggcctgctacggagcaactgatgaagcacccttttatccgtgaccagcccaatgagcgtcaggtgagaattcagctcaaggatcacatcgatcgtaccaagaaaaaacggggtgagaaggacgagacagagtacgagtactccggatctgaagaagaagaagaggagaacgactccggggagccctccagcattttgaacctgcctggggaatcaaccctccggagggactttttacgtctgcagttggccaataaggaaagaagcgaggccctacgtcggcagcaactcgaacagcagcaacgggagaatgaagaacataaaagacagctacttgcagagcgccagaagcggattgaggaacaaaaggagcagcgacgccgtctcgaggaacagcagagacgggaaaaagaactcagaaaacagcaggagcgtgagcagcggagacattatgaggagcagatgaggcgcgaagaggagaggcggagagctgaacatgaacaggagtatattcggcgacagctcgaggaggagcagcgccagctagaaatccttcaacagcaattacttcacgagcaggccctcctccttgagtataagcgcaagcagcttgaagagcagcgtcaggctgagcgccttcagagacagctcaaacaggagcgggactaccttgtaagcctccaacaccagcggcaggaacagagacccgtcgagaaaaaacccctctaccattataaggagggaatgtccccatccgaaaaaccggcttgggcgaaggagatcccccatttggtggcagttaagagtcagggacccgcactgaccgcatctcaatcagtgcacgaacagccgacaaagggcttatcagggttccaagaggctctgaacgtcaccagccacagagtggaaatgccccgtcagaattctgatcccacatcggagaaccctccacttcccacccgtattgagaagttcgaccgttcctcctggctgaggcaggaagaagatattccacccaaggtgcctcagcggacaactagcatctcccccgcactcgcgagaaaaaatagtcccggaaatggcagcgccctcggccctcgcttgggctcgcaaccgattagagcatccaatcccgatctgcgcaggacagaacctattctcgaatcaccattgcagcggacgagcagcggcagcagttcttcgagttctacgcctagtagccagccctcgtcccagggcggatcacagccaggtagccaagccggttcaagtgaacgtacaagagtaagggccaacagcaagtcagaagggagcccagttctccctcatgagccggctaaggtcaagccggaggagtcgcgcgacatcacacgaccttctcgaccagccgtatccgcattcctgtcgaaaagctttgaattactgatctaccaggacctgactgcgttggcgaaggagttgcgggagctgcgcatagaagagacgaatagacctatgaaaaaagtaaccgattacagcagctcttcagaggaatccgagtctagtgaagaggaggaggaggacggagagtctgaaacccacgatggcacagtcgctgtctccgatattccaagactgataccaaccggagctcccggtagtaatgagcaatacaacgtgggaatggtaggaacacacgggctggagacttctcacgcagatagctttagcgggtccatctcgcgcgaaggcaccctcatgatccgcgaaacctccggggaaaaaaaacgcagcggacattcagactctaatgggtttgcgggacacatcaacctccccgaccttgtgcagcaatcacattcaccagcaggaaccccgaccgagggtctgggtcgggtttcaactcactcccaagaaatggattcaggcactgaatacggaatgggctcttcaacaaaagccagctttactcctttcgtagacccacgtgtgtatcagacttctccaaccgacgaggatgaagaagatgaggagtccagcgccgcagcgctttttacgtctgagcttctgcggcaggagcaagcaaaattgaatgaggccaggaagatcagcgttgttaatgttaacccaaccaatattagacctcattcagatacccctgaaattcggaagtacaaaaagagatttaatagcgaaatcctgtgcgctgccttgtggggagtgaacctactcgtcgggactgaaaacggcctgatgctcctggaccgcagcggccagggcaaggtgtacaaccttatcaaccggaggagattccagcagatggatgtgttagaggggttgaacgtcctggttacaatttcaggaaagaagaacaaactccgggtctattacctgtcctggttgcggaataggattctgcacaatgacccggaagtcgaaaaaaagcaaggctggatcactgttggtgatttggagggctgcattcattacaaagtggtcaaatacgaacggatcaagttcctagtgatcgccctgaagaatgcagtggagatatacgcctgggctcccaaaccttaccataagtttatggcctttaagtccttcgctgatctgcagcacaagccactgttggtcgatttgacagttgaagaagggcagcgactcaaagtgatcttcgggagccataccgggttccatgtaatcgacgtggactccggtaacagttacgacatctatatccccagccacatccagggtaacatcaccccccacgccatagtgatcctgcctaaaaccgacggaatggagatgctcgtctgctatgaggatgaaggggtctatgttaacacatatggccgtataacaaaggacgtggtcctgcagtggggggagatgccgacctcagtcgcatatatccactccaatcagattatggggtggggcgagaaagccatcgaaatcagatcagtagaaaccgggcatctggatggagtgttcatgcataagcgcgctcagcgcctgaagttcctctgtgaacgcaatgataaggttttcttcgcatccgtccgaagcggtggttccagccaggtgttttttatgaccctcaatagaaactcaatgatgaattggtag

SEQ ID NO: 244268 - DNA, 1725 bp, synthetic construct
  misc_feature 1..1725: note = Description of Artificial Sequence: Synthetic coding sequence
  source 1..1725: mol_type = other DNA
atgccccctcagctgcaggaaaccagaatgaataggagcatccccgtggaagtcgatgagagtgagccttaccctagccaactcctgaaacctatccccgagtattcacctgaggaagaatctgagccccctgcacccaatatcaggaacatggccccaaacagtttgagtgcccctacgatgctccataacagcagtggagatttctcccaggcccattccaccttgaagttggctaatcaccaaagacctgttagccgacaagttacgtgcctacgtacccaagtcctggaggactccgaagactccttctgtagacgccatcccggtctgggcaaagccttcccctcggggtgtagcgctgtcagcgaacctgcttccgagagcgtggttggagcattgcccgcagagcatcagttcagcttcatggagaaacggaatcaatggttggtcagtcagctctcagcagccagccctgatactggtcacgattctgacaaatctgaccagagcctccccaatgcatcggcagattcactcgggggatcacaggagatggttcagcgtcctcagccacaccggaatagggcaggcctcgacttaccaactatagatacagggtatgatagtcagccccaagacgtgctgggtatcaggcagctggaacgccctctgcctttgacatctgtctgttacccacaggatttgccacggcctttgcgttctagagagttcccacaatttgagcctcagcgttaccccgcttgcgcccagatgcttccccctaacctgagcccacatgcaccctggaactatcactatcactgccctgggagccccgaccatcaggtcccgtacggacacgactacccccgagccgcatatcagcaagttattcagcctgctttgcctggacaacccctaccaggtgcaagtgtgcggggacttcatcctgtccagaaggtgatcctgaattacccttctccgtgggatcacgaagagcgcccagctcaacgcgattgctcattccccggacttccaaggcaccaggaccagcctcaccaccagccccctaacagagcgggtgcccctggggaaagcctcgagtgccccgctgagctcagacctcaagtccctcaacccccttcacccgctgcagtccctaggccaccgagcaatcctcctgcacggggaacgctcaaaaccagtaacttaccagaggagctaagaaaagttttcatcacatatagcatggacaccgctatggaggtcgtcaagtttgtgaacttcctgttggttaatggctttcaaactgccatcgatatcttcgaagaccgcattaggggcatcgatatcattaaatggatggagcgctatttgagagataaaacagtgatgataatcgtggccatatcacccaaatataagcaggatgtggagggagcagaatcacagctggatgaagatgagcatggtctccacaccaaatacattcaccggatgatgcaaatcgagtttatcaaacagggctcaatgaacttcaggtttatcccagtgttgttcccgaatgccaaaaaggagcacgtgcctacatggcttcagaatactcatgtgtattcctggcccaaaaacaagaaaaacatcctgcttagactgctgcgggaagaagagtatgttgctcctcccaggggacctctgcctacccttcaagtagtgccactgtag

SEQ ID NO: 244269 - DNA, 1695 bp, synthetic construct
  misc_feature 1..1695: note = Description of Artificial Sequence: Synthetic coding sequence
  source 1..1695: mol_type = other DNA
atgaatcgatctattcccgtggaggtggacgagagcgagccttacccttcccagcttctgaaacccattccagaatactcacctgaagaggagagtgagcccccagcgcctaacattcgaaatatggcgcctaatagcctttccgcaccgaccatgcttcataactcttctggagatttttcccaggcacattcgacccttaagctcgccaaccatcagagacccgtatccaggcaggtcacatgcctccggactcaagtactggaggattctgaagattctttctgtcggaggcaccctgggttaggcaaggcattcccgtctgggtgtagcgccgtaagtgagcccgctagcgaatcagtggtgggagccctgcccgctgagcatcaattctctttcatggaaaaaagaaatcagtggcttgtgagtcagctctctgcagcttcgcccgataccggtcacgatagcgataagtccgaccagagcctgcccaacgcctccgccgatagcctcggaggctcacaggaaatggttcagcgacctcagccacatcgcaaccgtgcgggattggatcttcccaccatcgataccggctatgattcccaaccacaagacgtccttgggatacgacagctagagaggccactgcccctcacgagtgtttgctacccccaggacctaccccgacccctgagatccagagagtttccacagttcgaaccccagcgatatcccgcttgcgctcagatgctgccacctaaccttagtccccacgcaccgtggaattatcattatcactgccccggaagtcccgatcaccaggttccatacggacacgattaccccagggcggcttatcagcaggtgatacaacctgccttgcctgggcagcctctccccggagcctctgtccgaggccttcatcccgtacaaaaggtgatcttaaactaccccagcccctgggaccatgaggagcgtccagcacagagagactgttccttcccaggattgcccagacatcaggaccagccacatcaccagcctccgaaccgagctggcgctcctggcgagagcctcgaatgtcctgccgaattgcgaccacaggtgcctcagcccccatcacctgctgcagtgcctagacccccaagcaacccccctgccaggggtaccctcaagaccagtaacctgccagaggagttacggaaggtattcatcacttattccatggatactgctatggaggtagtgaagttcgtaaatttcctgttggttaatggatttcagactgcaatcgacatctttgaagaccgtatcaggggcattgacattataaaatggatggagcgctatctgcgggacacagttatgatcatagtggcaatcagtcccaagtataagcaggacgtcgaaggcgcagagtcccagctcgacgaggatgaacatggcctccatactaaatatattcaccgcatgatgcagatcgaatttattaaacaggggtccatgaacttccgcttcatccccgtgctcttccccaatgccaagaaggaacatgtgcctacctggctgcaaaacactcacgtttactcgtggcccaagaacaaaaaaaatatactcctgcgtctgctccgggaggaggaatatgtcgcccctccacgaggccctcttcctacactacaagtggtccccttatag

SEQ ID NO: 244270 - DNA, 1698 bp, synthetic construct
  misc_feature 1..1698: note = Description of Artificial Sequence: Synthetic coding sequence
  source 1..1698: mol_type = other DNA
atgaatcggtccatccccgtggaagtggatgaaagcgagccatacccaagccagctgcttaaaccgataccagagtacagtcctgaggaggagtctgaaccgcctgccccaaatatccgcaacatggctcctaactccctgtccgctcctacaatgctccataattctagtggggatttctcacaggctcattcaactttaaagcttgcaaatcatcagagacccgtcagcagacaagtcacttgccttagaacacaagtcctcgaggacagcgaggactccttttgccggcgtcaccccggtctcgggaaggcttttccatcggggtgctctgcagtaagtgagcccgcatctgagagcgttgtaggggcactgcctgccgaacatcagttttcattcatggagaaaagaaatcagtggctggtatctcaactgtcagcggcatccccagacaccgggcacgactcagacaagtccgatcagtcactgccgaatgcatcagccgatagcctggggggttctcaggagatggttcaacgccctcaaccgcataggaaccgagctggtttggacctgcccacgattgacacgggatacgactctcaacctcaagacgtgctcggaattagacagctggagcggccattgcccctcacctcagtgtgctatccacaggacctgcccaggcccttgcgctcaagagaattcccacagtttgagccacagagatatccagcctgtgcccaaatgctacccccaaatctatcccctcatgccccttggaattaccactatcactgtcctggatctcccgatcatcaggtcccttacgggcacgattatccacgagccgcataccaacaggttattcagcctgctctgccgggacagcccctgcctggcgcatccgtccggggtttacaccctgtccagaaagtgatcctgaattacccaagcccctgggaccacgaggaacggccagcccagagggactgcagttttcccggactgcctcggcatcaggaccagccacaccatcaacctcccaaccgggctggagctccaggagagtctctggagtgcccggcagaattgcgtcctcaagtaccgcagcccccatcaccagccgctgtgccaaggcccccttctaatcccccagcccgaggcaccctcaaaacctcaaatctaccagaggagctgaggaaagtgttcattacatactccatggatacagctatggaagttgttaaatttgtgaattttttgcttgtcaacggctttcaaaccgctattgacattttcgaggaccgcatcagaggtatcgatatcataaagtggatggagaggtacctgcgcgataaaactgttatgatcatcgtggctatcagccccaagtacaaacaggatgtggaaggggctgaatcccaactggatgaggacgaacacgggctccacacaaaatacattcatcggatgatgcagatcgagttcattaaacagggcagcatgaacttccgctttattcctgtgctgttcccaaatgctaagaaagaacatgtgccaacctggttgcagaacacccacgtctatagctggcccaagaataagaaaaacatcctactgagactcctgcgtgaagaggagtatgtggcccctccaagagggcctctgcccacactgcaggtggtgcctctgtag

SEQ ID NO: 244271 - DNA, 1725 bp, synthetic construct
  misc_feature 1..1725: note = Description of Artificial Sequence: Synthetic coding sequence
  source 1..1725: mol_type = other DNA
atggcccctcaattggaggagacacgcatgaatcgctccatacccgtcgaggtcgatgaaagtgagccatacccttcccaacttctgaagccaatccctgagtactctcccgaagaagagagcgagccgccagccccaaatataaggaacatggctcccaattcactatccgctcctacaatgctccataatagctctggcgatttctcgcaagcacactccacattaaaactggccaaccatcagcgtcctgtctccaggcaggtaacgtgcctccgcacacaggtgttggaggattccgaggactccttctgtaggcgccaccctggcttgggcaaggcctttccttcaggatgctcggccgtaagcgagcccgcatcagagtctgtcgtgggcgctcttccagctgaacaccagttcagcttcatggaaaagcggaatcagtggttggtaagtcagctgtccgccgctagtcccgataccgggcacgactctgataagagtgaccaatcactgcctaatgcgtcggctgattcattagggggaagccaggaaatggtgcaacggccacagccccaccgcaacagggccggtctggacctgcccactattgacaccgggtatgacagccagccccaagacgtgctggggattagacaacttgagcggcctctgccactgacttcagtgtgctatccccaggatctcccacggccacttagatctcgggaatttccgcagttcgaacctcaaagatacccggcatgtgcccaaatgctgccacccaatcttagtccccacgcaccgtggaattaccactatcattgtcccggatcgccggaccatcaagtcccttacggccatgattaccctagagccgcatatcaacaggttatccaacccgctctcccaggccagccactgcccggagctagcgtaagagggctgcatcccgtccagaaggtgatactgaactatcccagtccatgggatcacgaggaacggccagcccagagagactgttcttttcccggactgccgagacaccaggatcagccccaccaccagccgcctaacagagctggcgctcccggagaaagcctggagtgtccagccgagctgaggcctcaggtcccacagcctccaagccccgcagccgtccctcgcccaccctccaacccccctgccaggggcacgctcaagacttccaacctgcccgaggagttacggaaggtgttcattacatactccatggacacagccatggaggtcgtgaagtttgtgaattttttacttgttaacggctttcagacagccatcgacatatttgaggacaggattaggggcatcgatattataaaatggatggagcgctacctccgggacaagacagtgatgattattgtcgcaatatccccaaaatacaaacaggatgttgaaggagctgaatcccaactggatgaggatgagcatggcctccataccaagtacatccacagaatgatgcagattgaattcatcaagcagggatccatgaatttcaggttcatacccgttctcttccccaacgctaaaaaagaacacgtcccaacatggcttcaaaatacccatgtgtatagctggccaaagaacaagaagaacatactccttcgactacttagagaggaggaatatgtggcacccccacggggtccgctgcctacactgcaggtggtgcccctttag

SEQ ID NO: 244272 - DNA, 462 bp, synthetic construct
  misc_feature 1..462: note = Description of Artificial Sequence: Synthetic coding sequence
  source 1..462: mol_type = other DNA
atggaggtggttaaatttgtgaatttcctgctagttaacgggtttcagacagctatcgatatttttgaagacagaattagggggatcgacattattaagtggatggagcggtacctgcgagataaaacggtgatgataatagtagcaatcagtccaaagtataagcaggatgttgagggtgcggagtcccagctggatgaagacgaacatggactgcataccaaatacattcaccggatgatgcaaattgagttcatcaaacaggggtcgatgaacttcaggtttatccccgtgctgttccctaacgcaaagaaagagcatgtgcccacgtggctgcaaaatacccacgtttattcttggccgaagaacaagaagaacatcctgctgagactgctgagggaggaggagtatgtggcaccaccccgagggcctttacccaccttacaggtagtgcccctgtag

SEQ ID NO: 244273 - DNA, 330 bp, synthetic construct
  misc_feature 1..330: note = Description of Artificial Sequence: Synthetic coding sequence
  source 1..330: mol_type = other DNA
atgattattgtggctatttcccccaagtacaaacaggatgtggaaggcgcagagagccagctggatgaagacgagcacggcttgcacactaagtatatccatcggatgatgcagatcgagtttatcaaacagggatccatgaattttcgcttcatccctgtgctgtttccaaacgctaaaaaggagcacgtccccacctggcttcagaatactcacgtgtattcatggcctaagaacaaaaaaaatattctcctacggctgctccgagaagaagagtacgtggcccctccaaggggccctctgccaacgcttcaagtggtccccctttag

SEQ ID NO: 244274 - DNA, 1596 bp, synthetic construct
  misc_feature 1..1596: note = Description of Artificial Sequence: Synthetic coding sequence
  source 1..1596: mol_type = other DNA
atgatatcacccgacccccgtccaagcccagggctggcccgatgggccgagtcttatgaagccaaatgtgagcgccgtcaggaaattcgcgaaagccggagatgccgccctaacgtgactacttgcagacaggttggaaagactctccggatccagcaacgcgagcaactgcagagagccagactgcagcaatttttcagaaggcgaaacctagagctggaggagaaggggaaggcccagcatccccaggccagggaacagggacccagcagacggccaggacaagtcactgggacttccagtgaggtgtttcccgcacagcacccaccgccaagcggaatctgccgtgacctgtcagaccatctgtcatcccaggcagggggactcccgccacaggacacaccgataaagaaaccaccgaaacatcaccgcggaacacagacgaaggcggagggacccacaatcaaaaacgacgcttcccaacagacgaattatggcgttgccgtgctggacaaagagatcatccagctgtcagactatctcaaggaggccctgcagcgggagctggtgctgaagcagaagatggtaattctgcaggatttgttgagcacactgatccaagcctccgattcgagctggaagggccaactgaatgaagacaagctgaaggggaagttacgatctctggagaatcagctctacacgtgcacccaaaaatactccccctggggtatgaaaaaagtgctgctagagatggaagaccagaaaaattcctatgagcaaaaagctaaagaatcccttcaaaaggtgctggaagagaagatgaacgccgagcagcaactgcaaagcacccagagatcccttgctttggctgagcagaaatgcgaggagtggagatcccaatatgaagcactcaaagaggactggaggacgctgggtacccagcatagagagctggagagccagctgcacgttttgcaatccaaactgcagggggctgattcccgggatctgcaaatgaatcaggctctgcggtttttggaaaacgagcatcagcagctgcaggcaaaaatcgagtgtctccagggtgaccgtgacctttgctcactggatactcaggacctccaggatcagctgaagcgaagcgaagctgagaaattgactctggtgacgcgggtgcagcagcttcaagggctgcttcagaaccaaagcttacaattgcaagaacaggaaaaacttctgaccaagaaagatcaggcgctcccagtgtggtctccaaaaagcttcccaaatgaagttgaaccagaaggcaccggaaaggaaaaggactgggacctgcgcgaccagctgcaaaaaaaaacacttcagctgcaggctaaggagaaagagtgtcgcgagctacacagtgaactggataacttgagtgacgaatacttgtcatgcctccgcaaactgcagcactgccgtgaagagctcaatcaaagtcagcaactgcccccacgcaggcagtgcggtagatggctgcctgtgctaatggtcgtgattgctgctgcccttgccgttttcctggcgaataaggacaatctcatgatctag

SEQ ID NO: 244275 - DNA, 549 bp, synthetic construct
  misc_feature 1..549: note = Description of Artificial Sequence: Synthetic coding sequence
  source 1..549: mol_type = other DNA
atgaaaaaagttcttctagagatggaagaccagaagaatagctatgagcagaaggctaaagaatcccttcagaaggtcctagaagagaagatgaacgccgaacagcagcttcaaagcactcagcgatctttggcccttgctgagcaaaagtgcgaggagtggcgaagtcagtatgaggccctcaaagaagactggaggactctcggaactcagcatcgagagttggagtcccagctccacgtgctccagtctaagctccagggggcagactctcgagacctccagatgaatcaggccctgaggtttcttgagaacgagcatcaacagctccaggcaaaaattgagtgcctgcagggcgatagggacctttgcagcctcgatacacaggatcttcaggaccagctgaagcgaagcgaggccgaaaaattaaccctggtgacccgtgtacagcagctgcagggcctgctgcagaaccaaagtctccagctgcaggagcaggagaagcttctcacaaaaaagggccagcagatatactatcacaagttctag

SEQ ID NO: 244276 - DNA, 1656 bp, synthetic construct
  misc_feature 1..1656: note = Description of Artificial Sequence: Synthetic coding sequence
  source 1..1656: mol_type = other DNA
atgatatcaccagatcccagacccagccccggtctcgccagatgggcagaaagctatgaagcaaaatgcgaaaggaggcaggagatcagagagtcgaggagatgccggcctaatgttacaacatgccgccaggtcggcaagacgctccgcatccagcagcgggagcagcttcaaagagccagactccagcagttttttaggcgaaggaatctcgagttagaagaaaaagggaaggcacaacatccacaagctagagagcaaggaccctcccgacgaccaggacaggtaactgtcctcaaagaacctctctcctgcgctagaagaatctcatccccaagagagcaggtaaccggcacgtcctccgaggtcttcccagcccagcacccgcctcccagcggtatctgtagagatttatccgatcatttgagctcccaagcaggcggactgccgccacaggacacccctataaagaagccgcctaaacatcaccgcggaacacagactaaggctgaaggtccgacgataaagaatgacgcaagccagcagacgaattacggggtggccgtcctagataaggagatcattcagttgagcgattacttgaaagaggccctgcagagggagctagtcctgaaacaaaagatggtgatcctgcaggatcttctctcaacgttaattcaggcaagtgactcaagttggaaggggcagctgaatgaggacaagctgaaaggtaaactgaggtccttggagaaccagttgtacacatgtactcagaaatattccccttggggaatgaaaaaggtgctgctggagatggaggaccagaaaaattcctatgagcagaaagcaaaagagagcctgcagaaggtcttggaagaaaaaatgaacgctgagcagcagctgcaatccacccagaggtccctggcattggctgagcagaagtgcgaggagtggagatctcaatatgaggcactgaaagaggactggaggacgctgggcacccagcatagggagctggaatctcagctccacgttctgcagtctaagctacagggggctgatagccgcgacctacagatgaatcaggcacttcgatttcttgagaacgaacaccagcaattgcaggccaagattgaatgccttcaaggggaccgagacctgtgtagcttggatactcaggacctgcaagaccagttgaaacgttccgaagccgaaaagctgactttggttacccgcgtccaacagctgcagggccttctgcaaaatcagagtctgcaactccaggagcaagagaagctcctcaccaagaaagaccaggccctgccagtctggagcccgaagtcgtttcctaatgaggtagagcccgaagggacaggtaaagaaaaggattgggatctgcgggatcagttgcagaagaaaaccctgcaactccaggcaaaggaaaaagagtgcagggagcttcactcggagctggataatctgagcgatgaatatctttcatgtctgcgcaagctccagcactgtagggaagagctgaaccagagtcagcagctgcccccaaggaggcagtgtggccgttggcttcctgtattaatggtggtcatcgccgctgcactggctgtgttcctcgccaataaagacaacctcatgatctag

SEQ ID NO: 244277 - DNA, 1656 bp, synthetic construct
  misc_feature 1..1656: note = Description of Artificial Sequence: Synthetic coding sequence
  source 1..1656: mol_type = other DNA
atgattagcccagacccacgccctagtcctgggctggccaggtgggctgagagctacgaagccaagtgcgagcggcgacaggaaatccgggagagtcggagatgccggccaaatgtaactacctgccggcaagtgggtaagacactgcgtattcaacagcgggagcaactacaacgtgccagactacaacaattctttcgcagaagaaacctggagcttgaagagaagggtaaagcacagcaccctcaggctagggagcagggaccttctagacggccaggacaagtgacagtgctgaaggagcccctttcatgtgcccgaaggattagcagcccccgagaacaggtgactggaacgagctccgaggtgttccctgcccagcaccctcccccaagcggaatctgtcgggatctttccgaccatttatcatcacaggccggtggcttacctccccaggacacacccattaaaaagccaccaaagcaccaccgcggtacgcagaccaaggcagagggcccaactatcaagaatgacgcttcccagcagacaaattatggagtggcagtactggataaagaaattatacagctgagcgattacctgaaggaggccttgcagcgtgagttggttctgaagcagaaaatggtgatactgcaagacctgttgtcaaccctcattcaagcctctgacagcagctggaaaggccagcttaacgaggacaaactgaagggcaaactccggtcacttgaaaaccagttatacacctgtacacagaagtacagcccctggggcatgaagaaggtgctcctggaaatggaggatcagaagaatagctacgagcagaaggctaaggagtctctgcagaaggtactggaagaaaagatgaatgcggagcagcaattgcagtcgacccagagatccctggccctggcggagcagaagtgtgaggagtggagaagtcaatatgaagctttgaaggaggactggcggacgttgggcacccagcatagggagctggaatcccagttgcacgtcctgcagtcaaagctccagggcgctgacagtcgagacctccagatgaaccaggccctgaggtttttggagaacgaacaccaacagctgcaggccaaaatcgaatgtcttcaaggcgaccgtgatctgtgttccctggacactcaggacctgcaggaccagctaaagcgatcagaggctgaaaaactgactctggtgactcgagtgcaacagttgcagggtctcctccagaaccagtcgctacaattgcaagaacaggagaaacttctcaccaagaaggatcaagcactgcccgtctggtcacctaagtcattccctaatgaagttgagccagaagggactgggaaagagaaagattgggacctcagagatcagcttcagaaaaaaacactgcaattgcaggctaaagaaaaagagtgccgggagctccacagcgagctggataatctctctgacgagtacctgtcctgcctccgtaagctgcagcactgcagagaggaactcaaccagtcacagcagctcccccctaggagacagtgcggtaggtggctgcccgttctgatggtggtgatagcagcagcattagcagtgtttttagcaaacaaggataatctgatgatctag

SEQ ID NO: 244278 - DNA, 1596 bp, synthetic construct
  misc_feature 1..1596: note = Description of Artificial Sequence: Synthetic coding sequence
  source 1..1596: mol_type = other DNA
atgatcagccccgaccccagaccgagtcccggtttggcaagatgggcggagtcctatgaagcgaagtgtgagcgccgacaggagatccgagagtcccgtagatgcagacctaatgtgactacctgtagacaggtcggtaaaacactgcggatccaacaacgagaacagcttcagcgtgccagactgcaacaattttttcggcgtaggaatctggagctcgaggagaaagggaaggcccagcatcctcaagccagagagcagggaccttctaggcgtccaggacaggtcacaggtaccagctctgaagtcttccctgctcagcacccaccccctagtggtatatgcagggacctgagcgaccatttgtcttcacaggccggaggattgcctccacaggacactcccattaagaaacctcccaaacaccaccgtggaacccagacgaaggccgagggcccaacaatcaaaaacgatgcctcccaacagaccaactacggagtggccgtccttgacaaagaaatcatacagctgtccgattacctgaaggaagcactgcagagagagctggtgctgaaacagaaaatggtaatcctgcaagaccttctgagcactcttattcaggcatctgactccagctggaaggggcagcttaacgaggataagctgaagggaaaactacggtcacttgagaatcagttatatacctgcacccagaagtattccccatggggcatgaagaaagttctcctggagatggaggatcaaaaaaactcctacgagcaaaaggccaaagagtctctgcagaaagtcctggaggagaagatgaatgccgaacagcagctccaaagcacccagcgtagcctagcactggccgaacagaaatgtgaagaatggcggtcccagtacgaagcactcaaggaagactggcgcacactgggcacacagcaccgggaacttgagtcccaactccatgtgttacagagcaagctccagggcgctgactctcgagaccttcagatgaatcaggctctgagatttcttgagaacgaacatcagcagcttcaggccaaaattgagtgcctgcagggcgatcgagatctctgcagcttggacactcaagacttacaggatcagctaaaaaggagcgaggcagaaaagttgacactcgtgacaagagtgcaacagctgcagggcttactgcagaatcaaagcctccaactgcaggagcaagagaagctgctgactaagaaagaccaggccctgccagtctggagtcctaaatcttttcccaacgaggtcgaacctgagggtacaggtaaggagaaagattgggacctccgtgatcagttgcagaagaagactctgcagctgcaggctaaagaaaaggagtgccgagaacttcactcagagctggacaatttatcagatgaatacctctcatgccttagaaagctacagcattgtcgcgaggagctcaaccaaagtcagcagttgcccccacggcgacagtgtgggagatggctcccggtcttgatggttgtgattgcagctgccctcgctgtgttcttggcaaataaggataatttgatgatttag

SEQ ID NO: 244279 - DNA, 1215 bp, synthetic construct
  misc_feature 1..1215: note = Description of Artificial Sequence: Synthetic coding sequence
  source 1..1215: mol_type = other DNA
atgatctctcccgaccctagaccctcacccggtttggccaggtgggcggagagctacgaagctaagtgtgagcggagacaagagatccgggaatcaagacggtgccgcccaaacgtcactacttgccgacaagtggggaagaccctgcgcatccaacagagggagcagctccaaagggccaggctccagcagttcttccgaaggaggaatctcgagctggaggaaaagggcaaagcacagcacccacaggctcgggaacaaggtccaagccggaggcccggtcaagttaccggtacctctagtgaggtgtttcctgcccagcaccctccccctagcggcatttgtcgggacctgtccgatcacctttccagtcaggccggaggcctgccaccccaagacacccctattaagaagcctcctaagcatcaccgaggcactcagactaaagccgagggcccaactatcaagaacgatgcctcccaacaaacaaattacggtgtcgcggtcctggataaggaaattattcagcttagcgattacctcaaagaagcactgcaacgggagttagttttgaaacagaagatggtcattctacaagatttgctgagcaccctgatacaagccagcgacagctcatggaaagggcaactgaacgaagacaaattgaaggggaagctgcggtccttagaaaatcagttatacacctgtacccagaagtacagcccatggggtatgaagaaggtgcttctggagatggaagatcagaaaaactcatatgagcaaaaagcaaaggagtcactccagaaagtgctggaggagaaaatgaatgctgagcaacagctccagtctacacagcggagcctcgccctggccgaacaaaagtgtgaagagtggcgctctcagtacgaggcgctgaaggaagactggagaactctcggtacccagcaccgggaactggaatctcaactgcatgtgttacagtcgaagctgcagggagctgacagtagagatctgcagatgaaccaggctctgagatttctggaaaatgaacatcaacagttgcaggctaaaatcgagtgcctccagggcgatcgcgacttgtgttcattggatacccaggacctgcaggaccaattgaaacgatctgaagcagagaagctgaccttggtgacacgggtccaacaactgcaagaagctgcaggctggactacatag

SEQ ID NO: 244280 - DNA, 963 bp, synthetic construct
  misc_feature 1..963: note = Description of Artificial Sequence: Synthetic coding sequence
  source 1..963: mol_type = other DNA
atgataagtcctgatcctagaccctcaccaggactcgcaaggtgggcagaaagctacgaggctaaatgcgaaagacgtcaggagatacgtgagtctcggcgatgtaggccaaacgtcacaacgtgtcgccaggtggggaagactttgaggatccagcagcgggagcttgaagagaaaggaaaggcccagcatcctcaagccagggaacagggaccatcaaggcgccctggccaggtgacagtgcttaaagagccgttgagctgtgcgagacgcatatcaagtcccagagagcaggtgacaggtactagctccgaggtctttcctgcccagcaccccccaccttccggcatctgccgggacctgtccgaccacctgagttcccaggcagggggtctgcctccacaagacacacccattaaaaaacctccgaagcatcaccgcggaacccaaacaaaggccgagggtccaacaataaagaatgatgccagtcagcaaacaaactacggcgttgccgtgctggacaaggaaatcatccagttgagtgattacctgaaagaggccctgcagcgggagcttgttttgaagcagaagatggtgattctgcaggatctgttgagcaccctgattcaggcatctgactcctcttggaagggccagctcaatgaggataaacttaagggcaagttgaggtccttggagaatcaattatatacctgtacccaaaaatatagcccatgggggatgaaaaaggtacttctcgagatggaggaccagaagaacagctatgaacagaaggcaaaagagagcctgcagaaagtgctggaagagaaaatgaacgcagaacaacaactacaatccacccaggtgtgggggtgccatatcgatatgggactcggaacaccaggtagcctgggcaacaagggcagtcagttacataattccctggagccatcacccctttag

SEQ ID NO: 244281 - DNA, 81 bp, synthetic construct
  misc_feature 1..81: note = Description of Artificial Sequence: Synthetic coding sequence
  source 1..81: mol_type = other DNA
atgatttcccccgaccccagaccaagccccggactggcccgatgggccgaaagctatgaagccaagtgcgagcgcagatag

SEQ ID NO: 244282 - DNA, 1671 bp, synthetic construct
  misc_feature 1..1671: note = Description of Artificial Sequence: Synthetic coding sequence
  source 1..1671: mol_type = other DNA
atgcaaaagttcatcgaggcggattattatgagctggactggtactatgaggaatgctctgatgtgctctgcgccgaacgcgtagggcagatgactaaaacttataatgatattgacgctgtcacccgactgctggaggagaaggagagagatctggagctagccgctcgaattggccagtcactgctgaagaaaaacaaaactctgactgagaggaacgagcttctggaggagcaggtggaacacatccgcgaggaggttagccagcttcgccacgagttgtcaatgaaagacgaactgctgcagttctacacttctgcggcagaagaatcggagccagaaagtgtctgcagcacccccttaaagagaaatgagtcttcctcaagtgtacagaactactttcacctagatagtctccagaagaagttgaaggatctggaagaggagaatgttgttctccgctctgaagctagccaactaaaaactgagaccattacgtacgaggaaaaggagcagcagctcgtgaatgactgtgtaaaggagctgagggatgctaatgtgcaaatcgccagcatctctgaggagttagccaaaaagacagaggatgctgccaggcagcaggaggagattactcacctgctgtcccagatcgtggatctccagaaaaaggcaaaggcttgcgcggtggaaaacgaagaactcgttcagcacctgggagcggcaaaggatgctcagaggcaacttaccgctgagctcagagaactggaggacaaatatgccgaatgtatggaaatgctacacgaagcccaggaagaactcaaaaacctgcgcaacaagaccatgcccaacacaaccagtcggagataccactctctgggactctttcctatggattcactcgccgctgaaatcgaaggtacaatgaggaaggagcttcagttagaagaagctgagtcccctgacatcactcatcagaaacgtgtatttgagacagtaaggaacattaaccaggtggtgaagcaacgctcgctgactccaagcccaatgaacattcccggaagtaaccaatcctccgccatgaacagcttgctgtctagttgcgtatctacgcctagatcatccttttatggatcagatatcggcaatgtggtactggacaataaaacaaatagcatcatcttagaaaccgaggcagctgatttgggtaacgacgagaggagtaagaaacccggaacacccggtacccccggtagccacgatctagagacagcgctaagacgcctgagcctgcgcagagagaactatttgtcagagcgacggttttttgaggaggagcaggaacgaaaactccaggagctggccgagaaaggagagctgcgtagcggctcgctgacacccacagagtcaataatgtccctgggaacacatagcaggttcagcgaatttacggggttctctgggatgtcattctcatctcgctcctacctgccagaaaaactgcaaattgtgaaacccctagaaggtgaccacgcgggacctaggccactaagcgtgttgctcggcgactcactctggtcccttatacaccttcgcaaagccggtcacctgtgtcacgcctattcctttttcttccgtgacagtcacccacggtgctggttcgagtttctgtag

SEQ ID NO: 244283 - DNA, 438 bp, synthetic construct
  misc_feature 1..438: note = Description of Artificial Sequence: Synthetic coding sequence
  source 1..438: mol_type = other DNA
atgactgtacataacctctatttgttcgaccgcaatggagtgtgtctccattactccgaatggcaccggaaaaagcaggcgggtatcccgaaagaggaagagtataaactgatgtacggtatgctgttttcaatcaggagcttcgtatctaagatgtccccactggatatgaaagatggattcttggccttccagacttccagatacaagttacactactatgagacccctactggcatcaaggtcgtgatgaacacagaccttggtgtgggacctatcagggacgtgctgcaccatatctactctgccctgtatgttgaactcgtcgtgaagaatcccctctgcccactcggacagactgtccagtcggaattatttcgttcccgtcttgatagctacgttcgatctctcccctttttttctgctagagccggttag

SEQ ID NO: 244284 - DNA, 438 bp, synthetic construct
  misc_feature 1..438: note = Description of Artificial Sequence: Synthetic coding sequence
  source 1..438: mol_type = other DNA
atgaccgttcacaacctgtacttatttgaccgcaacggcgtgtgcttacattactccgaatggcataggaagaaacaggcaggaataccgaaagaggaagagtataagctgatgtacgggatgctcttctccattagaagcttcgtatccaagatgtcaccactcgacatgaaagacggtttccttgcttttcagacctcgcgctacaagctgcactattacgaaacacccacaggaattaaggttgttatgaacacagatctgggcgtggggcctatccgcgacgtcctgcatcatatctacagcgcactgtatgtggagttagtcgttaagaaccctctgtgcccacttggccagactgtgcagtcagaactgttcaggtccagactggactcatacgttagaagtctgccatttttcagtgcaagagcgggatag

SEQ ID NO: 244285 - DNA, 3402 bp, synthetic construct
  misc_feature 1..3402: note = Description of Artificial Sequence: Synthetic coding sequence
  source 1..3402: mol_type = other DNA
atgtctccgactcagtgggactttcccgtggagctctgctgtcgccctatggcttttgtaaccctgaccgggcttgacgtggtctacaacgctgtgcatagagcggtatgggatgccttttgcgcgaaccgtcgggcagatagggtgccaatcagctttaaggtactgcctggcgatcacgaatatcccaagtgtaggcctaagagaacttcttacgagtggtacatccccaagggtattctgaagacaggatggatgaacaagcacctgaatctcgttcctgccctggtcgtagttttctacgagttggactgggacgagccacagtggaaggagaagcagtcagagtgtgctacccgggtcgagattgtgcgacagtctttgcagggcagaaacacaaaagtggcagtggtcctgatccagaagaagactcccctccccccaggtgaagacgtgatcgcctccgagcgggcagccgcactatgtaacgcttgcgagttatctgggaagtccttatttgtattgccacacaccgaccacctcgtggggtatatcattaggctggagaacgcattctacgagcacgcccaaacgtattattacaccgaaattaggcgagtcaagagccataaagagtttctgaacaagaccactcaccagctcctttttgtgaggcaccagtttaagatcgcattcttttcagaactcaagcaggacactcaaaacgccttaaaaaattacaggactgcatacaatttggttcacgaactgcgtgcccacgagactaatatcctcgaaatcaagacaatggcaggcttcatcaattacaagatctgtcggctctgttttcagcacaatacaccattggatgccattgcacagttcagaaagcacatcgacctctgtaagaaaaaaattggttcggctgagctgtctttcgaacacgatgcttggatgtccaaacagtttcaggccttcggagatttgtttgacgaggcgattaagctgggcctgaccgctattcaaactcagaacccagggttttactaccaacaggccgcttactacgcccaagaaagaaagcagctggctaaaaccctgtgtaatcacgaggcatcggtgatgtatccaaatcccgatcctcttgagacacagaccggcgtgctcgatttctacggccagcgttcatggcggcagggcatcttgtcttttgacctctcagatcctgagaaggaaaaagtgggaatcctcgctatccagttgaaggagcggaatgtcgttcacagtgaaattattattactttgctgagcaacgccgtagcccagtttaaaaaatacaagtgtcctcgcatgaaatctcatctgatggtacagatgggagaggagtattattatgctaaggactatactaaagctttgaagctgctggactacgtgatgtgtgattacagatcggaaggctggtggaccctactcacgtctgtgctcactactgctctgaagtgttcttacttaatggctcaactgaaagattacatcacctactccctcgagttgctgggaagggcttcaactttaaaagacgaccaaaaaagcagaatagagaagaacttgatcaacgtgctaatgaacgaaagtcctgaccctgaacctgattgcgatatcctggccgtaaagacagcccaaaaactctgggctgacagaatatcgctcgccggatccaatatcttcacaattggtgtgcaggactttgtcccttttgtccaatgtaaggcaaaatttcatgcacctagcttccatgtggacgtacccgtgcagttcgatatttatctgaaagccgattgtccccaccctatacggttttccaagctttgtgtgagcttcaacaatcaggagtataaccaattttgtgtgatagaggaggccagcaaggctaatgaggtcctggaaaacctgactcaaggcaaaatgtgtctagtacctggcaagacgcgaaaattactcttcaagttcgttgccaaaactgaggatgtgggaaagaaaatagagattacttctgttgatctggccttaggaaacgaaacgggaaggtgtgtggttcttaactggcagggcggaggcggtgacgcagcatcctcacaggaagcacttcaagcagcaaggtcttttaagcggagacctaaacttccagataatgaagtccactgggattccatcataattcaggcttcgacaatgattatctcccgcgtccctaacatctctgtgcacctgctgcacgaaccccctgccctgaccaatgagatgtattgcttagtcgtaaccgtgcaatcccacgagaagactcaaatacgagacgtcaaactcactgccggtctcaagcccggacaggatgctaacctgacccagaaaactcatgtgaccctgcatgggacggagctttgcgatgagtcctaccccgctcttttaacagatatacctgtgggtgacctccacccgggtgaacaacttgaaaagatgctttatgtgaggtgtggcacagttggctctcgcatgtttctcgtttatgtgtcatacttgattaacacaacagtcgaagaaaaagagattgtttgtaaatgtcataaggacgaaaccgttactattgagacagtctttcccttcgacgtcgccgtcaagtttgttagcacaaagtttgagcaccttgagcgggtgtacgccgacatccctttcttactgatgacggatctgctgtccgcatctccttgggctttgactatcgtctcctcagaacttcagctggcaccctctatgactactgtggatcagcttgaaagtcaagtggataatgtcatccttcaaactggtgagtccgcatcggaatgtttttgtctgcagtgcccatccctgggtaacattgaaggcggtgtagcgaccggtcactacattatctcttggaagagaacaagcgccatggagaacattccaatcatcaccaccgtgatcactttaccacacgtgattgtggagaatatccccctacatgttaatgccgacctcccgtccttcggcagagtccgggaaagcctccctgtgaagtaccatctgcagaataagaccgacttagttcaggacgtcgaaatctcggtggaaccctccgatgcgtttatgtttagcggtctaaaacagatcaggcttagaatcctgcccggaaccgaacaagaaatgctctataatttttatcctctcatggccggatatcaacaactgcctagcttgaacatcaaccttctgcgctttccaaacttcactaatcagctcttgagaagattcataccaacaagtatctttgtaaaacctcagggacggctcatggacgacaccagcatcgctgcagcgtag

SEQ ID NO: 244286 - DNA, 3261 bp, synthetic construct
  misc_feature 1..3261: note = Description of Artificial Sequence: Synthetic coding sequence
  source 1..3261: mol_type = other DNA
atgtcccccactcaatgggatttccccgtggagctgtgctgccggcctatggcgttcgtcacccttacaggccttgatgtagtgtacaacgccgtgcatagagccgtgtgggatgccttctgcgcaaaccgtcgtgccgaccgcgtccctattagctttaaagtgctccccggtgaccatgaatatcccaagtgtcgcccaaaacgtacctcctacgaatggtatatccccaaagggatactgaaaactggttggatgaataagcacctgaacctggtacctgccttagtagtcgtattttatgaactggactgggatgagccacagtggaaggagaaacaaagcgaatgtgccacccgcgtggaaatagtgcggcaaagcttgcaggggaggaacactaaagtggctgtagttttaatccagaaaaaaactcctctgcccccaggggaagatgtgattgcatccgagagggcagcggcactgtgtaatgcttgtgagctgagtggtaagagccttttcgtcctgcctcatactgaccatcttgtcggctacattatcagattagaaaatgccttctacgaacatgcgcagacctactattacaccgagatcaggagggtgaagagccacaaggagttcttgaacaagactacccaccaattgctttttgtaagacaccagttcaagatcgcctttttttccgagttgaaacaggacacccaaaatgcgctcaagaactaccgaacagcttataatttagtacacgagctccgcgctcacgagaccaacattctcgagatcaagacaatggcgggattcatcaactataaaatctgtcgcctctgtttccaacacaacacccccttagacgctatcgcacagtttaggaagcatatagacctctgtaagaagaaaattgggtcggccgagcttagctttgagcatgatgcttggatgagcaaacaatttcaggctttcggtgacctgttcgacgaggccataaaactggggctgactgctatccagacacagaacccagggttctattaccagcaggccgcatattacgctcaggagcgcaagcagctcgccaaaacactttgtaatcatgaggcatctgtcatgtaccctaaccctgaccctttggagactcagaccggggtgctggatttctacggacaacggtcttggcggcagggtattctctcctttgatcttagcgatccagaaaaggaaaaggtggggattctagccatacagctgaaagaaagaaatgtagtgcattcggagattatcatcaccctcctctcaaatgcagtggctcagttcaagaaatataagtgccctagaatgaaatcgcacctgatggtgcagatgggggaggagtactattacgcaaaagactatacaaaggccttgaagctactggactacgttatgtgtgattaccgctccgaaggatggtggacactgctaacatccgtcctcaccaccgcccttaaatgttcctatttgatggcacagctgaaagactacatcacatactcgctcgagttgctgggccgagcctccacgttaaaagatgaccagaagagtcgcatagaaaaaaatctaatcaatgtgctgatgaatgagtctcccgaccccgagcccgactgtgacatcctggccgtcaagacggcgcagaagctttgggcagatcggattagcctcgccggtagcaacatttttaccatcggagtgcaggattttgtgccatttgtgcagtgtaaggctaagttccacgctccttctttccacgtagatgtccctgtgcagtttgatatctatctgaaggccgactgcccgcaccccattcgcttttcaaagctttgtgtaagtttcaataatcaagagtataaccaattctgtgtgatcgaggaagcatccaaggcaaacgaagtcctcgagaatctcacccagggcaaaatgtgtttggtaccaggcaaaactcgcaaactgttatttaagttcgtggctaaaactgaagatgtaggcaaaaaaatcgagataacttcagtggaccttgccttagggaacgaaaccgggagatgcgtggtgctaaactggcagggtgggggaggagacgctgcatccagtcaggaggctctgcaggctgccagaagcttcaaacgacgccctaagctccctgataatgaagtccactgggattccattataatccaggcctcaactatgattatttctagagtcccaaacatctccgtgcaccttttacacgagccacctgctttaaccaatgaaatgtactgcctcgtggtgactgtgcaaagccacgaaaagacgcagatcagggacgtcaaactgaccgccggactcaagccaggccaggatgccaatctgacacagaaaacacacgtgacccttcatggaaccgagctttgcgacgaatcctaccccgctcttcttacagatataccagtcggtgatttacacccaggcgaacagctggaaaaaatgctatacgtccggtgtggcacggttgggtccagaatgttcctggtctacgtctcttacctgataaatacgacagtggaggagaaagagatcgtgtgcaaatgccacaaagatgagaccgtgaccatcgaaaccgtgtttccattcgacgtcgcagtgaagtttgtgagcactaagttcgagcacttagagagagtgtatgcggatattccattcctccttatgacagacctgctgagcgcgtccccttgggctcttactatagtttctagcgaactgcagctggccccaagtatgacaacggtggatcagctggaatctcaggtggataatgtgattctacagaccggagagtctgcctctgagtgtttctgcctgcaatgccctagcctcggaaatattgaagggggagtagcgaccgggcactatatcatcagctggaagcggacttcagccatggagaacataccaatcattacaacggtgatcactttgccacacgtgattgtggagaatatccctctccacgtgaatgcagatctgcccagtttcggccgagtgcgggagagtctaccagttaagtaccatctgcagaacaagactgatctggttcaggatgtggagatttccgttgagcccagtgacgccttcatgtttagcggactgaaacaaatccgactgcccgcacaggcattctatacctaccagtacttttgtcaggcgaccggctccacacacggatag

SEQ ID NO: 244287 - DNA, 3057 bp, synthetic construct
  misc_feature 1..3057: note = Description of Artificial Sequence: Synthetic coding sequence
  source 1..3057: mol_type = other DNA
atgagcccgactcaatgggattttcccgtggaactctgctgccgcccaatggcatttgtgaccctgaccggactcgacgtcgtgtataacgccgtgcaccgggcagtttgggacgccttttgcgctaaccgacgcgcagatagggtccccatttccttcaaggttctgcctggggaccacgaatatccgaaatgtcggcctaaacggacctcatacgagtggtacatcccgaaggggattcttaagactggttggatgaacaagcacctaaatcttgtgcctgccttggttgtggtgttttatgaactggactgggatgagccccagtggaaggagaaacagtctgaatgtgctacaagagtcgaaatcgtgagacagagcctgcagggcaggaacactaaggtggccgtggtgctaatccagaaaaagactcccctcccccctggagaagatgtgatcgccagcgaacgagccgctgccctatgtaacgcatgcgagctgagcgggaagtcattgttcgtgctaccacatactgatcatctcgtgggatacatcattaggctggagaacgccttctatgagcacgctcaaacctactattataccgagattaggcgcgttaagtctcataaagagttcctcaacaaaaccactcaccagttgctattcgtcagacaccaattcaaaatcgctttcttttctgaattaaagcaggatacacaaaatgcgcttaaaaattataggacggcctataatctggtgcacgagctcagagcgcacgagaccaacattctggagatcaagaccatggccggatttatcaattacaaaatctgtagactgtgttttcaacacaatacccctttagatgccattgcccagttcaggaagcacattgatctgtgtaaaaaaaagatcggcagcgccgaactgtcctttgagcatgatgcgtggatgtccaagcagtttcaggccttcggggacctgtttgatgaggccattaaactgggactgacagcgattcagacgcaaaaccctggcttttactatcagcaggcagcgtattacgcccaggagaggaaacagcttgccaagaccctgtgcaatcatgaggctagtgttatgtatcccaatcccgatcccctggagactcagaccggcgtgctggacttttacggccagaggtcttggcgccaggggattctcagcttcgacctgagcgacccagagaaggagaaagtgggtatactggccatccaactgaaggagcggaatgttgttcattctgagataattatcaccctgctatccaacgccgtggcccaattcaagaaatacaaatgtcctagaatgaagtcgcatcttatggtccagatgggagaggaatactattatgctaaagactacacgaaggctctgaagttgctcgactacgttatgtgcgactatcggtccgagggctggtggacgctacttacaagcgtcctgactactgcactgaaatgctcttaccttatggctcaactcaaggattacatcacatattctctggagttattaggccgtgcctcaacactgaaggacgaccagaaatccagaattgaaaaaaaccttataaatgtgctgatgaacgagtcccccgatccggaaccagattgcgacatcctggctgtgaaaactgcacagaaactgtgggcagatagaattagtttagcgggttccaatatcttcaccattggggtccaggattttgttccgttcgttcagtgtaaggcgaaatttcacgcgccatccttccacgtggatgtgccagtgcagttcgacatttacctgaaagctgattgcccgcatcctattagattcagcaagctgtgcgtgtcctttaacaaccaggagtacaatcagttttgcgttattgaagaggctagcaaggcgaacgaggtcctggaaaacctgacacagggcaagatgtgcttagtccccggtaagacgaggaaacttctgttcaaatttgttgcaaaaaccgaggatgtgggcaaaaagatagaaatcacctctgtagatctcgccctgggcaatgaaacggggagatgcgtggtgcttaattggcaaggcggaggcggagatgccgcaagtagccaggaggccctgcaggcagcgagatctttcaagaggcgtcctaaattacccgataacgaggtccattgggactctataatcattcaggcctctacaatgattatcagccgcgtgcccaacatcagtgtacacctgctgcatgagcctcccgcactgaccaacgagatgtactgcctggtggttaccgtgcagagtcacgagaagactcagattcgtgacgtgaaacttacggccggactcaagcccggacaggatgcaaatctcacccagaaaacacacgtaacgctccatgggactgagttatgcgatgagagttaccccgcactgctgacagacatcccggtaggcgacctgcatcctggcgaacagcttgaaaagatgctgtatgttcgctgcggaacagtcgggtcaagaatgtttctggtttatgtcagctacctcataaacactaccgtcgaggaaaaggagattgtgtgtaagtgtcacaaagatgaaacggtaaccatcgagaccgtgttcccctttgatgtggccgtcaagttcgtgagtaccaaatttgaacacctcgagcgagtgtatgcagacatacctttcctgctgatgaccgacctgctgtccgccagcccctgggctttgaccatcgtaagcagcgaactgcagctcgcccctagcatgacgaccgttgaccagctggaatctcaggtggataacgtcatcctgcagaccggcgagagtgcaagtgctctctattatctgcttgaaaaagatctctcaaacggggagtatccccatcatcataattgccaccactccgctgcaagggattgcggagagtacccgagtccatgcgaatgccgttcagcggtcatctgggcatgccagagagtagtcacgtgccaggtttctcctacagaatag

SEQ ID NO: 244288 - DNA, 2091 bp, synthetic construct
  misc_feature 1..2091: note = Description of Artificial Sequence: Synthetic coding sequence
  source 1..2091: mol_type = other DNA
atggaagacgccggaggtggcgaggaacaggggctgctattccaggaagagacaattgacttgggaggtgacgagtttggctctgaggagaacgaaacagcgtccgaagggagttccccgcttgccgataaactgaatgagcatatgatggaaagcgtattgatcagcgacagtcctaacagcgaaggcgacgcgggagacttggggcgagttagggacgaagccgagcccggtggggaaggggatcctggcccagagccggcagggacccctagtccctctggtgaggccgacggtgactgcgccccagaagacgcagctccaagctccgggggagccccacgccaggacgctgccagagaggttcccggttcagaggcagccagaccagagcaagaaccccctgtggctgagccggtccctgtgtgcacaatcttctctcaaagggccccacctgcctccggcgatggattcgagccccagatggttaagtctcccagtttcggaggcgctagcgaggctagcgccaggacaccccctcaggtagttcaaccttctccatcccttagcactttttttggagacaccgcggcatcccactctctcgcatctgatttctttgatagctttactacatccgcttttatttcagtttccaatcccggagctggatcgcccgctccggcatctcccccacccctggccgttcctggcacagagggccgacctgagcccgttgccatgcggggacctcaagctgccgcaccacctgcctcacccgagccatttgcacacattcaggcggtgtttgccggatcggatgatccattcgccaccgctctgtctatgtcagaaatggatcgacgtaatgacgcatggctgcctggagaggcaacacgaggcgttttgcgggctgtggctactcagcagaggggagccgtgtttgtggataaggagaacctgacaatgccaggcctgcgctttgacaacatccagggcgatgcagtgaaagacctgatgttgcgctttctcggagagaaagctgcagcaaagaggcaggtgttgaacgctgattcagtggaacaaagctttgtcggacttaagcagctgatcagttgccgtaattggcgagctgcagtggacttgtgcggccgtctcctcacggctcatggccaaggctacgggaagagtgggctcctgactagccacaccacagattccctgcagctgtggttcgtgaggcttgcactgctagtcaagctgggactgtttcagaatgcagagatggagttcgagccctttggaaacctagaccagccagacctgtactacgaatactacccgcatgtctatccgggaaggcgagggtccatggtccctttctccatgcgcatcctacacgccgagcttcaacagtatttgggcaatccccaggagtcgctcgaccgacttcacaaagttaagacagtttgtagcaagattctcgcaaatcttgaacagggtctggcagaagatgggggaatgtcctccgtgacacaggaaggtcgccaaggttgttcatacctggtggcttcaatcagactttggagaagtagattggggagagtcatgtactctatggcaaattgccttctgttgatgaaggactacgtgctcgcagtggaagcttatcacagtgtaataaaatactaccccgaacaggaacctcaactgctgtcgggcatagggcgaatcagtctacagattggcgatatcaaaaccgccgagaagtacttccaggacgtggagaaggtgacgcagaaattggacggactacagggtaaaattatggtgctaatgaactccgccttccttcatcttggtcagaataatttcgcggaagcccatcggttcttcaccgaaattctgcggatggatccccgtaacgctgtgcaaatgctaagtgcttcacaccctactgggaaagaaccctcgcccaaggatgccgaggaacaccccgaaggacatcgagattctgcagagcccggtccggctaggcctatggttccgcagcgggctcctccgggacctgccctgtgcgcacagccttag

SEQ ID NO: 244289 - DNA, 2208 bp, synthetic construct
  misc_feature 1..2208: note = Description of Artificial Sequence: Synthetic coding sequence
  source 1..2208: mol_type = other DNA
atggaggatgctggcggtggtgaagagacccctgcaccggaggcaccacatccgccacagctagcccctcctgaagagcagggcctcttgtttcaggaagagactattgatctgggaggagacgaattcggcagcgaggagaatgagacggccagcgaaggaagctctcccctggcggacaagcttaatgagcatatgatggaaagtgtactcatctctgactcccctaattctgagggggacgcaggggacctagggagagtccgcgacgaagcagaacccggaggagagggagatcccggaccagaacccgcagggacccctagccccagtggtgaggccgacggtgactgtgctcctgaggacgcggctccatctagcggaggcgctccaagacaggacgccgctagggaggtgcctgggtccgaggcggcaagacctgagcaggagcccccagttgcagagccagtcccggtctgcaccattttttctcagagggcccctccggctagcggggatggcttcgaaccccagatggtgaaaagccccagctttggcggagcaagcgaggcatcagctcggacgccccctcaagtggtgcagccgtccccatcattgtccactttcttcggggatactgcagcatctcactctcttgcatccgattttttcgattcctttaccacgtcagcctttatctctgtatcaaaccccggtgctggctctcctgctccagcctcaccgcctcctttagccgtcccgggaacagaggggaggccagagcccgtggcaatgcggggaccccaggcggctgctcctcctgcaagtccagaaccattcgctcacatccaggccgtgttcgcgggtagcgatgacccgtttgccaccgccctgtctatgtctgagatggacagacgaaatgatgcttggctccctggagaagccacccggggtgtgctacgcgcagtggcaacgcagcaaagaggcgcagtctttgtggacaaagaaaatcttacaatgcctggtctgcgctttgacaatattcaaggagatgccgtgaaagacctcatgctgagattccttggtgaaaaagctgcggctaaaagacaggtgctgaatgccgacagcgtggagcagagttttgtgggactgaaacaattgatctcatgccgcaactggagggccgctgtggatttgtgtggccgtctgctcaccgcccatggccagggctacggcaaatctggcctacttacttcgcacacaacagatagcctgcaattgtggtttgtgaggctcgccctgctggtcaagctgggactttttcaaaacgcggagatggaattcgagcccttcgggaacctcgaccaacccgatctctattacgaatactacccccacgtctatccgggacgaagagggagcatggtgccgttttctatgcgaatcctgcatgccgagctgcagcagtacctcggaaatccacaagaatctctggaccgcttacataaagtcaagacagtctgttcgaagatactcgccaacctggaacaaggattggcagaggatgggggtatgtcctccgtcacccaggaaggaagacaggccagtatccggctgtggcgatctcgtctgggccgagttatgtattcgatggctaattgtttacttctaatgaaggactatgttctggccgtcgaggcctatcatagtgtaatcaaatattaccccgagcaggagcctcagttgctctccggtattggacgcatctccctgcagattggcgacatcaagaccgccgagaagtatttccaggatgtggagaaagttacacaaaagctggatgggcttcagggtaagatcatggtgctcatgaattctgctttcctgcacttgggacagaacaacttcgcggaggcgcaccggttcttcaccgaaatattgcggatggatccgcgaaatgccgtcgccaataacaacgctgccgtttgcctcctgtatctgggaaaactcaaggattctttacgccagcttgaagccatggtccagcaggaccccaggcattacttacacgaatctgttcttttcaacctgaccacaatgtacgagctcgaaagctcacgaagcatgcagaagaagcaggcccttctggaagccgtcgctggcaaagagggtgacagctttaatacacagtgtctgaagctggcatag

SEQ ID NO: 244290 - DNA, 2208 bp, synthetic construct
  misc_feature 1..2208: note = Description of Artificial Sequence: Synthetic coding sequence
  source 1..2208: mol_type = other DNA
atggaggatgctggtggaggagaggaaacccctgcccctgaggccccacatccccctcaactagccccaccagaggaacaaggactgcttttccaggaagaaaccatagatttgggcggtgacgagtttgggagcgaagagaatgaaaccgcttctgagggtagctcacctcttgctgacaaattgaatgagcacatgatggagagcgtgcttatcagcgactcaccaaacagcgagggagatgccggagatctaggacgtgtaagagatgaggccgaacccggtggagagggcgaccctggtcccgagcctgccggaacccctagtccctccggggaagccgatggcgactgcgcgccagaagacgcagccccttcatctggcggtgcgccaaggcaggacgccgcacgggaggtaccagggtcagaggcggcaagacctgagcaggaaccacctgtcgccgaacctgtgcccgtgtgcacaatattctcccagcgggcacctccggcttcaggggatggctttgaaccccagatggtgaagtctccctctttcggcggagcgtctgaagcaagcgcaagaacacctccccaggtggtccaaccctcaccttccctgtctactttttttggggataccgctgctagccactcacttgcatccgactttttcgattcgttcacaacgtccgcgttcatctctgtgagtaatccgggtgcaggcagccctgccccagcaagcccacctcccctggctgtacccggaactgaaggaaggcccgagcctgtcgccatgcgcggtcctcaggctgcagcaccaccggcatccccagaaccctttgcacacattcaggctgtattcgcgggatccgatgacccctttgcaacagcattgtctatgtcagagatggaccgcaggaacgatgcctggttgccaggcgaggccacccgcggtgtcctcagagccgtagcaacacagcagaggggagctgtgttcgtcgataaagagaatctgactatgccagggctgcgctttgataacattcagggcgacgccgtgaaggacctgatgctgagattcttaggtgaaaaggccgctgccaagcggcaagtgttaaatgctgatagcgtcgagcagtcctttgtcggcctcaaacaactaatttcatgtagaaactggagagctgcggtggacctctgcggcaggcttctgacagcacacggccagggctatgggaagagtggacttttaacctctcacacaaccgacagcctgcagctgtggtttgtgagacttgcccttctggttaagctgggacttttccagaatgctgagatggagtttgagccattcgggaacttggaccagccagacttatactacgagtactaccctcatgtgtaccctggtagacgcggatcaatggtgccattctccatgcggatccttcatgctgagctgcaacaatacctgggaaacccgcaggaaagcctcgatcggctgcacaaggtcaaaactgtctgtagtaaaatcctggctaacttagagcaagggctcgcagaggatggaggcatgtcctccgtgacccaggaagggagacaggcatctattcggctgtggcggagccgcttgggacgcgtgatgtacagcatggcgaattgcctgttacttatgaaggattatgtcttggctgtggaagcataccattcagtgataaaatactatccagagcaggagccacagctgctcagtggcattggccgtatatctctgcagatcggcgacatcaaaaccgccgagaagtattttcaagacgtggaaaaggtcacccaaaaactggacggtctgcagggcaagatcatggtcttgatgaacagtgcctttttacatctggggcagaataacttcgctgaagctcatcgcttttttacagaaatcctacggatggatcccagaaatgccgtggcaaacaataatgcggcagtctgtctactgtatctgggaaagctgaaggactcactccggcaactagaggccatggtccagcaggacccacgccattatcttcatgagagtgtattgtttaatcttactactatgtatgagctggagtcttccaggagtatgcagaaaaagcaggcccttctagaggcagtcgccggtaaggagggagatagttttaacactcagtgtctgaaattagcctag

SEQ ID NO: 244291 - DNA, 423 bp, synthetic construct
  misc_feature 1..423: note = Description of Artificial Sequence: Synthetic coding sequence
  source 1..423: mol_type = other DNA
atgtcaggcagtttctacttcgtgatcgtgggtcatcacgataatcccgttttcgagatggaattccttcctgccggaaaggccgaaagcaaagacgatcaccgacaccttaaccaatttatcgcccacgctgccttagatctggtggatgagaacatgtggctgagtaacaatatgtatttaaaaacggtcgataagttcaacgaatggttcgtgtctgctttcgtaaccgctggacacatgcggttcattatgctccacgatatcaggcaagaagacggcattaaaaacttcttcacggatgtctatgacttgtacataaaattctcaatgaacccattttatgagccgaacagcccgattaggagctctgcattcgacaggaaagtgcagtttctaggaaagaagcacctcttaagctag

SEQ ID NO: 244292 - DNA, 423 bp, synthetic construct
  misc_feature 1..423: note = Description of Artificial Sequence: Synthetic coding sequence
  source 1..423: mol_type = other DNA
atgagtggaagcttttactttgtaatcgtcggccatcacgataatccagtcttcgagatggagttcctgccggcaggtaaggccgagtctaaggacgaccacaggcacctcaatcagtttatagctcacgccgcactcgaccttgtagacgaaaacatgtggctaagtaataacatgtaccttaagacagtggacaagttcaatgagtggtttgttagtgcattcgtgacagctggtcatatgcgcttcatcatgttacacgacatccgccaggaggacggcatcaagaactttttcacagacgtatatgatctttacatcaagtttagtatgaaccccttctacgaacctaatagccctatacgatccagcgccttcgacaggaaagtgcaatttctaggaaaaaaacacctcttgagttag

SEQ ID NO: 244293 - DNA, 423 bp, synthetic construct
  misc_feature 1..423: note = Description of Artificial Sequence: Synthetic coding sequence
  source 1..423: mol_type = other DNA
atgagcggctccttttacttcgtcatagtcgggcaccacgataacccagtctttgagatggagttcctccccgctggaaaggctgaaagcaaggacgaccaccgccaccttaaccagtttatcgctcacgccgcattggatctggtggacgaaaatatgtggctaagtaacaatatgtacctgaaaacagttgataaattcaatgaatggttcgtgtcagcgttcgtcaccgctggacacatgaggtttatcatgctccacgacattcgccaggaagatggcatcaagaacttttttaccgacgtttacgatctgtatatcaagttctcgatgaaccccttctatgagcctaattcccccatcagaagcagcgctttcgatagaaaggtgcaattcctgggcaaaaaacacctcctttcctag

SEQ ID NO: 244294 - DNA, 423 bp, synthetic construct
  misc_feature 1..423: note = Description of Artificial Sequence: Synthetic coding sequence
  source 1..423: mol_type = other DNA
atgtccgggtccttttacttcgttattgttggtcatcatgacaaccctgtgttcgagatggagtttctgcccgcaggcaaggctgagtcaaaggacgaccacagacacctgaaccaattcattgcgcatgccgcactcgacttagtggacgagaacatgtggttgtccaacaacatgtatctaaaaactgttgataagtttaacgaatggtttgtgtccgccttcgtcacagctggacatatgcggtttattatgctgcacgatatccgccaggaagacgggatcaagaatttctttactgacgtgtacgacctgtacattaaattctccatgaaccctttttacgaacccaacagccccattcggagctccgcgttcgatagaaaagtgcagttcttagggaagaagcacctgctgtcctag

SEQ ID NO: 244295 - DNA, 444 bp, synthetic construct
  misc_feature 1..444: note = Description of Artificial Sequence: Synthetic coding sequence
  source 1..444: mol_type = other DNA
atgtctggcagcttttacttcgtgatcgttgggcatcacgataacccggtgtttgagatggagttcctgcctgctggaaaggcagaatcaaaggacgatcaccggcatctgaatcagttcatcgcccacgccgctcttgatctggtggacgaaaatatgtggctgtcaaataacatgtacctgaagactgtcgataagttcaatgaatggtttgtgtctgcatttgtgacggcgggacacattcttacatttttagtgaagatgagatttataatgctccacgatatcaggcaggaggacgggatcaaaaatttctttacagatgtgtatgatctttacatcaagtttagcatgaaccctttttatgagccgaacagcccaatacggtcaagcgctttcgatcgcaaagtgcagttcctgggaaaaaaacatttgttgtcctag

SEQ ID NO: 244296 - DNA, 525 bp, synthetic construct
  misc_feature 1..525: note = Description of Artificial Sequence: Synthetic coding sequence
  source 1..525: mol_type = other DNA
atgagctcttggaaacaggaccgctccggcctgcgcagtacggagctgaatgtgcttgaatatcagccattgtgtgccgttcgaagtcatattcttaaaacaatgtctggatctttctatttcgtgatcgtcgggcatcacgataatccagttttcgagatggagttcctgcccgctggcaaggccgagtccaaagacgaccaccggcatctgaaccagttcatcgctcacgctgcactggacttagtggacgagaacatgtggctgagcaacaacatgtacctcaaaacagttgataaattcaatgagtggttcgtctccgcatttgtgacagccggacacatgcgattcattatgctgcatgacatcagacaggaagacggaatcaaaaatttctttactgatgtatacgacctttacatcaagttttcaatgaatccgttttatgagcccaactcgccgattaggtcaagtgccttcgaccggaaggtgcagtttctgggaaagaaacatctgctgtcttag

SEQ ID NO: 244297 - DNA, 225 bp, synthetic construct
  misc_feature 1..225: note = Description of Artificial Sequence: Synthetic coding sequence
  source 1..225: mol_type = other DNA
atgagcggatccttctactttgtaattgtgggccaccacgataacccggtgtttgaaatggaatttctccctgcaggcaaggccgaatccaaggatgatcataggcatttaaaccagtttatcgcacatgctgctctggacctggtggatgagaatatgtggctttcaaacaatatgtacctgaagactgttgataagttcaacgagtggttcgtttcagcctag

SEQ ID NO: 244298 - DNA, 423 bp, synthetic construct
  misc_feature 1..423: note = Description of Artificial Sequence: Synthetic coding sequence
  source 1..423: mol_type = other DNA
atggccgtttgtattgctgtgattgccaaggagaattacccgctgtacatcagatccactcctaccgaaaacgaattaaaattccactacatggtccatacgagtctggatgttgtggacgagaagattagcgcaatggggaaagcactcgtggatcagagggaattgtatctggggctcctgtatccaaccgaagattataaggtgtacggatacgtcaccaactccaaggtaaagttcgttatggttgttgatagttcaaatacagcactcagagacaatgagatccggtcgatgttcaggaagctacataactcatatacagacgttatgtgtaatcccttttataacccaggcgaccgaatccagagctcacgagcctttgacaatatggttacttccatgatgatccaggtatgctag

SEQ ID NO: 244299 - DNA, 357 bp, synthetic construct
  misc_feature 1..357: note = Description of Artificial Sequence: Synthetic coding sequence
  source 1..357: mol_type = other DNA
atgtctagacaagccaataggggtactgagtctaaaaaaatgagcagcgagctgtttaccctgacttatggggctctggtcacgcagttatgcaaagactatgagaatgacgaagatgtaaataaacagctggacaaaatgggtttcaatatcggcgtgaggctcatagaggatttcctggccagaagtaatgtgggcaggtgtcacgactttcgcgagaccgccgacgtcatcgcaaaagagcggaaaatgtttctgggaaaacagaataaaaccaagagacaggcaaagctttacgatgccgtgaaggaaaggggggcagccagctgcaccgacgcctcgcctctccttagctag

SEQ ID NO: 244300 - DNA, 405 bp, synthetic construct
  misc_feature 1..405: note = Description of Artificial Sequence: Synthetic coding sequence
  source 1..405: mol_type = other DNA
atggggtttaacataggagttagactaatcgaagatttccttgctcgcagtaacgtgggaaggtgtcacgactttagggaaaccgccgatgtgatagcaaaggtggcatttaaaatgtacttgggaatcaccccctcaataacaaattggagccccgctggtgatgagttcagcctgatcctcgagaacaatcccctggtcgatttcgtggaactgccggacaaccattcgagcctgatatacagtaatcttctttgtggcgtgctccgcggtgctctagaaatggtgcagatggcagtggaggccaaatttgtccaggatacactgaagggtgacggagtgactgagatccgcatgaggtttattcggcgaattgaagataaccttcctgcaggggaagaatag

SEQ ID NO: 244301 - DNA, 405 bp, synthetic construct
  misc_feature 1..405: note = Description of Artificial Sequence: Synthetic coding sequence
  source 1..405: mol_type = other DNA
atgggtttcaacataggggtgagactcatcgaagacttcctagctcggagcaatgtggggaggtgccacgattttcgggagacagctgacgtcatcgcaaaagtggcttttaagatgtatcttggtatcactccctcgatcacaaactggtcacctgcaggcgacgagtttagtctgatactggagaataaccctctggtagattttgtagaacttcctgacaatcactctagcctgatctattcgaatctgctgtgcggcgtgctgcggggtgccctggagatggtgcaaatggccgtggaggctaaatttgtccaggacacactgaagggggatggcgttactgaaataaggatgagatttatcaggagaatcgaagacaacctgcccgctggagaagagtag

SEQ ID NO: 244302 - DNA, 543 bp, synthetic construct
  misc_feature 1..543: note = Description of Artificial Sequence: Synthetic coding sequence
  source 1..543: mol_type = other DNA
atgagtaggcaggctaacagaggaactgagagcaagaaaatgtcctcggagctctttactctgacttatggtgcccttgtcacccaactctgcaaggactacgaaaacgatgaggacgtgaataaacagttagataaaatgggattcaatattggggtgcggctcattgaggactttctcgcaaggagcaacgttgggagatgccatgactttcgggaaacagctgatgtaatcgccaaggtggctttcaaaatgtatctgggcattacacctagcattactaactggtctccggctggtgacgaatttagcctcatattggagaataatccacttgtggacttcgtagagctacctgataatcatagcagccttatttactctaatttgctttgtggggtcttgaggggggctcttgagatggtccagatggcagtggaggctaaattcgtacaggataccctgaaaggcgatggcgtgactgaaatcagaatgagatttatcaggcgcattgaggacaacctccccgcaggggaggaatag

SEQ ID NO: 244303 - DNA, 498 bp, synthetic construct
  misc_feature 1..498: note = Description of Artificial Sequence: Synthetic coding sequence
  source 1..498: mol_type = other DNA
atggctattttctcagtctacgtggtgaataaagcgggaggtctgatttatcagctggacagctacgctccacgggcagaagccgaaaaaactttttcttatccactggacctgcttttgaagttgcacgatgagcgcgttctggtagctttcggtcagagagacgggattcgggttggacatgcggtcctcgcaatcaacgggatggacgtgaacggcagatatacagccgacggaaaggagatgttagagacagatacattcaagttgcactgttatcagacactgaccggcatcaagttcgtcgtgctcgccgaccctcgccaggctggcatagactcgctcctaaggaagatctacgaaatttactcagacttcgccctgaagaatcccttttatagcttggagatgccaattagatgcgagttatttgatcagaacctgaagctggcgctagaagtcgccgaaaaggccggtacctttggacctggaagttag

SEQ ID NO: 244304 - DNA, 660 bp, synthetic construct
  misc_feature 1..660: note = Description of Artificial Sequence: Synthetic coding sequence
  source 1..660: mol_type = other DNA
atggccatatttagcgtgtacgtggtgaataaagccggtggcctcatttatcagctggatagttacgcccctcgggcagaggccgagaaaaccttctcttatcctctcgacctcctgctgaagctgcacgacgaaagagtattggttgccttcgggcaacgcgatgggattcgagtggggcacgcggtgcttgccatcaatgggatggacgtcaatggcagatacacagcagatgggaaagaagtgctggagtacttaggtaaccctgccaattacccggtgagcattaggttcgggaggcctcggctcacatccaatgagaagctgatgctcgcttctatgttccacagtctcttcgcaatcggcagtcagctcagccctgagcagggctcgagcggcatcgaaatgctcgagaccgacacttttaaactgcactgttaccagactctcacgggaatcaaatttgtggtcctcgccgatccacgccaggctgggatagatagtctcctcagaaagatttacgagatctactctgactttgccctgaaaaaccctttctattctctggagatgcctatacgctgcgagctcttcgatcagaacctgaagctggcactggaggttgcagagaaggccggtacatttgggccagggagttag

SEQ ID NO: 244305 - DNA, 4308 bp, synthetic construct
  misc_feature 1..4308: note = Description of Artificial Sequence: Synthetic coding sequence
  source 1..4308: mol_type = other DNA
atggcccagtgcgttcagtccgtccaagagttgatacccgattcatttgttccctgcgtggccgctctgtgctccgacgaggctgaacggctcactcgcttaaaccatctcagtttcgccgagctgctgaaacctttttcccgtctcacaagcgaggtacatatgagggatcccaataatcagctgcacgtgattaaaaatctgaagatcgccgtttcaaatatcgttacgcagccaccccagcccggtgccataagaaaactgctgaacgatgtagtctccggaagccagcctgctgagggactagtagcgaatgtaatcaccgcgggagactatgacctcaacatctccgcaacaacgccgtggtttgagtcttatcgagagaccttccttcagagcatgcccgcattggaccatgagtttcttaatcactatctggcatgtatgctggtagcaagcagcagcgaagccgaacccgttgagcagttctctaagcttagtcaagagcagcacagaatccagcacaattctgattattcttaccctaaatggttcatacccaataccttgaaatattatgtgctccttcatgacgtcagcgctggtgatgagcagcgggcagaaagcatttacgaagaaatgaagcaaaagtacggcacgcagggctgttatctgttgaagattaactctcgaacgagtaacagagcgtcagatgagcaaatcccagatccatggagtcagtatctgcaaaagaactctattcagaaccaggagtcctacgaggatggaccatgtaccatcacaagcaataagaattctgacaataacctactgagcctggatgggctcgataatgaggtcaaggatggattacccaataacttcagggctcatcctttgcagctggaacaaagttcagatccatctaatagtattgatggcccagatcacctgcgttcagccagctccctacacgagacaaagaagggcaacacgggaatcatccacggcgcttgcctcaccttgacggaccacgatagaatccgccagttcatccaggagttcactttcagaggccttctgccccatattgagaaaactatcagacagctgaacgaccagcttatttccagaaaagggctgtctagaagcctgttctcagcaacaaaaaagtggttttctggtagcaaagtgcctgagaaaagcatcaacgatctgaaaaacacatccggacttctctacccccctgaggctcctgaactacagatacgtaagatggccgacctgtgtttcctagtacagcactacgatctcgcttattcctgctatcacacagcaaagaaggacttcctcaacgatcaagctatgctgtatgccgctggcgctttggaaatggctgctgtttccgcttttttgcagcccggagctcctcgtccctatcccgcacactacatggataccgcgatccaaacatacagggatatctgcaagaacatggtgttggctgagcgttgtgtcctgttgtctgcggagttgcttaagtctcaatccaaatacagcgaagcagcggcactcctgattaggctgacatccgaggatagcgacctgaggtcagctttgttgcttgagcaggcggcacattgcttcataaacatgaaatcgcctatggtgaggaaatatgccttccacatgattttggcgggtcatagattttctaaggccggtcagaagaagcatgcactgcgttgctattgtcaagccatgcaagtatacaaaggcaagggctggtcgctggccgaagatcacattaattttacgattgggcgacagtcttacacccttcgacagctcgacaacgccgtcagtgcgtttcgacacattctgattaacgagtcgaaacagtcggccgcacagcagggcgcattcttgcgggaatatctgtacgtctataaaaacgtgtcccagctctctccagacggacccctgccgcagcttcccctgccatatatcaattcaagcgctactcgggtgtttttcggtcacgaccgacgacctgcggacggtgaaaaacaggcagccacacacgtctcacttgatcaggaatacgatagcgagagcagccagcaatggagggagctggaagaacaggtcgtgagtgtggttaacaagggagttatcccatccaacttccaccccacccagtattgcctgaattcttattccgacaatagcagattccctctggccgtggtggaggagcccatcacggtagaagtcgcatttcggaatccactcaaagtgctcctcctccttaccgatctatcactgctttggaagtttcaccctaaggatttcagcgggaaggacaacgaggaggtgaagcagcttgtcacttccgaaccagaaatgataggagcagaagtgatttctgagtttctaatcaacggcgaagagtccaaagtggccagactgaaacttttcccccaccatattggcgaactgcacattttaggggtggtctacaatctcgggactattcagggctctatgacagttgacggcattggagctttaccgggttgccatactggcaagtactcattgagtatgtcagttagggggaagcaggacctggaaatacagggtcctcgactcaacaatactaaggaagagaagacctctgtgaagtatgggccagaccggcgactagaccctatcatcacggaggagatgcctttgctcgaagtgttcttcattcactttcccacagggctgttgtgcggggaaatccggaaagcatacgtcgagtttgtgaatgtctctaaatgtccactgacagggctgaaggtagtctctaagagacctgagttcttcacattcggtgggaacaccgctgtgctaacgccacttagcccgtcggccagcgagaactgttcagcctacaaaacggtggtaaccgacgcgacgagtgtgtgtaccgccttgatcagctctgcctcctccgtggattttggtatcggtaccggaagtcaacccgaggtgattcctgtgccactcccagatactgtgttactgcccggagcctccgtgcagctgccaatgtggcttcgcggacctgatgaagaaggtgtacatgaaataaacttcctgttttactatgagtctgtaaaaaaacaacctaagatccgccatcgcatcctcaggcacactgctataatatgtacatcccgcagccttaatgtacgggcaacggtgtgcagaagcaattcccttgagaacgaagagggcaggggcggtaacatgttagtgtttgttgacgtagaaaacacaaatacctctgaagccggagtaaaagaattccatattgtccaggttagcagttcttccaagcactggaaactgcagaagagtgtgaacttgagcgagaacaaggacacaaagctggcttctagagagaaaggaaagttctgttttaaagcgatccgctgtgaaaaagaagaggccgcaactcaatccagcgagaagtatactttcgccgatattattttcggaaatgaacagattatctcctctgcttcgccatgcgccgactttttctatcgaagtctgagcagcgaattgaagaaaccacaggcccacctgccggtgcacactgagaaacaatccactgaagatgctgtccggctcattcaaaagtgctctgaggtcgatttgaatatcgtgattctctggaaagcatacgtcgtggaggatagtaaacagctgatcttggagggacagcaccacgtcattcttaggacgattggcaaggaggcattcagctaccctcagaaacaggagccaccagagatggaattgttaaagttcttccgacctgagaatataaccgtatcaagccgccctagcgtggagcagctgtcctccctgattaagacctcactgcactatcccgagtctttcaatcatccttttcatcagaagtcgctgtgtctggttcctgtgacattgttgttgtcgaattgcagtaaagctgacgtggacgttatagtcgacttgcgacacaaaacaacttcacccgaagccctggaaattcacgggagctttacatggttaggccaaactcagtacaaactgcagttgaaatcacaggaaatccacagtcttcagctgaaggcatgttttgtacacacaggcgtgtacaatttaggtacaccaagggtcttcgcaaaactttctgatcaagtgaccgtgtttgagacgtctcagcagaatagcatgcctgccttgatcatcatctcaaatgtgtag

SEQ ID NO: 244306 - DNA, 3420 bp, synthetic construct
  misc_feature 1..3420: note = Description of Artificial Sequence: Synthetic coding sequence
  source 1..3420: mol_type = other DNA
atgagcgtgcctgattatatgcagtgtgccgaggaccaccagaccctcctggtggtcgtgcagccagtgggcatcgtctctgaggaaaatttctttagaatttataagagaatttgttcagtgtcgcagatctctgttagagattctcagcgggtgttgtatatccgataccggcaccattaccctcccgaaaacaacgagtggggcgactttcagacacatcggaaggtagttggacttatcaccattactgactgtttctctgcaaaggattggccccagacttttgagaaatttcatgttcagaaggagatttacgggtcaaccctgtatgacagccgactgtttgtcttcggcctccagggggagatcgttgagcagcccagaacagacgtggccttttacccgaactacgaagattgtcaaacggtggagaagcggatagaagattttattgaatctctgtttatcgtcctggaaagtaaacgtctggatcgcgctacagacaagtcaggcgacaaaattccccttctgtgtgttcctttcgagaagaaagactttgttggcttagacaccgacagcaggcactacaagaaaaggtgccagggcaggatgcggaaacatgtaggcgatctgtgcttacaggccggaatgctgcaggattccctggtccactatcatatgagtgtcgaattgctaaggagtgttaatgacttcctgtggctgggagctgcgctcgaaggattatgttccgcgagcgtaatctatcattatccgggaggaaccgggggaaaaagcggagctcggcgttttcagggatcgacactgcccgcagaggccgctaatcgacacagacccggtgccttgactacgaacggtatcaatccagatacgagcactgagattggcagggccaaaaattgcttgtcacctgaagacatcatcgacaagtacaaggaagcaatttcctattatagcaaatataaaaacgcgggagtcatagagctggaagcatgtataaaggccgtgcgagtactggccatccagaagaggagtatggaagcaagcgaattcctccagaacgctgtgtacatcaatctgagacagttgtcagaggaggagaagattcagcgttacagcatcctatcagagctatacgaactgattggctttcacagaaaaagtgcattcttcaagcgcgtagcagccatgcagtgcgtggctccgtccatcgccgagccaggatggagagcctgctacaagctcctccttgaaaccctgcccggatactctctgtccctggatcctaaggatttctccagaggtacacataggggctgggctgctgtccaaatgcggttgcttcacgagttggtgtatgcgtcaaggagaatgggaaatccagctctctcagtgcgtcacctgtcttttttattgcaaactatgcttgacttcctcagcgaccaagaaaagaaggacgtcgctcagagcttggaaaattataccagtaagtgtccaggaacaatggagccaatcgccctccccggaggactaacgctccccccagtgcctttcactaaattgcccattgtccgacatgtgaagcttttaaatttgcccgcttcccttaggccacataaaatgaaaagcctcctgggccagaatgtgagcacaaagagccccttcatctacagtccaatcattgcccataaccgtggtgaggagcgaaacaagaaaattgatttccagtgggtgcaaggggacgtttgtgaagtgcaactcatggtatacaatcctatgcccttcgagctgcgggtggaaaacatgggcctgctgacctctggggtggaatttgagtcactgccagctgctttgtcccttcccgcagagtccggcctttaccctgtgactctggtgggcgtgccccaaacaaccggaacaatcacggtgaacggataccatacaaccgtgtttggagtgttctccgactgcctgcttgacaatttgccaggcatcaagacgagcggcagcacagttgaagttatacctgctctgccgagacttcagataagcacgtcactgccaagatcggcccattcactccagccaagctctggcgacgagatcagcacaaacgtcagcgtacaactttataacggcgagagccagcagcttatcatcaaactcgaaaatatagggatggaacctttggagaagctcgaagtcacatccaaggtccttaccacaaaagaaaagctttatggtgactttttatcatggaagctcgaggagacgcttgcccagttccctctgcagccaggaaaggtggcaaccttcacaattaatattaaggttaaactggacttcagctgtcaggaaaatctccttcaggatttatccgatgatggaatatctgtgtctggatttccactttcttcaccctttagacaggtagtacgtcccagagtagagggcaaaccagtcaacccccctgagtcaaacaaggccggagattattcgcacgtaaaaacgttggaggccgtgctgaactttaagtatagtgggggtccgggacacactgagggatattataggaacctctctctgggcctccatgtcgaagtagaaccaagcgtcttctttacgcgcgtgagtacgctgcctgcgacttccacacggcagtgccacctattactggacgtctttaattcaaccgagcatgaattgacggtgtctacccgctcctctgaagcccttattctacacgcaggggaatgtcagaggatggctattcaagtggataaattcaatttcgagagctttcctgaatctcccggtgagaagggtcagttcgctaatcccaaacaactcgaagaagaaagaagagaggctcggggactggaaattcattctaagctaggtatatgctggcgtataccttcactgaaaagatcaggagaggcgagtgtggaaggactgctgaaccagctggtgctggaacatctgcagctggccccattgcagtgggacgtgctcgtcgacggccagccgtgcgaccgtgaggcagtagccgcatgtcaggtgggggacccggttagactggaggtcaggctgaccaaccggagcccgaggtctgtggggccttttgctttgaccgtggttcctttccaggaccaccagaacggcgtacacaactacgacttgcacgataccgtgtcctttgttggatcgtctacgttctatcttgatgccgtgcagcccagtggccaatctgcctgtctgggggctctactgttcttgtataccggtgatttcttcctgcacatccgatttcacgaagattctacttccaaggaattaccaccaagctggttctgtctcccgtccgtacacgtgtgtgctctcgaagcccaggcttag

SEQ ID NO: 244307 - DNA, 3741 bp, synthetic construct
  misc_feature 1..3741: note = Description of Artificial Sequence: Synthetic coding sequence
  source 1..3741: mol_type = other DNA
atggtgccagccggtgatcaggacagggcaccccacaggggcaagccagcccaagccggtgctaggaccagtcgtgcctcacgagcgctgagaagctggaggaggtcgcaggctgccagggccacggtcacacatcccagggggggacatgaccgaggcagccacggcggatacagggaaggccatcgcggatgcagacgcgaccctcagtgggccagtgctggaccgccacctttgtctttcacggaagaagtgaaattcgagcttcgcgcacttaaggattgggactttaaaatgtccgtaccggactacatgcagtgtgctgaggaccaccaaacgctgctggttgtggtgcagccagttgggattgtgtcagaagagaactttttccgaatttataagcgcatttgttccgtgtctcaaatatcagtccgcgatagtcagagagtcttgtacatccggtatcgccatcactaccctccggaaaataatgaatggggggattttcagacacaccgtaaagtggtcgggttgattaccattacggactgtttttcggccaaggattggcctcaaaccttcgaaaagttccatgttcaaaaggagatctatggatctaccctgtacgattccagacttttcgtatttgggcttcagggggagattgtggaacaaccacggaccgacgtcgccttttatccaaactacgaggactgccagactgtggagaagcggatcgaggacttcattgaaagtctgttcattgttctggaatccaaacgtcttgatcgggcaaccgataaaagcggggacaaaatccctctgttgtgcgtgcccttcgagaaaaaggatttcgtgggcttggataccgattcccggcactataaaaaacggtgccagggaaggatgcggaaacacgtgggtgatctgtgcctgcaggctggcatgctccaggactccttagtgcattaccacatgtcagtagagctcctgcgctcagtgaatgactttctctggttaggggctgccctggaggggttgtgctccgcctcggtcatttatcactacccaggaggaacaggtggaaaatccggagctcgcaggttccaagggtctactctgccggcagaagccgctaacagacaccggcctggcgctcaggaagttctcattgatccaggggcactcaccacaaatggtattaatcccgacacaagcacagagataggcagagctaaaaactgtttatctccggaggacataatcgacaagtacaaggaagccatcagctactactcgaagtataaaaacgcaggagtaattgagctcgaagcttgcatcaaggcagtgagggtcctagctatacagaaacgctccatggaagccagtgaattcttgcagaacgcagtgtacattaatctacgacagcttagcgaggaggaaaaaatacagcgctattcgattctgtcagaactatatgagctgatcggatttcaccgtaaatcagccttctttaaacgtgttgccgctatgcagtgcgtagcccctagcattgccgaaccagggtggagagcctgctacaagctcctactcgagaccctccctggttatagtctcagtctggaccctaaagatttctccagggggacccaccggggttgggcagctgtgcaaatgaggctgctccatgaactagtgtacgcctcccgtaggatgggcaatcctgctctgtctgtccgccacttgtcgttcctgttgcagactatgctggacttccttagcgatcaggagaagaaggatgtggcccagtcgctcgaaaattacacctcgaagtgccctggaacaatggagcctatagctctaccaggaggactgactcttcctcccgtgccgttcacaaagttaccaatagtcagacatgtaaaacttctgaatctgcccgctagtctgagacctcataagatgaaatccctgctgggccagaacgtttccaccaaaagccctttcatctattcacccatcatcgctcacaaccggggagaagagagaaataaaaagatcgactttcagtgggtgcagggagacgtgtgcgaggtgcaactcatggtctataacccaatgccttttgaacttagggtggaaaatatgggcctcttaacttcaggcgtggaattcgagagcctgcccgctgccttgtccctcccggcagagtcagggctgtatcccgtcacgttagttggtgttccccaaaccacaggcacaatcacagtgaatggctatcatactaccgtgtttggggttttttccgactgccttttggacaacctgcctggaataaaaactagcgggtctaccgtcgaggtcatccccgctttacctagactgcagatctcaacaagcctacctaggagcgcccattctctgcagccttcttctggtgatgaaatctcaacaaatgtgtccgtgcagctttacaacggagaatcacagcagctgataatcaagcttgaaaacatcggaatggagccattggagaagctggaggtgacctccaaagtgctgaccactaaagagaaactgtatggtgattttttgtcctggaagctggaggaaaccttggctcagttccccttacagccgggtaaagtggccaccttcacgattaatatcaaggtcaaacttgatttttcatgtcaggaaaaccttcttcaagacctgagcgacgacggcattagcgtttccggatttccattatcgtctccattcaggcaggtggtgcgcccaagggtcgaaggaaaacccgtcaatccccctgagtcaaataaggctggagattattctcacgtgaaaaccctagaggccgtccttaatttcaagtattcaggtggaccaggtcacaccgagggctattacagaaacctgtcacttggtctacatgtggaggtcgagccaagtgtgtttttcaccagggtgagcacacttccggcaactagcacccgccaatgccacctgcttctggacgtcttcaattcaacagaacacgagttgaccgtgtcaacgcgctccagcgaggcactgatattacacgcaggagaatgccagaggatggccattcaggtcgacaaattcaacttcgagagctttcctgagagccctggcgagaaggggcagtttgccaatcctaagcaactggaggaggaaagacgggaggccaggggcctggaaatccacagcaaactgggaatttgctggagaatccctagcctgaagcgttctggcgaggcctcagtggagggactgcttaatcagcttgtcctagaacatctgcagctcgccccattgcagtgggatgttctggtcgatggccagccttgtgaccgcgaggccgtcgcggcatgtcaggtcggcgacccagtgagactcgaggttcggctaactaacaggtcacctagatcagtgggaccgttcgccctgaccgttgtgcccttccaggatcaccagaatggcgtgcataattatgacctgcacgataccgtgagtttcgtgggatctagcacgttctacctggatgccgtacaacccagtggccaatctgcgtgcctgggcgctctcctgttcttgtatacaggggatttttttttgcatatccgcttccatgaagactctactagtaaggaactcccaccctcttggttctgcctgcctagtgttcacgtttgtgctttagaagcacaggcctag

SEQ ID NO: 244308 - DNA, 3447 bp, synthetic construct
  misc_feature 1..3447: note = Description of Artificial Sequence: Synthetic coding sequence
  source 1..3447: mol_type = other DNA
atgtcagtaccagattatatgcagtgcgccgaggatcaccagacactacttgtggtggtgcagcctgtaggaatagtgtctgaggagaacttttttcgtatctataagcgcatttgctcagtgagccaaatctctgtgagagactcacagcgcgttctgtatattaggtacagacatcattacccaccagaaaacaatgagtggggagatttccagacccatcgcaaagttgtcggcctcatcacgattactgattgcttctccgctaaagactggccacagacattcgaaaaatttcacgtgcagaaggaaatctatggttccacactctatgactcgcgtctgtttgtctttggactccaaggcgagattgtcgaacagccacgcactgacgttgccttttatccaaattacgaggattgccagaccgtggaaaagaggatagaggacttcattgagtccctctttatcgtactggaatccaagcgcctggacagagccaccgacaaatccggcgataaaataccactgctgtgcgtcccattcgaaaaaaaagacttcgtgggccttgatacggacagtcgacattacaaaaagcgttgtcaggggagaatgagaaagcacgtgggagacttgtgcctgcaggctggtatgttgcaggattccctcgtgcattatcacatgtcggtggagctgctgcgttcagtcaatgacttcttatggttaggagcagccctggagggtctctgcagcgcaagcgtaatctaccattacccaggcggaactggaggtaaaagcggcgcacggcgattccagggcagcacgctacccgctgaagccgctaaccgccacaggcccggagctcaggaagtccttattgaccctggtgcactgactaccaatggcatcaatcctgatacctccactgagatcggtcgggctaagaactgtctaagcccagaagacatcatagataagtacaaggaagccatttcatattattccaaatacaagaacgcaggcgtcattgagctagaagcttgtataaaagccgtccgagttttggccatccagaagaggtcgatggaggcttcggagtttttgcaaaatgccgtgtacataaatctgcgccaacttagtgaagaagagaagatacaacggtatagcattcttagcgaactttatgagttgataggatttcaccgcaagtcagccttctttaagcgggtcgctgcaatgcagtgtgtcgccccaagcatcgctgaacctggctggcgggcatgttacaaattgctcttagaaacactcccagggtattctctaagcctcgaccccaaggacttcagtagagggacacatagaggttgggctgccgtgcagatgaggctgctccacgagcttgtttacgcaagccggagaatggggaatccagcgttgtccgttcggcatttgagctttttactgcagactatgctcgattttttgagtgaccaggaaaaaaaggatgtggcacagtcgctggagaactatacctctaagtgtccgggaactatggagcccatcgcccttcctggcggactgactctccctccagtcccctttactaaactgcccatagttcggcatgtgaagcttctgaacctccctgccagtcttcgtccacataagatgaaatctctgttaggccagaacgtgtcaaccaagtccccattcatatatagtcccattattgcacacaatagaggggaggagcgcaacaaaaagatcgacttccaatgggtacagggggacgtgtgtgaggtgcagctgatggtgtataatcccatgcctttcgagctcagggtcgaaaatatgggtctacttacgtcaggcgtggaatttgagtctctgcccgcagccctctccttgccagcagagagtggactctaccccgtcacactagttggcgtcccgcagaccaccggcaccatcacagtgaacggataccacactactgtgttcggagtttttagcgattgcctgctcgataacttacctggcataaaaacttccggcagcaccgtcgaagtaatacccgctctgcctcggctgcaaatatcaacttcgttaccccgatcagcacactccctgcaaccttcctccggcgacgaaattagtaccaatgtctctgtgcaactttacaacggcgaaagccagcagctcatcattaaactagaaaatattgggatggaacccctcgagaaattggaggtaacctctaaggtcttgactacgaaggagaaactctatggtgattttttgtcctggaagctggaggagaccttggcacaattcccgctccagccagggaaagtggctaccttcactatcaatattaaggtgaagttggattttagctgtcaagaaaacctcctgcaggatcttagtgacgatggtatttctgtgagtggatttcccctctcttcaccgttcagacaagtcgtcaggccgcgtgtggagggcaagccagtcaaccctccggagagtaataaggctggggattatagccatgtaaaaactttagaagctgtgctgaattttaaatattccgggggtcccggacatacggagggctattatcgtaatctcagcttaggtctgcacgtagaggtggagccatcagtgttttttaccagagtgagcactttgccagccacatctactcgtcagtgccaccttttgctggacgtgttcaattccacggaacatgaactgactgtgtctacacggtccagcgaggccctaatacttcatgccggtgaatgccagagaatggccatccaagtcgacaagttcaattttgagagtttccctgaaagtcccggtgaaaagggtcagttcgccaacccaaagcagcttgaagaggagcggcgagaagcaagggggttagagatccactcaaaactcggaatctgttggcgcataccctcccttaaaagatctggagaagcatccgtggaagggcttctaaatcaactggtgctcgagcacctacagctggcccctctgcagtgggatgttctcgtggacggacagccctgcgatcgcgaagccgtcgccgcatgtcaggtgggcgaccccgtccggctggaggttcgtctcaccaatcggtccccgcgaagcgtaggtccatttgcgttgactgtggtcccttttcaggaccaccagaacggcgttcacaattacgacctgcacgacacagtcagtttcgttgggagttcaacgttttacttggatgcggtccagccctctggacagagcgcatgccttggggcattgctgtttctttataccggggatttcttcttgcatataaggtttcacgaggatagcacctcgaaggagctgccaccatcatggttctgccttcccagcgtccatgtgtgtgcgctggaggctcaagcctag

SEQ ID NO: 244309 - DNA, 2862 bp, synthetic construct
  misc_feature 1..2862: note = Description of Artificial Sequence: Synthetic coding sequence
  source 1..2862: mol_type = other DNA
atggcattggtgtttcagtttggacagcccgtgcgggctcaaccattgcccggtctctgtcacgggaagttaatccgcactaacgcttgcgacgtgtgtaacagcacggatttgcccgaagtggaaattatcagcctcctggaggagcaattgccacactacaaactgcgtgctgacactatttatgggtatgatcatgatgactggttacacactccgcttattagcccagacgcgaatattgatcttaccacggaacagattgaggaaacactgaaatatttcttgctctgtgctgaacgggtgggtcagatgaccaagacctacaacgacatcgatgcagtgacgcgcctgctcgaggagaaggagagggatctagagctggccgcaagaattgggcaatcgcttctcaagaaaaataaaactttgactgaaaggaacgagcttctcgaagagcaggtggagcacatcagggaggaagtgagtcagctccggcatgagcttagtatgaaagacgagctgctgcagttctacacgtctgccgcagaggaatcagagcccgaaagcgtgtgcagtaccccactgaagcgcaacgaaagcagcagtagtgtgcagaactactttcacctagattccctgcaaaaaaagcttaaggacttagaagaagaaaatgtcgtactgcgatccgaagccagccagcttaaaaccgagaccatcacatacgaggagaaggaacagcagctagtaaacgattgcgtgaaggaactacgggacgcaaatgttcagatcgcctctatctctgaagagcttgccaaaaaaacagaggacgccgcacggcaacaggaggagataacccatctgctatcacagattgtggacctacaaaagaaggccaaggcgtgtgctgttgaaaacgaggaattggtgcagcatcttggcgcagctaaggacgcccaacggcagctgacagccgagcttagggagctagaggataagtatgctgagtgcatggagatgttgcacgaagctcaggaagagcttaagaatcttagaaacaaaacaatgcccaataccacttctcgcagatatcactcgctagggctttttccgatggatagcctcgccgcagagattgagggcacaatgaggaaggaacttcagttggaagaggccgaatctccggacatcacccaccagaaacgtgttttcgaaaccgtccggaacatcaatcaggtggtgaagcagaggtctttgacaccatcccccatgaatattccaggatcaaaccaatctagcgccatgaactctctgcttagctcctgtgtttcaacccctcgctcaagcttttatggatcagatatcgggaacgtggtgctggataataaaaccaattctattatcctggaaaccgaggccgcagacctggggaacgacgagcgtagcaagaaacccggtacccccggtactcccggatctcacgatttggagaccgctctccggagactgtccctgagaagagaaaactacctcagcgagagaaggttttttgaagaagaacaagaacggaaattacaagaacttgccgagaagggcgagctgcgcagcggctcactgacgccaactgagagcattatgtccttggggactcacagccgtttcagcgagttcaccggctttagcggtatgtctttttcctcacggagttacctgcccgagaagctgcaaatagtgaaaccattggagggctccgctacacttcatcattggcagcaactcgcccagcctcaccttggtggtatcctcgaccccaggcccggagtggtgaccaaaggcttcaggaccctggatgtagatcttgatgaagtttactgcctgaacgacttcgaggaggatgatacgggcgatcacatctccctcccgagattggccaccagtaccccagtgcagcaccccgagacatccgcgcatcacccgggaaaatgtatgagtcagaccaactctaccttcacattcacgacctgtcggatcctgcacccctcagacgagttgaccagagtgacaccatcgctgaatagcgcaccaactcccgcatgcggatctacaagtcacctgaagagtacacctgtggccaccccttgtactccacgtcgcctgtctctggccgagtcttttaccaatacacgagagtctaccaccaccatgtcaacatccttaggcctggtctggctcctgaaggaacggggtatttccgctgccgtttatgacccccagtcctgggatcgcgcaggccgaggatcgctgctgcattcgtatacgcccaagatggccgttatcccgagtacaccccctaacagccctatgcagaccccaacctcaagccccccttcctttgaatttaagtgtacgagtcctccatatgacaatttcttggcaagcaagccagcctctagtatccttagggaagtgcgcgaaaagaatgtgaggagcagcgagtctcagaccgacgtgtccgtttccaatctcaacctggtggacaaagtccggcgatttggggtcgccaaggtggtcaactctggcagggcccatgtgcccacgttgacggaagaacaggggcctttgctctgtggacccccaggcccagcgcctgctctggtgccccgtggcttggtgccagagggccttccactgagatgcccaaccgtgacgtctgcaatcggcggattgcagctgaactcagggatccgcaggaatcggagctttccgacgatggtgggctcctccatgcaaatgaaggccccagtcactctgacctctgggattcttatgggcgcaaagctaagcaagcagacctccctccgttag

SEQ ID NO: 244310 - DNA, 2061 bp, synthetic construct
  misc_feature 1..2061: note = Description of Artificial Sequence: Synthetic coding sequence
  source 1..2061: mol_type = other DNA
atgagcctgagagataagggcggagaagaggagtgtttcgagtacgactgtcaagatgaggaacggaaaccaacccaccggcaacatgacactcaggatctcctggaggaggttctctgcgcggagcgagtcggccagatgaccaagacctacaacgatattgacgccgtgaccaggctgctggaggagaaagaacgtgacctggagctcgctgctcggataggacagagcctgttgaagaagaacaagaccctcacggagcggaatgaactgttagaggagcaggttgaacacatccgagaggaggtctcgcaactccgccatgagctgtctatgaaagatgagctgctccaattttacacgtccgccgcagaagagtccgagccagagagtgtatgttcgacccccctgaaaaggaacgaatcttcgtctagcgtccagaactatttccacctggattccctgcaaaagaagctcaaagaccttgaagaagaaaacgtggtactaagatcagaagcatcccaactcaagactgagacgatcacttacgaggaaaaagaacaacagcttgtcaatgactgtgtaaaggagttgcgcgatgccaacgtccagatcgcaagtatttccgaggaactggcaaagaaaactgaggacgcagctcggcagcaggaagaaatcactcacctactttcccagatagtcgatctgcagaagaaggcaaaggcttgtgccgtcgaaaatgaggagttggttcaacatctgggtgccgcaaaggacgcccagagacagttgaccgctgagctcagagagctggaagataaatacgcggaatgtatggagatgttgcacgaggcccaggaggagctgaagaacctgagaaacaagaccatgcccaatacaacaagcagaaggtatcactccctgggactgtttcccatggactctctggcggcagagatcgaggggacgatgaggaaggagttacagttggaggaagccgagagtcctgacattacacaccaaaagagggtgtttgagactgtcagaaacatcaatcaggtcgttaagcaaaggtcattaaccccgtccccaatgaatatccccggttcgaatcagagctctgccatgaactcattactgagctcctgtgttagcacaccgagaagttccttctatgggagtgatatcgggaacgtagtgttggacaataaaaccaatagcatcatacttgaaacagaggctgctgacctgggcaatgacgagaggtccaaaaaaccaggcacgcccggaactcctggatcccatgacctggagacagcactccggaggctatcactcaggagggaaaactacctcagcgaaagacgcttctttgaggaagagcaggagagaaagctccaggagctggccgaaaaaggcgagctgcggtccggttctctaactcctaccgaaagcattatgagcttagggactcacagcagattctcagagtttacagggtttagcggtatgtcattttccagtcggtcataccttccggagaaactacagatagtcaagcctcttgaaggcagcgccacacttcatcactggcaacagcttgctcagccccatttgggcggtattctcgaccccagacctggagtggtgactaagggatttcgcaccctggatgttgatctcgatgaggtgtattgcctgaatgatttcgaggaggatgacaccggcgaccatatttcccttcctcgcctcgcaactagtacacccgttcaacaccctgaaacctctggtgaacggagccaggccagggtgaccgtgtcaggatcacgttcctacccaagcagaccccaagcgagtcccgaggaaatgcaggaacccccagcagcgactgaagaagaagaagaggaggaagaggaagagggttctggagagggaacgacaatcagccctgtgaacctagcacccttccctgaagctgagttctgggcgattctcactagcgttccagggactatccggagtggatctctgtctgtggcaagtgcccgtttgtgtggatag

SEQ ID NO: 244311 - DNA, 2688 bp, synthetic construct
  misc_feature 1..2688: note = Description of Artificial Sequence: Synthetic coding sequence
  source 1..2688: mol_type = other DNA
atgagcctacgcgacaaggggggagaagaagaatgcttcgagtacgactgtcaggacgaagagagaaaacctacacaccggcagcacgacacccaagacctcctcgaagaagtactctgtgccgagcgtgtcggacagatgactaagacttacaacgacattgatgcagttacgcgcttgctggaagaaaaagagcgcgacctcgaattagccgctcgaattgggcagtccctgctgaagaagaataagactctgaccgagaggaatgaactccttgaagaacaggtggaacacattagggaggaagtgagccagctgcgtcacgagctgtccatgaaagatgagcttctgcaattctacacatcagctgctgaggaaagtgagccagagtcagtgtgcagcactcccttgaaacgtaacgagtcaagcagctccgtccaaaactatttccacctggactccctgcaaaagaagctcaaagacctcgaggaggagaatgtagtgctgcgaagcgaggcaagtcagttaaagacagagaccatcacatatgaggagaaggagcagcaactagtgaacgactgcgtaaaggagctgcgcgacgctaatgtgcaaatcgcatctatatccgaagagctggccaaaaaaactgaggatgccgctcgtcagcaggaggagattactcacttgttgtcacagatcgtggaccttcagaaaaaggctaaagcttgcgcagttgaaaatgaagagttggtacaacatctcggcgctgccaaagacgctcagagacagttgaccgcggagctcagagagctcgaagacaagtacgcagagtgcatggaaatgctacatgaggctcaggaagaattaaagaatttgcggaacaagacgatgcccaacacaacgtccaggcggtaccacagcctaggcctatttccaatggattctcttgctgctgaaatcgaaggaacaatgagaaaagagctccaactggaagaggcagaaagtcctgacataacacaccagaaaagggttttcgaaaccgtgagaaacataaatcaggtcgttaagcaaaggtctctgacccctagtcccatgaacataccaggctcgaaccaatcctccgccatgaactccctgctttcaagctgtgtctcaacccctcggtcaagcttttatggaagcgacatcggcaacgtggtgctagataataaaaccaatagcataattctcgagaccgaagccgctgacctaggaaacgatgaaaggtctaaaaaaccaggaacgccgggaacaccaggctctcatgatctggaaacagccctgagacggctgagtctgcggcgtgaaaactatctgtctgagcgcagattctttgaagaggagcaggaacggaaactgcaagaactggctgagaaaggagagcttcggtcaggcagtctgacccccacagagtctatcatgtctctggggactcacagcagatttagtgaattcaccgggttctccgggatgtctttctctagcaggtcatacttgccagagaaactccagatcgtgaagccactggaggggtcggccacattacatcattggcagcaactggctcaacctcatctgggcggaatccttgatccacgacctggcgtagtcaccaaaggctttcgcaccctggacgtggaccttgacgaagtgtactgtttaaatgattttgaagaggacgatacgggggaccacatctcattaccacggttggccacgagtactccggtgcagcaccccgagaccagcgctcaccatccgggtaagtgcatgtctcaaacgaatagcactttcaccttcaccacctgtcgcatcctgcacccatccgacgagctgaccagagtgacaccaagcctgaattcagccccaaccccagcatgcgggtcgacttctcatctgaaaagcacaccagtggccactccctgcacaccacgacgactgagcttggcggagtcttttactaacaccagagaatctacgacaaccatgtccactagcctcggactagtatggttgctgaaggaaagaggaatatctgccgctgtgtacgatccccaatcctgggaccgagcaggtagaggttccttacttcacagctacacccctaaaatggccgttatcccgtccacccctcctaattctccaatgcagactcctacgtcgtcgccaccttctttcgaatttaagtgcacatccccgccatatgataacttcttagcatcaaagccggctagcagcatcttaagggaggtgagagagaaaaatgtgcgtagcagcgagtcccagaccgacgtgagcgtgtcaaacttaaacctggttgacaaggtgaggaggtttggcgttgcgaaggtggtgaattcaggtcgcgctcacgtccctacactgactgaagaacagggaccattactgtgcggacccccaggtcctgcacctgccttggtaccacgcggactggttcccgagggcctgcctttaagatgcccaaccgtgaccagtgctatcggcggtctgcaactgaacagcgggattcggcgtaaccgatcattccctacaatggtgggctcctctatgcagatgaaggcgcctgtgactctgaccagcggtatcctaatgggggcaaagctttccaagcagaccagcttgcggtag

SEQ ID NO: 244312 - DNA, 2361 bp, synthetic construct
  misc_feature 1..2361: note = Description of Artificial Sequence: Synthetic coding sequence
  source 1..2361: mol_type = other DNA
atggcactggtattccagtttggacagcccgtgagagcccagccgctgcccggattgtgtcacggtaaactgatccgcaccaatgcatgcgatgtttgcaattcaaccgacctgcccgaagtggagattattagcctgctggaagagcagttaccccactacaagctcagggccgacacaatctatggttatgatcacgacgattggcttcacacgcccctgatttcgccagatgccaatatcgacttaacgaccgagcagattgaagaaacgctcaagtatttcctgctgtgtgcagaacgcgtgggccagatgaccaaaacatataatgatatagacgccgtgacccggctcctggaagaaaaagaaagagacctggaattagctgcgcgtataggtcaatctttgttgaaaaagaataagacactcacagaacgtaatgagctgctggaggaacaggttgagcatatccgagaagaggtttcccagctgcggcatgaactgtcaatgaaagatgagctacttcagttttatacatcggccgcagaggagtcggagccggagtctgtatgcagtacaccattgaagcggaacgaatcctcctccagcgttcagaattacttccacttagacagtctgcagaagaaattgaaagacctcgaggaagagaatgttgtcttaaggagcgaggcgagccaactgaagacagagactataacatacgaagagaaagagcagcagctcgttaatgactgcgtcaaggaattaagagatgctaacgtacagatcgctagtatcagtgaggagttagcaaagaagactgaagatgccgcacgtcagcaggaagagatcactcacctactgtcccagatcgtggatctgcagaaaaaggcaaaagcgtgtgctgttgaaaacgaagaactggtccagcacctaggagccgctaaggatgcacagaggcaactcacagcggagttgagggaactcgaggataaatacgcagaatgtatggagatgttgcatgaggcccaggaagaacttaagaacctacgaaacaagacgatgcctaacacaaccagccgccgttatcacagtctgggcctattccccatggactcgcttgcagccgaaatcgagggaactatgaggaaggaactccagctggaagaagctgagtctccagatatcacgcatcagaagcgggtgtttgagaccgtccgaaatattaatcaagtggtgaagcagagaagcctgaccccttcccccatgaacattccaggatctaaccagtcaagcgctatgaattctctcctgtcctcctgcgtatccacgccgagatcgagcttttacggcagcgatatcgggaacgtagtgctggataacaaaacaaactcgataatccttgaaacggaggctgccgaccttggcaacgatgaaaggagtaagaaaccgggaacccccggaacccccggaagccacgacctcgaaacggctcttaggcggttgagcctgagaagggagaattacctttccgaaaggagatttttcgaagaggaacaggagcggaagctccaggagctagccgagaaaggcgaactccgctccggatcgttaactccaaccgaatcaattatgtccctggggacacattcaaggttttccgagtttaccggcttcagcggcatgagctttagcagccgctcttacctgcctgaaaaactgcagatcgtgaaacccctcgaaggctctgccactctccaccactggcagcagttggcccagccccacctgggcggaatcctggatcctcgcccaggagtcgtaacaaaaggctttaggactttagatgttgatctggacgaagtgtactgtctaaacgactttgaagaggatgatacggctcatcaccccggtaaatgcatgtcccagacgaattcaacgttcactttcacgacctgcagaattctccaccctagtgacgagctgacccgggtgacacccagtctcaatagtgcccctacacccgcttgtgggtccacatctcatctgaagtctacacctgtggcgactccatgtacgcccagaaggctgtctctcgccgagtcgtttacaaatacccgggagtctaccacaaccatgagcacaagcctcggcctggtctggcttttaaaagagcgagggatttctgccgctgtttacgatcctcagtcctgggacagggccggacggggttctctcctccattcacacgaggatgtgacttgtgctaatttgggtgaaggtggtgtgctgagcagcttcttgctacggagcaccgaaaccccaaaatgcgtccttatcccatggatcggtaaccagtag

SEQ ID NO: 244313 - DNA, 2745 bp, synthetic construct
  misc_feature 1..2745: note = Description of Artificial Sequence: Synthetic coding sequence
  source 1..2745: mol_type = other DNA
atgtctcagtcccagaacgcgatctttaccagccctaccggggaggagaatctgatgaacagtaaccacagggatagcgagtccatcaccgacgtttgtagtaatgaggatctcccagaggtggaactggtcagtctgttggaggagcagcttccccagtaccgtctcaaggtggatacgttgttcctgtacgaaaaccaggactggacacagtctccacaccagcgtcagcacgcctccgacgccctcagccctgttctggctgaggaaaccttcagatatatgattctgggaacagacagggtggagcagatgaccaagacctataacgatatagatatggtcacccatctgctggctgagagagaccgggatctggaactcgcggcacggatcgggcaagctctcctgaagcgcaatcatgtcctcagtgagcagaacgaaagcttggaagagcagctgggacaagcattcgaccaggtcaatcagctccagcacgaactgtgtaaaaaggatgagcttctgaggatagtgagcatcgctagcgaagagtccgagaccgactcctcatgctccacacccctaaggttcaatgagtcatttagtttaagtcaaggcttgctgcagctggaaatgctccaggaaaagctaaaagagttggaagaggagaatatggcgttgagatctaaggcatgccacatcaaaactgaaactgtgacctacgaggaaaaggaacagcagttggtgtcagattgtgtgaaagagctaagggagacgaatgctcaaatgagccgtatgactgaggagttatcaggcaaatccgatgaacttatccgatatcaggaggaactcagctctctgctttcacagatcgtcgatcttcagcataaactgaaggagcacgtaatcgaaaaggaagagctgaaactgcatctccaggccagcaaggacgcacagcggcagctcaccatggaactccacgagcttcaggatagaaacatggagtgcctgggcatgctgcacgaatcccaggaggagataaaggaattaaggtctcggtctggacctacagcacacctgtacttttctcagtcttatggcgcttttaccggtgagtctttagccgcagagattgagggcactatgcgaaagaagctgagtcttgacgaagaaagctccctgtttaagcagaaggctcaacaaaaacgggtctttgatactgtaagaatagcaaatgacacaagaggcagatccataagcttccctgcgctcctaccgattcccggatctaatagaagcagtgttataatgactgccaaaccattcgaatccggcttgcagcagactgaggacaagagccttctgaatcagggatccagctcagaggaagtggccggaagctcacagaagatggggcagccgggtcccagcggagacagtgatttagcaaccgcccttcaccggctgtccttgagacgacagaactatttgagcgagaagcaatttttcgctgaggagtggcagcgaaagatccaggtgcttgcggaccagaaagagggagtttcagggtgcgtcactcctacagagtcattagcaagtctgtgcactacccaatctgagatcacggatctttcttcagcaagctgtctccggggatttatgcccgagaaactgcagatcgtaaaaccgctggagggatcacagactttgtatcattggcaacagctggcccagcccaatctgggtaccatcctggatcctaggccaggcgtgattacaaaaggatttactcagctgcctggagatgctatataccacatctctgacttagaggaggatgaggaggagggaattaccttccaggtgcaacagcccctcgaagtcgaggaaaagcttagcacaagtaagccggtcaccgggatctttctccctccgatcacatcggctggcggaccagttactgtggccaccgcaaaccctggcaagtgcctgtcctgtacaaattccaccttcacatttacaacttgtcgaatactgcaccctagcgacattactcaagtcacgcccagctcgggctttccctctctgagctgtggatctagcggaagctcctcttcaaacacagccgttaacagccccgctttatcttatagactgagcattggagaatctatcaccaacaggcgtgacagcaccactaccttctccagcaccatgtcactcgctaagctgttgcaagaacgcggaatcagcgccaaagtatatcatagccctataagtgaaaatcccctgcaacccctgcccaagtctctggcaattccgtcaactcctccgaactctccttctcacagcccctgcccttctccactgcccttcgaaccgcgagtgcacctctctgaaaacttcctggcttcacgcccagcggagaccttcctgcaggaaatgtacggtctgcgcccttccagaaatccccctgatgttggtcaactgaagatgaatctcgtagatcgactgaagaggctgggcattgccagagttgtgaagaatcccggagcacaggaaaacggtcggtgtcaggaggccgagattggaccacaaaaaccagacagtgctgtctacctgaactctggttcttccctcttgggcggtcttcgcagaaaccagagtctccccgtgatcatgggtagcttcgctgcccctgtatgtacttcatctccaaaaatgggcgtcttgaaagaggactag

SEQ ID NO: 244314 - DNA, 936 bp, synthetic construct
  misc_feature 1..936: note = Description of Artificial Sequence: Synthetic coding sequence
  source 1..936: mol_type = other DNA
atgagccagtcacagaacgccatcttcacctctcccaccggagaggaaaatctgatgaatagcaaccaccgggactccgagtcgattacggatgtctgctccaatgaagacctccctgaagtggagttggtcagcctccttgaggaacagctgccgcagtatcggctgaaagtcgatacactctttctttatgagaaccaggattggacacagtcccctcatcagcggcaacatgcgagtgatgcactgtcccctgtcctagccgaagagacctttagatatatgattcttggcactgatcgcgtggagcagatgactaaaacctacaacgacatcgacatggtcacacacctcctcgccgagagagacagggacctggagctggcagctcgcatcggccaggctctccttaaacggaaccatgtgctgtctgaacagaacgagagcctggaagagcagctcgggcaggctttcgaccaggttaatcagttgcagcatgagctgtgcaagaaggacgagctcctgaggatcgttagtatcgcctctgaagagagtgagaccgactcttcttgttccacacctctgcggtttaatgagagctttagtctttcccagggtcttttgcagctggaaatgcttcaggaaaagctgaaagagctggaagaggagaatatggcgcttcgctccaaggcctgtcacatcaagaccgagaccgtgacctacgaggagaaggagcaacagctggtcagtgactgcgtaaaggaactgcgcgaaacgaacgcccagatgtctcgcatgacagaagaactgtcaggcaagtctgatgaactgattagataccaggaagagctctcttccctgctgtcccaaattgtggacctgcagcataagctgaaggaggtaggcttgtttatccactcaactgacatttgctag

SEQ ID NO: 244315 - DNA, 93 bp, synthetic construct
  misc_feature 1..93: note = Description of Artificial Sequence: Synthetic coding sequence
  source 1..93: mol_type = other DNA
atgagccagagccagaatgctatatttaccagccctactggggaggagaacctcatgaacagcaaccacagagatagtgagagcataacctag

SEQ ID NO: 244316 - DNA, 2340 bp, synthetic construct
  misc_feature 1..2340: note = Description of Artificial Sequence: Synthetic coding sequence
  source 1..2340: mol_type = other DNA
atgattctgggtaccgaccgtgtggagcagatgaccaaaacttacaatgacatcgatatggttactcacctgctagcagagcgtgacagggatctcgaactcgcagccagaatcggacaggcccttctcaagcgcaaccacgttttgtcagaacagaatgagtctttggaagagcagctgggacaggcatttgatcaggtgaaccagctgcaacatgagctatgtaaaaaagatgagcttctgcggatagtatccattgcatcagaggaatccgagacagacagctcatgtagtaccccgctgaggttcaatgagtctttctctctctctcaaggcctcctgcagctcgagatgctccaagaaaagctcaaagagttagaggaggagaatatggcactgaggtctaaggcctgccatataaagaccgagaccgtaacctacgaggagaaagagcagcagctggtatctgattgcgtcaaagagctgcgcgagacgaacgcgcagatgtctcgcatgacagaagagctctctggcaagtcagatgagctgattcggtatcaagaggaattgtcttccctactgtcccagattgttgatcttcagcacaagttgaaggaacacgttatcgaaaaggaggagctcaaactgcacctacaggcctcgaaagatgcccaacgccagctcacaatggagctgcacgagctccaggacagaaacatggagtgcctggggatgcttcacgagtcacaggaagagattaaagaacttagatctcgatcaggcccaactgctcatctatacttttcacagagttacggcgcattcaccggcgaatcgctggcagcggaaatcgaaggaactatgaggaaaaagttaagcctggacgaagagtcaagcctttttaagcagaaggcccagcagaagagagtgttcgataccgtgcgcattgccaatgatacccgtggaagaagtatcagttttcccgcactgttacctattcctggcagcaataggagctctgtgattatgaccgccaaacccttcgagtcggggctgcaacaaaccgaagataaatccttgctcaatcagggatcttcttctgaagaggtggcaggcagcagccagaagatgggccaacccggtcctagtggggactcagatcttgctacagccctgcaccgacttagtctgaggcgtcagaactatctcagcgaaaagcaattttttgctgaggaatggcagagaaagatccaggtattggccgatcagaaggagggagtctcagggtgtgtcacacccaccgaatcattagcttcactctgcaccacacagtccgagattaccgacctgagcagcgcctcctgcctccgagggttcatgccagagaagctgcaaattgtgaagcccttagaagggtcgcagacgctctaccactggcagcagttagcccaaccgaatttagggacgattctggatcctagaccaggggtgattaccaagggctttacgcagctaccaggagatgcgatctaccacatctcagacctagaagaggatgaggaggagggtatcacctttcaagtgcagcagccactcgaggtcgaggaaaaactcagcaccagcaaaccagtgactggaatcttcctaccacctatcacttctgcaggaggtcccgtgacagtcgcgacagccaaccccggtaaatgtctgagctgtaccaatagcacgtttacctttactacgtgtcggattcttcatccctccgacattacccaggtcacaccaagctccggctttccttccctgtcctgcggatcttctggctcctccagcagcaatacagccgttaattctcccgctctcagttacaggttgtccatcggtgaatcaatcaccaacagacgtgatagcaccaccacattttcctctactatgtctctggcaaagctgttgcaagagaggggaattagcgcgaaagtttaccattcaccaatttccgaaaaccccctgcagccactgccgaagtccctcgcaattcccagtaccccgcctaacagcccctcacattccccctgtcccagccccctcccatttgagccccgtgtacatttgtcggagaattttctagcctcaaggcccgcagaaacatttcttcaagaaatgtatggccttcggccaagtagaaaccctccggacgtgggccaactaaagatgaatcttgtggatagactgaaaagactggggatcgcacgagtcgtcaagaacccagtgcccaagcgtatggaagacgcgaggcgacagaaactcgtgctcaaaaaccagatcctccttttcatctag

SEQ ID NO: 244317 - DNA, 486 bp, synthetic construct
  misc_feature 1..486: note = Description of Artificial Sequence: Synthetic coding sequence
  source 1..486: mol_type = other DNA
atggaaaaaccgctgaccgtgctgagagtttccctctaccatccaacacttgggccatctgcgttcgccaacgtcccccctcggctgcagcacgatacctcccctcttctgctgggcagaggccaggacgcccatttgcagctgcagctgccgagactcagcagacggcacttatctttagaaccctatctagagaagggttctgctctgctagcattctgtctgaaagccctgagccgaaagggctgcgtctgggtgaacgggctaacactccgctatctcgagcaagtacccctgtccaccgtgaatcgggtctcctttagcggaatacaaatgcttgttcgtgtcgaggagggaacgagcttggaggcctttgtctgttactttcatgtgagtccctctccacttatataccggccagaagccgaggagactgatgagtgggagggcattagtcagggccagccccctcccggaagtggatag

SEQ ID NO: 244318 - DNA, 1749 bp, synthetic construct
  misc_feature 1..1749: note = Description of Artificial Sequence: Synthetic coding sequence
  source 1..1749: mol_type = other DNA
atggcagagtttctggatgaccaggagacccgactttgcgataattgcaagaaagaaatcccagtcttcaatttcacgatccacgagatacattgtcagagaaatatcggtatgtgccccacttgtaaggagccttttcctaaatcggacatggaaacacatatggccgctgagcattgtcaagtgacgtgcaaatgtaacaaaaaactcgagaaaagactgctgaaaaagcacgaagagaccgaatgcccactacgactggctgtatgtcagcactgtgacctcgagttgtcaatacttaaacttaaagagcacgaggactattgcggggcacggacagaactatgcggcaattgcggaagaaatgtgctggtgaaagacctaaaaacccatcccgaagtgtgcgggcgtgaaggagaggagaaaagaaacgaagtggccatacctccgaacgcctacgatgagtcctgggggcaggacggcatctggatcgcaagtcagctcctgaggcagattgaagcattagatccacctatgcgattgcctaggcgtccactacgagccttcgagtcagatgtcttccacaaccgtaccactaatcaaaggaacattactgcccaggtgagcatacagaataatctgtttgaagaacaggagagacaagagcgaaatagaggccagcagccgccaaaggaggggggtgaggagtctgccaacctcgacttcatgttagcgctttctctgcagaatgaggggcaggcctcgtcagtggccgaacaggacttctggcgcgcagtgtgcgaggccgaccagagccacggagggcctagatcactgtccgacatcaagggggctgccgatgagattatgcttccctgcgaattttgtgaagagctgtaccctgaagagctgctgatagatcaccagacctcttgtaatccatcacgcgctctaccttccttgaacacaggaagcagctcgccgcgtggagtggaggagccagacgtgatctttcaaaacttcctgcagcaggccgctagcaatcagctggatagtctgatgggactgtcaaatagccaccctgttgaggagtctatcatcatcccatgcgagttttgcggcgtccagttggaagaggaggtccttttccaccatcaagaccagtgcgaccagcgccctgccacagcaactaaccacgttactgaggggattccgaggctcgatagtcagccccaggagacatctccagaattgccacgcagaagagtccgccaccagggagacctttcctccggataccttgacgacaccaaacaagaaacggccaatgggccaacgtcttgcttacctccatcaaggcccatcaataacatgactgccacttacaaccagctctccaggagcacctccggccctaggccgggttgtcagccaagtagcccatgtgtacctaagctgagcaactccgattcccaagatatccaagggagaaaccgggattctcagaacggcgcaatcgcacccggtcatgtgagcgtgataagacctccccagaatctgtaccccgagaacatagtgccaagcttttcccctggcccttccggcaggtatggagcatctggaagaagtgaaggcggacgaaactcccgcgtgactcctgctgccgcaaactataggtcccgaaccgccaaggcgaaaccctcgaaacagcagggcgctggtgatgcagaagaagaggaagaggaatag

SEQ ID NO: 244319 - DNA, 1749 bp, synthetic construct
  misc_feature 1..1749: note = Description of Artificial Sequence: Synthetic coding sequence
  source 1..1749: mol_type = other DNA
atggccgaatttctggacgaccaagagactcggctgtgcgataactgtaagaaggagattccagtttttaactttaccattcacgagatccattgtcagcgaaacataggtatgtgcccaacatgcaaagagccctttcctaagagcgacatggaaacacatatggcggcagaacactgccaggtgacttgtaagtgtaacaagaaactagagaagcgcttacttaaaaagcacgaggaaactgagtgccctctccggctcgccgtttgccaacattgtgacctggaactgtcaattctgaaactgaaagagcacgaggactattgtggcgcacggacagagctgtgtggtaattgtgggagaaatgtgctagtcaaagatctgaaaacccacccagaagtgtgcggcagagagggagaggagaagcgaaacgaggtggccatcccccctaacgcctacgatgagagctggggtcaggatgggatctggatcgcatcgcagttgctgcgacaaatagaggcactggatccacccatgagacttccccgtcggccactccgggcatttgagagcgatgttttccacaaccggactacgaatcagcggaacattactgcacaggtctccatacaaaataatttgtttgaagaacaggagcgccaagagcgcaatcgcggtcagcagccgcctaaggagggaggcgaggagagcgctaacttggatttcatgcttgccctatcactgcaaaatgaggggcaagcctcttctgtcgctgagcaggacttttggcgcgcagtatgtgaggctgatcaaagtcatggtggccctagatcactgtctgacatcaaaggcgcagccgatgagattatgctaccttgcgagttttgtgaggagctctacccagaggagctcttgatcgatcaccaaacatcctgtaacccttctcgcgctctccctagtcttaatactggctcatcaagccctcggggtgtggaagaacctgacgtgattttccaaaacttcttgcagcaggctgcaagcaaccagctggactcgctgatgggactgtccaactctcacccagtggaagagagcatcattataccttgtgagttttgcggagttcagctcgaggaagaagtgcttttccatcaccaggatcagtgtgaccagcggccagcgaccgcaaccaatcacgtgaccgagggcatacctcggctcgattcccagcctcaggaaaccagtcctgagctcccaagaaggagagtaagacaccagggcgatctgtcttctggttacctcgacgacaccaaacaggagaccgccaacggccctactagctgtttgccccctagtcggccaatcaacaatatgaccgcaacttataaccaactgtccaggagtacaagcggccctaggccgggttgtcagcccagttccccctgcgttcctaagctgagcaactccgatagccaggatattcaggggcgaaaccgtgattcccaaaacggtgccattgccccaggacatgtatctgtcattcgtcctccccaaaatctgtacccggagaacatagtgccaagcttctcccccggtccaagcggccgttatggggcttctgggagatctgagggtggcaggaattctagagtaacccctgcagcagccaattatagatctagaaccgcaaaagctaagccaagtaaacagcagggggctggcgatgccgaggaggaggaggaagaatag

SEQ ID NO: 244320 - DNA, 408 bp, synthetic construct
  misc_feature 1..408: note = Description of Artificial Sequence: Synthetic coding sequence
  source 1..408: mol_type = other DNA
atggccgagttcttggatgatcaagaaaccagactgtgtgacaattgcaagaaggaaattcccgtgtttaattttaccatccacgagattcactgtcagagaaacataggtatgtgtccgacctgtaaggagcccttccccaaatctgacatggagacgcatatggccgcagagcactgtcaggtgacctgtaaatgtaacaagaaactcgaaaaaaggctgttaaaaaagcacgaagaaaccgaatgccccttgaggctggctgtgtgccagcactgtgacctcgagctctccattcttaagctcaaggaacacgaggactattgcggcgcaaggactgaactttgcggcaattgtgggaggaatgtgctggtgaaagatttgaagacccaccccgaagtgtgctag

SEQ ID NO: 244321 - DNA, 495 bp, synthetic construct
  misc_feature 1..495: note = Description of Artificial Sequence: Synthetic coding sequence
  source 1..495: mol_type = other DNA
atggcagagttcttggatgaccaagagacacggctttgcgataactgtaagaaagagattcccgtgttcaattttactatccacgaaatccactgccagaggaatatcggtatgtgtcctacatgcaaagagcctttccccaagtctgacatggaaacccatatggcagccgagcactgtcaggtgacgtgcaagtgtaataagaagctagagaagcggctgctgaaaaaacacgaagagacggagtgtccccttcggcttgcagtctgtcagcactgcgatttagaactgagcatactcaagctgaaggaacacgaagactattgtggtgctcgcaccgaactttgtggaaattgcggcagaaatgtattagtgaaggatcttaagacccacccagagctgaagaataagcgcggaaggaagggaattgaagccaatagtcccccaaaacgggtcgtaaaacgcgtccagacctggacatcgtgctggccctag

SEQ ID NO: 244322 - DNA, 852 bp, synthetic construct
  misc_feature 1..852: note = Description of Artificial Sequence: Synthetic coding sequence
  source 1..852: mol_type = other DNA
atggcagaattcctggatgaccaagagactcggctgtgcgacaactgcaaaaaagaaatccctgttttcaatttcaccatccatgagattcattgccagagaaacatcgggatgtgccctacatgcaaggagccttttccaaagtctgacatggagacacacatggctgcagagcattgtcaggttacctgcaaatgtaataaaaaactggagaagcgccttttgaaaaaacatgaggaaaccgagtgccccctcagactcgctgtttgccaacactgtgatctcgaattgtccatcctgaaactgaaggagcatgaagattattgtggagctcgtacagagctctgcggcaattgtggccgaaatgtgctcgtaaaggatttgaaaacgcacccagaagtttgcggtagagagggagaggagaaacgcaacgaggtagctattccaccaaacgcctacgacgaatcctgggggcaggatgggatctggatcgcgtcccagctgctgcgtcagatcgaggctttggacccccctatgaggctccccaggagaccactccgcgcttttgagtctgatgtgtttcacaatcgcacgacaaaccaacgtaatataacagcacaggtttcgatccagaataatctgttcgaggagcaagagcggcaggagagaaaccgcggtcagcagcctcctaaggaggggggtgaagagtccgccaatctcgactttatgttggcgttgtccctgcagaacgaaggccaggcctcttcggtggctgaacaggacttctggcgagctgtgtgtgaagctgatcagagtcacggaggacctaggtctttgtcagacattaagtag

SEQ ID NO: 244323 - DNA, 414 bp, synthetic construct
  misc_feature 1..414: note = Description of Artificial Sequence: Synthetic coding sequence
  source 1..414: mol_type = other DNA
atgggggcacatctggtgagaaggtacctgggggatgcatcggtggagcccgatccactccaaatgcccacattccctccggactacggcttcccggaaaggaaggagagggagatggtcgccacccagcaggagatgatggacgctcagctgcgcctccaattgagggactactgcgcccatcacctgatcaggctcctaaagtgcaagagggacagtttcccaaactttttggcctgtaaacaagaaagacacgactgggattactgtgaacacagggactatgtgatgcgcatgaaagagtttgaaagggaacgccgactgctgcagcgtaagaagcggagggaaaaaaaggccgctgagctggcgaaggggcagggtcctggcgaggtggatccgaaggtggccctgtag

SEQ ID NO: 244324 - DNA, 972 bp, synthetic construct
  misc_feature 1..972: note = Description of Artificial Sequence: Synthetic coding sequence
  source 1..972: mol_type = other DNA
atgattcttcaggaaactaaggctgcttgtggcatccctgccatcccgcactgcagtagggttgagatcctggatgctaagactcgcgagaagctttgtttcttggacaaagtcgaaccacatgctactatcgcagagataaagaacttgtttacaaaaacccacccccagtggtaccccgcacgtcaatcactgagactggaccctaaggggaagtctctgaaagatgaagacgtgctgcaaaaactacctgttggtactactgctactttatactttcgagacctcggggcacagataagctgggttacagtgttcttgaccgaatacgccggacctctgttcatttatctgctgttctatttcagagtgccatttatctatggccacaaatacgattttactagctcccgccatactgtggtccatctggcttgtatatgccattctttccattacatcaaaagactcctggagactctattcgtccaccgtttcagtcatggcaccatgccactcagaaatatcttcaaaaactgcacctactactggggttttgctgcctggatggcttactacatcaatcatccactgtacacaccacctacctatggagcccagcaggtcaaactggccctggctatctttgtaatatgccagctgggcaatttttctatccacatggctcttcgggatcttcgccctgcagggtccaagacacggaaaattccatacccaaccaaaaaccccttcacgtggctatttctgctggtcagttgcccgaattatacctacgaagtaggctcatggattgggttcgcaatcatgacacagtgtctacccgttgcactgtttagtctggtggggttcacacagatgacaatttgggccaagggtaagcaccggtcctacctgaaggagtttcgcgattaccccccactccgaatgccaataattcccttcctgctatag

SEQ ID NO: 244325 - DNA, 1014 bp, synthetic construct
  misc_feature 1..1014: note = Description of Artificial Sequence: Synthetic coding sequence
  source 1..1014: mol_type = other DNA
atgtcatcttctcctgttaagcgacaacgtatggagagcgccctagatcagctgaaacaatttactaccgtggtggccgacacgggggattttcacgccatcgacgagtacaagccccaggatgcaactactaacccatcacttattttggctgcggcacagatgccagcttaccaggaattggttgaagaggcaatagcctacggaagaaaactaggcggaagtcaggaggaccaaattaagaacgctatcgataagcttttcgttctcttcggcgcagaaatactcaaaaagattccgggaagagtgtccacagaagtggatgcacggctgtctttcgataaagatgcaatggtggctcgggcacgcaggctcatcgagttatataaggaggccggtatttctaaggatcgcatattaatcaaactctcttccacctgggagggtatccaagcgggtaaggagctcgaggaacagcatggcattcattgtaacatgaccctccttttttcatttgcccaggcggttgcctgtgctgaagctggagttacccttatcagcccattcgttggtcgaatcctcgattggcacgtggccaatactgataagaagtcctacgaaccacttgaggaccccggtgtcaaatccgtaacaaagatctataactactacaagaagttcagttataagaccatagttatgggagcaagcttcaggaataccggcgagatcaaagcacttgccggatgcgacttcctcaccatttcgcctaaactgctgggcgagttgctgcaagacaacgctaagctagtgccagtgctgtccgccaaagctgcacaggcatctgatctcgaaaagatccatttggatgaaaagtcttttcggtggctccacaatgaagaccaaatggcagttgaaaaactctccgacggaatacggaaattcgcggctgacgcagtgaagctggaaaggatgctgactgagaggatgtttaacgccgaaaatgggaagtag

SEQ ID NO: 244326 - DNA, 957 bp, synthetic construct
  misc_feature 1..957: note = Description of Artificial Sequence: Synthetic coding sequence
  source 1..957: mol_type = other DNA
atgtcctcaagccctgtaaagaggcagagaatggaaagtgcgttggatcagctgaagcagtttaccaccgtggtcgcagatacaggagacttccacgccatagatgagtataaacctcaagacgccaccaccaatccttcgcttatcttagctgcggcacagatgccagcctaccaggagctcgtggaagaggctatcgcctatggcagaaaattgggcggatcccaggaggatcagataaaaaatgcaatcgacaaattgtttgtcttgtttggggctgaaattttgaagaagatcccgggtagagtgagcacagaagtggacgcgaggctgagcttcgacaaagacgcgatggtagcgcgtgcgagaaggcttattgaattatacaaagaagctggaatatcaaaagatcgaattctgatcaagctctcttccacctgggaaggaattcaggccggaaaagagctagaggaacagcacggtatacactgcaatatgacgctcctgtttagcttcgcccaggcggtcgcatgtgccgaggcaggcgtgactctgatcagcccctttgtaggaagaatccttgattggcacgtcgcaaataccgacaaaaagtcctatgagccactcgaagatccaggtgttaagtccgtaaccaagatatacaactattacaaaaaattctcatacaagactatcgttatgggagcatccttccgcaatacaggggaaataaaagcgctcgctggatgcgacttcctgacaatttccccaaagttacttggtgagctcctgcaggacaatgctaaattggttcccgtcctgtcagccaagccaaaacccgtgacctggaaaaagagtacgtggatgcgatccttgagtgtgggctgcacaactaggactagatggctgtggagatcatctcttaccgggagcgcctcgttacctctcatgcagtag

SEQ ID NO: 244327 - DNA, 1302 bp, synthetic construct
  misc_feature 1..1302: note = Description of Artificial Sequence: Synthetic coding sequence
  source 1..1302: mol_type = other DNA
atgcgtcaatctcatcagctccccctcgttggtttactgctgttttctttcattcccagtcagctgtgtgagatctgtgaggtttctgaagaaaactacatccgcctcaagcccctcctgaacaccatgatccaaagcaattataacaggggaacctctgctgttaatgtagtcctcagcctgaaattggtgggaatccagatccaaacccttatgcagaagatgatccagcagattaagtacaatgttaagtctcggctgagcgacgtctctagtggggaattggcactcatcattctcgcccttggggtgtgccgcaacgctgaagagaatttgatctatgactaccacctgatagacaagctggaaaataagttccaggccgaaatagaaaacatggaggcacataatggaactcccctaacaaactactaccagttgtcacttgacgtgctggctctgtgcctgtttaacggcaattattccacggcggaggtagtgaaccacttcacccccgaaaataagaattactacttcgggagccagttctctgtagacacaggggcaatggcagtccttgcactgacctgcgtgaaaaaatctctgatcaacggacagatcaaagccgacgaaggttcgctgaaaaatattagcatctacactaaatccctggtcgagaaaatcctttcagaaaaaaaggagaacggtttgataggtaacaccttcagtacaggggaagccatgcaggctctatttgtgtcatctgactattataatgagaatgattggaactgtcaacagaccctcaatacggttcttacagagatctcccaaggggcattcagcaatccaaacgccgctgcccaggtactgcctgccctcatggggaaaactttcttagacatcaacaaagattctagctgtgtttctgcctctgggaacttcaacatctcagccgacgagccaatcactgtcactcctccagacagtcaatcctatatatccgttaactattctgtgcgcattaacgagacctacttcacaaatgtgaccgtgctcaacggatcagtgtttctgagcgtgatggaaaaggctcagaagatgaacgacacaatctttggctttacaatggaagagaggtcctggggcccatatattacgtgcatccaaggcttatgcgccaacaataatgaccggacttactgggaactgctaagcggaggggaacctttgagccagggcgctgggagctatgtggtccgaaatggcgaaaacctcgaggttaggtggtccaagtactag

SEQ ID NO: 244328 - DNA, 1083 bp, synthetic construct
  misc_feature 1..1083: note = Description of Artificial Sequence: Synthetic coding sequence
  source 1..1083: mol_type = other DNA
atggctgctgccgcagccgcaggtgcaggtccagagatggtgcgtggacaagtgtttgatgtggggccaaggtacacaaacctgagctatattggcgagggggcatatggaatggtatgctccgcctatgataacgttaataaggtgcgggttgcaatcaaaaaaatttccccatttgaacaccagacgtactgtcagagaacgcttcgagaaattaagattctgcttcgcttccggcacgaaaacatcattggcatcaatgacatcatccgcgctcccactatcgagcagatgaaggacgtgtacattgttcaagatctgatggaaacagacctgtataaacttcttaaaacgcagcacctctctaacgaccacatctgctacttcctgtatcagattctcagggggctgaaatatatccactcagctaatgtgctgcaccgggacctgaagccctccaatctcctccttaataccacttgcgacctgaagatctgcgatttcggcctggccagggtggcagacccagaccacgatcacactggattcctcactgagtatgtcgccacaagatggtacagggcgccagaaatcatgttgaacagcaaggggtataccaaatctatcgatatttggtctgtggggtgtatcctggccgaaatgctgtctaacagaccgatcttcccagggaagcattacctagatcagcttaaccacattctcggcattctgggatcacccagtcaggaagatcttaattgcattatcaacttgaaggccagaaactacctgttgtcgctgccccataaaaataaggtcccctggaatcgtcttttccccaacgcggatagtaaggccctcgatttgctggataagatgctaacctttaatccgcataaacggatcgaagtggagcaggcgctggctcatccttacctagaacagtactacgatcctagcgacgagccaatcgcagaggccccatttaagtttgatatggaacttgatgaccttcccaaggagaagctcaaagaactcatctttgaagaaaccgcgcgattccagcccggataccgatcttag

SEQ ID NO: 244329 - DNA, 1203 bp, synthetic construct
  misc_feature 1..1203: note = Description of Artificial Sequence: Synthetic coding sequence
  source 1..1203: mol_type = other DNA
atgagacatctcggcgcatttctcttccttctgggcgtgctcggagctttgaccgaaatgtgtgagatacccgagatggactctcacctggttgagaagctcggacagcaccttctcccttggatggatagactgagtttagagcatttaaatccctctatctacgtgggtctgagactgtcatctttgcaggcaggaaccaaggaggacctgtacctgcacagcttgaagctggggtatcagcagtgcctgcttgggagcgccttctcagaagacgatggagactgccagggcaagcctagtatgggtcaactggctttatatctgctggcattacgggcaaattggcatgatcacaagggacacccgcacacatcatactaccagtacgggctgggaattctcgccctgtgcctacaccagaagcgagttcatgattccgtggtcgacaaactactgtatgcagtggaaccattccatcaggggcatcattcggtggatactgccgcaatggccggactggcttttacctgcttgaaacgctccaactttaatccgggacgacgtcagcggattaccatggccatcaggactgtgcgtgaggaaatcctcaaggcacagacaccagagggccacttcggcaacgtgtattcaacgcccttggcattacagtttctgatgacatctccaatgcgaggagccgaattgggaactgcgtgcctgaaagcaagggtggcgctgctggccagcctgcaggacggtgctttccaaaatgccctaatgatctctcagctgctgcctgttcttaaccacaaaacgtatatagatctgatttttcccgattgtctggcccctcgagtcatgttagaaccggctgccgagacaattcctcaaacgcaagagatcataagcgtgactctgcaggtattgtcgctcctcccaccctataggcagtctatatctgtgcttgccggatcaacagttgaggatgtcctcaagaaagcccacgagctgggtggttttacatatgaaacacaagctagtctaagcgggccatatcttacctccgtgatgggcaaggccgctggggaaagggagttttggcagcttcttagagaccctaacactccgctcctgcaggggatagccgattacagaccaaaggatggtgaaaccattgaattgagattggtgtcctggtag

SEQ ID NO: 244330 - DNA, 843 bp, synthetic construct
  misc_feature 1..843: note = Description of Artificial Sequence: Synthetic coding sequence
  source 1..843: mol_type = other DNA
atggaggatgaagtggtgcgtttcgcaaagaagatggataagatggttcagaagaagaatgccagtactagaattggaatgtccgtgaatgcaattcggaaacaaagcacggacgaagaggtgacgagtctggcaaagagtcttattaaatcctggaaaaagttactggatggtcccagcactgagaaggatttggatgagaaaaagaaagagcccgctatcacaagccaaaattctcccgaggcgcgagaggaatccacttcctctggcaatgtgtctaatcgcaaagatgaaactaatgctcgcgatacctatgtgagcagtttcccaagggcaccttcaaccagtgactcggtcaggctcaaatgcagggagatgctagcggctgccctgcgcaccggcgacgattacatcgctatcggcgcagacgaagaggagctcggcagccaaatcgaagaagcaatctatcaagaaatacggaataccgacatgaagtacaagaatcgggtcagaagtagaataagcaacttaaaagatgctaagaaccctaatcttaggaagaacgtgttatgtggcaacattcctccggatcttttcgcacgaatgaccgccgaagagatggcaagtgacgaactcaaagaaatgcggaagaatctcaccaaggaggcaattagggagcaccaaatggcgaaaacgggcggaacccaaacggatttgttcacgtgcggaaagtgcaagaagaaaaattgtacctatactcaagtgcagactcgcagcgctgatgagcccatgacaacttttgtggtctgcaacgaatgtggcaaccggtggaaattttgctag

SEQ ID NO: 244331 - DNA, 906 bp, synthetic construct
  misc_feature 1..906: note = Description of Artificial Sequence: Synthetic coding sequence
  source 1..906: mol_type = other DNA
atggaggatgaggttgttagattcgccaagaagatggacaaaatggtccagaagaagaatgctgcgggagcactggaccttcttaaggaattaaagaatatccccatgacactcgaattactccagtctacccgtattgggatgtcagtaaacgccatccgaaagcagtccacagatgaggaggtaacctccttagcgaagagtctgattaagtcatggaaaaaactgctggatggcccttcaactgagaaagatctagatgaaaaaaaaaaggagccagctattacgtcacagaattcccccgaagcacgcgaggaaagcactagtagcggaaatgtttctaatcggaaagacgagacaaatgcgagagacacctacgttagcagctttccccgagccccaagcacttccgactcggtgagacttaagtgccgggaaatgctggcggcagctctccgtactggagatgattatattgcaatcggagccgacgaggaagaacttggttcccagatagaggaagccatatatcaagagattcggaatacagacatgaagtataagaatcgtgtgcggagccggatcagtaacttgaaggatgcaaagaatccaaacctcaggaagaatgtactgtgcggtaatatccctccagatttgttcgccagaatgactgctgaggagatggcctctgacgaacttaaggagatgagaaaaaacttaaccaaggaggccattagagagcaccagatggccaagaccggaggaactcagacagatttgtttacttgcggtaagtgcaagaaaaaaaattgcacatacacacaggtgcagactcgctcggcagacgagccaatgaccaccttcgtggtgtgcaacgaatgcggcaaccgatggaaattctgctag

SEQ ID NO: 244332 - DNA, 354 bp, synthetic construct
  misc_feature 1..354: note = Description of Artificial Sequence: Synthetic coding sequence
  source 1..354: mol_type = other DNA
atggaggatgaggtcgtgcggttcgcaaagaagatggacaaaatggtgcagaaaaaaaatgccgctggggctcttgacctgctcaaagaactgaagaacataccaatgacactcgaactgcttcaggaaatggcctcggacgaactcaaggaaatgaggaagaacctgacaaaagaggcaattcgggagcatcagatggcaaaaactgggggtactcaaaccgatcttttcacttgcggcaaatgcaaaaagaaaaactgtacatatacacaggtccagacacgcagtgctgacgagcccatgactacattcgtggtgtgtaatgagtgtggtaataggtggaagttttgctag

SEQ ID NO: 244333 - DNA, 480 bp, synthetic construct
  misc_feature 1..480: note = Description of Artificial Sequence: Synthetic coding sequence
  source 1..480: mol_type = other DNA
atggacaagccgaggaaggagaacgaagaagaaccacagtccgccccaaagaccgatgaggaaagacctccagtggagcattctccggaaaagcagtcccctgaggagcagtcctccgaagagcaatcatccgaagaggagttttttccggaggaactgctccccgagctgctgccagaaatgttgctgtccgaagaaagaccaccccaagaggggctgagccgcaaagatcttttcgagggacgcccacctatggagcagcccccatgtggggtaggcaaacataagctggaagaaggctcctttaaggagcgtctggccagatctaggccacaattccgcggtgacattcacgggaggaatctgagcaacgaggagatgatccaggctgctgatgaactggaggagatgaaacgcgtaagaaacaagcttatgattatgcactggaaagcaaagcgcagtagaccttatcctatatag

SEQ ID NO: 244334 - DNA, 480 bp, synthetic construct
  misc_feature 1..480: note = Description of Artificial Sequence: Synthetic coding sequence
  source 1..480: mol_type = other DNA
atggacaaacctcggaaggaaaacgaagaggaaccccagtcagctcctaagacagatgaggaacggccaccagtggaacacagtcctgaaaaacagagtcccgaggaacaaagctctgaggaacaatctagcgaagaggagtttttccccgaagaattgttacctgaactcctccctgaaatgctcctgagcgaggaaagacctccccaggaaggcctaagtcgcaaggaccttttcgaggggagaccccctatggagcaacctccgtgtggtgtcggcaaacataaactggaggaagggtcatttaaagaacgactagcgagatctcggccacagtttagaggagatattcatggtcgaaacctgtcgaacgaggagatgattcaagcggcagacgagctggaagagatgaaacgagtccgtaacaagttaatgattatgcattggaaagccaaacgctctaggccatacccaatttag

SEQ ID NO: 244335 - DNA, 480 bp, synthetic construct
  misc_feature 1..480: note = Description of Artificial Sequence: Synthetic coding sequence
  source 1..480: mol_type = other DNA
atggataagccgagaaaggagaacgaagaagagccccaatctgccccaaaaactgacgaggagcgcccaccagtcgaacatagccccgagaaacagtcccctgaggagcagtcatccgaagagcagtcttcggaggaagaatttttccctgaggagttattgcccgagctcctgcccgagatgcttctcagcgaggagcgcccaccacaagaaggactttcccggaaggacttattcgaaggcaggcctccgatggagcagcctccatgtggcgtagggaagcacaaactggaggaaggatcttttaaagaaaggctggcacgctcgcgaccccagttcagaggggacatccatggcagaaacctgtcaaacgaagaaatgatacaggctgctgatgaactagaggaaatgaagagggtgaggaataaattaatgatcatgcactggaaggcgaaacgatccaggccttatccgatctag

SEQ ID NO: 244336 - DNA, 471 bp, synthetic construct
  misc_feature 1..471: note = Description of Artificial Sequence: Synthetic coding sequence
  source 1..471: mol_type = other DNA
atggataaaccaagaaaagaaaacgaggaagagccccaacgccctagaccgatgaggcgaggattaagatggagcaccttaccaaaaagcagccccccaaggagttccctccggaggtctagccccagacgaagaagtagttttctgcggtcctcctgcctctcctcctgtctgcgttgctccagcagaaggtccccacaggaaggattaagcaggaaggaccttttcgaggggagacctccaatggagcagccgccttgcggggtggggaaacacaagctcgaggagggctcctttaaggaacgcctcgccaggagccgtcctcagtttcgaggagacattcacggacggaatttgagcaacgaggaaatgatccaagctgctgatgaacttgaggagatgaaaagagtgcgaaacaagctcatgataatgcactggaaggctaagcgcagcaggccttaccccatttag

SEQ ID NO: 244337 - DNA, 303 bp, synthetic construct
  misc_feature 1..303: note = Description of Artificial Sequence: Synthetic coding sequence
  source 1..303: mol_type = other DNA
atgcagaaaccctgcaaggagaatgagggaaaaccaaagtgttcggtgccaaagagggaggagaaaaggccttatggggagttcgaaagacagcagactgagggcaacttcaggcagcgcctgctccagagcctcgaagagttcaaagaggacattgactatcgccatttcaaggacgaggagatgaccagagaaggagatgagatggaacgctgccttgaagagattcgtggtttgaggaagaaattcagggctctacacagtaatcaccgccatagtagagatcggccataccccatttag

SEQ ID NO: 244338 - DNA, 303 bp, synthetic construct
  misc_feature 1..303: note = Description of Artificial Sequence: Synthetic coding sequence
  source 1..303: mol_type = other DNA
atgcagaaaccgtgcaaagagaacgagggcaaacccaaatgctccgtgcccaagcgggaagagaaacggccttacggtgaattcgagcgacagcagaccgaaggcaactttaggcagaggcttctgcagtctctggaggaattcaaggaagatatagattaccgacatttcaaagacgaagagatgacaagggagggcgatgaaatggaacggtgtttggaggagatacgcggtctgcggaaaaagttcagagctctccacagcaaccaccgccacagcagggaccgaccctatcctatctag

SEQ ID NO: 244339 - DNA, 291 bp, synthetic construct
  misc_feature 1..291: note = Description of Artificial Sequence: Synthetic coding sequence
  source 1..291: mol_type = other DNA
atgtacgtgaagttgatatcatcagatggacacgaattcatcgtgaagagagagcatgcactgacctccggtaccatcaaggctatgctgagtggtccgggacagtttgcagagaacgaaacgaacgaggtcaacttcagagaaatccccagtcacgttttaagtaaagtgtgtatgtactttacctataaggtcagatacactaattccagtactgagatcccagaattccctatcgcaccggagattgcgttagaactgctgatggccgctaacttcctggattgctag

SEQ ID NO: 244340 - DNA, 339 bp, synthetic construct
  misc_feature 1..339: note = Description of Artificial Sequence: Synthetic coding sequence
  source 1..339: mol_type = other DNA
atggatggtgaggaaaaaacgtacggagggtgcgagggccctgacgctatgtatgtgaagcttatatcaagcgacggccacgaattcattgtgaagcgtgagcacgcgttgaccagcgggacgatcaaggccatgctgagcgggccagggcagttcgcagaaaacgagaccaacgaggtgaatttcagggagattcctagtcacgttctgtccaaagtctgcatgtactttacctacaaggtgcggtatacgaactcttccactgagattcccgaattcccgattgcgcctgaaatcgccctggaacttctcatggccgctaactttcttgactgctag

SEQ ID NO: 244341 - DNA, 339 bp, synthetic construct
  misc_feature 1..339: note = Description of Artificial Sequence: Synthetic coding sequence
  source 1..339: mol_type = other DNA
atggacggggaagagaagacctacggaggttgcgaaggcccagatgcgatgtacgtcaaacttattagctcagacggacacgaattcattgtcaagcgcgagcacgcactgacgtcaggcaccatcaaggcaatgcttagcggtccaggtcaattcgccgaaaacgagaccaacgaggtcaattttcgggaaattcctagccacgtactttctaaagtgtgtatgtatttcacttacaaagtccgatacacaaattcctccacggaaatccccgagtttcctattgcccctgaaattgccctggagctactgatggccgcaaacttcttagactgttag

SEQ ID NO: 244342 - DNA, 339 bp, synthetic construct
  misc_feature 1..339: note = Description of Artificial Sequence: Synthetic coding sequence
  source 1..339: mol_type = other DNA
atggacggtgaggagaagacctacgggggttgtgaaggcccagatgcaatgtacgtaaagctgattagcagtgacggacacgaattcattgtgaagagggagcatgcacttacctcagggaccattaaagctatgctcagtggcccagggcagtttgccgaaaacgagaccaatgaagtcaattttagagaaattccttctcacgtactctccaaggtttgtatgtatttcacgtacaaggttcgatataccaactcatccaccgagatccccgaattcccaattgctccagaaatcgccctggagctgctaatggcagcaaacttcctcgactgttag

SEQ ID NO: 244343 - DNA, 339 bp, synthetic construct
  misc_feature 1..339: note = Description of Artificial Sequence: Synthetic coding sequence
  source 1..339: mol_type = other DNA
atggacggagaagagaagacgtacgggggttgcgagggacccgatgccatgtatgtaaagctgatatcctcagacggtcatgaatttattgtcaaaagagagcatgccttgacctctgggaccattaaagcaatgctgtctggaccaggacagttcgctgagaacgaaacaaatgaggttaatttccgggaaattcctagtcatgtcctatcaaaagtgtgcatgtactttacatacaaagtgcggtacaccaattcctccacagagatccctgagttccccatcgctccagaaatagccctcgaattgctaatggcggctaatttcctggattgctag

SEQ ID NO: 244344 - DNA, 339 bp, synthetic construct
  misc_feature 1..339: note = Description of Artificial Sequence: Synthetic coding sequence
  source 1..339: mol_type = other DNA
atggacggcgaagagaaaacctacggcggatgcgagggcccagacgcaatgtatgtgaagctgatctccagcgatgggcatgagtttattgtcaagcgcgagcacgcattgacatctggcacaataaaggcaatgctgtcggggcctgggcagttcgccgaaaatgagacaaacgaggtgaacttcagggagatcccgtcacacgtgcttagcaaggtgtgtatgtattttacatataaggtgcgatatacgaactccagtaccgaaatcccagagtttcctatcgcccctgagatagcgctggagttgctcatggctgcgaattttctggattgctag

SEQ ID NO: 244345 - DNA, 339 bp, synthetic construct
  misc_feature 1..339: note = Description of Artificial Sequence: Synthetic coding sequence
  source 1..339: mol_type = other DNA
atggatggggaggagaaaacctatgggggttgcgagggtcccgacgccatgtatgtgaagttaatcagctccgacggacatgagtttatcgtcaagagggagcacgccctgacctctggaaccatcaaggctatgctgagtggcccaggtcagtttgccgagaatgagaccaacgaagttaattttcgggagatccccagtcatgtgctgtccaaggtgtgcatgtattttacttacaaagtgcgctacacgaatagtagtacggaaatccccgagttcccaattgctcctgaaatcgcactagagcttctaatggctgcgaacttcttggattgttag

SEQ ID NO: 244346 - DNA, 2397 bp, synthetic construct
  misc_feature 1..2397: note = Description of Artificial Sequence: Synthetic coding sequence
  source 1..2397: mol_type = other DNA
atgcacgggggacggtcctgcggtccgaggacccggagggaaccaagttcaggggaggaagccgcacctgttacagccatggctgccgagagcgctctgcaggtggtagaaaaactgcaggcaagactcgccgctaatccggacccaaagaaattgctcaaatatctgaagaagttatcaacactgcccattacagtggacatcctcgccgaaacgggcgtgggcaaaaccgtcaactctctcaggaaacacgagcatgttggatccttcgcaagggacttagtagctcagtggaaaaaattagtcccagtcgaaagaaacgccgagcccgacgagcaggacttcgagaaatccaactcacgcaaacgcccaagggatgccctacaaaaagaggaggagatggaaggtgactaccaggagacctggaaggcgaccggtagtcggtcatactccccagaccataggcaaaagaagcatcgaaagctgagcgagcttgaaaggccccacaaggtctctcatgggcatgaacgcagagatgagagaaagcgctgccaccgaatgtcccctacgtactctagtgaccccgagagtagcgactatgggcatgtgcagtctcccccttcatgtacgtcccctcatcagatgtacgttgatcattatagaagcctggaggaggaccaagagcccatcgtaagccatcagaaacctggtaagggccacagcaatgccttccaggaccgcctcggcgcatcacaggagagacaccttggagagccacacggtaaaggtgtggtttcccagaacaaggagcataagtcatctcataaggataaaaggcccgtcgatgcaaagtcagacgagaaggctagcgttgtttcgagggaaaaatcacacaaggccctttcaaaagaggagaacaggcgtccccctagcggagataacgcacgggagaagcctccgagcagcggagtgaagaaggagaaagatcgcgaggggagctctttgaaaaaaaagtgtctgcctcctagcgaagccgcttcagacaaccacctcaagaagcctaagcatcgagatcctgagaaagcaaagttagacaaatctaaacagggcctcgatagttttgataccggaaaaggggcaggtgatctgctccccaaggtgaaggaaaagggttcaaacaacctgaagacacctgaaggaaaggtaaagaccaaccttgaccgtaaaagccttggtagtctgccaaaagttgaggaaaccgatatggaagatgagtttgaacagccaacaatgagctttgaaagttacctctcatatgatcagcctcgcaagaagaagaagaagatagtaaaaacgtctgctaccgccctcggagacaagggtcttaagaaaaacgattctaagtccaccggcaagaaccttgattctgtgcagaaacttcccaaagtcaacaaaacaaaatctgaaaagccggcaggggcagacctcgccaaactgcgcaaagtcccagacgtgcttcccgttttacctgatctccctctgcccgctatccaggcaaattaccggccactgccctctctcgagctcatctccagcttccagcccaagcgcaaggccttctcatctccgcaggaggaagaagaggccggtttcactgggagacgcatgaatagtaaaatgcaagtgtatagcggaagcaaatgcgcatacttgccaaagatgatgacattacaccaacagtgtatcagagtcttaaaaaacaacatagactctatcttcgaagtcggcggtgtaccttactcggtactggagcctgtgctagaacggtgcactccggaccaactgtaccgaatcgaggagtataaccatgtgcttatagaggaaacagaccagctatggaaggtacactgccatagagatttcaaggaggagagaccagaggagtacgagagctggagagagatgtacctgcgactgcaggacgcacgcgaacagcggctgcgtgttctgaccaagaatattcagtttgcccacgcaaataagccgaaagggagacaggcgaaaatggcgtttgtcaacagcgtagcaaaacccccaagagacgttcgcagacgacaagagaagtttggaaccggaggtgccgcagtccctgagaaaattaagatcaaacccgcaccatatcctatggggtcctctcacgccagcgcttccagcatcagctttaaccccagccccgaagagccagcgtatgatggaccatccacgtcctctgcccacctcgcccctgtggtgtcatccacagtcagttatgaccctagaaagcctaccgtcaaaaagatcgcacccatgatggccaaaaccatcaaggcttttaaaaataggttctctcgccgttag

SEQ ID NO: 244347 - DNA, 3297 bp, synthetic construct
  misc_feature 1..3297: note = Description of Artificial Sequence: Synthetic coding sequence
  source 1..3297: mol_type = other DNA
atggcagagcgcggtggggacggcggtgagtctgagagattcaatcccggagaactgcgaatggcccagcagcaggcccttcgcttccggggtcctgcccctccccctaacgccgttatgagagggccacccccattaatgagaccacctccccctttcggaatgatgagaggacctcctccacctccgaggccccctttcggccgtcctccatttgatccgaacatgccccctatgccaccaccaggcggaatcccccctcctatggggccaccacacctccaacgcccacccttcatgccaccccctatgagctccatgcccccaccccctgggatgatgtttccacctgggatgcccccagtgactgccccagggactcctgccttgccgccaaccgaagagatctgggtggagaacaagacccccgatggcaaagtttactactacaacgcccgtactcgcgagtctgcctggacaaagccagatggagttaaggttatccagcagagcgagctgacccccatgctggccgctcaggcacaggtgcaggcacaggcccaggcacaagcgcaggcgcaggcccaggcacaggcccaagcacaggcccaggcccaggctcaggcccaagcccaagcccaggcccaggcgcaggcacaggcccaggcacaagcccaggcccaggcacaagcacaggcacaggcccaggcccaggcacaggctcaagtacaagcgcaagtgcaggctcaggtgcaagcccaggcagtaggagcgtcaactcctactacatcaagtcccgcacccgctgtgagcacaagtacaagcagttctactccctccagcacaacatccactacaacgacagctacatcagtcgcccaaactgtgagcaccccaaccacccaggatcagaccccttcttccgctgttagtgtagccactccgactgtttctgtgtctacccccgctccaactgccactccagtgcaaaccgtgcctcagccgcatccccagaccctgcccccagccgtgccccactctgtcccacagcctactacggccatcccagcgttcccgccagtcatggttccgccattccgcgtgcccttgcctgggatgcctattccattgccaggcgtagccatgatgcagatcgtgagttgcccctacgtcaagactgtggcgacgacgaagactggcgtgctgcctggtatggctccccctattgtgcccatgatccatcctcaggtcgccatcgctgcatctcccgctaccctcgccggagcaacagctgtcagcgagtggaccgagtacaagacagccgatggtaaaacatattactataacaaccggacactcgaatcgacatgggagaagcctcaggaattgaaagagaaggaaaaactcgaggagaaaatcaaagagccgattaaggaaccatcagaggaacctctgcctatggaaaccgaggaggaagacccaaaggaggaacctataaaagaaataaaggaggaacccaaggaagaggagatgaccgaagaagagaaggccgctcagaaagccaagcctgtcgcaaccgcccctatcccgggaaccccgtggtgtgtggtatggaccggcgacgagagggtgtttttctacaaccctactacgcgcctttccatgtgggacaggccagacgacctgattggcagggcagatgtggataaaattatccaggaacctccccacaagaagggcatggaggaactcaagaagttacgtcaccccacaccaacaatgctgtccattcaaaagtggcaatttagcatgagcgcgattaaggaggagcaggagctaatggaggaaatcaacgaagacgaacccgtaaaggcgaaaaaaagaaagcgagacgacaataaggatatcgacagtgagaaagaggctgcaatggaagccgaaatcaaagctgcccgtgaacgcgctattgttccactcgaagcaagaatgaaacagtttaaggacatgctgctggaaagaggtgtgtcggctttttccacatgggagaaggagctgcacaagatagtgtttgacccccgttacctgctgctaaatcccaaagagagaaagcaggtgtttgatcaatacgtaaagaccagggcagaggaagagcgtcgggagaaaaaaaataagattatgcaggcgaaggaagactttaaaaagatgatggaggaggccaagttcaatccgagagccacattctctgagttcgcggctaagcatgctaaggattctcgttttaaagctatcgaaaaaatgaaagacagggaagcgttgttcaatgaattcgtcgcagctgctcgaaaaaaagaaaaggaggatagcaaaacgcgcggtgaaaagattaagtccgacttcttcgagctgctgtccaaccaccacctggattcgcagtctagatggagcaaggtcaaagacaaggtcgagtcggatccgcgatacaaagccgtggactcttcgtctatgcgcgaggacctctttaagcagtatatagagaagattgcaaagaaccttgactcagagaaggagaaggaactggaaagacaggccagaatcgaagcatcattgcgagaaagagagcgtgaggttcagaaggctcggtccgaacagacaaaggagatagatagagagcgggagcaacataaaagagaggaggccatccagaacttcaaggctctgcttagtgacatggtgcgttcgagcgatgtttcgtggagtgacactcgcaggactttgcgtaaagatcaccgctgggaatctgggagcctgctggagagagaggaaaaagaaaaactgtttaatgagcacatcgaggctctcaccaaaaagaaacgcgaacacttcagacagcttctggatgagacgtccgccatcaccctgacgagcacttggaaggaagtcaagaagatcatcaaggaggatccgcgatgcatcaaattctcttccagtgataggaagaagcagagggagtttgaggagtatattagggacaaatatattactgccaaggccgatttcagaacgttactgaaggagacgaagtttataacctaccggtctaaaaagctgatccaggagtctgaccaacatctgaaggatgtggagaagattctccagaatgacaaacggtatctggtgctcgactgcgtgccagaggagcgcaggaagctgattgtagcttatgtagacgatctcgacaggcgcggacccccaccacctccaaccgcctcagagcctacacggaggtcaaccaagtag

SEQ ID NO: 244348 - DNA, 3234 bp, synthetic construct
  misc_feature 1..3234: note = Description of Artificial Sequence: Synthetic coding sequence
  source 1..3234: mol_type = other DNA
atggctgagcggggtggcgatgggggagaatcagagaggttcaatcctggagagcttaggatggcgcagcagcaagctcttcggttccgtggacctgcaccgccacccaacgcggtaatgcgaggcccaccaccacttatgcggccaccgccaccctttggcatgatgaggggaccccctccacccccacgccctcccttcgggaggccccctttcgatcccaacatgccacctatgccaccccctggcggaatccctcccccaatggggcctccccatcttcagcgccctccatttatgcctcctcctatgtcatcgatgcctcccccaccgggtatgatgtttccacctggcatgccaccggtgaccgcgcctgggacccctgccctgccccctaccgaggagatttgggtcgaaaacaaaacaccagacgggaaggtgtattattacaatgctcgaacccgcgaaagcgcttggaccaagcctgacggagtcaaggtcattcagcagtctgagctgactccgatgctcgcagcgcaggcccaggtgcaggcccaggctcaagcccaggcccaagcccaggcccaagcccaagctcaagcccaagcccaagcccaagcacaggcacaggcccaggcccaagctcaggcacaggcacaggctcaggcacaggctcaggctcaggctcaggctcaggcccaggctcaggcccaggcccaggctcaggttcaggcgcaggttcaggcacaggtccaggcccaggcagtgggagcctcaacaccgacaacctcttcacctgcccctgccgtgagtacctctacctccagctcaacgccatcttcaactacatctactaccaccaccgccactagcgtggctcaaacggtgagcactccaaccacccaggaccagaccccatcgtccgcagtgtccgtagcgacaccaactgtctcagtgtccactccagccccaactgccactccagtacagacggtcccgcaacctcatccacagaccctgcctcccgcagttcctcattcagtgccgcagcctacaacggccattcccgcttttcctcccgttatggtgcccccatttagggtccccctcccaggtatgccaattcctttacctggtgtcctccccggaatggcccctcccattgtaccaatgatccatccccaagtggccatcgcagccagccccgcaacgttagccggagccaccgctgtctcggagtggaccgagtacaagaccgcagatggtaaaacttactattataacaaccgtaccctggagtccacctgggaaaaacctcaggaactgaaggagaaagagaaattggaggagaagatcaaagaacctatcaaggagcccagcgaagagcctctgccaatggaaactgaggaagaggaccccaaggaagagcccattaaggaaattaaagaagagcccaaggaggaggagatgaccgaggaggagaaagctgcccagaaggctaagcccgtggctaccgcacccattccagggactccctggtgtgtggtttggacaggtgatgagagagtatttttttacaacccaaccacaaggctatcaatgtgggatcgacctgacgacctgattggtagagccgacgtggataaaataattcaggaacccccacataagaagggaatggaagaattgaaaaaattgcggcaccccacacctactatgttaagtatccagaagtggcagttctctatgagcgccattaaggaagaacaggagctcatggaggagataaacgaagatgagcctgttaaggctaaaaaaagaaagcgtgacgacaataaggacatcgacagcgaaaaggaggctgcaatggaggccgagataaaggccgcacgggagcgcgctatagttccgcttgaagctagaatgaagcagttcaaagatatgctgctggaaagaggggtttctgcattttctacatgggagaaagagttgcataaaattgtctttgaccccagatacctgctgttgaacccgaaagaaaggaagcaggttttcgaccagtacgtgaaaacacgcgctgaggaagagcgaagggaaaagaaaaataaaatcatgcaggcaaaagaagacttcaagaagatgatggaggaagctaaatttaacccgagggcaaccttctcagaattcgccgcaaagcacgccaaagacagtcgtttcaaggccattgagaaaatgaaagacagagaggctctgtttaatgaatttgttgccgcagccagaaagaaagaaaaagaagactcaaaaactagaggagagaaaatcaagagtgacttctttgagcttttgtctaaccaccatcttgactcccagagtaggtggagcaaggtaaaggacaaggtggagtctgacccgcgttacaaagcagtcgattccagctctatgagagaagacttattcaagcagtatattgagaaaatcgccaagaatctggacagcgagaaggagaaggagctcgagcgtcaagctcgcatcgaagcatcgttgagggaacgcgagagggaggtgcaaaaggccaggtccgaacagactaaagaaatcgatagggaaagagagcagcataagcgagaggaggctatccagaacttcaaggctctgttgagcgacatggtgcggtcgtctgacgtctcatggtctgacacaaggcggaccctccgaaaagaccaccgctgggaaagtggttcgctccttgagagggaggagaaggaaaagttgtttaatgagcatattgaggcgttgactaaaaaaaagcgagagcacttccgtcaactgttggacgagacctcagccattactctcacatccacttggaaggaggtgaagaagattatcaaggaggatccacgatgcatcaaatttagctcaagcgacagaaagaagcagagggagttcgaagagtacatcagagataagtacatcaccgctaaggctgacttcagaactctgctgaaggagactaaattcatcacttatcggtccaaaaagctgattcaggaaagcgaccagcatctcaaagacgttgagaaaattctgcaaaacgacaagagatacctcgtgctggactgtgtaccggaggaaaggcgcaagctcattgttgcctacgtcgatgacctcgacaggcggggtcctccacctccgcctacagcctccgagcctactaggcggtcaacaaagtag

SEQ ID NO: 244349 - DNA, 2049 bp, synthetic construct
  misc_feature 1..2049: note = Description of Artificial Sequence: Synthetic coding sequence
  source 1..2049: mol_type = other DNA
atgaatccacagcagcagcgaatggcagctataggtaccgataaagagctttccgacctgctggacttttccgccatgtttagtccgcctgtcaattctggaaagactagaccgacaaccttgggctccagccagttctctgggagtggcatcgatgaacggggagggacaacctcctggggtacgagtggtcagcctagcccgagctacgattcttccagaggtttcaccgattccccccattacagcgaccatctcaatgactcacgactgggggctcatgaaggcctaagcccaaccccctttatgaacagcaatctaatggggaagacttccgagcggggatccttcagcctgtattctagagatactgggcttcccggatgccaaagctccctgctgcgccaggatctgggtctgggcagtcctgcccagttaagctccagcgggaagcccggaactgcttactatagcttctcagccacctcatctaggagacgccctttgcacgactccgctgccctcgatcctcttcaggccaagaaagttcgaaaggtgcccccaggcctgccctcgagcgtctacgcgccatcacctaattccgacgatttcaacagagagtccccatcctatccatctcctaagcctccaaccagcatgttcgcctccaccttctttatgcaggatggaacccataactcttcagacttgtggtcaagttcaaacggaatgtcacaacccggatttggcggaattctcggcacatccactagtcacatgtcccagtcttcaagctatggcaacttgcattcccacgataggctatcatacccgccacattctgtatcacccactgatattaacacaagtcttcctcctatgagcagcttccaccgtggttctacgtcttcctccccttacgtggccgcttctcatacccctccaattaacggtagcgattcaatcttgggcacacggggaaacgctgcagggtcaagtcagaccggagatgcattagggaaggccctcgccagcatttactcacccgatcatacctcctcaagcttcccctcaaaccctagtacaccagtcgggagtcctagcccactgacaggtacgagccagtggccaagaccgggagggcaagccccttcttccccctcttatgagaacagcctacactccctgcaatcacgcatggaagatcgactggatagactggatgacgcaattcacgtcctgaggaaccatgctgtgggcccaagcacaagtcttcctgctggccactccgacattcactcgctgcttggcccttcccataatgcgcctatcgggagcctcaactccaactatgggggttcaagtctggtcgccagcagtcggagcgcgtcgatggtggggacccatagagaggactccgtttctcttaacggaaatcactctgtcttaagctccacagtgactacaagtagtaccgatctcaaccataaaacccaggaaaactatagaggaggcctgcagtctcaaagcggcacggtggtgacgaccgagattaaaactgagaataaggaaaaagatgagaaccttcacgagccgccaagttctgatgacatgaaatcagatgatgagagtagccagaaggacatcaaggtgtctagtcggggtaggaccagctcaacaaacgaggacgaggatctgaatcctgagcagaagatagaacgggaaaaagagcgaaggatggctaataacgctagagagcgactgagggttcgagacatcaacgaggcgtttaaagaactcgggaggatgtgtcagctgcacttaaagtcagagaaaccacagaccaagttgctgattcttcatcaagctgttgcggtgattcttagcctggagcaacaggtcagggaaagaaacctgaatcccaaggccgcatgtctcaagcggagagaggaggagaaggtatccgccgtctctgcggaaccccctacaactctccctggcacgcaccctggcctgtctgaaacaacaaaccctatgggtcatatgtag

SEQ ID NO: 244350 - DNA, 2121 bp, synthetic construct
  misc_feature 1..2121: note = Description of Artificial Sequence: Synthetic coding sequence
  source 1..2121: mol_type = other DNA
atgaacccacaacagcagagaatggccgctataggtactgacaaggagctcagcgatctgctcgatttctcagccatgttctcacctcctgtgaactccggcaagacacggccaacaacactcggatcgtctcaattttcggggagcggtattgatgaacgtggcggaactacatcttgggggacttccggacaaccgtcaccatcctatgacagcagtaggggtttcactgatagtccccactatagcgaccacctgaatgacagtcggctgggcgcacacgagggtctgtcccccacgcccttcatgaattccaacttgatgggcaaaacatccgaaaggggctcattttcactgtactcccgcgacacaggtctgccgggttgccaaagcagtctactgagacaggacctcggccttggaagtcctgcccagttgagctcctctggcaagcccggaaccgcttactacagtttttcagcaacctcttccaggagacgaccactgcacgattccgccgcactcgatccattgcaggcaaagaaagtgcgcaaagtgcctccagggttgccgagcagtgtgtatgctcccagcccgaatagcgatgattttaacagggagtccccctcatatcccagtcccaagccccctacctctatgtttgctagtaccttttttatgcaggatggaacccataattcctctgacctatggtcaagttctaatggcatgtctcagcccggttttggagggatcctgggcaccagcacttcacatatgtctcagagctccagctatggcaatctgcacagtcacgataggctttcctacccccctcacagcgtatcaccaactgacatcaacacaagtctgcctcccatgagctccttccatagaggttcaacctcatcatcaccatatgtcgctgcctcccacactcctccaattaatgggtccgacagcattcttggtacgagaggcaatgctgcaggcagttcccaaaccggcgatgctcttggaaaggctctcgcgtctatttactccccagatcacaccagttcaagcttccctagcaatccctctactccagtaggatcgccatctcccctgactggcacgagccagtggccaaggccagggggtcaggctccaagttcaccaagttacgagaacagcttgcactctcttaagaatcgggtcgagcagcagctgcacgagcatctccaggatgctatgtcttttttaaaggacgtgtgtgagcagagcaggatggaagatcggcttgacaggcttgacgacgccattcatgttctgcgaaaccatgccgtcgggcctagcactagcttgccagctggccacagtgatattcattccttactgggaccatcccataatgcacccatcgggtcactcaactccaactatggtggcagtagtctcgtggcttcatcccgtagtgctagcatggtaggaactcatcgcgaagattctgtgtcactcaatgggaatcacagcgttctctcgagtaccgtgacaacctcctctaccgaccttaatcataaaacacaagaaaattatcgcggtgggctgcagtctcagtccgggaccgtcgttactacggagattaagaccgagaacaaggagaaagatgagaacctgcacgagccaccttccagtgatgatatgaagagcgatgatgagagctctcaaaaggatattaaggtgtcatctcgcggtcgtacatcctccactaacgaggacgaggatctgaatccagagcagaagattgaacgcgagaaggagaggagaatggccaacaacgccagggagcgactccgtgtgcgggacataaatgaggctttcaaggagctgggcagaatgtgccagctgcacctcaaaagtgaaaagccccagaccaagttactaattctgcaccaagccgtggcagtaatcctcagtctggaacagcaagtcagggagcgaaacttgaatcccaaggcagcatgtctcaagaggcgggaagaggagaaggtgtctgccgtgtcagccgaaccccctacaacgctcccgggtacccatcctgggctatccgaaaccaccaaccccatgggccacatgtag

SEQ ID NO: 244351 - DNA, 2109 bp, synthetic construct
  misc_feature 1..2109: note = Description of Artificial Sequence: Synthetic coding sequence
  source 1..2109: mol_type = other DNA
atgaatcctcagcagcaaaggatggctgcaattggcacagacaaggagctgagtgatctgttagacttttctgccatgttcagcccacccgtcaattcaggaaagacacgcccaaccaccctggggtcctcacaattctccggatctggaacaatccacgaaatgaagcagttaaattcgaaggccaggcaaaagggacagagaatcaaagggttcacagattcaccacattattcggaccacctcaacgacagcagacttggagctcatgaagggctcagtcccacaccctttatgaattctaatctcatggggaaaacctcggaacgaggaagtttctcactgtactctcgcgacaccggcctgcccggatgtcagtcaagcctgcttcgtcaggatctgggcctgggatcgcctgcccagctctcttcttcaggcaaacctggcaccgcatactactcattttcagcaacctctagccgtcggaggccattgcatgactccgcagctctggacccgttgcaggcaaagaaagtccgtaaggttcctcccggtctcccctccagcgtgtatgctccctcccccaattccgatgacttcaatcgcgaatctccctcctatcctagtcctaagcctcctacctcgatgttcgcttctactttttttatgcaggatggcacccacaatagctccgatttatggtcatccagcaatgggatgagccagccagggtttggcggtatcctcgggacgtctacatctcacatgtcccagagctcatcctacggcaatctccactctcacgataggcttagctatccaccacacagtgtctctccgactgatatcaatacttcactgcctccaatgtcatctttccaccgagggagcaccagctcttctccttatgtagccgcaagtcacacaccccctatcaacggctcagatagcatcctcggcactcgagggaacgcggcaggctcttcgcaaaccggagatgctctgggcaaggctttagccagcatctactcgcctgatcacaccagcagcagcttcccttccaaccccagcacgccagttggctctcctagtcctttgacggggacttctcagtggcctcggcctgggggacaggcccctagctctccaagttatgaaaacagccttcacagtttgaaaaaccgcgtggagcagcaactgcatgaacatctgcaggacgccatgtctttcctgaaagacgtctgcgagcagtcccgaatggaggataggctggacaggctagacgatgcaatccatgtattgaggaaccatgccgttgggcctagtacctcccttcctgctggacacagcgatatccattccttactggggcctagccataatgcacccattgggagcctgaattctaactacggaggcagttcacttgtggcaagttctaggagtgcttcaatggtgggcacccatcgggaggacagtgtttccttgaacggcaatcactctgtgctgtcctcaactgttaccacaagctctaccgatctgaaccataaaacacaggagaactatagaggagggctgcagtcgcagtcaggtactgtggtgaccaccgagatcaagactgagaataaggaaaaggatgagaacctccacgagcccccatcatcagatgatatgaagagcgacgacgagtcctctcagaaggatatcaaggtgtcttcaagggggagaacaagcagcaccaatgaagacgaagatcttaatccggagcagaaaatagagagggaaaaagagcgacgcatggccaacaacgccagggaaagactaagagttagggacattaatgaggccttcaaggagctgggacggatgtgccaactgcacctcaagtcagaaaaaccacagactaaattgctaatcctccatcaggccgtggcggtcatcttaagcctggaacagcaggttagagaaagaaatctgaaccccaaggcagcgtgtctcaagcgccgtgaagaagaaaaggtatccgcagtcagcgccgagcctccgaccactctgcccggtacccatcccggactttctgagactaccaatccgatgggacatatgtag

SEQ ID NO: 244352 - DNA, 1341 bp, synthetic construct
  misc_feature 1..1341: note = Description of Artificial Sequence: Synthetic coding sequence
  source 1..1341: mol_type = other DNA
atgggaaaaaggtatatgcaccatcctcagattcagatgattagcactgtgaacctgttggtcatccaccttctttcccaccagccagtctgcagcttagctctgtccttgtgcaagtcatatccccctcattctgttagcccaacggacatcaacaccagtctgccacccatgagctcctttcaccgaggatccacttcttcctcaccatatgtagcagcttcacacactccccctattaatggctcagatagcattctgggaactcggggtaatgccgctggcagctcccaaacgggggatgcactgggcaaagcgttagccagcatctactcacctgaccacacgagctcttcttttccctctaatccatctactccagtgggaagcccctcacccctgactggcactagtcagtggccccgtcctgggggacaggccccatcttccccctcttacgaaaacagtctgcactctctgcaatctcgaatggaggacaggctggatcgacttgatgatgctatccacgtccttagaaatcatgccgtggggcctagcactagtctgccagcaggccattccgatatacactctttactcgggccaagccacaatgccccaataggctccctgaattcaaactacggaggctcttctctcgtcgcctctagcaggagtgctagtatggttggtacccaccgtgaagattctgttagtttgaatggtaaccacagtgtgctgtcatccaccgtcacaaccagcagtactgacctgaaccataaaacgcaggagaactaccgtggaggactgcagtcgcaaagcggcacggtggtcacaacggaaatcaaaacggagaataaggagaaagacgagaacctccatgaacccccatcttctgacgatatgaagagtgacgacgaatccagccagaaggatattaaggtttcaagccggggaagaactagctcaactaacgaagacgaggatctgaaccccgaacagaagattgagcgcgagaaggagagaagaatggctaacaacgctagagagagactccgcgtgagagacataaatgaggcattcaaagagctcggccgtatgtgccagctccatctgaagtctgagaagccacaaacaaagttgctgatcctgcaccaagccgtggctgttatactgagcctggaacagcaggttagggaacgtaatctgaacccgaaagccgcatgcctcaaacgaagagaagaggaaaaagtgtctgccgtaagtgccgagccaccaaccactctgccaggcacccatcccggtctgagtgaaacaacaaaccccatggggcatatgtag

SEQ ID NO: 244353 - DNA, 2046 bp, synthetic construct
  misc_feature 1..2046: note = Description of Artificial Sequence: Synthetic coding sequence
  source 1..2046: mol_type = other DNA
atggccgcattcagcgtgctgcgccctcgagtgcccggaagctctggaacctgggcggcagaccccgatgcctccacagcagtcagccctagcctgagatttggtgggagggagcctgcaagacctacacggggtggagccaccaaatggcccaagatgaatccccagcagcagcggatggcggctatcgggacagacaaagagctgtctgacctactggatttcagcgccatgttctcacctcccgtgaacagcggaaagacgcgacctaccactttagggagctctcagttctctggttctggaattgacgaacgtgggggtactacttcctggggtacctccgggcaacccagtccgtcctatgacagttctcgcggatttaccgattctccccactattcagaccatttgaacgacagtaggttaggagctcacgaggggctatcccccaccccttttatgaatagtaacctgatggggaaaacttccgagcgtggatcattcagcctgtactccagggataccggtctccccggatgtcagagtagcttactgaggcaggacctaggattgggttcgccagcccaacttagcagctctggcaaaccaggaactgcttactactccttctcagcaaccagctccagacgccgaccactgcacgatagtgccgctctggatcccctccaagccaagaaggtccgtaaagtaccgcctggactccctagctctgtttacgccccatctccgaattctgacgactttaaccgagagtcaccaagctatcctagcccgaagccacctacctccatgttcgcatccacatttttcatgcaggatggaactcataattcctccgacctatggagctcaagcaacggcatgtcccagcccggattcggcggtatcttgggtacctcaaccagtcacatgtcgcagagctctagctacggcaacctgcatagccatgaccgcctctcctaccccccacacagtgtgtcacctacagacattaacacttcactgccaccaatgagctccttccacagaggcagcacatccagcagtccgtatgtcgccgctagccacactccacctatcaacgggagcgatagcatacttggcactcgcggaaacgccgctgggtcatcccagactggggatgccctgggaaaagcactcgccagtatatattcaccagatcataccagtagtagctttccctccaatccctccacaccagttggatcgccctctccactcactggaacatcccagtggccaaggccaggcggacaagcccctagttcaccctcctacgagaattcattgcattcattgcagtccaggatggaggatagactggaccgcctggacgatgccatccacgttttgagaaaccatgcggtaggaccaagtacaagtctgcccgcaggtcacagcgacatccacagcctgctcgggccatcccacaatgccccaataggctccttgaattccaactatggaggcagctcacttgtggcctcgtctaggtccgcaagcatggtggggactcatagagaggacagtgtgtctttgaatggaaatcactcagtcctgtcctcgactgttacgacttcctccaccgacctaaaccataagacacaggaaaattaccggggaggtctacagtcccagtcagggacggtggtcactacagagatcaagacagagaacaaggagaaagatgagaacctgcatgaacctccttccagtgatgatatgaaatcagatgacgagtccagccaaaaagacatcaaagtgtctagtcgcggtcgcacaagttcaaccaatgaggatgaagacctaaaccccgaacagaagatcgagcgggaaaaagagaggcgaatggcaaataacgcacgggagcgccttcgcgtgcgagatatcaacgaggccttcaaggagcttggtcggatgtgtcaattgcacctgaaaagtgaaaaaccacagaccaaattactgatcctgcaccaggcagtgacaaccatcggcccttag

SEQ ID NO: 244354 - DNA, 885 bp, synthetic construct
  misc_feature 1..885: note = Description of Artificial Sequence: Synthetic coding sequence
  source 1..885: mol_type = other DNA
atgtcctttctgaaggacgtgtgtgagcagtccaggatggaagatagacttgataggctggacgatgccatccatgtacttcgcaaccatgcggtggggccttctacgtccctacccgcagggcactccgacattcactctctgctgggtccttctcacaatgcacctattggttccctcaactcaaattacggcggaagcagcctggtggcctcttcccggtccgcgagcatggtcggaacgcatcgagaggactccgtgtccctcaacggcaatcattccgtgctaagctcgactgtgactaccagttccacagatctgaaccacaaaacccaggaaaattacaggggcggtctgcagagccagagtggcaccgtggtcactactgaaattaagactgagaacaaggagaaagatgaaaatctgcatgaaccaccttcaagcgatgatatgaagtcagatgatgaaagcagtcagaaggatattaaagttagttcaagaggtcgcacctctacaaacgaggacgaagatctcaacccggaacagaagatcgaacgcgagaaggagcggagaatggcaaataacgctcgtgagcggctgcgggtcagagacattaatgaggcattcaaagagctggggagaatgtgtcagttgcacctgaagagtgagaaaccccagaccaagctgctgattctgcatcaggccgtggccgtgatcctgtctctagagcaacaggttagggagcggaacctcaacccgaaagcagcatgcctcaaacgcagggaagaagaaaaggtgtctgctgtaagcgccgaaccacctaccaccctgccaggtactcaccccggtctctccgaaactactaacccaatggggcatatgtag

SEQ ID NO: 244355 - DNA, 1611 bp, synthetic construct
  misc_feature 1..1611: note = Description of Artificial Sequence: Synthetic coding sequence
  source 1..1611: mol_type = other DNA
atgtattgcgcctacccagtcccaggtatgggaagcaactccctgatgtactactataacggaaagactgtttatgcaccgagcccaaattccgatgattttaacagagagtcccctagctatccctcacccaaaccgccaacgtcaatgttcgcctccacattcttcatgcaagacggcacacacaattcgtccgatctttggtcctcttcaaatggcatgtctcagcccggatttggcggaatcctcggcaccagcactagccatatgtcccaatcctcatcgtatggaaacctccactcacatgaccgcctgagctatccaccccactccgtgagccctaccgatattaatacctcactacctcccatgagcagtttccacaggggatcgacaagcagctcaccctacgtggcagcatcccacaccccaccgattaacgggtctgactcaattctagggactcgcggaaatgctgcgggttccagccagaccggggacgctctcggcaaagcgctggcgagcatctatagtcctgatcacaccagcagctctttcccatctaatccatctactcccgtgggatctccatctccgctgacaggcactagtcaatggccccgtcctggaggacaggcaccaagttcgccaagctacgagaactcactacattcacttaagaacagagtcgaacagcagcttcacgaacaccttcaagacgccatgtcttttctcaaggacgtctgtgaacagtcccgaatggaggaccgcctcgacaggcttgatgatgctattcacgttctgaggaaccatgctgtgggcccatctacaagtctgccagcaggccactcggatattcatagtcttcttggcccaagccacaacgcccctatcgggtctctcaactcaaactatggagggtcctcactcgtcgcctcttctcggtcagcctcaatggtgggaacacacagggaggacagtgtctctcttaacggcaatcatagcgtactgtcatccaccgtgactacgtccagtaccgatctcaatcacaagactcaggagaactacagaggcggactgcagagccagtcaggaactgttgtcactaccgagataaagactgagaataaagaaaaggacgagaacctgcatgagcccccttcttccgacgatatgaaatccgatgatgaatcctcccagaaagatatcaaggtgagttccaggggtcgtacctcatccactaacgaagatgaagatctcaacccggaacagaaaattgaacgcgagaaggaacggagaatggccaataatgcccgtgagcgtcttagagtgcgagatatcaatgaagcttttaaagaactggggagaatgtgtcaactccatctgaaatctgaaaagccgcagactaagctgctcattttgcaccaggccgttgcagtgattttgagcctggagcagcaggtccgggaacgcaacctgaatccgaaagccgcttgcttgaagcgcagagaggaggagaaggttagcgccgtgagcgctgagccacccacgactctgcctggcactcaccccggtctcagcgagacaactaacccaatgggtcacatgtag

SEQ ID NO: 244356 - DNA, 2049 bp, synthetic construct
  misc_feature 1..2049: note = Description of Artificial Sequence: Synthetic coding sequence
  source 1..2049: mol_type = other DNA
atgaaccctcagcaacagcgaatggctgcaattggaactgataaggaactctcagacctgcttgacttttccgctatgtttagtccccctgttaactcaggcaaaaccaggcctactaccctaggatcttcacagttcagcggtagcggcatagacgaacggggaggcactaccagctggggcacctcggggcaacctagtccttcctacgactctagtcgcggattcacagatagtcctcactattccgatcatttgaacgatagtcgactgggcgcacacgaagggctgtctccaacgccctttatgaattcaaacctgatgggcaagacctcggagagaggatcattcagtctgtacagtagggacactgggctcccaggatgtcagtcctctctattgagacaagacttagggctcggctcccctgcacagctgagcagcagtgggaagcccggaactgcatactatagcttttcggctacgagttcccgcagaagacccttgcacgattccgctgctctggatccactgcaggcaaagaaggtgcgcaaggtgccacccggtttgccttcttctgtgtatgcgccttctcccaacagtgatgattttaaccgcgagagccccagttacccttcgcctaaaccccctacttccatgttcgcctccacatttttcatgcaggatggcacccacaactccagtgacctgtggtcttcttccaatggcatgagccagcctggattcgggggtatcttagggacgtccactagccacatgtcccagtctagcagttacgggaacctgcactctcacgatcggctgagctacccccctcattctgtctctccaactgacattaatacttccctgccccctatgagttctttccataggggcagcacatcttcatctccatatgttgccgcaagtcatacgcctccaatcaacgggtcagactccattttgggcacgcggggaaatgctgcaggctcttcgcagactggcgatgccctcggcaaagccttggccagcatctattcacccgaccatacatcgtcttcattccccagtaacccttcaaccccggtgggcagcccgtcaccccttactggcacatcacagtggcccagaccaggcggacaggcgccaagctcaccttcttacgagaacagcctccactctcttcaatcccggatggaggatcgcctagatcgactggatgatgcaattcacgtgttgcgcaaccatgcggttggaccatccacttctcttcctgctggccactcagacatccacagcctgctgggcccaagccacaatgcacccatcggctcactcaacagcaattatggtggttcaagtctggtggcttcctcacggtcagcctccatggtgggcactcatcgagaggactccgtgtcattgaacggcaatcattctgtgctgtcttccactgttactacatcaagtacagacttaaatcacaagacccaagagaattataggggtggcttacagagccaaagcggaacggttgtcacaactgagattaagacagaaaacaaagagaaggacgagaatctgcatgaaccaccctcctcggacgatatgaaaagtgacgatgaaagttctcagaaggacatcaaagtcagcagccggggaagaactagctccacaaatgaggacgaggatctgaacccggagcaaaagatcgagcgggaaaaagaacgcaggatggcgaataatgccagggagaggctgcgagtgagagacatcaacgaagcttttaaagagctgggacggatgtgtcagttgcatcttaaatcagaaaagccgcagaccaaacttttgatcctgcaccaggctgtggctgtgattctgtcccttgaacaacaggttagggagagaaatcttaatccaaaggcggcttgtctgaaacgtcgagaagaagaaaaggtcagtgcagtgagcgcggaaccacccaccaccctccctggcacacaccctggactgagtgaaactacaaacccgatgggccatatgtag

SEQ ID NO: 244357 - DNA, 1020 bp, synthetic construct
  misc_feature 1..1020: note = Description of Artificial Sequence: Synthetic coding sequence
  source 1..1020: mol_type = other DNA
atgagctccaattcctctacatcgcaatggccgcgaccgggtggccaggctccgtcatcgccctcttatgaaaattcactacacagtttaaaaaaccgggtggaacaacaactgcacgagcacctccaggatgcaatgtccttccttaaagatgtgtgcgaacagtcacgtatggaagatagactcgatagactcgatgatgctattcatgtgctgcggaaccatgctgtaggtccgtccacctcgttgccagcagggcatagcgacatccactccctgctggggccttctcataacgccccaataggttcgctcaactccaactacgggggatcttctttggttgcttcatctcgatccgccagtatggtcgggactcatcgcgaggatagtgtgagcttgaacgggaaccacagcgtcctctcctccactgtcacaacctcatctaccgacttgaaccataagactcaagaaaattaccggggtggactacagtcccagagtggaacagtggtaactacagaaataaagactgagaataaggagaaagatgaaaacttgcacgagcccccttccagcgacgacatgaaatctgacgatgaaagctcgcagaaagacattaaggtcagctctcggggaaggacatccacaaacgaggacgaagacctgaatccggagcagaagattgagcgggagaaagagcgacgcatggctaacaatgccagagaaaggctccgggtccgcgatattaatgaggcttttaaggagctcggacgaatgtgtcagctgcatttgaagtcagagaaaccacagacaaaactgctgatactccaccaggctgtggccgtcatcctctcattagaacagcaggtgcgggaacgcaatctcaacccaaaagcagcctgcctcaagcgccgtgaggaagagaaggttagcgctgtcagtgcagaacccccaaccactctgccaggcacacatcccggactgtccgaaacaacaaatcccatggggcacatgtag

SEQ ID NO: 244358 - DNA, 1341 bp, synthetic construct
  misc_feature 1..1341: note = Description of Artificial Sequence: Synthetic coding sequence
  source 1..1341: mol_type = other DNA
atgggcaagagatatatgcaccatccacagattcagatgatctctacagtgaatctgttagtgattcacctgttatcccatcagccagtttgctctctcgccctgagcctgtgtaaatcgtatcccccacactcagtgagccccaccgatatcaatacctccctcccccctatgtccagcttccaccgcggatcaacctcgagcagtccttatgtggccgcaagtcatacacctcccataaatgggagtgactccatcctgggaacaagggggaacgctgccggatcttctcaaaccggcgatgcgctgggcaaagcattggcgtccatttatagcccggatcatacatctagctcatttccatcaaacccaagtaccccagtgggcagtcctagtccacttaccggtacgtctcaatggcccagaccgggtggacaggctccgtcctccccatcctatgagaatagcctgcatagcctgcaaagcagaatggaggatagactagaccggctggatgacgccattcatgtgttgaggaatcacgccgtaggtccaagcacaagcctgcctgccggtcacagtgacattcactccttacttggccctagtcacaacgcaccgatcggtagcctcaacagtaactatggcggaagctcacttgtggcctcatccagaagcgcatcgatggtagggacccatcgcgaggattcagttagcctgaacgggaatcactccgtgctatcttccactgtcacaacctcgtctactgaccttaaccataaaacccaggaaaattatcggggaggccttcaaagccagtctggtacagtagtcactactgaaatcaagacggaaaacaaagaaaaagacgaaaatctgcacgaaccaccatccagcgacgacatgaaatccgacgatgagagctctcagaaggatattaaagtcagcagcagagggcgtacctcttctacaaacgaggatgaggacctgaatcccgagcagaagatcgaacgggagaaagagcgaagaatggcgaataacgcgagggagaggttgcgcgtacgcgatattaatgaagcgttcaaggaactgggcaggatgtgccagctgcatctgaaaagcgagaagccgcaaacaaagctattgatcctccatcaggcagtggctgtgattcttagcttagagcagcaggtccgcgagaggaatttgaatcccaaggctgcctgtctgaaacgtagagaggaagaaaaagtgtcagctgtctccgctgagcctcccaccactctgcccggtacgcaccccggactaagcgagacgacaaatccgatgggccacatgtag

SEQ ID NO: 244359 - DNA, 1539 bp, synthetic construct
  misc_feature 1..1539: note = Description of Artificial Sequence: Synthetic coding sequence
  source 1..1539: mol_type = other DNA
atgtattgtgcatacccagtgcctggcatggggagcaattctcttatgtactattacaatggaaaaactgtgtatgctccaagtccaaattcagatgatttcaacagagagtctccctcctaccccagtcccaaaccacccacctctatgttcgcatctacctttttcatgcaggacgggacccacaacagctcagatttgtggtcatcctctaacggaatgagccaaccaggttttgggggtatcctgggcacttctaccagtcacatgagtcagagctccagctatggaaatcttcattcgcatgataggttatcctaccccccacactccgtgtcccctaccgacataaacacaagtctgccccctatgtcctcgttccacaggggtagtacaagcagctcaccttacgtggccgcttcacatacgcccccaattaatggctctgatagcatcctggggactcggggtaacgccgcaggttcatctcaaacgggagacgcgctcgggaaagcacttgcatccatttatagtcccgatcatacgtccagcagcttcccgagcaacccctctacacctgtggggtccccgagccctttaactgggacttctcagtggcccagacccggaggccaggctccatcttccccttcttacgagaatagccttcacagcctgcagtccagaatggaagatcgtcttgatcgtttggatgatgctatccatgtcctgagaaaccatgcagtgggcccatctacatcactccctgctggccactcggatatacactcacttctcggaccctcccataacgccccaatcggcagcctgaatagcaattacgggggttcctcccttgttgcaagtagtagatctgcctccatggtgggcacacatcgggaagactcagtctcacttaatggtaaccatagtgtcttatcctccactgtaacaacttcaagcactgatttaaaccataagacgcaggagaactacaggggtggcctgcagtcacaatctggcaccgtggtgaccaccgagattaagaccgagaacaaggagaaggatgagaatctgcacgagccgccatctagtgacgacatgaaatccgacgacgagagctcccagaaggacataaaggtttcctcgagggggagaacctcatctacgaatgaggacgaagatctcaatcccgaacagaagatcgagagggagaaagagcggaggatggctaataatgcacgtgagcgtctgcgggtgagggatatcaacgaagcgtttaaggagttgggcagaatgtgccagctccatcttaaaagcgaaaaaccacaaaccaaattgttaattttgcaccaggctgtcgccgtcattctttcactggaacagcaggttcgagaacggaacctaaacccaaaggccgcatgtctgaagcgtagagaggaggagaaagtcagcgctgtctctgccgaacccccaacaaccttgcctggaacacaccccggactctctgagacaacgaaccccatgggccacatgtag

SEQ ID NO: 244360 - DNA, 600 bp, synthetic construct
  misc_feature 1..600: note = Description of Artificial Sequence: Synthetic coding sequence
  source 1..600: mol_type = other DNA
atggcctttgccttactgagacccgtgggtgcccatgtgttgtatcctgatgtccggctgctctcagaagacgaagaaaacaggagtgaaagcgacgcatctgaccagtctttcggctgttgtgagggccctgaagctgccaggcgcggtcctggccctgggggtggccgtcgagccggagggggtggtggtgccggtcctgtcgtggtcgtgcggcaacggcaggcggctaacgcaagagagcgggatcgcactcaatcagtgaatacagcgttcacagccctgcggacgctaatcccgacggagcccgtggatcgcaagctgagtaaaattgagacagttcggttagcaagctcttatatcgctcacctcgctaatgttctcttgctcggggattccgcagacgacgggcagccctgtttcagagccgcaggttcggccaagggcgctgtgcccgcagccgcagatggagggcgtcagccgagatcaatttgcaccttctgtctgtctaatcagcgcaagggtggcggacgccgtgatctgggcggatcctgcctgaaagtaaggggcgtggccccactcaggggccctcgcagatag

SEQ ID NO: 244361 - DNA, 1038 bp, synthetic construct
  misc_feature 1..1038: note = Description of Artificial Sequence: Synthetic coding sequence
  source 1..1038: mol_type = other DNA
atgcttccttgtttccaactcctcagaatcgggggtggacggggaggcgatctgtacacattccatccccctgcaggggctgggtgtacctaccgactcgggcacagagccgacctgtgcgacgtggccctcaggccccagcaagaacctggactgatcagtggcatccatgccgagctccacgccgagccacggggagacgattggagggtgtcactcgaagaccactcatcccaaggtacactcgtgaataacgtgaggctgcccagaggtcaccgcctcgagctttccgacggcgatttactgaccttcggccctgaaggcccacccggaaccagtcctagtgaattctactttatgttccagcaggttagggtcaagccccaggactttgcggctataaccatcccgagatccagaggagaagcacgggtcggagccggatttcgcccaatgctgcccagccagggagctcctcagcgcccactgagcacttttagcccggcaccaaaagcgactctgatactcaattcaattgggtctctgtctaagctcaggccccagccgctgaccttcagcccatcttgggggggtcctaaatctctgcccgttccagctccccctggcgagatgggaacgaccccatctgcaccacctcagcggaacaggcgcaagtcagtccatagggtgcttgccgaacttgacgatgaatctgaaccacctgaaaatccgcctcccgtgctgatggagccgagaaaaaagctgagagtggataaagccccacttacacccaccgggaataggcggggacggccacgaaaataccccgtttcggcccctatggcgcctcccgcagtgggaggcggagagccttgcgcagccccttgctgctgtctacctcaagaggaaaccgtcgcctgggtgcagtgcgacggatgtgatgtgtggttccatgtggcatgcgtgggctgttccatccaggctgctcgggaggcagattttcgctgcccaggatgcagagctggaattcagacatag

SEQ ID NO: 244362 - DNA, 1038 bp, synthetic construct
  misc_feature 1..1038: note = Description of Artificial Sequence: Synthetic coding sequence
  source 1..1038: mol_type = other DNA
atgctcccttgctttcagctcctgagaatcgggggtgggagggggggagatctctacaccttccatccgcctgccggagccggatgtacgtaccgccttgggcatcgcgctgacctgtgcgatgtggcactacggcctcaacaagaacctggcctgatttcaggtattcacgcagaactgcatgcagagccacggggagacgactggcgggtctccctagaagatcattcctcacagggcactctcgtaaacaatgtacggctcccaaggggccaccgcctggagctgagtgatggtgatctcctgacctttggaccagagggtccacctgggaccagtccatccgaattctactttatgttccaacaggtgcgggtgaagccacaggattttgcagcaattacaatccctcggagtaggggtgaggctagggtaggcgcaggatttagacctatgctaccctcccagggagcaccacagaggccactgtccacattctcacctgccccaaaggcgactttaatcctgaactccatcgggtccctgtctaagctgagacctcagccactgacattttccccctcctggggaggtccgaagagcctgcctgtacctgcaccaccaggcgaaatgggaaccacccctagcgcacccccacagagaaatcgcagaaaatccgtccaccgcgtattggcggagttggatgacgaaagtgagcctccagagaatcctccacccgtcctcatggagccgcgaaaaaagcttcgggtagataaagccccactgacacctaccggcaatcgccgaggcagacctcggaaataccctgtctccgctcccatggctccacctgctgtgggcggtggtgagccatgcgccgcaccctgttgttgcctgccccaggaagaaaccgtcgcatgggttcagtgtgacggatgcgacgtgtggtttcacgtggcgtgcgtcggttgttcaatccaggccgcacgggaggcagactttagatgccctggctgtagggccggaatccagacatag

SEQ ID NO: 244363 - DNA, 1038 bp, synthetic construct
  misc_feature 1..1038: note = Description of Artificial Sequence: Synthetic coding sequence
  source 1..1038: mol_type = other DNA
atgctgccgtgcttccagctgctccgcatcggcggaggacggggaggcgatctttacacctttcatccgccagcaggtgccggatgcacgtatcgattgggccacagggctgacctgtgcgacgtggccctccgccctcagcaggaaccaggcctgatctccggcatccatgcggagttgcatgcggagcccaggggagatgattggcgtgtgtccttggaggatcactccagtcagggcaccctggtcaacaacgttagattacccagagggcaccgactggaactgagcgatggggatctgctgactttcgggccagaggggccaccaggaacatcaccctctgaattctatttcatgtttcagcaggtgagggtgaaaccgcaggatttcgcagcgatcacaattccgagaagcaggggtgaagccagagttggggcaggctttaggcctatgcttcctagccaaggagctcctcagcgccctctctcaactttctcacctgcgcctaaggccaccctaattcttaatagcattggaagtttgagtaagctacggccacagcccctcacattctcccccagttggggaggtcccaaatcactgcccgtccctgcgccaccaggtgaggtgggtacaacaccttccgcccctcctcaaaggaacaggagaaagagtgtacatcgtgttttggcggagttagacgatgaaagcgaaccccctgaaaatccaccgcctgtgcttatggaaccccgaaagaagcttagagtggacaaagctccactgacacccactgggaaccgtcggggtagaccacggaagtatcccgtatctgccccaatggcaccccctgcagttggcggaggcgaaccttgcgccgcaccctgttgttgcctgcctcaggaggagactgtcgcatgggtccagtgtgatgggtgtgatgtgtggtttcacgtagcctgcgtgggctgcagcatccaggcagccagggaggctgatttccgctgtccaggatgccgcgcaggtatccagacttag

SEQ ID NO: 244364 - DNA, 1038 bp, synthetic construct
  misc_feature 1..1038: note = Description of Artificial Sequence: Synthetic coding sequence
  source 1..1038: mol_type = other DNA
atgctgccatgcttccagctcttgcgtatcggcggaggcagaggcggagatctgtatactttccatccccctgccggtgcgggatgcacgtatcgccttggccatcgagctgacctgtgcgatgtcgcactgcgacctcagcaggagccaggactcatttcaggaatacatgctgaactccatgcagagcccaggggtgatgactggcgcgtgtcactagaggatcattcaagccaggggacattggtcaacaatgtgcggttaccgagggggcacaggctggagctttcggacggtgaccttctcactttcggacccgaggggccacctggaacttcaccgtccgagttttactttatgtttcagcaggtacgagtgaagccccaggacttcgcagctattactatacctcgcagccgcggagaggccagagtcggggctggatttagacccatgctacccagccagggagcgccacaacgccctctaagcacgttctctcctgccccaaaagcgactttgatccttaatagcatcggttctctgagtaaactgaggccacagcccctcacttttagcccaagttggggcggacccaagtcactgcccgtgccagcgcctcctggcgaggttggtactaccccttccgcacctccacagaggaaccgtagaaaaagcgttcacagagtgcttgccgagttggacgatgaatccgaaccacccgagaaccctccccctgtgctgatggaaccacgaaaaaaacttagagtggacaaagcccctctgactcctaccggaaaccggcgtggccgacccaggaaataccccgtgtctgcccctatggcgcctcctgctgtgggtggaggggaaccttgtgctgctccttgttgttgcctaccacaggaagagacagtcgcttgggtgcagtgcgatggatgtgacgtgtggtttcacgttgcatgtgtgggatgcagtatacaggctgcacgagaagcagacttccgctgccctgggtgcagggccggaattcagacctag

SEQ ID NO: 244365 - DNA, 1038 bp, synthetic construct
  misc_feature 1..1038: note = Description of Artificial Sequence: Synthetic coding sequence
  source 1..1038: mol_type = other DNA
atgctaccgtgcttccagctgctccgcataggcggagggagaggcggtgacctgtacacgtttcatcccccagccggagcaggatgtacctatcgattgggccatagagctgatctttgcgatgtagctctacgtccacagcaggagcccggtctgatctctggaattcatgcagagctgcacgccgagcccagaggcgacgactggcgcgtcagcctagaggaccactcctcacaggggacattggtcaacaacgtccgactgccgcgaggccaccggctagagctgtctgacggagatctcctcactttcgggcctgagggtccccctggcacatcaccctccgaattttactttatgtttcagcaggtgcgcgtgaaaccccaggacttcgctgccatcacaatcccgcgttcaagaggggaagccagagtgggcgcaggcttccgcccaatgttgccctcacagggggctccccagagacccctctccactttctccccggctcctaaagcaaccttgatcctcaactccatcggatccctcagcaagttaagaccccagcctctaacattctctccatcttgggggggacctaagagtctgccagtcccagcacctccaggagaagtcgggacaaccccatctgcgccaccacagcgcaacaggcggaagtctgtgcaccgcgtcttggctgagctggatgacgaatccgagccaccggaaaaccctccaccagttcttatggaaccccgaaagaagttgcgtgtagacaaagcgccactgactcctacggggaatcgcaggggcagacctcgaaaatatcctgtgtcggcaccgatggccccacctgccgtcggcggaggcgagccatgtgcggctccatgttgctgcctcccccaggaggagaccgtagcttgggtgcagtgcgatggctgcgacgtctggtttcatgttgcgtgtgtcgggtgctccatccaggcagctcgcgaggcagacttcagatgccccggttgcagggctggcattcagacctag

SEQ ID NO: 244366 - DNA, 1038 bp, synthetic construct
  misc_feature 1..1038: note = Description of Artificial Sequence: Synthetic coding sequence
  source 1..1038: mol_type = other DNA
atgttaccatgtttccaactgctgcggatcggagggggtagaggcggtgatctctatacgtttcatcctcccgctggagccggttgtacctatcggcttggccaccgtgctgatttatgcgatgtggccctcaggcctcagcaggagcccggtttaatcagtggtatccacgcagagctgcatgctgagccacgaggtgatgactggcgcgtatccctggaagatcactcgtcacaggggacgctggtaaataacgtcagactgcccaggggccacagactagaactctcagacggtgacctattaactttcggccctgagggccctcccggtacctctccctccgagttctactttatgttccagcaagtgcgggtgaaaccccaggactttgccgcaattacaataccacgatcaaggggtgaggcaagagtgggcgcaggtttcagacctatgctgccaagtcagggcgcaccacagcggccactgtctacattcagcccagctcccaaggccacgctgattttaaattcaatcggcagtttgtctaaacttcgaccccaacctctcacattctctccgagctggggaggacccaaatcactgcctgtaccagctccaccaggcgaggttggaactaccccctccgctcctcctcaacgtaaccggcgaaagtcagtccacagggtgctagctgaactggatgacgaatccgaacctccagagaatcctcccccagtgctaatggagcccagaaagaagttacgtgtcgacaaggcccctcttacacctactgggaatcggaggggcaggccacgaaaataccctgtctctgctcccatggctccgcctgccgtcgggggtggggaaccttgcgccgctccctgctgttgtttgcctcaggaagaaactgtggcgtgggtacagtgcgacgggtgtgatgtttggttccatgtcgcgtgtgttggttgctctattcaagcagctagagaggctgatttcagatgtcccggatgcagggcgggaatccagacttag

SEQ ID NO: 244367 - DNA, 1038 bp, synthetic construct
  misc_feature 1..1038: note = Description of Artificial Sequence: Synthetic coding sequence
  source 1..1038: mol_type = other DNA
atgctgccatgcttccagcttcttcggatcggcggaggaagaggtggagacttgtacacatttcatcccccagcgggtgccggatgtacctacagactcggacatagagctgatctgtgtgacgtggcactaaggccccagcaggaacctggcctgattagtggcatccacgctgagctgcacgccgagccccgaggcgatgattggagggtgagtctggaggatcactcaagccaaggaacgctagttaataatgtccgcctaccacgcggtcatagactcgagctatctgacggagacctcctaaccttcggtcccgaagggcctccaggaacttctccgagcgagttctattttatgttccagcaagtgagagtgaaaccccaggattttgctgccatcacaatcccacggtccagaggtgaagctagggtgggagctggctttcgtcctatgctgccaagccagggcgcacctcaacgacccctctcgaccttcagtccagctccaaaggctaccctcattttgaatagtatcggaagcctcagtaagttaaggccgcagcccctgactttctccccctcttggggcggtcctaaatcccttcccgtgccagcaccacctggagaggtgggaaccacaccgagcgcaccaccccaacgcaaccggaggaagtccgttcacagggtgctggccgagttagacgatgaatcagagccgccagagaatcctcctcccgtgcttatggagccccgaaaaaagcttcgcgtcgataaagccccactgacacccacagggaaccgcagggggagacccaggaagtatcccgtgtccgccccaatggctcccccagccgtgggcggtggcgaaccctgcgcagcaccgtgttgttgcctcccccaggaagagacagtcgcctgggttcaatgcgatggctgcgatgtatggtttcacgttgcctgcgtcggttgtagcatacaggcagcacgggaagccgatttcaggtgtccaggctgccgtgcaggcatccagacttag

SEQ ID NO: 244368 - DNA, 1038 bp, synthetic construct
  misc_feature 1..1038: note = Description of Artificial Sequence: Synthetic coding sequence
  source 1..1038: mol_type = other DNA
atgctaccatgcttccagcttcttcgcatcggaggagggcgaggaggagatctctatacttttcatccgcctgccggtgcgggatgtacctacagactgggccacagagccgacctgtgtgacgtcgccttgagaccccagcaggagccaggcctcattagcggcatccatgccgagctccacgccgaacctcgtggtgatgactggcgcgtttcacttgaagaccactcgtcccagggcactttggtcaacaacgtcagactccctcgtgggcatcgcctggaattgagcgatggagatttgcttactttcggcccagaaggctctccgggaaccagtcctagcgaattttatttcatgtttcagcaggtgagggtgaaaccccaagacttcgctgctatcaccatacctagatccaggggggaagctcgggtgggcgcaggctttagacccatgctaccatcccagggtgccccacagaggcctctgtctactttctctccggcacctaaggccacactgatattaaactcgataggatctctctccaagctccgccctcaaccgctaacttttagtccatcgtggggcggacctaaatcattaccagtcccagctccacctggggaggtcgggacaacaccaagcgctcctcctcaaaggaatcgccgaaaatccgtccaccgcgtcctcgccgagttggacgacgagtcagagcccccagaaaaccctcctccggtgttgatggaacctcgaaagaagttgcgtgtggacaaggcccctcttacacctacaggcaaccgtcggggacgccctaggaagtatccggtttcagcccctatggctccgcctgctgtgggaggcggtgagccctgtgcagctccctgttgctgtctgccacaggaggagactgttgcgtgggttcagtgtgacggctgcgatgtgtggtttcatgtggcttgtgtgggctgtagcatccaggctgcaagagaggctgacttccgatgcccagggtgcagggcagggatccagacgtag

SEQ ID NO: 244369 - DNA, 1038 bp, synthetic construct
  misc_feature 1..1038: note = Description of Artificial Sequence: Synthetic coding sequence
  source 1..1038: mol_type = other DNA
atgcttccttgctttcagctgctgcgtatcgggggtggccgtggaggcgatctttatacttttcatcccccagctggggctgggtgcacttacagactagggcatagagccgacctttgtgatgtagcccttaggcctcagcaggaaccaggcttaatttcaggcatccacgcggaattacatgctgagcccaggggagacgattggagagtgagtctggaagaccacagttcacaggggacattggtaaacaacgtccggctgcctcggggtcacagactcgaactgtccgacggcgacctcctgacgtttggccctgaggggcctccaggcactagccccagcgagttttactttatgttccagcaggtgagagtgaagccacaagactttgcagcaataactatcccccgaagtagaggggaggcgagggtaggcgctggcttcaggcctatgttaccttcccagggcgcaccccagcgacctttgagtacattctcccctgcgcctaaagctacactgatactcaactcaataggtagcctgtccaaactgcgcccacaaccgttgactttcagcccgagctggggaggccctaaatctctgccagttcctgctccacccggtgaagtcggaactacaccttccgctccaccacagagaaataggagaaaaagcgtgcaccgagtgctagccgagttagacgacgagtctgaacctcctgaaaatccacccccagtgctgatggagcctcgcaagaaactacgggttgacaaggcacccctgacgcccactggaaataggagagggcgacccagaaaataccctgtgagcgcaccgatggcccctccagccgtcggtgggggtgagccctgtgccgctccgtgctgttgtttaccccaggaggaaacagtggcctgggtgcagtgcgatggctgcgatgtgtggttccacgtggcttgcgtcggatgcagtattcaggccgctcgggaggccgacttccggtgtcccggatgtagagctggaatacagacttag

SEQ ID NO: 244370 - DNA, 1038 bp, synthetic construct
  misc_feature 1..1038: note = Description of Artificial Sequence: Synthetic coding sequence
  source 1..1038: mol_type = other DNA
atgcttccctgttttcagctgcttcgtattggtggaggtcgcggaggagacctctatacttttcaccctccagccggagcaggatgcacgtatcgccttggccaccgcgctgacctttgtgatgtagcccttcggccacaacaggaacctggcctgatttccggaattcatgcagagcttcacgcagagccgcgaggagacgactggcgagttagcctggaagatcattctagccagggaactttagtcaataatgtaagactgcctaggggccaccggctggagctgagcgatggtgacctcctcaccttcgggcctgaaggacctcctgggacaagtccttcagagttctacttcatgttccagcaggtgcgtgtcaagcctcaggacttcgcagccatcacaattcccaggtcccgaggagaggctcgggtcggagctggcttcagaccgatgcttccttcccaaggcgctccgcagagaccgctctcgactttctcccctgcacctaaggcaacgcttatccttaacagtatcggttccctcagtaaattgcgccctcagccgctgactttctctccaagctggggtggacccaagtctctgccggtgccagctcctcccggtgaggttggcacaaccccatccgctcctcctcagcggaaccgaagaaagtccgtccaccgggttctggcagagttagacgatgagagtgaaccacctgagaaccctccaccagttttgatggagccccgtaagaagttacgtgttgataaggcacccttaacacccacggggaataggagagggaggcctcggaaatatcccgtctctgcgcctatggctcctcctgctgttggtggaggagaaccttgcgcggcaccttgttgttgcctcccacaggaggagactgttgcttgggtccagtgtgacgggtgtgacgtctggttccatgtggcatgcgtgggttgctcaattcaggctgcacgtgaagccgactttcgatgccccggttgtagagcaggcattcagacctag

SEQ ID NO: 244371 - DNA, 1038 bp, synthetic construct
  misc_feature 1..1038: note = Description of Artificial Sequence: Synthetic coding sequence
  source 1..1038: mol_type = other DNA
atgttgccatgttttcagctactgcggatcgggggaggcagaggcggagatctgtacacgtttcatcccccagccggtgccggttgcacctatagactcgggcatagggcagacttatgcgacgtggccctcaggcctcaacaggaacctggtcttatcagtggaattcacgctgaactgcacgcagaacccaggggggacgattggcgtgtgtccttggaagatcattccagccaaggcactctggtgaacaatgtccgccttcccaggggccaccgtcttgaactctctgatggtgacctcttgacctttgggcctgaaggcccacctggtaccagcccttccgaattctactttatgtttcaacaagtgcgagtgaaaccacaggactttgctgcaataacgattccaaggagccgcggtgaagccagggtgggagcaggctttcgcccaatgctgccatcgcagggggctccacagcgacctctcagcacattttccccagcacctaaggccactctcattctgaacagcattgggagtttgtcgaagctccggccacagccattaaccttcagcccatcatgggggggtcccaaatctctcccagtgcctgctcctcccggagaagtgggcactacgccatcagcccctcctcagaggaacagaagaaaatccgtacaccgcgtgttagctgagttagacgacgaatctgagcctcccgaaaaccctcccccagtattaatggaacctaggaagaagctgcgggtggataaggcccctctgacccccacaggtaaccgacgcggacggcctagaaaataccccgtgtccgcccctatggctccacccgctgtcggaggaggggagccttgtgccgcaccctgttgctgcctccctcaggaggaaactgtcgcatgggtgcagtgtgatggttgtgatgtgtggtttcatgttgcttgcgttgggtgctctattcaagccgctagggaagcagattttcgttgccccggatgccgggcagggatccagacatag

SEQ ID NO: 244372 - DNA, 1038 bp, synthetic construct
  misc_feature 1..1038: note = Description of Artificial Sequence: Synthetic coding sequence
  source 1..1038: mol_type = other DNA
atgctcccgtgcttccagcttctgcgtataggcggtgggaggggaggggacttgtatactttccaccctcccgcaggcgctggatgcacgtacagattgggccaccgggctgacctgtgcgacgtggcactgaggccccagcaggagcctgggctgatttccggtatccatgctgaattacatgccgaaccacgaggggatgactggcgggtgtcactggaggaccactcttcccagggtaccctggtcaacaacgtccgccttcctagaggacacagattggagctgtctgatggcgatcttcttaccttcgggcctgaagggccacccggaacaagcccgtctgagttctactttatgttccagcaggtgcgggtgaagccacaggattttgccgcaataaccattcctcggagtaggggggaggccagggtaggcgcaggatttagacccatgcttccttcacaaggagccccacagagacccctgagcacattctcccctgccccaaaggcaaccctcattctaaacagcatcgggagcctgagtaagttacgtcctcagcccctcacgttttccccatcatggggcggtcccaagagcttgcccgtacccgcacccccaggcgaagtaggtacaacccccagtgcccctcctcaacggaatcggcgtaaaagcgtacaccgagtgctagccgagctcgacgatgaaagcgaaccacctgaaaatcctccccctgtgcttatggagcccaggaagaagctgagagtcgacaaggcaccactcacgccaaccgggaatcgtcggggaaggcctcgaaaatacccggtttctgctcccatggccccacccgcagtgggcggtggtgagccttgtgcggctccctgttgctgtcttcctcaggaagagaccgttgcctgggttcagtgtgacgggtgtgacgtgtggttccatgtcgcctgcgtgggttgtagcattcaggccgctcgcgaggccgactttaggtgtccgggttgcagggccggtatacagacgtag

SEQ ID NO: 244373 - DNA, 1038 bp, synthetic construct
  misc_feature 1..1038: note = Description of Artificial Sequence: Synthetic coding sequence
  source 1..1038: mol_type = other DNA
atgctcccatgctttcagctccttaggattggaggaggtagaggcggagacctgtacacttttcaccctcctgccggagccggatgtacatatcgtttgggacatagagccgatctgtgtgatgtagctcttcgaccccagcaggaacccggactgatctcaggaatacacgccgaactgcacgctgagcctcggggagacgattggcgggtttcattggaagaccacagctcccagggcaccctggtaaataatgtcagattaccgcgaggtcacaggctcgagctgtccgacggtgatttgctgacattcgggcctgagggtcccccaggaacgtcaccaagtgaattctatttcatgttccaacaggtgcgagtcaagcctcaggactttgctgccataactattcctcggtcgcggggtgaggccagggtaggagcagggtttcgtccaatgctgccttcccagggcgctcctcagcgaccattaagtacattcagtccagccccaaaagccaccctcattctaaattcaatcgggagtctgtctaaactcagaccccaacccctgacgtttagtccgtcctgggggggaccaaaatcacttcccgtgccagcgcctcctggggaagtgggcactactcccagtgctccccctcagcggaaccgccgaaagtctgttcatcgggtcctagccgaattggatgacgagtcggaaccaccggaaaacccaccaccggtactgatggagccgcgaaagaaactgcgtgttgataaagcacctctaacccctaccggcaatcgcaggggccgacctagaaaataccctgtgtcagcacccatggcgcctcccgctgtaggcggaggggagccttgcgctgcgccatgctgttgcctgccacaggaggagacagtggcctgggtacagtgcgacggatgcgatgtgtggtttcacgtagcttgcgttggatgttccattcaagccgcaagggaggccgacttccggtgcccgggatgtagagctgggatccagacttag

SEQ ID NO: 244374 - DNA, 1038 bp, synthetic construct
  misc_feature 1..1038: note = Description of Artificial Sequence: Synthetic coding sequence
  source 1..1038: mol_type = other DNA
atgctgccctgctttcagctgttacggatcgggggaggccgaggtggggacctatatacattccacccccctgccggtgctggctgtacctacagactcggtcacagagcagatctctgcgatgtggctctgcgccctcagcaagaaccagggcttatttctgggattcatgccgagttgcacgctgagcctagaggggacgactggagggtatcccttgaggatcactcaagtcaggggacactcgtcaataacgtgagacttccacggggacacagactcgaactgtctgacggagacctcctgacctttgggccagagggttctccaggtacttcgcccagcgaattttatttcatgttccagcaggtgcgagttaagcctcaggatttcgccgctataacgatccctagatccagaggagaagcaagagtgggagctgggttccggcctatgctgccgagccagggagccccacaacgccctctcagcactttttcaccagctcccaaagcgaccttaattctgaattccattgggtcactgtcgaaactccgcccacagcctctaaccttctcccccagttggggcggacccaagtcactaccagtacccgctcctcctggggaagtggggacgaccccgagtgctccacctcagcggaaccggaggaagagcgtgcaccgggtactcgccgagcttgacgatgagagcgaaccccctgagaacccaccccctgtgcttatggaacccaggaaaaaactaagagtagataaggcccctctaacaccaactggtaatcgcagaggcaggcccagaaaataccctgtcagcgccccaatggccccaccggcagtgggtggaggagaaccatgtgctgctccatgctgctgcttaccacaagaggaaaccgtggcttgggtgcagtgcgatggctgtgatgtgtggttccacgtggcttgcgtcgggtgctcaatccaggccgcaagggaagcggactttaggtgccctgggtgcagagcaggcatacagacctag

SEQ ID NO: 244375 - DNA, 654 bp, synthetic construct
  misc_feature 1..654: note = Description of Artificial Sequence: Synthetic coding sequence
  source 1..654: mol_type = other DNA
actcttgttaataacgtcaggttgcctcgcggacaccgcctcgagctctcggatggggatcttctcacatttgggcctgagggtccacccggaacttcgccctccgaattctattttatgttccagcaagtcagagtgaagccccaggattttgctgccataacaattccaagatctagaggtgaagcaagagtcggcgcaggcttcagacccatgctcccttctcaaggtgcccctcaaagaccactaagtacattcagccccgcaccaaaagctaccctgattttaaactcgatcggatcactgagcaaactacgcccacaaccactaaccttttcaccctcctggggcggacccaagtctctgcccgtcccagcacctcccggagagatgggtaccacaccttcagcgcctcctcagcggaatcgcaggaaaagcgtacaccgcgttctggccgagttagatgatgagtctgagccaccggagaacccaccaccagtgctcatggaaccacggaaaaagttacgcgtggacaaagctccgctgactcccacaggaaactggcatatccaggggatgcaaagcatagtgaaagggcagaaagaacgcccttggcccagggaacacctgtctggctacgaagaggccagctag

SEQ ID NO: 244376 - DNA, 645 bp, synthetic construct
  misc_feature 1..645: note = Description of Artificial Sequence: Synthetic coding sequence
  source 1..645: mol_type = other DNA
atgagccagaggaaagcgagggggcctcccgcaatgcctggcgtgggccattctcagacccaggccaaggcgagactcctcccaggagccgaccggaagcgctcacggctttcgcgtaccagacaggatccctgggaggagaggagctggtcaaatcaacgctggagcagagcaacccccggaccacggggaacccgggctgggggactagccctgggaagaagtgaagctagccctgaaaatgcagcccgagaacgcagcagggtccgtactttgcgccaggcgttcttggcactccaggccgctctccccgcagtgccccctgatacaaaacttagtaaattggatgtgcttgtactggcggcttcatatatcgcgcatcttacccgcacccttggccatgagctccccggtcctgcttggccacctttccttcggggtttgcggtacctgcatcccctgaaaaaatggcctatgagaagcagattgtatgcaggcggactggggtattcggacctggatagcaccacggcatccactccaagccagcggacccgcgatgccgaggtcggttcacaggttcctggcgaggccgacgctctgctcagtactacacccctctctccagcactgggagataaatag

SEQ ID NO: 244377 - DNA, 2031 bp, synthetic construct
  misc_feature 1..2031: note = Description of Artificial Sequence: Synthetic coding sequence
  source 1..2031: mol_type = other DNA
atgtccagacgggcactgagacgattgcggggagagcaaaggggacaggagcctctgggaccaggagctctgcacttcgatcttcgcgatgatgacgacgccgaggaagagggccctaagagagaactcggcgttcggcgaccgggtggcgctggaaaggaaggcgtgagggtcaataaccgcttcgagcttatcaacatagatgatttagaagacgaccctgtcgttaacggagagagaagcgggtgcgcactgactgatgcagtggcgccaggaaataagggacgtggccagagaggtaacacagaaagcaagacagatggggatgatacagaaactgttccatccgagcagtcccacgcttctgggaagcttcgtaaaaagaaaaagaagcagaaaaataagaagagctctacaggggaggctagcgagaatgggctggaggatatcgataggatcctagaaagaattgaggactccacaggtttgaacaggcccggaccagctcctctcagttctcgcaagcatgtgctctacgttgaacaccgccacctgaatccggatacagaattaaaacgctattttggggctagggctattctgggagagcaacgccctaggcagaggcagcgagtgtatccaaagtgcacctggctgactacccctaaatccacctggccccgatactctaagcctggactcagcatgcgtctcctggagagcaagaagggcttgagcttctttgcgtttgaacattccgaggagtaccaacaggcccagcataagtttttggtggctgtagaaagtatggagccaaacaacatagtggtgctcctgcagacgagtccctaccacgtcgacagcctgctccagctgagtgacgcttgtcgcttccaggaagaccaagaaatggcccgtgacctagtcgagcgggctctctactctatggaatgcgccttccatccactcttttcacttaccagcggcgcatgcaggttagattacagaagacccgaaaacaggtccttctacttggccctatataagcagatgtcctttttagagaagagaggttgtccacgcaccgccctggaatactgtaagctgatattaagtctagagcctgatgaagacccgttatgtatgctactattgatcgatcatctcgccctgcgcgcaagaaactatgagtatctcatccggttgtttcaggagtgggaggcgcacagaaacctgtcacagcttccaaattttgctttttcagtgccattggcgtactttctgctgagtcaacagactgatctccctgaatgtgaacaatcctctgcgcgacagaaagcgtccttgctgattcaacaggctctaactatgtttccaggtgtcctgctccctcttttggagtcatgctccgttcgacccgacgcaagcgtgtcctcgcacagattttttggccctaatgctgaaatcagccagcctcctgccctctcacagctggttaatctctacttaggccgatctcatttcttatggaaggaacccgcaacgatgtcttggctggaggagaatgttcacgaagtcctgcaggccgtggacgcgggagacccagcggttgaggcctgtgaaaacagacggaaggtcttgtatcagagggcacccaggaacatccacaggcacgtgatcctgtcagagattaaggaggccgtggcagctctgccccctgatgtcactactcaatccgtgatgggctttgacccactccccccttccgatactatatacagctatgttagacctgagagactgtccccaatctcccacggtaacaccatcgcactgttttttcgatcactgctgcccaactacacaatggagggggaacgacctgaagagggagtggctgggggtttgaaccggaaccagggactcaaccgtctaatgctagctgtgagggatatgatggccaatttccatctgaatgacctggaagccccacacgaggacgatgctgagggcgaaggagagtgggactag

SEQ ID NO: 244378 - DNA, 1422 bp, synthetic construct
  misc_feature 1..1422: note = Description of Artificial Sequence: Synthetic coding sequence
  source 1..1422: mol_type = other DNA
atgagacttctcgagagcaagaagggcctgtccttcttcgcattcgagcactctgaggagtaccagcaagcccaacataaatttctggtcgccgttgagtccatggagccaaacaatatcgttgtgttgctgcagacctccccttaccatgtcgactctctcctgcagctctccgatgcgtgcagattccaggaggatcaagagatggccagagatctggtggaacgagctctgtatagtatggagtgtgcgtttcacccacttttttctctgacttcaggggcatgcagactggactatcgcaggccagagaatagaagcttctatctggctctctataagcagatgagctttctagaaaagagggggtgtccacgcacagcccttgaatattgcaagttaatccttagtctggaacccgatgaagacccactgtgtatgctgctcctgattgaccaccttgctttgcgcgcacgaaattacgaatacctgatccgcttatttcaggaatgggaagcccacaggaacctgagccagctccctaactttgctttttctgtgcctcttgcctattttcttctcagtcagcaaacagatcttccagagtgtgaacaatcttccgccaggcaaaaggcttcacttttgatccagcaggccttaaccatgttcccgggtgtcctgctcccactcctggagagctgcagcgtcagacctgacgctagcgtgtcttctcaccgatttttcggcccaaatgcggaaatcagccagccaccagccctgtctcagctggtcaacctatacctagggagaagccacttcctgtggaaagaacctgccaccatgtcttggctcgaagaaaatgtacacgaagtcttacaggcagtcgacgccggagaccccgcagtcgaagcctgtgagaatcgacggaaggtgctgtaccagcgtgcacctagaaatattcacaggcacgtgattctgtctgagatcaaagaggccgtcgccgctctgccgccagatgtgaccacacagtccgtcatgggattcgaccccctgcccccatcggacacgatctattcatacgtcagacctgaaaggaaaggggaagaggagagaaacagcgtcatctggggctctcagctctgtgtctgcagacctaggagcttccctagcccacccaatgtccaggctttagcctgccgccctctatggcaggcaaaatcctatcagccatggaaacaccactgctctctgttgccagtcacagtcgctaagttgtatcacggcggaggagaagcaagagggaggagtgggtggggctcggagcctcaaccgggaccagaacaagcagatgcaggatgcgctagacacgatgggcagttaccaccgcagcgtcctgggggagcagctaggggacgccgatag

SEQ ID NO: 244379 - DNA, 651 bp, synthetic construct
  misc_feature 1..651: note = Description of Artificial Sequence: Synthetic coding sequence
  source 1..651: mol_type = other DNA
atgagtaggcgggcattacggagactgcgtggcgaacaacgcggacaggagcccctgggacccggtgcccttcacttcgacttaagagacgacgacgacgccgaagaagaagggcctaagcgcgaactaggggtccgtagaccaggaggagcaggcaaggagggagttagagtaaataaccgattcgaactaattaatattgatgacctggaggacgaccctgtagttaacggggagcgttcagggtgtgctctgaccgatgcagtggcacctgggaataaggggagagggcagaggggcaatacagagtcaaagacagacggagatgacacagagactgtgccatcagagcaatcccatgctagtggcaagctccggaagaaaaagaagaaacagaagaacaaaaagtcctccacaggcgaagcttctgaaaacggcctggaagacatcgatcgtatcctggaacggattgaggacagcaccggcctcaacaggccaggtccagctcccttatccagccgtaagcacgtgctgtacgtcgagcatcggcacctgaatcctgacacggagctgaagcgctattttggcgctcgggctattctcggcgagcagagagatcgagtgctgctcggctgccccgtctggttctag

SEQ ID NO: 244380 - DNA, 624 bp, synthetic construct
  misc_feature 1..624: note = Description of Artificial Sequence: Synthetic coding sequence
  source 1..624: mol_type = other DNA
cttactgtgaatgcgtcgatgtcccggttcccccctcatatggtcccacctcatcacacgcttcacactaccgggatcccccatcccgcaatcgtgacccccactgttaaacaggagtctagccagtctgacgtgggctcacttcactctagcaagcatcaggacagtaagaaggaagaggaaaagaaaaagccacatatcaagaagcctctcaacgccttcatgctgtatatgaaagaaatgcgggctaaagtggtggcagagtgcactctcaaagaatcagcagccattaaccagatcttaggaaggaggtggcatgccctcagccgcgaagagcaggcaaagtactacgagctggcccgtaaggaacgacagctacacatgcagctctaccccggatggtcagcaagagataactacggcaagaagaaaaaacgcaagagggacaagcagcctggcgaaaccaatgacctcagcgcgcctaaaaagtgccgggctcgattcggtttggaccagcagaacaactggtgcggaccttgtaggaggaagaagaaatgtgtccgctatatccagggcgagggatcctgcctgtctcctcccagttcggacggctccctcctctag

SEQ ID NO: 244381 - DNA, 669 bp, synthetic construct
  misc_feature 1..669: note = Description of Artificial Sequence: Synthetic coding sequence
  source 1..669: mol_type = other DNA
accaatcagaatagcagttccgactccgaagcggagcgcagaccccctcctagatctgaaagtttccgcgataagtccagagagagtcttgaggaggctgcgaagagacaggatggcggtctgttcaaggggccaccataccccggatatcccttcattatgatcccagacctgacctctccttatcttccgaatggctctctgagtcctacggccaggaccctgcacttccagtccggatcaacacactatagtgcctacaagactatcgagcatcagatagctgtccaatacttgcagatgaagtggcctctgttggatgtccaagcaggatctctgcagagccggcaggccctcaaggatgcaagaagcccttcaccggctcacatcgtaagccctcttccatgctgcacacagggacacgactgtcagcacttctatcctccttcggacttcacagtttctacccaggtgttcagggacatgaaacgttcacatagcctccagaaggtgggtgagccttggtgtattgagagcaataaggttcctgtggtccaacacccacatcatgtccatcccctcacgccactgatcacatacagcaatgagcattttactccaggaaacccgccaccgcaccttcctgcggatgttgaccctaagacgtag

SEQ ID NO: 244382 - DNA, 867 bp, synthetic construct
  misc_feature 1..867: note = Description of Artificial Sequence: Synthetic coding sequence
  source 1..867: mol_type = other DNA
atgccccagctcaacgggggaggaggagacgatctgggggctaacgatgagctgatttccttcaaggacgagggcgagcaggaagagaaatcctctgagaatagcagtgcagagcgcgacttggccgacgttaaatctagtcttgtgaatgagagcgagactaaccaaaacagctcaagtgacagtgaggctgaacgacgaccgccaccaagatctgaaagttttagggacaagagccgcgagtctctcgaggaggctgccaagaggcaggatggcggactttttaagggccctccctatcccggatacccgttcatcatgatacccgaccttacaagtccatacctgcccaacggaagcctctccccgaccgccaggactttgcacttccagtccggatccactcactacagtgcctataagaccatcgagcaccagatcgctgtccagtacttgcaaatgaaatggccactgctggatgtccaagccggttcgctgcaaagccggcaggcgcttaaggacgctaggtctcctagcccagcccatatcgttagtaataaagtaccagtggttcagcacccccaccatgtgcatcctttaacaccactaatcacctattctaatgaacacttcacacccggtaatcctccaccccatctgcccgctgacgtggaccccaagaccggaattcccagacctccacaccctcccgacatttccccctattatccgctgtcccctggaacagtgggtcagatacctcatccactcggatggcaagggcagccagtctacccgattacgactggagggtttcgacatccttatccaacagccctgactgtgaacgctagcatgtcgaggtag

SEQ ID NO: 244383 - DNA, 1380 bp, synthetic construct
  misc_feature 1..1380: note = Description of Artificial Sequence: Synthetic coding sequence
  source 1..1380: mol_type = other DNA
atgcctcaactgaacggcggtgggggagacgaccttggggctaacgatgagctgataagcttcaaagatgagggagaacaagaggaaaagagtagcgagaattctagtgccgagagggacctcgctgacgtcaaaagcagcctcgtcaacgagagcgagaccaatcagaactctagtagtgactcggaggctgagagaagaccccctcccagatccgagtcttttagagacaaatctcgggaatccctcgaggaggcagccaaacggcaagacgggggactgtttaagggcccaccttaccctggctaccccttcattatgatcccagacctaacgtctccatacctacccaatggctctttgtctcctaccgcccgtacatacctgcaaatgaaatggccgcttctggatgtccaagcgggtagcctgcaatcccggcaagcgctgaaggatgctcgaagtccctctccagctcatatcgtgtccaacaaggtccccgtggttcagcacccacaccatgtacatcccttgactccccttatcacgtatagcaacgaacactttactccaggaaatccccctccccatctgcccgctgatgtggacccaaaaaccggcataccccgaccccctcatcccccagacatcagcccgtattatcctctttcccctgggaccgtcggacaaatacctcatcccttgggatggctggtgccgcagcaagggcagcccgtttaccccatcaccaccggtgggtttagacatccgtacccaacagctctgaccgtcaacgcctccatgagccggtttcccccacatatggtccccccacaccacaccctccacaccacaggtataccacacccagcgatcgtgacaccaaccgtcaaacaggaaagttctcagtctgatgtcgggagtttgcatagcagtaagcatcaggatagcaagaaagaggaagaaaaaaaaaaaccgcatattaaaaaaccccttaacgcctttatgctctatatgaaagaaatgagagcaaaagtggtggctgagtgcactctcaaagaatctgcagcaatcaatcagatactagggcgtaggtggcatgctctctctcgcgaggaacaggctaagtactacgagctggcacgcaaggagcgtcagctgcacatgcagctgtacccagggtggtccgcccgtgacaactacggaaagaagaagaaacgcaagcgcgacaaacagcccggagaaacgaacgagcacagtgagtgctttcttaacccttgcttatcgttacctccgataacggaccttagcgcccctaaaaagtgccgagctcgctttgggcttgaccagcaaaacaattggtgcggcccatgcagcctatag

SEQ ID NO: 244384 - DNA, 1470 bp, synthetic construct
  misc_feature 1..1470: note = Description of Artificial Sequence: Synthetic coding sequence
  source 1..1470: mol_type = other DNA
atgccacaactcaacggaggaggcggagacgacctgggtgcaaacgacgaattaatttcgtttaaagacgagggggagcaagaggagaaatcctcagagaacagtagcgccgaacgtgatctggctgatgtgaaaagctcgctcgtgaatgaaagcgagactaatcagaactcctccagcgactcagaggcagaacgcaggccacccccacgctctgagagttttcgggataagtccagagaaagtcttgaggaggccgctaaacggcaggatggcggtttatttaagggacccccttacccgggatatccgtttatcatgattcctgatctgaccagtccctacctgcctaatggttctctctcccccaccgctcgaacctacctgcagatgaagtggccactcctggacgtacaggcgggaagccttcagagtagacaagcgctcaaggacgcaagatcccccagcccggcacatatcgtcagcccactgccctgctgtacccaagggcacgattgccagcatttctaccccccaagcgattttaccgtttccacccaagtgtttagggacatgaagagatcccatagcctgcagaaagtgggtgagccttggtgtattgaatcaaacaaggttccggtcgtgcagcacccacatcatgttcatcccctgaccccattaattacttatagtaatgaacatttcactcctggcaacccaccgccacatctcccagccgatgtcgatcccaagaccggtatcccgcgaccaccccaccctcccgacatatcgccgtactaccccctgagtcccggtaccgtgggtcagattccacatcccctaggctggttagtcccccagcagggccagcccgtataccccattaccacaggcggattcagacacccataccccaccgctctcacagtcaacgcgagcatgtcccgcttccctccccacatggtcccacctcaccatacgctgcacacaacagggatcccgcatcctgccatcgtgaccccaaccgtcaagcaagagagctctcagtccgatgtcggcagcctccacagcagcaagcaccaggactcaaagaaggaagaggagaagaagaagccccacattaaaaagccattgaatgccttcatgctctatatgaaagagatgcgagcaaaggtggtggcagagtgcacccttaaggaatcagccgctataaatcaaatactcgggagaagatggcatgcactgagcagagaagagcaggcaaaatattatgagctagcacgcaaagaaagacagctacacatgcagttgtaccccggatggagtgcgagagataactacggtaaaaaaaagaagcgcaaacgcgacaagcagcccggagaaaccaacggagagaagaagtctgcattcgctacgtataaagtcaaggccgctgccagcgcccacccactgcagatggaagcgtactag

SEQ ID NO: 244385 - DNA, 1860 bp, synthetic construct
  misc_feature 1..1860: note = Description of Artificial Sequence: Synthetic coding sequence
  source 1..1860: mol_type = other DNA
atgcctcaactcaatggtgggggtggggacgacctcggggctaatgacgagttgatttcttttaaggatgagggcgagcaagaagagaaaagctctgagaactcgtctgcagagagggaccttgccgatgttaaatcctctttggtgaatgaaagcgaaactaatcagaatagttcctcagactcagaggctgagcggcgtccgccacccagaagtgaaagttttagagataaatctcgcgagtcactagaggaggccgcaaagcgacaagacggtggcctttttaagggccctccctatcctggatacccctttatcatgattccagatctgacatccccttacctgccgaacggctcactcagtcccacagcacgaacactacacttccaatctgggtccactcactactctgcgtataagactattgaacaccagatagcagtgcaatacctgcagatgaagtggcctctgttggatgtgcaggctgggagcctccagtcccggcaggccctgaaggacgctcgctccccctcaccggctcacatagttagcaataaagtgcctgtggtccagcatccacatcatgtacacccactcactccactcattacgtattcaaacgaacactttacccctggcaatccacctccacatttacccgcagatgtggatccaaagactgggatccctaggcctccgcacccaccagatatctccccctactaccctctctcacctggtaccgtaggacaaatacctcatcccctcgggtggctggtgcctcagcaaggtcagcctgtctacccaatcaccaccgggggattccgccatccataccctaccgccctaactgtgaacgcctccatgtctaggttcccccctcacatggtccctccgcatcatactttgcatacgaccggaatcccccaccccgctatcgtgaccccaaccgtgaagcaagagtcctcccagagcgatgttgggtctctgcacagctctaagcaccaggatagcaagaaggaagaggaaaaaaagaaacctcacatcaagaaaccactgaatgcatttatgctgtacatgaaggaaatgagggctaaggtagttgctgaatgtaccctgaaagaaagcgcggcaataaaccaaattctcgggcgaagatggcacgccctctcaagggaggaacaggctaagtactacgaactggcgagaaaggagcgccagttgcacatgcagctctacccaggctggtcagccagggataactatggcaaaaagaaaaaacgcaagcgggataaacagccaggcgaaaccaatgagcactcggaatgctttctcaacccttgcctgtccttgcctccaatcacagatttgagcgcgcctaagaaatgcagagcaaggttcggccttgaccagcaaaataattggtgtgggccatgtagaaggaagaaaaaatgcgtgcgttatatccagggcgagggctcctgtctgtccccccctagtagcgatgggtccctgctggattctccacccccatccccgaacctattggggtcacccccaagagatgcgaagagccagactgagcaaacacagccattatctctgtccctgaagccagacccattggcacatttgtcaatgatgccccctccaccggcacttctgctcgcggaggctacgcacaaagcctccgcactgtgccctaacggcgctttagacttgccacccgcagccctccaaccagcagcaccatcgtccagcatcgcacagccctccacaagtagcctccactctcacagtagcctggcagggacccagccccaacccctatctttagtgacaaaatctctggagtag

SEQ ID NO: 244386 - DNA, 363 bp, synthetic construct
  misc_feature 1..363: note = Description of Artificial Sequence: Synthetic coding sequence
  source 1..363: mol_type = other DNA
atgctctatatgaaggaaatgagggcgaaggtggtggccgagtgcacgctaaaagaatccgccgcaattaaccagatcctgggtcgtcgctggcacgccctgtcaagggaggagcaggcaaaatattatgaactggccaggaaagaacgccagttgcacatgcagttataccccggttggtccgcgcgagacaattatgggaagaagaaaaaacggaaaagagataagcagccaggcgaaaccaatgacctgtctgctcctaaaaaatgtcgagctagattcggactggatcagcagaataactggtgcggcccttgccgatgcaaatattctaaagaggtctccggcaccgtgcgagcatag

SEQ ID NO: 244387 - DNA, 531 bp, synthetic construct
  misc_feature 1..531: note = Description of Artificial Sequence: Synthetic coding sequence
  source 1..531: mol_type = other DNA
atgtcaagattcccgcctcacatggtgcccccacaccatacactgcatactaccggaattccccatcccgcaattgtgacaccaactgtgaaacaggagagttcacagagtgatgtcggctctctacactcgtcgaagcaccaagactccaagaaagaagaagagaagaaaaaaccacacatcaaaaagcctcttaatgcctttatgttatatatgaaagaaatgagagctaaagtcgtagccgagtgtacgctgaaagaatcagccgcaatcaaccagattttgggcagacggtggcatgctctgagtcgcgaggagcaggcaaagtattatgaattagcacgtaaggagaggcaattgcacatgcagctgtatcccggttggtctgcacgcgataactacgggaagaagaaaaaaagaaagagagataaacaaccaggggagacaaatggtgaaaagaaatccgccttcgcaacatacaaagttaaagcagcagcgtctgcccatccgcttcagatggaggcctattag

SEQ ID NO: 244388 - DNA, 954 bp, synthetic construct
  misc_feature 1..954: note = Description of Artificial Sequence: Synthetic coding sequence
  source 1..954: mol_type = other DNA
atgcctcaactgaacggaggcggtggcgacgatctgggggctaacgacgagctaataagcttcaaagatgaaggggagcaggaggagaaatcctcagagaacagttccgccgaacgagacctggccgacgtgaaatcaagtctggtgaatgagagtgaaacaaaccagaactcaagttccgatagtgaggccgagcggcgtccccctcccagaagcgagagctttcgagacaagtcgcgtgagtccctcgaggaagcagcgaaaaggcaggatggaggcctgtttaaggggcctccctatcccggataccctttcattatgattccagatctgacctccccctatctgcctaacggttctttgtcgcctacagctagaacatacctacagatgaaatggcctctgttagatgtgcaggccggttctctgcaaagtcgtcaagcactcaaggatgcaagaagcccaagcccagcacacatagttcagtctcccttgccatgctgtacccaggggcacgattgccaacatttttatccacctagcgacttcacagtgagcacgcaggtgttccgggatatgaaaaggagccattccctccagaaagtcggggagccttggtgcatcgaaagcaacaaagtgccagtggtacaacatccccaccacgtgcaccctctgactcccctcatcacttacagcaacgagcacttcaccccaggaaaccccccaccacacctcccagctgacgtggatcctaaaacaggaatcccaaggcctccccacccacccgatatatcgccctattatcctctgagcccaggaaccgtgggtcagattccccatccgctgggatggcttgtgccccagcaggggcagcctgtctatcctatcacaacgggagggtttcggcatccctatcccacagccctgacggtgaacgcatcaatgtcaaggtag

SEQ ID NO: 244389 - DNA, 1791 bp, synthetic construct
  misc_feature 1..1791: note = Description of Artificial Sequence: Synthetic coding sequence
  source 1..1791: mol_type = other DNA
atgccccagctgaacggaggaggtggcgatgacctgggagctaacgatgaactgatctcttttaaggacgaaggcgaacaggaggagaagagctcagaaaactcgagcgccgagcgtgaccttgccgatgtaaagtctagcctggtgaatgaaagcgagacaaatcagaattcgagctccgacagtgaggcagaaaggcggcctccgccacgttcagaatcttttagggacaagagtcgcgagagcttagaggaggccgcaaagagacaggatggagggttgttcaaagggccaccctacccagggtaccctttcatcatgataccagatttgacaagtccttacctgccaaacggctcactgagcccaactgccagaacgtacctgcagatgaagtggcccctcctagacgtgcaggcgggtagtcttcagtcccggcaagctctgaaagatgctcgatcccccagtccggctcacatcgtctctaacaaggtacctgtggtgcagcatccgcaccacgtgcaccctctgacacctctgatcacttatagcaacgagcattttaccccaggcaatcctcccccacacctgcccgcagacgtcgacccgaaaacaggaatcccgcgacccccacaccccccagatatctccccatactatcccctgtcacctggcacggtcgggcagataccccacccccttggttggctggtcccacagcagggccagccagtgtaccccatcactaccggcggtttcagacacccttaccccaccgctctgacagttaatgccagtatgtcaagatttcctcctcacatggtgccaccccatcacaccctacacactactgggattcctcaccccgcaattgtgacaccaacagtcaaacaagagagcagccagtcggatgtgggtagccttcactcatccaaacaccaagattccaaaaaggaggaggagaaaaaaaaaccccatataaaaaagcccctgaatgccttcatgttgtacatgaaagagatgagagcaaaggttgtcgccgaatgcactttaaaggaatcagccgcaataaaccagatcctgggcagaaggtggcacgctctcagtcgtgaggagcaagcaaaatattacgaattagccagaaaggaaagacagcttcacatgcagctgtatccaggatggagcgcccgagataactatgggaagaaaaagaaaaggaagcgggacaaacagccaggagagaccaacgagcacagcgagtgttttctaaacccctgcctcagcctcccccctatcacggacctcagcgctccaaaaaagtgtcgagcaaggttcggtctcgatcaacagaacaactggtgcggaccctgtcggcgaaagaagaagtgcgtgcgctacatccaaggcgagggttcctgcttgagcccccctagttccgacggttccctgcttgatagcccgcctcctagtcccaacctgctcggttcacccccaagagacgctaagtcacagaccgaacagacacagcctttatccctctctttgaagcccgaccctttggcccatctgagcatgatgccccctccacccgcactccttctcgccgaggccacccacaaggcaagcgctctttgccccaatggcgcactggacctcccacccgcagcactgcagccagctgctccatcaagctctattgcccagcctagcacatcctcccttcactcgcattccagtcttgcaggcacacaaccacaacctctgtccttggtcactaagagccttgagtag

SEQ ID NO: 244390 - DNA, 1485 bp, synthetic construct
  misc_feature 1..1485: note = Description of Artificial Sequence: Synthetic coding sequence
  source 1..1485: mol_type = other DNA
atgcctcagctcaatggtggcggtggagacgatctcggagctaatgatgagcttatctcattcaaggatgagggggaacaggaagaaaaaagctcagaaaattcaagcgccgagagggacttagctgacgtgaagtcctcactcgtcaatgagagcgagacaaaccagaactcatccagtgacagcgaggctgagcgcaggccccctccaaggtctgaaagctttcgcgacaaaagtcgggagtccctggaggaagccgctaaaaggcaggatggcggtctgtttaaggggccaccttaccctggataccccttcattatgattccagatcttaccagcccatatctccccaatggctccctttctccaaccgccagaaccctgcactttcagagtggatctacgcactattcagcttataaaacgattgagcatcagatagccgtgcagtacctccagatgaagtggcccctcctggacgtccaagctggctcgctgcagtctcgacaggctttaaaggacgcccgatcaccatctccagctcacattgtgtctaataaggtgcccgtggtgcagcaccctcaccacgtccatcctttgactcccctcattacatatagtaatgagcacttcacacctgggaatccccctcctcatctccccgctgacgtcgaccccaaaacaggtattcccagaccgccacacccccctgatatcagcccctattaccccttgtctcccggtactgttggccaaatcccccacccattgggttggctagtcccgcagcaaggacagcctgtgtacccgattacgacaggaggcttcaggcacccctatcctactgcccttacggttaacgcttcaatgtcaaggttcccaccccatatggtgccacctcaccacacccttcacacgacaggtatcccacatcctgctatcgttacccctaccgttaagcaagagtcttcacagtctgatgttggaagtttacattcctctaagcatcaggattccaaaaaggaagaagagaagaaaaagccgcacatcaagaaacctctgaacgccttcatgttgtatatgaaagagatgagggcaaaggtggttgccgagtgtacgctgaaggagagcgccgctatcaaccaaattttaggcagacggtggcatgccttgtcacgagaagaacaggcaaagtactacgaacttgctagaaaggagagacagctgcacatgcagctttaccccggatggtccgcacgcgataactatggaaaaaaaaagaagaggaagagggataagcaacctggcgaaaccaacgaacactctgaatgttttctgaatccatgcctttccctgccgccaattacagatttaagtgcgccaaaaaaatgtcgcgcaagatttggcctggatcagcagaacaactggtgtggcccttgtcggtgtaaatacagcaaggaggtatcagggactgtgcgggcttag

SEQ ID NO: 244391 - DNA, 1809 bp, synthetic construct
  misc_feature 1..1809: note = Description of Artificial Sequence: Synthetic coding sequence
  source 1..1809: mol_type = other DNA
atgccacagctgaatggaggtgggggtgacgatctaggtgcgaacgatgagcttatatccttcaaggacgagggtgaacaggaggagaaatcctccgagaacagctccgccgaacgagacctggctgacgtgaagtcgtcgctggtgaacgagtcggaaacgaaccagaattcttcatctgacagtgaagctgaacgaaggccacctcctcgatccgagtcctttcgtgataagtcccgcgaatctctagaggaggctgctaaaagacaggacgggggtctcttcaagggtcccccttatcccggatacccatttatcatgatacctgacctgactagcccctatttgcccaatggctcactgagccccacggcaaggactctgcactttcagagcggtagcacacactattccgcttataagacgattgagcaccagattgccgtccagtacttacaaatgaaatggcctctgctcgacgtgcaagcaggctcattgcagtcaagacaagctctgaaggacgctagatccccatccccagcacatattgtgagcaataaggtgccagttgtccagcacccgcaccacgttcatccactgaccccccttattacatattccaatgaacacttcaccccgggaaacccaccaccgcacctccctgccgatgttgatcccaaaaccgggatcccccgtccaccgcatcctccagacattagtccctactaccccctgtcaccaggtacagtagggcagatcccacacccactcgggtggctggtaccccagcagggccaaccggtgtatccaatcaccacgggaggtttcaggcacccatacccaacagcgttgaccgtgaatgcttcgatgtcccgtttccctccccacatggtccctcctcaccacacactccatactaccgggattccccaccctgctattgtaactccaactgtcaagcaggagagctcacagtcagacgtgggaagcctgcactcatctaaacaccaggattccaagaaggaggaagaaaagaaaaagccccatatcaaaaagcctctgaatgctttcatgctgtatatgaaagagatgagggctaaggtggtcgccgagtgcactctgaaggagtctgctgctatcaatcagatcttaggaaggcggtggcacgccctatcccgggaagagcaggctaagtactatgagttagcacgcaaagaacggcagttacacatgcagctgtatcctggctggtcagccagggacaattatggcaagaagaagaaacggaaacgtgataagcagcccggtgaaacaaacgatctgtctgcaccaaaaaagtgccgagccagattcggattagaccagcagaacaactggtgcggaccatgtcggcgtaagaagaagtgtgtgagatacatccaaggagaaggttcctgcctgagccccccatcttccgatggcagtttactggactctccacctcccagcccaaatctgctgggttctccccctagggacgcaaaaagccagacagagcaaacacagcctctcagtctctccttaaagccggaccccctagctcacttgagtatgatgccaccaccaccagctctgctgttagctgaagccacccataaggcttctgccttatgtcccaacggagctctcgatctcccacccgcagccttacagccagccgcaccatcgtcttcgatagcgcagccctcaacatcgagtcttcacagccatagttctctggccggtactcaaccacagcccctcagcctggtgaccaagtccctggagtag

SEQ ID NO: 244392 - DNA, 1449 bp, synthetic construct
  misc_feature 1..1449: note = Description of Artificial Sequence: Synthetic coding sequence
  source 1..1449: mol_type = other DNA
atgcctcagctgaacggcggagggggagacgacctgggcgctaatgatgagcttatttctttcaaagatgaaggcgagcaggaggagaaatcgtcagagaacagctccgccgagagggatctggcagacgtaaaatctagcctcgttaacgagtccgagaccaaccagaactcgagtagcgacagcgaagcagagcgtcggcctccccctcggagtgaatcattccgagataagagcagggagtcactagaggaggccgctaaacgccaagatgggggactgtttaagggacctccctaccctgggtaccctttcatcatgatcccggatctgactagtccttatctgcctaatggcagtttaagccctaccgctcggacactgcattttcagtcaggatccacacattattcagcctacaagacaattgagcaccagatcgcagttcagtacttgcaaatgaagtggcccctcctagacgttcaagcaggctcccttcagtcaaggcaggccctcaaagacgctcggtcccccagccctgcacacattgtatcaaataaagtccctgtggtgcaacacccacaccacgtccatcctctgacgcctctgattacctattcaaacgaacattttacgcccggaaatcccccacctcaccttcccgctgatgttgaccccaagacgggaatccctcggccacctcacccgccagacatctcgccatattaccctctcagtccaggcactgtaggccagatcccccacccattgggatggctcgttccgcagcagggtcagccggtttatcccatcacaacaggtggcttccgccacccctaccctaccgccctgaccgtgaacgccagtatgtccaggttcccgcctcatatggtacccccacaccacacacttcacacaacagggatacctcaccccgctattgtcactcccaccgttaaacaggagtcttcccagtcagacgtgggctctctccacagcagcaagcaccaggactcaaagaaagaggaggagaaaaagaaacctcatattaagaagcccctgaacgcatttatgctgtatatgaaggaaatgcgagctaaggtggtggcggagtgcacactgaaagaatcagccgcaatcaatcagattcttgggagacgatggcacgcattatcacgggaagagcaggccaaatactacgaactcgccagaaaggaacggcaacttcatatgcagctgtatcccggttggagtgccagagataattatgggaagaaaaagaagcgtaagcgagataaacagcctggagaaacaaacgagcacagcgagtgtttccttaacccttgcctgagccttcccccaataacaggggagaagaagtctgccttcgccacgtacaaggtcaaagccgcagctagtgctcaccccctgcagatggaggcttactag

SEQ ID NO: 244393 - DNA, 1008 bp, synthetic construct
  misc_feature 1..1008: note = Description of Artificial Sequence: Synthetic coding sequence
  source 1..1008: mol_type = other DNA
atgtctagcttcctgagttcacggttcccgcctcacatggttcctcctcaccacaccctacataccacgggcatcccacatcctgccattgttactcccaccgtcaagcaggaatccagtcaatccgacgtgggatcacttcattccagcaaacaccaagattcaaagaaagaagaggagaagaagaaaccccacataaagaaaccactgaacgcatttatgctgtatatgaaggaaatgcgcgcaaaggtcgtggcagagtgtaccttaaaagagtctgccgcaatcaatcagattttggggcgacggtggcatgctttatcaagagaggagcaagcaaagtactacgagcttgccaggaaggagcggcagctccacatgcagctgtatcctggctggagtgcaagagacaactatggaaagaaaaagaaaaggaagagggacaaacaaccaggagaaaccaacgaacatagcgagtgcttcctgaacccatgcctctctctgcccccaatcacagacttgtcagccccaaaaaaatgcagggcccgtttcggcttagatcagcagaataactggtgtgggccttgtaggcggaaaaagaagtgcgtgaggtacatacagggtgagggatcatgcctgagtcctccttctagcgatggatcactgcttgattccccccctcccagtcctaatctgctcgggtcccccccacgagacgctaagagtcagaccgagcagactcagccactttccctcagcctgaaacccgatccactagctcacttgtctatgatgcccccacctcctgctttgctgctggctgaagcgacacacaaagcatctgctttatgccctaacggggctcttgatttgccacctgctgctctgcagcccgctgccccttcttctagcatagcccagccttctactagtagtctgcactcgcatagctccctcgccggtacccagccacaacccttgagcctagtgaccaaaagtctcgaatag

SEQ ID NO: 244394 - DNA, 1809 bp, synthetic construct
  misc_feature 1..1809: note = Description of Artificial Sequence: Synthetic coding sequence
  source 1..1809: mol_type = other DNA
atgcctcagctgaacggagggggaggtgatgacctaggtgcaaacgatgagcttattagctttaaagacgaaggagagcaggaagaaaagtcaagcgagaattcgtctgctgaaagagatcttgctgatgttaagtcaagcctggtgaacgagagcgaaactaatcagaattcaagctccgactctgaggcagaacgcagacctccaccccgtagtgagagctttagggataagagccgagagagcctcgaagaggcggctaaaagacaggatggcggtctattcaaaggacccccttatcctggataccccttcattatgatccccgatctcacttccccttacctgcccaatggctctctgtctccgactgcgagaacccttcactttcagtccggtagcacccactactctgcttataaaaccattgaacatcagattgccgtccagtatctgcaaatgaagtggccactgctggacgttcaggccggttccctgcaatctcgacaggcattgaaggacgcaaggagtccgagtcccgctcatattgtgagcaataaagttcccgtagtccagcacccccatcatgtgcaccctttgacccctctcatcacatattcgaacgaacactttacgccgggaaacccaccaccccacctgccagcggacgtggatcctaagactgggatcccgcgaccgccacatccccctgatatttcaccctattacccactttcccctggcacagtgggacagatcccccatccactcgggtggctggtacctcagcagggccagccagtctaccctattacaacagggggattccgccacccttatccaaccgctttgaccgtgaatgcctcaatgtcccggttccctccacatatggtcccaccccaccacacattgcacacgacgggcatcccgcatccagccatagtgacacctacggtcaaacaggagagctcccagtccgatgtcggaagcctacactccagcaagcaccaagacagcaagaaagaggaggagaagaaaaagccacacatcaagaaacccctgaatgcttttatgctatacatgaaggaaatgcgagcaaaagttgtggctgagtgtacacttaaagagtctgctgccatcaatcagatcttgggccgacggtggcacgctctgtcccgagaggaacaggctaagtactatgagttggctcgtaaggaaaggcaactacacatgcagctgtacccaggctggagtgccagggataactacggaaagaaaaagaagcgtaaaagagacaaacagcccggtgaaacaaacgacgctaacaccccgaagaagtgtcgcgcactattcggcttagaccgacagacactctggtgcaaaccgtgccgacggaagaaaaaatgcgtcagatacattcaaggggagggttcttgcctgtcccccccatcttccgatgggtccctgcttgactcacctccacctagccccaatttgttgggatctcctccaagagacgccaaatctcagactgaacagactcagccactgtccctctcgcttaagcctgacccactggcacatctgtccatgatgccccctcccccagcactgctgctagctgaagccacccacaaagctagtgctctgtgtcctaatggcgcactggacctgccgccagccgctcttcagccagcggcaccgtcttcctccatcgctcagccaagtacaagcagcctgcactcccacagctccctcgcaggaactcagccacagcccctaagtctggtgactaaatccttagaatag

SEQ ID NO: 244395 - DNA, 1860 bp, synthetic construct
  misc_feature 1..1860: note = Description of Artificial Sequence: Synthetic coding sequence
  source 1..1860: mol_type = other DNA
atgccgcaacttaacgggggtgggggtgacgatctcggcgctaacgacgaactgatcagctttaaggatgagggggagcaggaagagaagtcttccgagaacagctcagccgagagagatcttgccgacgtgaagtcttctcttgtcaatgaatcagagacgaaccagaactctagcagtgacagtgaggcagagagacgtcccccacccaggtccgaatccttcagagataaatctcgcgagtcccttgaggaggcagctaaaaggcaggatggtggcctgtttaagggccctccttaccctggatacccgtttattatgattcctgatctcacgagcccatatctccccaacggttccttatccccaactgcacgaacactacatttccagagcggctccacacactactccgcttacaaaaccatcgaacaccagatcgctgtgcagtacttgcagatgaagtggcccttgcttgatgtgcaggcgggttcactgcagtcaaggcaagcgttaaaggacgccagatccccttcacccgcacatatcgtgtcaaacaaggtgcctgttgtgcagcatccacaccacgtgcatccattgacacccctgattacttattctaatgagcacttcactcctggaaatccaccaccccacctgccagctgacgtcgatcccaaaaccggaatcccgaggccccctcatcctcctgacatatctccatattatccattatcccctggtacggtcggccagatcccccaccccctcggctggctcgtcccccagcaaggccagcccgtgtaccctatcacaaccggcggatttcgacatccatatcctacagccctgacagtaaacgcgagcatgtcacgttttcccccacacatggtcccccctcatcatactctccacactactggtatcccgcatcctgctattgttacacctaccgtcaaacaagagtcaagtcaatcagacgtcggctctttgcattcttctaaacaccaggattctaagaaggaggaggaaaagaagaaaccccatatcaaaaagcctctgaacgcctttatgctctatatgaaagaaatgagggcgaaagtcgtggctgagtgcaccctgaaggagagcgcggcaatcaatcaaattctcggccgtagatggcatgccctctctagggaagaacaagcaaagtattatgagcttgcccgtaaggaaaggcagctgcacatgcaactgtatcccggttggagcgccagagataactacggtaagaagaagaagagaaagcgggataaacagcctggcgagaccaacgaacattccgaatgcttcctcaacccttgtctgtcgctgcccccaatcacggatgcaaatacccctaaaaagtgtcgcgctctttttggattggatcggcagaccctctggtgcaagccttgtagaaggaagaaaaagtgtgttcgctacatccagggcgaggggtcatgcctctctccgccttcctcagacggttctttattggattccccccctcctagtcccaacctactgggctcacctccgagagatgccaagtcccaaacagagcaaacccaaccgctctctctgtccctaaaacctgaccccctcgcgcacctgtcaatgatgccacctccaccagcgcttctgcttgccgaagccacgcataaggcaagcgccctttgcccgaatggcgcactcgacctgcctccagccgcactccaacctgctgccccttcttcatccatcgctcaacctagcacaagctcactgcatagccactcgagtctggccggaacccagccgcagcccctgagtctggtcactaaaagtcttgagtag

SEQ ID NO: 244396 - DNA, 645 bp, synthetic construct
  misc_feature 1..645: note = Description of Artificial Sequence: Synthetic coding sequence
  source 1..645: mol_type = other DNA
atggccttcctgagatcaatgtggggggttttgtcggcacttggcaggtccggagctgaattatgtacaggttgtggcagcaggctgcgcagtcccttctcattcgtctacctcccgagatggttttcttccgtattggccagttgcccaaaaaaacctgtgtcttcctaccttagattttcaaaggagcagctccctatcttcaaagcgcagaaccccgacgccaagaccaccgaactgatcaggcggatcgcccagcgatggcgtgaactaccggattcaaaaaagaagatctaccaggatgcctatcgcgctgaatggcaggtctacaaagaagagatcagcagattcaaggaacagttgactcccagtcaaatcatgagcctcgaaaaagaaattatggacaagcacttaaagcggaaggccatgactaagaaaaaggagaagctcaagacggttaaggagaactggaagaatctgagcgacagtgagaaggaactctacattcagcatgctaaagaggatgagacgcgatatcacaatgaaatgaaatcctgggaagaacagatgattgaagtggggagaaaagacttgctgcggcgtacgatcaagaaacagagaaagtatggggctgaagaatgctag

SEQ ID NO: 244397 - DNA, 660 bp, synthetic construct
  misc_feature 1..660: note = Description of Artificial Sequence: Synthetic coding sequence
  source 1..660: mol_type = other DNA
tgagagctatgtaccgggtgtggtagccgactgaggtcccctttctctttcgtctacctgccccgatggttctcttccgtcttggcttcatgccccaagaagcctgtgtcctcttatctccggtttagcaaggaacagttgccaatatttaaggcccagaatcctgacgccaaaaccactgaactgattcgtcgcattgcccagaggtggagggaactgcccgactccaaaaaaaagatttaccaggatgcatatcgggctgaatggcaggtctacaaggaagaaatttctcggttcaaagagcagctgacacccagtcagattatgtccctggagaaggagataatggacaaacacctgaagcgcaaggccatgactaagaagaaagagctcacgcttctcggtaaacccaaacgaccccgtagcgcatataatgtgtatgtcgctgaacggttccaggaggctaagggcgattccccccaggaaaaactgaagactgtcaaagagaactggaaaaacctgtctgattccgagaaggaggtcagtataacggtagtcagcctgaagtgtctcctgcgcatctcggtgcgcgagtgcattcgcgcacgattggactcttgtgaggataatctggtgctcctgatcatccaggtattctag

SEQ ID NO: 244398 - DNA, 741 bp, synthetic construct
  misc_feature 1..741: note = Description of Artificial Sequence: Synthetic coding sequence
  source 1..741: mol_type = other DNA
atggcattcctgagaagcatgtggggcgtcctctcagcattaggtcgctcaggcgcagaactttgtaccggatgtggttctcgtctccggtctccattctcctttgtatatctgcccaggtggttcagctctgtgcttgctagttgccctaaaaaacccgtgtccagctatctcaggttttccaaggagcaactaccgattttcaaggcccagaacccagatgccaaaaccactgaactaattcgcaggattgctcagcgctggcgcgagctgccagattctaaaaagaaaatctaccaggacgcgtacagggctgagtggcaagtctataaagaagagatcagccggtttaaggaacagttaacccctagccagataatgtcactcgaaaaggagattatggataagcacttgaagcgcaaggctatgactaagaagaaggaattgactctgctaggcaagcccaagaggccaagatcagcatataacgtttatgtagccgaacgcttccaagaggccaagggagatagccctcaggaaaaactgaagacagtgaaggagaattggaagaatctgagcgacagcgagaaagagttatatatccagcacgccaaggaagatgagacaaggtaccacaacgagatgaaaagctgggaagagcaaatgatcgaggttgggagaaaagaccttctgcgacggacaatcaaaaaacaacgtaagtacggagccgaggagtgttag

SEQ ID NO: 244399 - DNA, 1302 bp, synthetic construct
  misc_feature 1..1302: note = Description of Artificial Sequence: Synthetic coding sequence
  source 1..1302: mol_type = other DNA
atgtccatcctggccaagatgggggattggcaggaccggcacgatggcacgagtaacggaaccgcgcgacttccacagctaggcactgttgggcagtcaccttacacctcagctccacctttaagccacacgccaaacgctgattttcagccgccttacttccctccaccataccagcctatctacccacagtcacaggatccctacagtcacgtaaacgatccctatagcctcaatcctttacacgcacagccacaacctcagcaccctgggtggcctggccaaaggcaaagccaagaatcaggattgctgcatacccaccgcggattaccacaccagctctcaggccttgaccctaggcgagactatagaagacatgaggatctcttacatggtcctcacgccctgtcctcgggtctgggagacctctccattcattccctgccacacgccattgaagaagtcccgcatgtcgaagatcctgggataaatattccggatcaaacggtgattaagaaagggcctgtttcgttgtcaaaatctaattccaatgctgtgagcgcgataccaatcaacaaagataacctattcggaggggtggtaaacccgaacgaagtgttttgtagcgttccgggtcggcttagtctgctctcgagcaccagcaagtacaaagtgacagtcgcagaggtgcagcgcaggctcagtcccccagaatgcttgaatgcatctctcctcggcggagtgcttaggagggctaagtcaaagaatgggggaaggtctctcagagaaaaacttgacaaaatcggactgaatttacccgctggccgaaggaaagctgccaacgtgacattgctcacgtccttagtggagggagaggccgtacacctcgcaagggacttcggctacgtgtgcgagactgagttcccagcaaaggcagtcgccgagtttctcaacagacaacactccgaccctaatgagcaggtgacccgaaagaatatgttactagctaccaagcagatatgtaaagagtttacagacctgcttgcccaggacagatcacctcttggtaactccagaccaaatcccatccttgagccaggaatccagtcctgcctcacgcactttaacctcatcagccacgggttcgggtctcccgcagtgtgtgccgcagttaccgcactccaaaattacctgacagaagctctgaaggccatggataaaatgtatctgtccaataatcctaatagccacacagataataatgcgaaaagttccgacaaggaggagaaacaccgaaaatag

SEQ ID NO: 244400 - DNA, 1314 bp, synthetic construct
  misc_feature 1..1314: note = Description of Artificial Sequence: Synthetic coding sequence
  source 1..1314: mol_type = other DNA
atgctgtggaaactcactgacaacattaagtatgaggattgtgaagataggcacgacggtacctccaatgggacagccagacttcctcagctgggaactgttgggcaatcgccgtatacaagtgcccctcctctctctcatacccccaacgcagattttcagcctccatactttccacccccttaccagccaatctatccacaatcacaagacccctactctcacgtgaacgatccatatagcctcaaccccttgcacgcacaacctcagccacaacacccaggatggcctgggcagcgacagtctcaagaatctgggttgttgcatactcacaggggccttccacatcagttatccggacttgatcctcgcagggactataggcgacacgaggacctcctgcacggacctcatgcgctgtcctctggcctgggggacctgagcatccattccctgcctcacgccatcgaggaggtgcctcatgtagaagacccaggtatcaacatcccagaccagaccgtcatcaaaaaaggccctgtgagcttgagcaaaagcaactcgaatgccgtttccgccatacctatcaataaagacaacctgtttggcggtgttgtgaatcccaacgaagttttctgctctgttcccggaaggttgagtctgctgagctctaccagtaagtacaaagtgacggtagctgaagttcagagaaggctttcacctcctgaatgtctcaacgcgagcctgctcggcggtgtattgcgtcgcgcaaaatcgaaaaatggcggaaggagcctcagagagaagcttgacaagatcgggctgaacctgcccgcaggaagaaggaaggcggctaacgtgacgctgctcaccagcttggtcgaaggcgaggctgttcacctggcaagggatttcggatacgtttgtgaaacagagtttcccgcaaaggccgtggcggagtttcttaacagacagcattccgaccccaacgagcaggtgacacgaaaaaacatgctgctggctaccaagcagatttgtaaggagttcacagaccttctggcacaggacaggagccctctcggaaactcgcgcccaaatccaattctcgaaccgggtattcagagctgcttgacccacttcaacttgatctctcacggtttcggcagccccgctgtttgtgctgctgtcaccgccctgcagaactatctgaccgaggctctaaaagcaatggacaagatgtacctgtctaacaacccgaacagccacactgataacaacgccaagtcgtccgataaagaggagaagcacagaaaatag

SEQ ID NO: 244401 - DNA, 1296 bp, synthetic construct
  misc_feature 1..1296: note = Description of Artificial Sequence: Synthetic coding sequence
  source 1..1296: mol_type = other DNA
atgctagtgcacagcttcagcgccatggatcgacacgatgggacctctaatggaaccgcgcgattgccccagcttggtacagtgggacagagtccatacacgagtgccccaccactttctcatacccctaatgccgatttccagccgccatatttcccacccccttatcagcccatatacccacagtctcaggatccctatagtcatgtgaatgatccttacagcctcaacccacttcacgcccagccccagccccagcacccaggctggcctggtcagaggcagagccaggagtcagggctcctccacacccatagaggcctgcctcaccagttaagcggccttgaccctaggcgagattaccgtagacacgaagaccttctccacgggccacatgcattgtcatcaggcctcggcgatttgagcatccactccctgccacatgctatagaggaggtccctcacgtcgaggaccctggaattaatatacctgatcagactgtgattaagaaaggacctgtgtcgttgagcaagtccaattccaatgctgtgagtgcaatccctatcaacaaagacaacctgttcggcggtgtggtaaacccgaatgaggtattttgctcagtgcccggaagactttctctgctgtcctctacctctaaatacaaagtgactgtggccgaggttcagcggagactcagcccaccggagtgcctcaatgcctcgctattggggggagtgctgagacgggctaagtcaaaaaacggcggacggtccctgcgggagaagttggacaaaattggtctgaacctgccggctggcaggcgcaaagccgctaacgtgacactattgacaagcctggtggagggtgaggccgtccacctggcacgggattttgggtacgtttgcgaaacagaattccccgcaaaagccgttgcagaattcctgaacagacagcacagcgatcctaatgagcaagtcacccgtaagaacatgttgttggccactaaacagatctgcaaggagtttaccgatctcttggcacaggatagatctccattgggtaattcccgccctaacccaattctggagcccggtattcagtcatgccttacgcattttaacctgatctcccacgggtttggatcccctgcagtgtgtgccgctgtgacagcccttcaaaactatcttaccgaagccctcaaagctatggacaaaatgtacctgagtaacaacccaaactcacacactgacaacaatgcaaagtctagtgacaaagaggagaaacacaggaaatag

SEQ ID NO: 244402 - DNA, 1320 bp, synthetic construct
  misc_feature 1..1320: note = Description of Artificial Sequence: Synthetic coding sequence
  source 1..1320: mol_type = other DNA
atgaaaatgctgtggaaactcaccgacaacattaaatatgaagattgcgaggataggcacgatgggaccagcaacggtacggctagattgcctcagctggggactgttgggcagtctccatacacgtcagctcctcccttaagtcatacccccaacgcagactttcaaccaccatatttcccacccccataccagcccatttatccccagtcccaagatccttacagtcacgtaaatgatccatattctctgaatccgctacacgcccagccacagccccagcaccccggatggcctggacaaagacagtcccaggagtcaggcctgctgcatacccatcgcggtttgccacaccagctgagcggactggacccaaggcgagactaccgtaggcacgaggatttactgcacgggcctcacgccctctccagtgggctcggggacctgagcatacattcccttcctcacgccatcgaggaggtgccccatgtcgaagatcccggaatcaatatcccggatcagactgtgatcaagaaaggacccgtgagtctttcgaagagtaatagtaatgccgtgagcgcaatccccatcaataaagacaatttgtttggaggcgtggttaaccccaatgaagtgttctgcagtgttccgggacgcctatcccttttgagctccacttcaaaatacaaggttacagtggctgaagtgcagagaagattgagccctccggagtgcctcaacgcctcgttgctgggcggagtgctacgcagagctaagtctaagaacggtggccgttctctgagggagaagcttgacaagattggtctgaatttgccggctggaagaagaaaggccgcaaacgtcactctgttgacatctctggtggaaggcgaagctgtacaccttgccagagatttcggctatgtctgcgaaacagaatttccagccaaggcagtagccgagtttctgaacaggcagcatagcgatccgaatgagcaggtgacccgcaagaatatgctacttgcaaccaagcaaatctgcaaagaatttacggatctgctcgcacaagatcgatcacccctgggaaattctaggcccaatccaattctcgaaccgggaattcaaagctgcttgactcattttaacctgattagccatggattcgggtccccggcagtgtgtgctgctgtgaccgccttgcagaactatttaaccgaagctctgaaggctatggacaagatgtatctgtccaataaccctaattcgcacacggacaataatgcgaagtccagtgacaaggaggagaagcacaggaagtag

SEQ ID NO: 244403 - DNA, 987 bp, synthetic construct
  misc_feature 1..987: note = Description of Artificial Sequence: Synthetic coding sequence
  source 1..987: mol_type = other DNA
atgctgtggaaactaaccgacaacattaaatatgaggactgcgaagatcgacatgacggtacttccaatggaactgctcgtttgccccagctagggactgtcggccaatcgccatatacttccgcccctccactgtctcacacacctaacgccgatttccaacctccctatttccccccaccctatcagcctatttacccacaatctcaagacccatattctcacgtcaatgacccttatagtctgaaccccctccatgcccagcctcagcctcaacaccctggatggcccggacagagacagagtcaagaatccggcttgctccacacacatcggggactcccacaccagctgtcaggcctagacccgagaagggactatcgtcgtcacgaggatcttctccacgggcctcatgccctgtcctcgggcctgggagatctgagcatccactctttaccccacgctatcgaggaggtccctcatgtggaggatcctggcataaatatccctgatcaaaccgtgatcaaaaagggaccggtgtccctctccaaaagtaacagtaacgccgtttctgcaatacccatcaacaaagataacctcttcggaggggtggtcaatcccaatgaggtcttttgctcagttcctggtcgactcagcctgctgtctagtacttcaaagtacaaggtcaccgttgccgaggtgcagagacgtctgagcccccctgagtgcttaaacgcttccctcctcggaggggtattacgccgagcgaaatccaagaacggcggaaggagtctgcgagaaaagctggacaagattgggctcaacctgccagcaggcaggagaaaagctgccaatgtgaccctattaacctccctggtggaagacagatatgccaagtcatcacctacgtgttggctgcgtacagatctgccttgggggactcacggccctacaccatcttggagccccgcttccagagccgcatag

SEQ ID NO: 244404 - DNA, 1314 bp, synthetic construct
  misc_feature 1..1314: note = Description of Artificial Sequence: Synthetic coding sequence
  source 1..1314: mol_type = other DNA
atgctatggaagctgaccgacaatatcaagtacgaagattgtgaagaccggcatgacggcacgtctaacggcaccgccagactgccccaactggggaccgtcggtcaatctccctatacctccgcgccaccactcagccatacgcccaatgccgactttcagcctccatatttcccgcctccctatcagcctatctatccccagtcacaagatccctacagtcatgtcaatgatccatacagcctgaatcctttgcacgcccaaccacagcctcagcatccaggttggcctggacaaaggcagtctcaggagagcgggctgctccacacccaccggggactaccccaccagctcagcggtctcgatcccaggagggattaccggaggcatgaggatctcctccatggaccccacgccctctcatccggcctgggggacctgtctatccattccctcccacacgcaattgaagaagtcccccacgtggaggacccagggatcaacattcctgaccagaccgtaattaagaagggtcccgtttccctgagcaagagtaactctaatgctgtgagtgctatccccatcaataaggacaacctgttcggtggggtggtgaaccccaacgaggttttctgctctgttccagggaggctgtcactcctgtctagtacctctaaatacaaagtcactgtggcagaagtgcagagaaggctctcccctcctgaatgcttgaacgccagcctgctcggtggtgtgctgcgccgagctaagtcaaagaatggtggtagaagtttgcgtgaaaagttggataaaatcgggctgaacttgcccgcagggaggcgcaaagccgcaaacgtcactctcttgaccagcctcgtagagggcgaggccgttcatctggcccgagattttggatacgtctgcgagaccgagtttccggcaaaggccgtggcagagtttctgaaccgacagcacagtgatcccaacgaacaggtaacccgcaaaaacatgctgcttgccacgaagcagatttgcaaagagtttacagacctgctggcccaggacagatctcccctggggaactctcgccctaatcccattctcgaacctgggatccaatcttgcctcacccacttcaacctgatctcccacgggtttggatccccagcggtctgtgcagccgtcacagctctccagaactacttgacggaagctttgaaggcaatggacaagatgtatctctcgaacaatcctaattcccatactgacaacaacgcaaagtctagtgataaggaagaaaagcaccgaaagtag

SEQ ID NO: 244405 - DNA, 1410 bp, synthetic construct
  misc_feature 1..1410: note = Description of Artificial Sequence: Synthetic coding sequence
  source 1..1410: mol_type = other DNA
atgcattcaccaccaagggatcaggctgccataatgttgtggaaactggtagagaatgtgaaatatgaggatatttacgaaatgcttgtccacacatactcatcaatggataggcacgatggggtgccatcccattcgtctcgcctcagccagctgggctccgtctcgcagggtccatattccagtgcgcctcccttgtcccacactccttctagtgatttccagccaccctatttccctcccccttatcagccgttaccataccaccagtctcaagacccctatagtcatgtgaatgatccctactctttgaaccccctgcaccagccccaacaacacccctgggggcagaggcagcgccaggaggtgggctccgaggcaggcagcctgctgccccagccccgtgccgctctgccacagctttcagggctggatccgcgtcgagactatcactcagtccgaaggccggatgtgttgcttcattccgcacatcacggtcttgacgcgggaatgggcgactcccttagcctacacggactaggacaccctggcatggaggacgtccagagtgtggaggacgccaacaactctggcatgaacctgttggaccagtccgtcatcaagaaggtgcctgtgccacccaagagcgtgacttccctgatgatgaacaaagatggcttcttgggcggaatgtctgtcaacacaggcgaggtcttttgttctgttcccggacgactgtcattactctcaagcacgtccaaatacaaagtgaccgttggagaagttcagcggaggctgtcaccccctgagtgcttgaacgccagcttgcttggcggtgtgcttcgtcgagcaaaatctaagaacggtggtaggtcacttcgcgagagattagagaagattggcctcaatctccccgcaggcaggagaaaagcagcaaatgtgacactgctgacctccctggtcgaaggcgaagctgtgcatcttgcacgggacttcgggtatatctgtgaaactgaattccctgcgaaggctgttagcgagtaccttaatcggcagcataccgatcctagtgacctgcacagtcgaaagaacatgttactcgcgacaaagcagttatgtaaggaatttacagacttattggcccaggacaggacacccatcggcaacagtcgtccaagccctattctcgaacctggcatccagtcatgtctgactcatttctccctaattacgcacgggtttggagctcccgctatctgtgccgctctgactgcgcttcaaaattaccttaccgaagcccttaagggaatggacaaaatgttcttaaacaacacgaccactaacagacataccagcggagaaggcccaggttcaaaaaccggagataaagaagaaaaacataggaaatag

SEQ ID NO: 244406 - DNA, 597 bp, synthetic construct
  misc_feature 1..597: note = Description of Artificial Sequence: Synthetic coding sequence
  source 1..597: mol_type = other DNA
atgctttggaaactggtggagaatgtgaagtatgaggacatctacgagatgctggtgcatacttattcctccatggaccgtcatgacggggtgccctcgcattctagccgcttaagccagctcggctctgtttcgcagggcccatactcgtccgcacctccactgtcccacacccccagcagtgattttcagcctccatacttcccccctccataccaacctctcccgtaccatcaatcacaggatccatacagtcatgttaacgatccctactccctgaaccctctccaccagcctcagcaacacccctggggacaaagacagcgccaggaagtggggtccgaggcagggagtctgttgcctcagcctcgagccgctctaccacagctcagtggacttgatccacgccgagattaccatagtgtgcgcaggccagatgttctgctgcactctgcccaccatggcctggacgccggaatgggagactctctgtccctgcacggcctggggcaccctggcatggaggacgtgcagagtgttgaagatgccaacaacagtgggatgaatctgctggatcagagtgtgataaagaaatag

SEQ ID NO: 244407 - DNA, 1383 bp, synthetic construct
  misc_feature 1..1383: note = Description of Artificial Sequence: Synthetic coding sequence
  source 1..1383: mol_type = other DNA
atgcatagccctcccagagaccaagcagccatcatgctgtggaagctggtagaaaatgtcaagtacgaagatatttacgaggatcggcatgacggcgtgccgtcccattcctcgagactctctcagttgggttctgtgagccaaggtccatacagcagtgcccctccactctcccacacccccagcagtgacttccaacccccttacttccccccaccctatcagccactgccttatcaccagtcacaggatccttatagccacgttaatgatccctatagtctgaaccccctgcaccagccccagcagcatccgtgggggcagcgccaacggcaagaagtggggtcggaagccggtagcttgctccctcagccccgagctgctctacctcagctcagtggccttgaccctcgccgagactatcattctgtgaggagacccgatgtcctccttcacagcgcccaccacgggcttgatgccggaatgggcgattccttgtcattgcacggcctcgggcaccctggaatggaggatgtgcagagcgtggaagacgcaaacaacagcgggatgaatctgctggatcagtccgtcattaagaaggtgcctgtgccaccaaagtctgtgacaagtctgatgatgaataaagatggctttctgggaggcatgtctgttaataccggcgaagtgttctgcagcgttccaggaagattgtccctcttgtcttctacatcaaagtataaggtgactgtgggcgaggttcagcgtcggttgtcacccccagagtgcttgaacgcttcacttctgggaggggtgctaagacgggctaagagtaagaacggagggagatcattaagggaacgcttggaaaaaattgggctgaacctgccagcaggacgcagaaaagccgctaacgtgaccctgctgactagtctagttgagggggaggccgtgcatttggcaagggattttggatatatctgcgagacagaatttccagctaaggcagttagtgaatatctgaaccggcaacacaccgacccatccgacctccacagccgaaagaatatgttgctggccactaagcagctgtgtaaagaattcaccgacctgctcgcgcaggaccgcacccccatcggtaattctcggccttccccgattcttgaaccgggtatccagtcctgcctgacccacttctccctgatcacccacggcttcggggctccagccatatgcgccgctttgaccgcgctccagaactacctgacggaggccctaaagggtatggataaaatgtttctgaacaacactacaaccaaccggcatacctcaggagaagggccaggcagtaagacaggggacaaggaggagaaacaccggaaatag

SEQ ID NO: 244408 - DNA, 1359 bp, synthetic construct
  misc_feature 1..1359: note = Description of Artificial Sequence: Synthetic coding sequence
  source 1..1359: mol_type = other DNA
atgagcaccacttttcccggacttgttcacgatgccgagatcagacacgacggctccaattcataccgactcatgcaactcggctgtcttgagtcggtcgctaactccactgtggcatactcatcttcttctccgctaacctatagtacaacagggaccgagttcgcatctccgtatttcagcaccaatcaccaatacacccctctccaccaccaatccttccattatgagtttcagcactcccaccctgcggtgacacctgatgcctatagtttgaactctctacaccactcacaacagtactaccagcagatacaccatggggagccaactgatttcatcaatttgcataatgctcgcgcactgaaatcgtcttgtctggacgagcaaagaagggaactgggctgcctcgatgcatatagacggcacgacctgtcccttatgagccatgggagccaatacggaatgcacccggatcaaaggttgctgcctgggcctagtctgggcctggccgcagccggagccgatgacctgcagggctccgtggaagctcagtgcggactcgtcctgaacgggcagggcggagtgatccggaggggcggaacctgtgttgtgaaccctactgatttgttttgttcagtgcctggaagactcagcttactctcatcgacgtctaagtataaagtcactatcgcggaggttaagcggaggttgtcgccccctgagtgcctgaacgcttcactgctgggaggtatcttgaggagggccaagagtaagaacgggggtcgctgtctccgtgagaaattggaccggctggggctcaacttgcccgcagggaggagaaaggccgcaaatgttactctgcttacatctctcgtcgaaggcgaggcgttacaccttgcaagagatttcgggtacacatgtgaaacagaattcccagcaaaggccgttggggaacatctcgcccgtcagcacatggaacagaaggagcagacagctaggaaaaaaatgattcttgccaccaaacagatctgtaaggaatttcaagacctcttatcgcaagatcgctcaccactgggtagtagcagaccaactcctatactggatcttgatatccaacggcatctcacccacttttctcttatcacacacggttttgggactccggctatatgcgccgctctgtctaccttccaaactgtgctgagtgagatgctgaattatctggagaagcatacaactcacaagaacggaggagcagccgatagcggacagggccatgcaaattcagagaaggccccattgagaaagacctccgaagcagccgtgaaagagggtaaaaccgagaaaactgactag

SEQ ID NO: 244409 - DNA, 1329 bp, synthetic construct
  misc_feature 1..1329: note = Description of Artificial Sequence: Synthetic coding sequence
  source 1..1329: mol_type = other DNA
atgctggtacacacctattctgccatggaacggcctgacggccttggcgctgccgcagggggagccagattgagctcgctgccgcaggccgcttatggcccagcccctcctctatgtcatacgcctgcagccactgccgctgctgagttccagcccccatatttccctcccccttatcctcagccacccctgccatatggccaggcccctgatgccgcagctgctttcccccatcttgccggagacccatatgggggacttgcccctctggcgcagccccaaccaccccaggcagcttgggccgctcccagggccgctgccagagcccacgaggaaccgccaggactgctagctccaccggctcgagccctcggcctggatccaagaagggactacgccactgcggtccccagactgctgcacggactggccgacggggctcatggcttggcagatgcaccactcggtctccccggtctcgctgctgcgccaggcctagaagacctccaagctatggatgagcctggaatgtccttgctggaccagagcgtaattaagaaggtgccaatccctagcaaagccagtagcttgagcgcgctttccctggccaaagatagtctggtagggggtattacaaatcccggagaagtgttctgctcagtccccggacgcctcagtttgctgtcctcaacttctaagtacaaagtgacagtgggagaggtgcagcgtcgcctgtctcctccagaatgtcttaacgcctcccttctggggggtgtgttgcgacgagcaaagtccaaaaacggtggcaggtgcctgcgcgaacggctggaaaagatcgggctgaatctccccgctggtcgcaggaaagccgctaacgtgacgcttctgacttctctcgtcgagggagaagccgtacatcttgcacgggacttcggatacgtttgtgagacggagttcccagccaaggccgctgccgaatacctgtgtagacaacacgctgacccaggggaactgcacagcagaaaatctatgcttctagccgctaagcagatttgcaaagagtttgcagacctgatggctcaggatcggtcccccctggggaactctagaccggcattgattctggagcccggagtccagtcctgtctcacccatttttcactgatcactcacggttttggcggacctgccatctgtgcggcactgactgccttccaaaactacctgctggaaagcttgaaaggcctggataaaatgtttctgtcctcggtgggtagcggtcacggagaaaccaaggcctcggaaaaagacgcaaaacaccgtaaatag

SEQ ID NO: 244410 - DNA, 1353 bp, synthetic construct
  misc_feature 1..1353: note = Description of Artificial Sequence: Synthetic coding sequence
  source 1..1353: mol_type = other DNA
atgctctggaagatcacagacaatgtgaagtatgaggaagactgtgaggataggcacgacggatcctcgaacggaaatcccagggtgccacacctgagttctgctggccaacatctgtatagtccagcacctcccctgagccacacgggcgtggccgagtatcaaccacctccttacttccccccaccttatcagcagcttgcctatagccagagcgcagacccctactcacacctgggtgaggcctacgctgcggctattaatccgcttcatcagcctgccccaacagggtcacagcagcaggcatggcccggacgccaaagtcaggaaggggctggtttgccctcccaccatggccgtcctgccggactactgccccacttgagcggattagaggctggcgctgtctccgccagaagagacgcttacagaagatccgatctgttgctgcctcacgcacacgcactcgacgcagcagggctggctgaaaacctagggctacacgacatgccacaccaaatggacgaggtgcagaatgtggacgaccagcatttgctattgcacgaccagactgtgattaggaagggcccaatctccatgactaagaatcccctgaatttgccgtgccaaaaagagctggtcggtgcagtcatgaatcccacagaagtcttttgctccgtaccaggtcggctctcactgctatcttccacttccaagtacaaagtgactgtggccgaagtgcagagacgcctgtcacccccagagtgcctgaacgcgtccctgcttggaggcgtgctgcggcgagctaagagcaagaatgggggaaggagcctgcgggagaagctggataaaatcggactcaacctgcctgctggcagacggaaagccgctcatgtgacgctgctgacttccttggtggagggcgaggctgttcacctggccagggattttgcctatgtttgtgaggctgaattcccctcaaagccagtggccgagtatttgacaaggccacatctgggcggacggaatgaaatggctgctcggaagaatatgttactcgcggctcagcaactttgtaaggagttcaccgaacttctgtcgcaagaccgcacaccacacgggacttcacgccttgccccagtgctggagacaaatatccagaactgcttaagccacttcagcctgattacccatgggtttggcagccaggcgatctgtgcggctgtgtcagccctccagaactacattaaggaagcgcttatcgtcatcgataagagttacatgaaccctggcgatcagagtcccgctgattctaacaagactttggaaaaaatggaaaagcatagaaagtag

SEQ ID NO: 244411 - DNA, 357 bp, synthetic construct
  misc_feature 1..357: note = Description of Artificial Sequence: Synthetic coding sequence
  source 1..357: mol_type = other DNA
atgttcttgcaggatcgacacgacggttcttcgaatggcaatcccagggtgccacatctgtcgtcagccggtcagcacctctactcgccggcaccccctctgtcccacacaggggtggctgagtaccagccgcctccttatttcccaccaccctaccagcagcttgcatactctcagtccgccgatccctactcccacctgggtgaagcctacgctgccgcaattaatccgcttcaccaaccagctccaaccggctcacaacagcaggcctggcccggaagacaaagccaggaaggagccggactgccaagccaccacggcaggccagccggtcttctgccacatctctccggctag

SEQ ID NO: 244412 - DNA, 846 bp, synthetic construct
  misc_feature 1..846: note = Description of Artificial Sequence: Synthetic coding sequence
  source 1..846: mol_type = other DNA
atgcctcatcagatggacgaggtgcagaatgttgacgaccagcacctgctgctgcacgaccaaaccgtgatccgcaagggcccaatcagtatgaccaagaacccattgaatctgccttgccaaaaagagcttgtgggtgccgtgatgaaccctaccgaggtcttctgtagtgtgcccggtaggctctccctgttgtcaagcacaagcaaatacaaggtgaccgtggccgaggtacagcggaggctgtcccctcctgagtgtctgaacgcctctctcctcgggggagttcttcggagagcaaaatccaaaaatggaggtcggagcctgcgggagaagctggacaagattggactaaacctacccgcagggagacgaaaagccgctcatgttacactgctcaccagtctcgttgaaggagaagccgtgcatctggccagagatttcgcttacgtgtgcgaggctgagttccctagcaagccagtggccgagtacctcactcgccctcacctcgggggtcggaatgagatggctgccaggaaaaatatgctgcttgctgcacagcagttatgcaaggagtttaccgaactcttgtcacaggataggacgcctcacggcacttcccgactggcgccagtgctagagacaaatatccagaattgcctcagtcacttttctctgatcacacacggctttggttcccaggctatctgtgcggctgtatccgcactgcaaaattacataaaagaggcactcattgtgatcgacaagtcttacatgaaccccggtgaccaatctccagccgacagtaataagacactggaaaaaatggaaaaacacaggaagtag

SEQ ID NO: 244413 - DNA, 1041 bp, synthetic construct
  misc_feature 1..1041: note = Description of Artificial Sequence: Synthetic coding sequence
  source 1..1041: mol_type = other DNA
atggcggcatctggcaagctgtccacatgtcgcttgccgcctctgcccaccatcagggagatcattaagttgttgcgcctgcaagccgcaaaacagttatcccagaactttctactcgacttgcggctgaccgacaagatcgtcagaaaggcaggtaatcttacaaatgcttatgtctacgaggtgggtcctgggccaggaggaatcacgcgctcaatcttgaatgccgatgtagccgagttgctggtggtggagaaagacactaggtttattcctggacttcagatgctgtctgacgccgcaccaggcaagttgcgcattgttcacggagatgttttgacctttaaggtggagaaggccttcagcgagagcctaaagcgcccttgggaggacgaccccccaaatgttcacattattggtaatctccctttcagtgtgtctacacccttgattatcaagtggctggaaaacatcagttgtagggatgggcctttcgtttatgggagaacccagatgacactgaccttccaaaaggaagtggcagaaagattggcggctaataccggtagtaagcagcggtcacgactgtctgttatggctcaatacctgtgtaacgttcgtcatattttcactatccccggtcaggcttttgtgcctaaacccgaagtcgacgtcggtgtagtgcatttcacccccctgatccagccaaagatcgaacaacccttcaaactggtggaaaaggtggttcagaacgtgtttcagttccgaagaaagtattgtcatcgcggactccgcatgctcttccctgaggcccagcgccttgagtcaactgggagattacttgagcttgctgatattgatcccactctgcggcctcgacagctatctatctcacattttaaaagtctttgtgacgtctatagaaaaatgtgtgacgaggacccacagctgttcgcatacaactttcgcgaggagcttaaacgccgaaaatctaaaaatgaagagaaagaggaagacgacgccgaaaactatcggctatag

SEQ ID NO: 244414 - DNA, 1728 bp, synthetic construct
  misc_feature 1..1728: note = Description of Artificial Sequence: Synthetic coding sequence
  source 1..1728: mol_type = other DNA
atgagccatgccgcagagcccgcacgagacggggtcgaggcaagcgctgaaggacccagagccgtcttcgttttgctggaggagaggcgtccggcagattcggctcagctgctgagccttaattccttgttgcctgagtctggcatcgtggctgatattgaattggagaacgtgctggacccggactctttctatgaactaaagagccagcccctgcctctgcgtagctcactgcctatcagcctgcaagccacacctgcaacaccagccacactgagtgcatcttcctcagccggaggctcccgcactcctgctatgagcagctctagctcttcaagggtgcttctgcgccagcagctgatgagggcccaggctcaggagcaggagcggcgagaaagaagggaacaagccgctgcggcaccgtttccttcacccgcaccagcttcacctgcaataagcgtcgtaggagtgagtgccggaggccatacccttagtcgcccacctcctgcccaagtgcccagggaagtactaaaagtccaaacccatctagagaacccgacgcggtatcatctgcagcaggcacggaggcagcaggtgaaacagtacttgtctaccactctcgggcctaagctagcttcacaagcacttaccccaccgccagggccagcgtccgcccagccgctgccagcccctgaggcagcgcacacgacgggaccgactggttccgcccctaattctccaatggctcttctgaccattggtagtagctctgaaaaggagattgacgatgtaatcgacgagatcatttcactggagtcctcttacaacgatgaaatgctgagctatttgccaggcggtactacaggtctgcagctcccgtcaacactcccggtgtccggcaatctgttggacgtctactcctcgcagggtgtcgcaacgccggctatcaccgtctccaactcctgcccagcggagctccctaacatcaagcgcgaaataagtgaaacggaagccaaagctttgctgaaagagcggcagaagaaagataatcataacctcattgagagacgacggaggttcaatatcaacgaccgcattaaggaactaggcacactcatacccaaatcctctgacccggagatgagatggaacaaagggacgatacttaaggcctctgtggattatattagaaagctgcagaaagaacagcagcgtagtaaagacttggaatctcgacagcggtcactagaacaggccaacaggtccctccagctccggatacaggagctggaactacaggcccaaatccatgggctccccgtgccgccaactcccggtctgctgagcctcgctaccacttctgcgtccgattcccttaaacctgagcagctcgatattgaagaagaagggagacccggagcagcaactttccacgttggagggggtcccgcacagaacgccccacaccaacagcccccagccccaccaagtgacgctctgttagatcttcacttcccttctgaccatttaggagacctgggggaccccttccacctagggttggaagacatactgatggaggaggaggagggtgtggtaggaggcttatctggtggcgcactgtctcctctccgggctgcctctgaccctctgctgtcaagtgtgagcccagcagtgagcaaagcatcctcacgcagatcctcgttcagtatggaagaagagtcatag

SEQ ID NO: 244415 - DNA, 1509 bp, synthetic construct
  misc_feature 1..1509: note = Description of Artificial Sequence: Synthetic coding sequence
  source 1..1509: mol_type = other DNA
atggcatgggctctcaaactgccccttgccgatgaggtcatcgaatccgggctcgtgcaggattttgacgcatccctgtcaggtatcgggcaggaacttggggcaggggcatattctatgtcggacgtgctggcgcttccaatctttaagcaggaggagtcatccctgccaccagataatgagaataaaattctcccatttcaatacgtactgtgcgcagctacctctcccgctgtgaaactgcacgacgagaccctcacctacctgaaccaggggcaatcttatgaaatcagaatgctggataaccggaaacttggtgagttgccagagattaatggaaagctcgtgaaatccatcttcagggtagtctttcacgatagacgtttgcagtacactgagcaccaacagctggaggggtggcgatggaatcggccaggagacaggattctggatattgatatccccatgtcagtcggaattatcgatcccagggctaaccctactcagctgaacacagttgaattcctgtgggaccccgctaagcggacctccgtttttatacaggtccactgcatcagtaccgagttcaccatgagaaaacatggcggtgagaagggcgtgccgttcagagtccaaatcgacacatttaaggagaacgagaacggcgagtatactgaacacctacattccgcttcctgtcagatcaaagtgttcaaaccaaaaggcgctgacagaaagcagaaaacagatcgggagaaaatggaaaaaagaaccccccatgagaaggaaaaatatcagccaagttacgagactacaatcttgactgaatgctcgccatggccagagattacctatgttaacaacagccccagtccagggtttaattctagtcactccagcttttccttgggcgaaggcaatgggtcaccaaatcatcagcccgagcccccaccccctgtgacagataatctcttaccaacgacgactcctcaggaagcccagcagtggctgcataggaataggtttagcactttcacacggcttttcaccaatttctcaggggcagacctgctgaagctcacccgtgatgatgtgatccagatctgcggtccagccgacggtattagactgtttaatgccctgaaggggcgaatggttcggcctcgactcactatctacgtatgtcaagagtcgcttcagcttagagaacagcagcagcagcagcagcaacagcaacagaagcatgaggatggtgattcgaatggcacgttctttgtctatcacgctatttaccttgaagaattaactgcagtagaactgactgaaaagatcgcccagcttttttccataagtccttgtcagatcagccaaatatataagcagggccctaccggaatacacgtgctgatcagtgatgagatgatccagaattttcaggaggaggcctgctttatcctcgacacaatgaaggccgagacaaatgactcctaccatatcatccttaagtag

SEQ ID NO: 244416 - DNA, 1356 bp, synthetic construct
  misc_feature 1..1356: note = Description of Artificial Sequence: Synthetic coding sequence
  source 1..1356: mol_type = other DNA
atggcttgggcactgaagctgcccctcgcagacgaagtgatcgagagcggactggtgcaagatttcgacgcatccctgtctggcatcggacaggagttaggagctggggcttatagcatgagcgatgttttggccctgcccattttcaaacaagaagaatcttcactgccaccagataatgagaataaaatactcccctttcagtatgtcctctgcgccgcaacgagtccggctgtaaagctgcacgatgagaccttaacatacttaaaccagggtcagtcatacgaaataaggatgttagataacaggaaactgggcgaactgcccgaaatcaacggcaaactcgtgaagagcattttccgtgtagttttccatgaccgacggctgcagtatacggagcatcagcagttggaagggtggcggtggaatcgccctggggaccggatcctcgatatcgacattcccatgagtgtgggaatcatcgatccaagggcgaaccccacgcagttgaacactgtcgaattcttgtgggaccctgccaagcggaccagcgtctttattcagcctaagggcgcagaccgtaaacagaagactgaccgggagaaaatggaaaaaagaactccccatgagaaggaaaaatatcagccttcttatgaaactaccatcctaactgagtgctccccgtggcctgaaatcacctacgtcaacaacagcccaagtcccggatttaattcttcccatagctccttcagtctgggcgaagggaatggttcacctaatcaccagcccgaaccacctccacccgtgacagataatcttcttcctactactaccccccaggaggcacagcagtggttacatagaaatcgcttctcgacattcacacggttattcacaaacttttctggggcagacctgcttaagctgacacgtgatgacgttatacagatttgcggccctgccgacggcataaggctgttcaacgctctgaaaggtcggatggtgcggcctaggcttacaatatatgtgtgccaggagtcgcttcagttgagagaacaacagcagcagcagcagcagcagcagcagaagcacgaggatggcgattctaatgggacattcttcgtgtatcatgccatttatttggaagaattgacggccgtcgaactcactgaaaaaatcgcccagttgttctccatctctccgtgccaaattagtcagatttataagcagggccctactggtatccacgtgttgattagcgacgagatgatccagaattttcaagaggaggcttgttttattctggacactatgaaggcggagacaaatgacagttaccacattattctgaagtag

SEQ ID NO: 244417 - DNA, 1353 bp, synthetic construct
  misc_feature 1..1353: note = Description of Artificial Sequence: Synthetic coding sequence
  source 1..1353: mol_type = other DNA
atggcttgggctctgaaacttcctctggccgacgaggtgattgagtcaggtttggtgcaggatttcgacgcatccctgagcggcatcgggcaggaactcggggctggcgcatatagtatgtcagacgtgttggccctgccaatcttcaagcaggaagaaagttctctgccaccagacaacgaaaacaagatcctaccgttccaatatgtactgtgcgctgcgacatcccccgcagtaaagttgcacgacgaaaccttaacctacctgaaccagggacagtcttacgaaattcggatgcttgacaatcgtaaactgggagagctgcccgaaattaacggcaagctagttaagagtatatttcgagtcgtcttccacgacagacgtctccaatacacagaacatcagcagctggaggggtggcgctggaatcgccctggggatcggattctcgatatcgacattcctatgtcggttgggatcatcgatcccagagctaatccaacccagttgaacacggtggagtttctgtgggatcctgcaaagagaactagtgtatttatccaacccaagggggcagacaggaagcagaaaacagaccgcgaaaagatggaaaaacgcactcctcacgagaaagagaagtatcaacctagctatgaaacaactattctcaccgaatgtagtccttggcccgagatcacctatgtcaataattcgccatctcccggtttcaatagttcgcattcttctttctcactgggggaaggcaatggtagccccaatcaccaacccgaacccccacctccggtgactgacaatctattaccaacaacaacaccacaggaggcgcagcagtggctccatcggaaccggttcagtaccttcacgcggctgttcaccaatttcagcggagcagatcttctgaaactgactagggacgacgtcatccagatttgtgggccagccgatggcatacgcctgtttaacgctctgaagggaagaatggtcaggcccaggcttactatttatgtctgtcaggaaagtctccagctccgagagcagcagcaacaacagcagcagcagcagcaaaagcacgaggatggcgattctaacggaaccttttttgtctaccacgcgatttatctggaggaactcacggctgtggagctgaccgagaagatagctcagttattttccattagcccatgtcagatctcccagatctataaacagggacccaccggcattcatgttttgattagtgacgaaatgatccagaacttccaagaggaggcatgtttcattcttgacacaatgaaggaaaccaatgatagctatcatatcatcctgaagtag

SEQ ID NO: 244418 - DNA, 1440 bp, synthetic construct
  misc_feature 1..1440: note = Description of Artificial Sequence: Synthetic coding sequence
  source 1..1440: mol_type = other DNA
atgttattttggcatactcagccagaacactataaccagcataatagtggctcctacttgcgggacgttctcgctttgccgatctttaagcaggaggagccacaactgtctcccgaaaatgaggcacgattacctccactccaatacgtgctgtgtgccgctacctccccagccgtgaagttacatgaggagacactgacatatctgaatcaaggacaatcgtatgagatacgcctgctggagaatagaaagctgggagacttccaggacctgaacaccaaatacgtcaaatctataataagagtggtgtttcacgacaggagactccagtataccgagcatcagcagctcgaggggtggcggtggtcacgtcctggggacagaatcctggacatcgatatccccctttccgttggcatattagacccaagagcttcacccactcagttaaacgccgtggaattcctatgggatccagccaaaagagcatcagcattcatccaggtgcactgtatctcgacggagttcacgcccagaaagcacggcggagagaagggtgtgccattcagagtgcagatagacaccttcaagcagaatgaaaacggagaatacacggagcatctgcattctgcctcatgtcagattaaggtttttaagcctaagggcgctgaccggaagcaaaagaccgacagagagaaaatggaaaagcgtactgcacaggaaaaggaaaagtatcagccctcctacgagactactattcttaccgagtgtagcccatggccagatgtggcttaccaggtcaacagcgcccctagtccttcctataacgggagtccgaactcattcggactaggcgagggaaatgcgtcccccacccacccggtggaggccctgcctgtcgggagcgatcatctccttccgtccgcctccattcaggatgctcagcagtggttacaccgtaataggttttcccagttctgtagactttttgcctcattttccggagcagacctgttgaagatgagcagggacgatctggtacagatttgtggcccagccgacggaattcgactattcaacgcgattaagggccgtaatgtccgtcctaaaatgactatttacgtatgccaggaacttgagcagaatagagtgccccttcagcagaagagagacggtagcggagactccaatctctctgtataccacgccatcttccttgaagagctcactacccttgagctgatagaaaagattgcaaacctatactctattagccctcagcacatccatcgagtgtaccgtcaaggacccacggggatccacgtggttgtgagcaatgagatggtccaaaacttccaagatgaatcctgcttcgttcttagtaccattaaggcggagagcaacgacggctaccatatcatcctaaagtgcggcctctag

SEQ ID NO: 244419 - DNA, 99 bp, synthetic construct
  misc_feature 1..99: note = Description of Artificial Sequence: Synthetic coding sequence
  source 1..99: mol_type = other DNA
atggttcagaattttcaggatgaaagctgttttgttctatcaacaatcaaggccgagagcaatgatgggtaccacatcatattaaagtgtggattgtag

SEQ ID NO: 244420 - DNA, 1218 bp, synthetic construct
  misc_feature 1..1218: note = Description of Artificial Sequence: Synthetic coding sequence
  source 1..1218: mol_type = other DNA
atggccaagtatgtcagtttgacagaggccaacgaagagttaaaggtacttatggacgagaatcagactagccgaccggtcgccgtccacactagtactgtcaaccctctggggaagcaactcctcccgaaaactttcggacagtcttccgtaaatattgatcagcaggtggtaattggtatgcctcagaggcccgctgcatctaatatccctgttgtcgggagcccaaatccccctagtactcatttcgcatcacagaaccagcatagctactcaagccccccatgggccggtcaacataataggaaaggggaaaaaaatggcatggggctgtgccggttgtccatgaaggtgtgggagacggtacagagaaaagggacaacttcatgccaggaagttgtaggggagttggtggcgaaatttagggccgctagcaatcatgcctcgcccaacgagtccgcctatgatgtcaagaacatcaagaggcgcacctatgacgcgctgaacgtgctgatggctatgaatataatctcccgtgaaaagaagaaaatcaaatggataggccttacaaccaactctgctcagaactgccaaaacctgcgagtggagcgccaaaaacggctggagcgcataaagcagaagcagtctgaactccaacagctcattcttcagcagatcgctttcaagaacctggtcctgcggaatcagtatgtcgaggagcaggtgtcacagagacctctgcccaactcagtcattcatgtaccgtttatcattatctcctcaagtaaaaagaccgtcattaattgttccatcagcgatgataaaagtgaatatctgttcaagtttaattccagctttgagatccacgatgacaccgaggtccttatgtggatgggcatgacctttggcctggagtctggttcctgcagcgctgaagatctgaaaatggcccgaaacctagtgccaaaggccctcgagccatatgttaccgaaatggcacagggaacattcgggggtgtgttcactacagcaggaagtcgatccaacggaacatggctgagtgctagtgacctgaccaacatcgcgatcgggatgctggccacctctagtggcggaagtcaatactccgggtcacgcgtggaaacaccggcagtagaggaagaagaggaagaagacaataatgacgatgatcttagcgaaaatgatgaagacgactag

SEQ ID NO: 244421 - DNA, 2649 bp, synthetic construct
  misc_feature 1..2649: note = Description of Artificial Sequence: Synthetic coding sequence
  source 1..2649: mol_type = other DNA
atggagggtgagagcagtcgcttcgaaattcatactccggtgagcgacaagaagaaaaaaaaatgctcaatccacaaggagcggccacaaaaacacagtcacgagatcttcagggacagcagtctggttaacgagcagtcccagatcaccaggcgaaagaagcgtaagaaagactttcagcacctgatcagtagtcctctaaaaaagagcagaatatgtgatgaaaccgcaaacgccaccagcaccctgaaaaaacggaagaagagacgctactcagccctcgaagttgatgaagaggccggagtgacggtggtattagtggacaaggagaacattaacaatacaccgaagcactttcgcaaggatgtggatgtcgtctgtgtcgacatgagcattgagcagaagctccccaggaaaccgaagacagataagttccaggtgctggctaaaagccatgcccataagagcgaggcattacactcgaaagtccgcgagaaaaaaaacaagaaacatcagcgtaaggcagcctcctgggaaagccaacgcgcaagagacacgctacctcaatctgaatctcatcaagaagagagctggctgtctgtcggccctggaggcgaaatcaccgaattgcccgcaagcgctcacaagaacaaatctaaaaagaagaaaaagaagtcttccaatcgggaatacgaaactttggcgatgcctgaaggatcacaagcaggaagagaggcaggcacagacatgcaagagagccagcctaccgtaggcttggacgacgagaccccccagctcctgggacctacgcataagaagaaaagtaaaaaaaagaagaagaaaaagtccaatcaccaggagtttgaagcactggccatgcccgaaggatcacaagtcggctctgaagtaggagccgatatgcaggagagcaggcccgctgtggggctgcatggtgagaccgcaggcatccccgcacccgcatacaaaaataaatctaagaaaaagaagaaaaagtcaaaccatcaggagttcgaagcagttgccatgcccgagtcactggaaagcgcttatccagaggggtcgcaggttggctcggaggtcggcactgtggagggtagcactgccttgaagggattcaaggagtctaacagtactaaaaagaaatcaaagaaacggaaactgacctcagtgaaaagggctcgtgtttcaggggatgacttctcagtgccctccaagaactccgagagtactttgtttgactccgtggagggagatggggcaatgatggaggaaggcgttaagagtagacccagacagaagaagacgcaggcttgtctggcctcaaagcatgttcaggaagctcctcggctagaacctgcaaatgaggagcataatgtggagaccgctgaggactctgagatcaggtacctttccgccgactctggagatgctgatgatagcgacgccgatctgggatcagccgtgaagcagctgcaggaatttatccctaacatcaaagaccgagccacctctaccatcaagagaatgtaccgggacgacttggagcgctttaaagagttcaaggcacaaggggtggccatcaagttcggcaagttctccgtcaaagaaaataaacagctggagaagaatgtcgaagacttcctggctctgactggtatagagtcagccgataagctgctgtacacagatcgctatccagaggagaagagcgtgataacgaacctgaaaagacgctacagcttccgtttacacatcggccgaaacatcgcacgcccatggaagctgatctactaccgggctaagaagatgttcgacgtgaataattataaaggcagatatagtgaaggggacactgaaaaactcaaaatgtaccactcgctcctgggtaacgattggaagaccattggggaaatggtggcgagaagcagcctgtccgtcgcgttgaaattttctcaaatatccagccagaggaacagaggagcctggtcgaagagtgagacaagaaagttgataaaggcggtagaggaagtgatcctgaagaagatgtcaccccaggaacttaaggaggttgactctaagcttcaggagaacccagaatcatgtctttccattgtgcgggagaaactctacaaagggatctcttgggttgaagtggaggcaaaagtacagactcgcaattggatgcagtgcaaatccaagtggacagagatcctcacgaaaagaatgacaaatggtaggcgaatctattatggaatgaacgcacttagagcaaaggtgagtctgatcgaacgtctgtacgagattaacgtcgaagataccaacgaaatagattgggaggacctcgctagcgctatcggagatgtgcctccgtcttacgtccagacgaaattctcacgactgaaggctgtttatgtgcctttttggcagaagaaaacattccctgagattatcgactatctgtatgagacgaccctccctctgctcaaagagaagctggaaaaaatgatggagaagaaaggaactaaaatccagacaccagccgcaccaaagcaggtgtttccttttcgcgatattttttactacgaagatgactcagagggcggtcatcggaaacgtaaacgacggtag

SEQ ID NO: 244422 - DNA, 2718 bp, synthetic construct
  misc_feature 1..2718: note = Description of Artificial Sequence: Synthetic coding sequence
  source 1..2718: mol_type = other DNA
atggagggagaaagcagccggttcgagatacacactccagtgagtgacaagaaaaagaagaagtgctcgatacacaaagaaagaccgcagaagcacagccacgaaatttttagggattcatctttggttaatgaacaatctcaaattacccgcaggaaaaagaggaagaaggacttccaacacctgatctcttctccactgaagaaatcccgcatttgtgatgaaactgcgaatgccacatccactctgaagaaaagaaagaaaaggagatactccgccttggaagtagatgaagaagccggagtgactgtcgtgctcgtcgacaaggaaaacattaacaacacgcccaagcactttaggaaggatgtcgatgtagtgtgtgtggatatgagtattgagcaaaagctccctcggaagccaaaaacggacaagtttcaggtgctggcgaagagccatgcccacaagtcagaggcacttcactcaaaagtcagagaaaagaaaaacaagaagcaccagagaaaggcggcatcttgggaatcccagagagctagagacaccctcccacagagtgagagccaccaagaggagagctggctctcagtggggccaggcggagagattacggagctcccagccagtgcccacaagaataaaagtaagaagaagaagaaaaagtcttccaatcgggagtacgagaccctagccatgcctgaaggcagtcaggcgggacgcgaagctggaaccgatatgcaggaatctcagccgacagtgggattggacgacgagacgccacagctgcttggtcctactcacaagaaaaaatctaagaagaaaaaaaaaaagaagtcaaatcatcaggagttcgaagccctggcaatgccagagggctcccaagtaggctctgaagttggagctgacatgcaggagagtaggcccgctgttggtttgcatggcgaaacagctgggatacccgctcctgcatacaagaacaagtctaagaagaaaaagaagaagtcgaaccaccaggagtttgaggctgtagcgatgcctgaaagtctggagtccgcctatcccgaaggcagtcaggttgggtcagaagtggggacggtcgagggctcgacagccctgaagggcttcaaggagtcaaattccaccaaaaaaaagagcaaaaaacgcaagttaacttcagtgaagcgagcaagagtgtcaggcgacgattttagcgtgccatccaagaattccgaatccacactgtttgattcggtagaaggcgatggggcaatgatggaggagggcgtcaaaagcagacctcggcagaaaaagacccaggcctgcctggcttccaagcatgtgcaggaagctccacggttggagcctgccaacgaagaacacaatgtcgaaacagctgaggattcagagatcagatatctctcagccgatagcggagatgctgatgattcagacgcagacctcggctccgccgtgaaacagttgcaggagttcatcccaaatataaaggatagagccacttccacaatcaaaaggatgtacagagatgaccttgagaggtttaaggagttcaaagctcaaggtgtagcaattaaattcgggaagttctccgtaaaagagaataagcaactggagaagaatgtggaggatttcttggcactcaccgggatagagtccgctgataagttgttgtacaccgaccggtatcccgaggagaagtcggtgattactaacctgaaacggcgatactcctttaggctgcatattgggaggaacattgccaggccctggaagctcatttattaccgcgcaaaaaaaatgtttgatgtcaataactataaggggagatacagtgaaggggacactgaaaaactgaagatgtatcacagcctgctgggtaatgactggaaaaccattggagaaatggtcgcaagaagctctctgagtgttgctctgaaattttcacagatcagcagtcagagaaaccgtggggcttggtctaaaagcgagacacggaagctcattaaagccgtcgaggaagtcattcttaaaaaaatgtccccccaggaattaaaggaggtggactccaaacttcaggagaacccggagtcatgtctcagcatcgtgcgggagaagctgtataagggaattagttgggtcgaagtggaggctaaagtccagactagaaattggatgcagtgtaagtcaaagtggaccgagatacttaccaagcggatgacaaatggcagacgtatctactatggcatgaacgctcttcgcgctaaagtttcactcatcgaaaggctgtatgagatcaacgttgaagacacgaacgagattgattgggaagatctcgcttccgccatcggcgatgtgcccccttcttatgtccagaccaagttttccaggctgaaggcagtttacgtcccattttggcagaagaagacatttcctgagattatcgactacctgtatgagaccacacttcctctactaaaggaaaagctcgagaagatgatggagaagaaagggacaaaaattcagacaccagctgcccctaaacaggtatttccatttcgtgacatcttctactacgaggacgatagcgagggagaagatattgagaaggaaagcgagggccaagctccgtgcatggcacatgcttgtaattccagcaccctcggcggacaggggagatggattatttag

SEQ ID NO: 244423 - DNA, 3489 bp, synthetic construct
  misc_feature 1..3489: note = Description of Artificial Sequence: Synthetic coding sequence
  source 1..3489: mol_type = other DNA
atggaggaggtgcgttgccccgaacatggtacattttgttttctaaaaacaggtgtccgcgacgggcctaataagggaaagagtttttatgtgtgcagggccgatacctgctcttttgtccgcgctactgatatcccagtgagccattgcctgctgcacgaggacttcgtcgtggagctgcaaggcctgctcctgccacaggataaaaaagagtatagattatttttccggtgtatccgcagcaaagcagaaggcaaacgctggtgcggtagcatcccatggcaagacccagactccaaggagcactctgtctctaataagagtcaacacgcatccgaaacattccaccactcatctaattggttgcgaaatcctttcaaggtcttagacaagaaccaggagccagcattgtggaagcaactcatcaaaggagaaggggaggagaagaaggccgacaaaaagcagcgggagaaaggtgaccagttattcgatcagaagaaagagcagaaaccggaaatgatggagaaggatctcagctctggcctagtccccaagaagaagcagtcagttgtccaggagaaaaagcaggaggaaggggctgagattcagtgcgaggccgagactggaggcacccataaacgggatttcagcgaaataaagtctcagcagtgccaaggaaatgaattgactcgcccaagcgccagtagtcaggaaaaaagtagcgggaagtcacaggacgtccagcgcgagtccgagcctttgcgagaaaaggtcacgcagttgctacctcagaacgtccattcgcacaacagcatcagtaaaccgcagaaaggtggacccctgaataaagaatataccaattgggaggccaaagaaacgaaggctaaagacggaccctccattcaggctactcagaagagcctccctcaggggcactttcaagaaagacccgagactcacagtgtaccagctcctgggggtcccgctgcccaagcggcacccgcagcacctggactgtccctcggggagggcagggaagccgcaacatccagcgatgacgaggaagaggatgacgtggtgttcgtttcttcgaagcctgggtctcccctcctttttgactcaaccttggatctcgaaactaaggagaacctccaatttcccgacagaagtgtgcagagaaaggtttcgccggcttctggggtgagcaaaaaagtggagcccagcgaccctgtagcccgacgcgtgtatcttacgacacagctgaaacagaagaaaagtactttggctagcgtgaatatccaagccctgcccgacaagggacaaaaactcattaagcagatacaagagctcgaggaagtcctgtccgggctgacactcagcccagaacagggaaccaatgagaagtccaattcacaggtcccacaacagagccatttcacgaagacaacaaccggacctccgcatctggtgccgcctcagcctctcccacgacgaggaacacagcctgtggggtccctggagttgaaatctgcatgtcaggtgacagccggtggaagcagccagtgctacaggggccataccaatcaggatcatgtccatgccgtatggaaaatcacctccgaggccatcggccagctgcaccggagcctcgaatcttgtccaggagagaccgtggtcgcagaagaccccgctggtttgaaggtgccactgcttctccatcaaaagcaggctctggcttggcttctctggagggagtctcaaaaaccccaaggaggtatcctcgctgacgatatgggcctggggaagactcttacaatgattgctcttatactgacccaaaaaaaccaggagaaaaaggaagagaaggagaagtccacggctctcacctggttaagcaaggatgattcttgcgacttcacatcccacggcacactgattatctgccccgcttcacttatacaccattggaagaatgaagtagagaagcgagtgaattctaataaactgcgggtttatctctaccacggccctaatagggacagtcgtgccagggtgctcagtacttacgacatcgttattacaacctactccctggtagccaaggagatacccacaaataagcaggaggccgaaatccctggcgctaacctaaacgtggagggcactagcacaccactgctccggatcgcttgggccaggattatactggacgaggcacataacgtgaaaaatccccgagttcaaacctccatcgccgtttgtaaattgcaggcatgtgctcgctgggccgtaacaggaacacccattcagaataatctgctggatatgtacagcttgcttaagtttctgaggtgctctccctttgacgagttcaacttgtggcgttcacaagtcgataatggcagcaaaaaaggaggggagaggttatcaatccttaccaagagcctgcttctgcgcaggaccaaagatcagctcgatagcactgggcgacccttagtcattctgccacagagaaagttccagttgcaccacctgaagctctccgaggacgaggagacggtgtacaacgtcttttttgcgcgatcaagatctgccctgcaatcctacttaaaacgacatgaatcaaggggcaatcagagcggcaggtcccccaacaatccattttctcgtgtagcactggagtttggatctgaggagccacggcacagcgaggccgcagactctcctaggagtagcacggttcacattctgtcacagctgctgcggctgcggcagtgctgttgccacctttcccttctgaagagcgccttggaccctatggaattgaagggcgagggcctggtgctctcgttagaagaacagctctctgcactcaccctgtcagaacttagagactcagagccaagctctactgtgtccctgaacgggacttttttcaagatggaactgtttgaggggatgagggaatcgactaagatttcgagtcttctcgctgagcttgaagccatccagaggaattccgccagccagaagtctgtcattgtgtctcaatggaccaatatgctgaaggttgtggcattgcatctcaagaagcacgggctgacatatgccacaattgatggcagcgttaatcctaagcagcgaatggatttggtggaagcctttaaccacagccgcggtcctcaggtgatgctcatctctctattagcaggcggagtcggcttgaatctcaccgggggaaatcatctgtttctactggatatgcattggaacccgagcttggaggaccaggcttgtgatcggatctaccgcgtgggacaacagaaggatgtcgtcattcaccggttcgtttgtgaaggcacggtagaggaaaaaattctccagcttcaagagaagaaaaaggacttggcgaagcaggtgctcagtggctcgggggagtccgtgactaagcttacattggccgacctccgcgtgctgtttgggatctag

SEQ ID NO: 244424 - DNA, 432 bp, synthetic construct
  misc_feature 1..432: note = Description of Artificial Sequence: Synthetic coding sequence
  source 1..432: mol_type = other DNA
aacatgctgaaagttgtggccttacatctcaaaaagcacggactcacttacgcgactatcgacggctctgtgaatccaaaacagaggatggatctggtcgaagcctttaaccattcaagaggcccacaggtaatgcttatctccttgttggccggaggggtcggactgaatctgacaggtggcaatcatcttttcctgctggacatgcactggaaccctagtctcgaggatcaggcatgcgaccggatctatagagtagggcagcagaaggacgttgtcattcacagatttgtctgtgaaggaacagtggaagagaaaatcttgcagcttcaagagaaaaaaaaggatcttgctaagcaggtgctctccggaagtggggaatcagtgacaaaactcacgctagcggatcttagagttctctttggcatctag

SEQ ID NO: 244425 - DNA, 1263 bp, synthetic construct
  misc_feature 1..1263: note = Description of Artificial Sequence: Synthetic coding sequence
  source 1..1263: mol_type = other DNA
atggcagaactgggcaagaagtactgcgtttattgcctggccgaagtatcacctctcaggttccggtgcaccgaatgccaggatatcgagctttgccctgagtgcttttcagccggagcagaaattggccatcacaggcgctatcacggttaccagctagtagacggcggacgatttaccctgtggggcccagaagcagaaggcggatggacatcaagggaggagcagctcctgcttgatgccatcgagcagttcggcttcggcaactgggaggatatggccgcacatgttggtgcaagccgaaccccacaggaagtcatggaacactatgtgtccatgtatatccacggtaatcttggaaaggcctgtattcctgacaccattcccaatagagtgaccgaccacacgtgcccaagcggcggacccctatcaccaagtctgactacccccctccctccacttgacatttctgtggccgaacaacaacagcttggatacatgcccctgcgggacgactatgagatagaatatgatcaagacgccgagacactgattagcggccttagtgttaattacgacgatgacgacgtggagatcgagctcaagagggctcacgtggacatgtatgtgaggaagctcaaagaaagacaaaggcgcaagaatatagccagagactataatctggtcccagcattcctgggcaaggataagaaagaaaaggagaaagcactgaaacggaaaatcaccaaggaagagaaggagctgcggctcaagctccggccactttatcagttcatgagttgtaaagaattcgatgacctgttcgaaaatatgcacaaagaaaagatgctgagggccaaaatccgagaattgcagcggtatagaaggaatggtattacaaaaatggaagaaagcgccgaatatgaggccgctcgccacaagcgcgagaagagaaaggaaaataagaatttagccggtagcaaaagagggaaagaagacggaaaggattccgagttcgccgctatcgagaatctccccggattcgaacttttgtcagatcgcgagaaggtgctttgttcatcgctgaacttgtccccagccagatacgtcacagttaaaactatcatcattaaggaccacctgcagaaaagacaggggattcccagtaaaagtaggctgcctagttatctggataaggtgctcaagaagcgcattcttaacttcctgacagagagcggctggattagccgggacgcgagctag

SEQ ID NO: 244426 - DNA, 366 bp, synthetic construct
  misc_feature 1..366: note = Description of Artificial Sequence: Synthetic coding sequence
  source 1..366: mol_type = other DNA
atggcagcacacgtaggcgctagtcgaaccccacaggaagtcatggaacattacgtaagcatgtacattcacggcaacctgggaaaggcatgcatccccgacaccatcccgaatcgcgtgaccgaccacacctgcccttccgggggacccctgagcccaagtttaactacaccccttcctccactcgatatttctgtggctgaacagcagcagctggggtatatgccgttgcgggacgactatgagattgaatacgatcaggatgctgaaacactgatctctgggctcagcgtgaattacgatgatgacgacgtcgagatagaactgaagagggcccatgtagacatgtacgtccggaagctttag

SEQ ID NO: 244427 - DNA, 390 bp, synthetic construct
  misc_feature 1..390: note = Description of Artificial Sequence: Synthetic coding sequence
  source 1..390: mol_type = other DNA
atggctgcccatgtcggggcttctaggacgccacaggaagtgatggagcactatgtcagcatgtacattcatggaaacctggggaaggcttgcatccccgatactattcctaaccgcgtcacagatcatacgtgcccaagcggcggtcctctgagcccatctctgaccacgcccctgcccccactagacatatccgtggcagaacagcagcagctcggctatatgcccctgagggatgattatgagatcgaatatgaccaggatgccgaaaccctgattagcggcctcagtgttaattacgatgatgacgacgtggagatcgagctcaaacgcgctcatgtcgacatgtacgtgcgaaagctgaaagagagacaacggaggaagaactag

SEQ ID NO: 244428 - DNA, 1038 bp, synthetic construct
  misc_feature 1..1038: note = Description of Artificial Sequence: Synthetic coding sequence
  source 1..1038: mol_type = other DNA
atggccgagttgggaaagaaatattgtgtgtattgcctggcggaggaggacatggctgcgcatgtgggagcgtctcgcacaccacaggaagtgatggaacattatgtctccatgtacatccatggcaatttgggcaaggcctgtattccggacactattcctaatcgggtcactgatcacacttgcccctcagggggaccacttagcccaagcctgactactcccctgcctcccctcgatatctctgtcgcagaacaacagcagctcggctacatgccactgcgcgatgactacgagatagaatatgaccaggatgccgaaaccctcatcagcggcctgtcagtcaactacgacgacgacgacgtagagatcgaactgaagcgggctcatgtggacatgtacgtgagaaagctgaaggagcggcaacggcgaaaaaacattgcgagggactataacttggtgcccgcatttctgggaaaagacaaaaaagaaaaagagaaagccctcaagcgtaagatcaccaaggaggaaaaagagctgcgactcaagcttcgccctctgtaccaatttatgtcctgtaaagagttcgatgaccttttcgaaaacatgcataaggagaaaatgctacgagctaagattagagaactacagcggtatagaaggaatggaattactaaaatggaggagtctgccgagtatgaggctgctcgccataagcgagaaaagcgaaaggagaacaaaaacctagctggttctaaacgcggtaaagaggacgggaaggatagtgaattcgctgcaatcgagaatctccctgggtttgagctgctctccgatcgggagaaagtcctgtgtagttcactgaacctcagcccagctcggtacgtaactgtgaagaccattatcattaaagaccacctccagaagaggcaggggatcccctccaagtccagacttccttcttacttagacaaagtcctaaaaaagcggattctgaatttccttacggagagtggttggatttcacgggacgctagttag

SEQ ID NO: 244429 - DNA, 987 bp, synthetic construct
  misc_feature 1..987: note = Description of Artificial Sequence: Synthetic coding sequence
  source 1..987: mol_type = other DNA
atggccgctcacgttggcgcttcccgcacacctcaggaagtgatggagcactatgtgtccatgtacattcatggaaatttgggcaaagcctgtataccggacaccatccctaacagggtgaccgatcatacatgtccaagtggaggccctctgtcaccgtccctcactacccccctcccccctctggatatatccgtggccgaacagcagcaactggggtacatgcctctccgcgacgactacgagattgagtatgatcaggacgcagaaactctaatctctgggttatccgtgaattacgatgacgacgatgttgagatagaattgaaaagggcccacgttgatatgtacgttcgcaagctgaaggagcggcagcgcagaaagaacattgcaagagattacaatctcgtgcccgcttttctgggcaaagacaagaaagagaaggaaaaagcactgaaacggaagatcacaaaagaggaaaaagagttgaggttgaagttgaggcctctgtaccaatttatgtcctgcaaagagtttgatgacctgttcgaaaatatgcacaaagagaagatgcttcgtgcgaaaataagggagcttcagaggtacaggcgcaatgggatcactaaaatggaagaaagcgccgaatatgaggcggctcgacacaaacgggagaagagaaaagagaacaagaatttggcagggtctaagagaggaaaagaggatggtaaagattcagaattcgccgctatcgaaaacttgcccggattcgagctgctctcagatagggagaaggtgctttgcagctccctgaatctttcaccagcccgttacgtcactgtcaagaccattattatcaaagatcacctgcagaaacgccaggggattccctcaaaatcgcggcttccaagttacctggataaggtcctgaagaagcgtattctgaacttcctgactgaaagcggctggatcagccgggatgcctcttag

SEQ ID NO: 244430 - DNA, 1299 bp, synthetic construct
  misc_feature 1..1299: note = Description of Artificial Sequence: Synthetic coding sequence
  source 1..1299: mol_type = other DNA
atgtcagagctgaaagactgcccgctgcagttccacgatttcaagtctgttgaccacttaaaggtgtgccccaggtatacggctgtgttggccaggtcagaggatgacggcattggaatcgaggaactggatacccttcagttggagctcgagacgctcttgtcaagtgctagccggagattgcgcgttttggaagccgagacgcaaattttaacagattggcaggacaaaaagggagacagacgctttctgaaactcgggagggatcacgagctgggtgctcccccaaaacacggaaagccaaaaaaacagaagctagagggaaaggccggacacggcccaggtccaggacctggcaggcctaagtccaagaacctgcaacccaaaattcaggagtatgagttcacagatgatccaatcgatgtgccacgcatcccaaaaaatgatgcacctaacagattttgggcatctgtggaaccttactgcgccgatatcactagtgaagaggtgaggaccttggaagaactgctgaaaccccctgaggatgaggcagaacactacaagatcccacccttggggaaacattacagtcagcgatgggcacaagaggacttgctggaagaacagaaggatggcgctagggctgctgccgttgccgataagaaaaaaggcctgatgggacctttgacagagctggataccaaagacgtggacgcccttctgaaaaagtccgaagcgcagcatgagcagcccgaagatggctgtccctttggagccttgactcaacgacttctccaggctctcgtagaagagaatattatctcccccatggaggattctcccataccagatatgtctggaaaggagagcggggcagacggcgcttctacgtcacctagaaaccagaacaaaccattcagtgttccccacactaaaagcttagagagtcgcattaaggaagagttaatagctcagggcctgctggagtccgaggatcggcctgctgaggactccgaggacgaggtgctggctgaactccggaagcgccaggccgagctgaaggctctgtctgcccacaatcgcacaaagaaacatgatcttctacggctcgcgaaagaggaagtgtcccgtcaggagctaaggcagagggtgcgcatggcagacaatgaggttatggatgctttcagaaaaattatggctgctcggcaaaagaaacgtacaccaaccaagaaggagaaagatcaagcttggaagaccctcaaggagagggaaagtattctgaaacttctggacggttag

SEQ ID NO: 244431 - DNA, 1110 bp, synthetic construct
  misc_feature 1..1110: note = Description of Artificial Sequence: Synthetic coding sequence
  source 1..1110: mol_type = other DNA
atgtctgagctcaaggactgcccactgcagttccacgacttcaagtctgtggatcacctaaaagtgtgccctcgctatacggccgtcctggcccgttccgaggatgatggaattgggatagaagagctagacactctccagcttgagttagagactttgctctccagtgcttcacgtcgcctgcgtgttcttgaggccgagactcagatcctgaccgattggcaggataaaaagggagacaggcgattcctgaagctcggccgtgaccacgaactaggggcaccaccaaagcatggcaagccaaagaagcagaaactggagggcaaagcgggacatggacctggaccagggccaggacgccctaagtcgaaaaatctccagccgaagattcaagagtacgaatttacagacgaccctatcgacgtccccaggatccctaaaaatgacgcacccaatcgcttctgggcctctgtggaaccttattgcgcggatattacgtcagaggaagtccggactctggaggaactgctgaaaccccctgaggacgaagccgagcactacaaaatacctcctcttgggaagcactactcccagcgctgggcccaagaggacctactagaggaacagaaggacggggctcgcgctgcagcagtggcagacaagaagaaaggcttgatgggccctctgaccgaactcgacactaaggacgttgatgctttattgaaaaagagtgaggcccagcacgagcagccagaagacggatgtccctttggagcgctgacacagcgactgcttcaagctctagtggaggaaaatatcatttctcctatggaagatagccctatccccgacatgtccggcaaagagagcggagcagacggcgcatccacatcccctagaaatcagaataaaccattttcagtgccgcataccaaaagcctggagtctcgtatcaaggaggaactgattgctcagggtctgctagagagcgaagatcggcctgccgaagattccgaggacgaagtgcttgccgagctgaggaagcgccaggcagaactcaaagctctgagcgcacataaccgtacaaaaaagcacgatctcctaagatag

SEQ ID NO: 244432 - DNA, 288 bp, synthetic construct
  misc_feature 1..288: note = Description of Artificial Sequence: Synthetic coding sequence
  source 1..288: mol_type = other DNA
atgtctgaactgaaagattgtcctctgcagttccacgacttcaagagcgttgatcacttgaaagtgtgtcctcgatacacagccgtgctggctagatctgaggacgatggtatcggtatcgaggagcttgacacgctccagctggagctggagacactcttgtcatctgcaagccggcgtttgagagtcctcgaggctgagacccaaatcctcaccgattggcaggataaaaagggcgacaggcggtttctgaaattggggagggaccatgagttgggggcaccttag

SEQ ID NO: 244433 - DNA, 1299 bp, synthetic construct
  misc_feature 1..1299: note = Description of Artificial Sequence: Synthetic coding sequence
  source 1..1299: mol_type = other DNA
atgtctgaactgaaggactgtcctcttcagttccatgatttcaagtctgtcgaccatcttaaggtatgtcctagatataccgcggtcttggccaggagtgaggatgatgggattggcatcgaggagctagacacactgcagttggaattagaaactctgctttcgagtgcttcgagacgcctgagggtcctagaggcagaaactcagattcttaccgattggcaggacaaaaaaggagataggcgatttcttaagctgggaagggatcatgaattgggagctccaccaaagcacggaaaacctaagaaacagaagctggaaggcaaagccggacacggccctgggcctggccctggaagaccaaaatcaaagaatctgcagcccaagatacaggaatatgagttcaccgatgacccgatcgacgtacctcggattcccaaaaacgacgcacctaaccgattttgggcctcagtggagccgtattgtgctgacataacatccgaggaagttcgcactctggaggaattgctcaagccacccgaagacgaagccgaacactataaaattccaccgctgggtaaacactacagtcagagatgggcccaagaggacctgctcgaggaacagaaggacggtgcaagagcagccgctgtcgcagataaaaagaaaggcctgatgggccctctcaccgagctggacaccaaggatgtggatgctttgctgaaaaagtctgaggctcagcatgaacagcccgaagatggctgcccattcggcgctctgactcagagactgctacaggccctggtcgaggaaaacatcataagtcctatggaggatagtcctatccccgacatgtctggtaaagaatccggggcagacggagcatcaacctccccacgaaaccagaacaagcccttttccgtgccgcacacaaaaagtcttgaaagccggatcaaggaagagcttatcgcacaaggactcctggagagcgaagaccgcccagcggaggacagcgaggatgaggtgctggcggagctgcgcaaacggcaggcagaactgaaagcgcttagtgcccacaacagaaccaaaaagcatgacttactgcggcttgccaaggaagaagtgtctagacaggaactcagacagcgggtgagaatggctgacaatgaggtcatggacgcatttcggaaaatcatggccgctcgccagaagaaacgtacccccacaaaaaaagagaaggatcaggcatggaagaccctgaaagagcgcgaatctatccttaagctccttgacgggtag

SEQ ID NO: 244434 - DNA, 1038 bp, synthetic construct
  misc_feature 1..1038: note = Description of Artificial Sequence: Synthetic coding sequence
  source 1..1038: mol_type = other DNA
atgcagctggagattcaagtcgccttgaactttattatctcttatttatacaacaaattgcctcggagaagggtcaacatctttggcgaggaacttgagcgactcctgaaaaagaagtacgagggccattggtaccctgaaaagccttataagggatctgggttcaggtgcattcatatcggggaaaaggttgacccagtgattgaacaggcttctaaagagtccggcctggatatcgatgatgtgagaggaaacctcccccaggatctgagtgtgtggattgacccatttgaagtgtcctatcaaatcggagaaaaaggtccagtgaaagtcctgtacgtggacgataataacgaaaacggctgcgaacttgacaaagagatcaagaattccttcaaccccgaagcccaggtgttcatgcccatcagtgaccctgcttcctccgtgtcctcaagcccaagtccgccttttggacacagtgctgctgtctcaccgactttcatgcctaggtcaacacagcctttaactttcacgactgccacatttgcagccaccaaatttgggtcaacaaaaatgaagaactccggccgttctaacaaggtagccagaactagtcccattaatttggggctgaacgtgaatgaccttctaaaacagaaagccatttcgtcaagtatgcacagcctctacggtcttgggctgggaagccaacagcagcctcagcagcaacagcagccggcacagcctcccccaccccctccaccacctcaacagcaacaacagcagaagacgtcagctctgtctccaaatgcaaaggagttcattttccccaatatgcagggtcaaggctcaagcactaacggtatgttccctggcgactctcctttgaacctatccccattacagtactcaaatgcctttgatgtgtttgccgcatatgggggtcttaacgagaagtctttcgtggatggcctcaatttttccctgaacaatatgcagtactccaaccagcaattccagccagtcatggcgaactag

SEQ ID NO: 244435 - DNA, 1038 bp, synthetic construct
  misc_feature 1..1038: note = Description of Artificial Sequence: Synthetic coding sequence
  source 1..1038: mol_type = other DNA
atgcagttagagatccaggttgccctaaatttcatcatatcgtatttatataacaagctgccacggcgaagagtgaatatctttggggaggaactggagcgactccttaaaaaaaagtacgaaggacattggtatccagagaaaccatacaaaggttccgggttccggtgtatccacatcggcgaaaaggtcgatcccgtgattgagcaggcctctaaggagtctggccttgacatcgacgacgttagaggaaatctgcctcaggacctctctgtgtggatcgaccccttcgaggtatcctaccagattggagaaaagggccctgtgaaagtgttgtacgtagacgataacaacgaaaacgggtgtgagctggataaagaaattaagaactctttcaatcccgaggcacaggttttcatgcccatatccgacccagctagcagcgtcagcagctccccatcacccccttttggccattctgccgcagtgagccctacattcatgccccgatccacacagcccctgacattcacaacagccacctttgctgctactaaatttggttctacgaagatgaaaaacagtgggcgaagcaacaaggtggcaagaacatctcccatcaatctgggcttaaacgtaaatgatcttttaaagcagaaggccatctcttcctcaatgcactctctgtatgggctgggactcggttctcagcagcagccccagcagcagcagcagccagctcagccaccaccaccacctcctccaccacagcagcagcaacagcaaaaaaccagtgccctatcacccaacgccaaggaatttatattccccaatatgcagggacagggatcttcaacaaacggtatgttccccggagactcaccactcaatctctcccctttacagtactccaatgccttcgatgtgtttgccgcatatggcggtctgaatgaaaagagcttcgtggatggtctgaatttcagtcttaacaatatgcaatactccaaccaacaatttcagcccgttatggccaattag

SEQ ID NO: 244436 - DNA, 1035 bp, synthetic construct
  misc_feature 1..1035: note = Description of Artificial Sequence: Synthetic coding sequence
  source 1..1035: mol_type = other DNA
atgcagcttgagattaaggtcgctctgaattttattatatcatacctctacaacaagctgccaaggcgtcgtgccgacctgttcggcgaggagcttgaacggctgctgaaaaaaaaatatgaaggacactggtatccggaaaaacctctcaaaggctccggctttcgctgtgtgcatatcggtgaaatggtcgaccccgttgtggaattagctgcaaagcgatcgggcctggctgtcgaggatgtgcgggcaaatgtccctgaggagctgagtgtgtggatcgacccattcgaggtgtcatatcagatcggtgagaagggtgcagtgaaagtcctgtacctggacgacagcgaaggatgcggggctcctgaacttgataaggaaataaaaagcagtttcaatccagacgcccaggtgtttgtccccatcggttcccaggacagtagcttatcgaattcccccagcccatcattcggtcagagcccaagccctaccttcattccaaggagcgcacagccgatcacttttactaccgcatccttcgcagccaccaaattcggctcaactaagatgaagaagggtggcggtgcagcatctggaggtggagtcgcatctagtggcgctggagggcagcagcctccacagcaaccaaggatggcaaggagtccaaccaacagcctgctcaaacacaaatccctctcgctgtctatgcatagcctaaacttcatcaccgcaaatccagctccacagtctcagctgtccccaaatgccaaagagtttgtttataatggtggtgggtcacccagcctcttcttcgacgccgcagatggccaaggctccgggacccctggtccgttcgggggatcgggcgctggaacatgtaactcctcctcttttgacatggctcaggtgttcggaggcggtgcaaactcgctgttcctggaaaagactccatttgtagaagggctaagttataacctgaacacaatgcagtatcccagccagcaatttcagcctgtggttctggctaattag

SEQ ID NO: 244437 - DNA, 306 bp, synthetic construct
  misc_feature 1..306: note = Description of Artificial Sequence: Synthetic coding sequence
  source 1..306: mol_type = other DNA
atgcagttagaaattaaggtggcactcaatttcattatcagctatctttacaataagttgcccaggcggagggcagacctgttcggcgaggagctggaacgcttgctgaaaaagaaatacgaaggacattggtaccccgagaagccacttaaaggatccggatttcgctgcgtacacattggtgaaatggttgaccctgtcgtggaactggctgcaaagcggtctggcttggccgtagaagatgtgcgggcaaacgtgcctgaggaactttcggtgtggattgaccccttcgaagtctcgtattag

SEQ ID NO: 244438 - DNA, 1569 bp, synthetic construct
  misc_feature 1..1569: note = Description of Artificial Sequence: Synthetic coding sequence
  source 1..1569: mol_type = other DNA
atgtcaatcacctcagacgaggtgaattttctggtttatcgctacttacaggagtctggtttctctcatagcgcctttacttttggtatcgaatcccacatctcccagtcaaacatcaacgggactctagtgcctccctccgccctgatttccatacttcaaaagggattacagtatgtggaagcagaaatcagtataaataaggatggcaccgtcttcgattctaggcctatcgagtctctgtccctcatcgtcgcagtcatcccagatgttgtgcagatgcggcagcaagctttcggcgagaagctgactcagcaacaagctagcgctgccgcaactgaggcaagcgccatggcaaaggctgcaactatgacacctgccgcaatcagtcagcagaacccccctaagaatagggaggcaacagtaaatggggaggaaaacggagcccacgaaataaacaatcactcaaagcctatggaaattgacggcgatgtggagatcccccctaacaaagcaactgtgctccggggacacgaaagcgaggtgttcatttgtgcttggaacccagttagcgatttactggcttctgggtctggggacagcacggccaggatttggaacttgaacgaaaactcgaacgggggttccacccaactagtgctgaggcactgtattcgtgaaggtggccacgacgtgccatctaacaaagatgtcacttcacttgattggaatagcgatgggacactcctcgccatgggcagctacgacgggttcgccaggatctggactgagaatggcaacctggcctccaccctggggcagcataaaggcccaatattcgccttgaaatggaacaagaagggcaactacgtgctgagtgccggtgtcgacaagactactataatttgggatgcccacacgggggaggcaaagcaacagtttccctttcatagcgcacctgcactcgatgtggactggcaaaataacatgactttcgcaagctgctctaccgacatgtgtatccatgtttgcaggcttggatgcgaccatccagtgaaaacctttcagggccatacaaacgaggtcaatgctattaaatgggacccctctgggatgctgctggcttcttgctccgatgacatgacactaaagatatggtcaatgaagcaggacgcttgcgtgcatgatcttcaagcacattccaaagaaatctatactatcaagtggtctcctacggggccagccacgagcaacccaaattccagtattatgctggcttcggccagcttcgacagtacagtacggctgtgggacgtggaacagggcgtctgtacacataccttgatgaaacaccaggagccagtgtattctgtggctttctcacctgacggaaaatatctcgcttccgggtccttcgataaatacgtgcacatctggaacactcagtcaggaagcctggtgcattcataccagggaacgggtggcatctttgaggtttgttggaatgcccgtggagataaggtaggcgcatctgcgtccgacggaagcgtgtgcgtgctggatttgtag

SEQ ID NO: 244439 - DNA, 1569 bp, synthetic construct
  misc_feature 1..1569: note = Description of Artificial Sequence: Synthetic coding sequence
  source 1..1569: mol_type = other DNA
atgagtattacctccgatgaggtcaacttcctggtttataggtacctgcaggagtcaggcttcagccactctgcatttacctttggtatagaaagccacatctctcagtcgaatatcaatggtaccctcgtgcctccctccgctcttatttcgattctgcaaaaaggcctgcagtacgtcgaggcagagatctccatcaataaagatgggacagtgtttgactctaggcccattgagtcactgagcttgattgtggcagtcatacccgacgtagtgcagatgaggcaacaagccttcggagagaagctgacgcagcagcaggcctcagctgccgcaactgaggcctcagctatggctaaggccgctaccatgactcccgctgccattagtcagcagaaccctccaaaaaaccgggaagccaccgtgaatggagaagagaacggagctcacgagatcaacaatcatagtaagccaatggagatcgacggggacgtggagatcccacctaacaaggctacagtgctgagaggacacgaatctgaggtgtttatctgcgcatggaatccggtctccgatctcctggcatctggctcgggcgatagtaccgccagaatatggaacctaaacgaaaattcaaacgggggttcaacccaattggtactcagacactgcattcgggagggaggccacgacgtgccctcgaacaaggacgtgacctctctagattggaactctgacggcacgcttctggcaatgggcagctatgacggcttcgctaggatctggacagaaaatggtaatctggcttcaacgttgggacagcacaaagggcctatctttgcgctgaagtggaataaaaagggcaactacgtgctgagtgctggcgtggataaaacgaccatcatttgggacgcgcatacaggcgaggctaagcagcagtttcccttccattcggcccctgctcttgatgtggattggcagaacaacatgacctttgcctcttgttccactgacatgtgtatccatgtatgcaggctcggatgcgaccatcctgttaaaacgttccaagggcacaccaatgaagtgaatgcgatcaaatgggaccctagtggaatgctgcttgccagctgctccgatgatatgaccctgaagatttggtccatgaaacaggatgcctgtgtgcacgatttgcaagcacacagtaaagagatctacaccataaaatggtcaccgacaggccctgctacgtccaaccccaacagctctattatgttggcctccgcatcttttgactccacagttcggctatgggacgtagaacagggggtgtgcacccacaccttaatgaaacaccaggagcccgtgtattccgtggccttcagccctgatgggaagtacctcgcatctggatcattcgacaagtatgttcacatttggaatacccagtctggctccctggtgcatagttaccaagggaccgggggaatctttgaggtttgctggaatgcaaggggggacaaagtcggagctagtgcttcggacggctctgtgtgcgttcttgacttgtag

SEQ ID NO: 244440 - DNA, 1569 bp, synthetic construct
  misc_feature 1..1569: note = Description of Artificial Sequence: Synthetic coding sequence
  source 1..1569: mol_type = other DNA
atgtccatcacctctgatgaggttaatttcctggtttaccggtatctgcaggaatccggcttctcgcactcggcatttacttttggtattgagtcccatatatcacagtccaatattaacggcactctggtcccaccgtcagcccttatttctattctccaaaaaggcctgcagtacgtcgaggccgaaatatcaataaacaaagacggaacagtctttgactccaggccaatcgagtctttgtcgctcatagtcgccgtgataccagacgttgtacagatgagacaacaagctttcggggagaaactgacccagcagcaagccagcgccgctgctaccgaagcttctgctatggcaaaagcggctacaatgacgcccgcagctatatctcagcagaatcctccaaaaaaccgtgaggcgacggtgaatggtgaggaaaatggtgctcatgagataaataatcactccaagccaatggagatcgacggcgacgtggagatccctccgaataaagccaccgtgctgagaggccatgagtccgaggtgttcatctgtgcctggaatcccgtctcagacctcctggcatctggctctggggattctacggccaggatttggaatctgaatgagaattccaatgggggatccacccagctcgtgctaagacactgtatccgggaggggggtcatgacgtcccttcaaacaaggatgtgacctcgctggattggaattccgacgggacacttcttgctatgggctcctacgacggcttcgccagaatctggaccgagaatgggaatctcgccagtacccttggccagcacaagggaccaattttcgctctgaaatggaataagaaaggcaattacgtgcttagcgccggagtagacaaaactaccattatctgggatgcccacactggcgaagctaaacagcagtttcccttccactctgctccggcactggatgtggactggcagaataacatgacatttgcctcctgttctaccgacatgtgtatccatgtgtgtaggctcgggtgcgatcatcctgtcaagaccttccaaggccacactaacgaagtcaatgctatcaagtgggatccttccggtatgcttctcgcttcttgcagcgacgatatgacgctcaaaatctggagcatgaagcaagatgcttgtgtgcatgacctccaggcacacagcaaggaaatctacacaattaagtggtctcccacaggccctgccacatctaatcctaattcctctatcatgttggctagtgcatcattcgactccacagttcggctgtgggatgtagaacaaggcgtctgcactcacactctcatgaagcaccaggagcccgtttattctgtggccttctcgcctgatggcaagtatctggctagcggctcctttgataagtatgttcacatatggaacacccaatctggaagcctggtccactcctatcaggggacaggcggaatcttcgaggtctgttggaacgcaaggggagacaaggttggtgcctccgcaagcgacgggtctgtttgtgtgctggacttgtag

SEQ ID NO: 244441 - DNA, 1095 bp, synthetic construct
  misc_feature 1..1095: note = Description of Artificial Sequence: Synthetic coding sequence
  source 1..1095: mol_type = other DNA
atggagattgatggtgacgtcgaaatcccccctaacaaagccaccgtgttgcgcggtcatgaatctgaagtgtttatatgtgcctggaacccagtgtctgatcttctcgcgtccggctccggggactctaccgcaaggatctggaacctgaatgagaactctaatggaggcagcacccagctcgtgcttcgccactgtatacgggagggcggacacgacgtgccgtccaacaaggatgttaccagtctcgactggaactctgacggcaccttactggcaatgggctcctatgacggatttgcccgaatatggaccgagaacgggaatctggcctcaaccctgggacagcacaaaggacctatcttcgccctgaaatggaacaagaagggcaattacgtgctgtccgctggcgtggacaaaaccactatcatttgggacgcgcataccggcgaggctaagcagcagtttcccttccactctgctcctgccctggacgtcgattggcagaacaacatgacattcgcctcttgcagtaccgacatgtgcatccacgtgtgtagactcggatgcgatcacccagtgaaaacctttcaaggacatactaacgaggtcaacgccattaaatgggacccatccggcatgctcctggcatcttgttcagatgacatgaccctgaagatctggagcatgaaacaagatgcttgcgttcatgacttgcaagcccacagcaaggagatttataccataaagtggtcccccaccggacccgctacctcaaaccctaacagtagcatcatgcttgcatctgccagcttcgacagcacggtgcgcctatgggatgtggagcagggcgtgtgcacacacaccttaatgaagcaccaggaacctgtgtatagcgtagcttttagcccggacggtaaatacctcgccagtggcagctttgacaagtacgtgcatatctggaatacgcagagtggttccctcgttcactcttaccagggaaccggtgggatatttgaagtgtgttggaacgccagaggtgacaaagtgggcgcttcagcctcagacggctccgtgtgcgtgctggacctgtag

SEQ ID NO: 244442 - DNA, 1752 bp, synthetic construct
  misc_feature 1..1752: note = Description of Artificial Sequence: Synthetic coding sequence
  source 1..1752: mol_type = other DNA
atgcctttgcgaaagatgaagattccatttctgttacttttcttcttatgggaggccgaatcgcatgccgctagccgcccaaatataattctcgtcatggctgatgacttgggtataggagatccaggctgctacgggaacaagactatcaggaccccaaatatcgataggctggctagcgggggagtgaaattgacacaacatctggccgcttctccactgtgtacacctagccgggcagcctttatgacgggtcgttaccctgtgcgcagtggtatggcctcctggtctcgtacgggagtgtttctatttacggcctcttcaggtggtctgcccaccgacgaaattacgttcgcaaaacttctgaaggaccagggctactcaactgccctgatagggaagtggcacttggggatgtcttgccatagcaagaccgacttttgtcatcatccgctgcatcacgggttcaattacttctacggaatttctttgacaaacctccgcgattgtaagcccggagaaggctctgtgttcactacgggcttcaagcggctagtcttcttgcccctgcaaatcgttggggtgaccttgctcactttagctgcactcaactgtcttggcctattgcacgtacccctgggcgtttttttttctctgctctttcttgctgccttaatcctaaccctatttttgggatttctgcattattttcgacctctgaactgcttcatgatgagaaattatgaaattattcagcagcctatgagctatgataacctcacacaaaggctgacagtggaggccgctcagtttattcagcggaatactgagaccccatttttgttagttctcagctatctgcatgtccacactgccctgtttagctctaaagactttgcaggaaagagccagcacggcgtgtatggagacgccgtggaggaaatggattggagcgtaggccagatcctgaacctactggatgaacttcgtctggccaatgatactctcatctatttcacaagtgaccagggagcccatgtagaggaggtctcttcaaagggcgagatccatggtggaagtaatggcatttataaaggagggaaagccaacaattgggagggaggcatccgggtgcctggtatactgaggtggccaagagtcattcaggccggacagaagattgacgaaccgactagtaatatggatatattcccaacggtggcaaagttggctggcgctccactgcctgaagacaggatcattgatgggagggacctgatgcctctactcgagggcaagtcccaacgcagcgatcatgagtttttgttccactattgcaatgcgtacctgaacgccgtcagatggcatccgcagaatagcactagcatctggaaggcctttttctttacacccaacttcaaccctgtcggttctaacgggtgtttcgcgactcatgtgtgtttctgctttggttcgtatgtgacacatcacgacccgccattgctgttcgatatctcaaaagacccaagggagagaaatcccttgacccccgcttccgaacctcgcttttacgaaatcctgaaggttatgcaggaggcggcagaccgccatactcagaccttgcctgaagtgcccgaccagtttagttggaacaacttcctctggaagccttggctgcagctctgctgcccatccaccggactctcctgtcaatgcgaccgcgagaaacaggacaaaagactctcacgctag

SEQ ID NO: 244443 - DNA, 1581 bp, synthetic construct
  misc_feature 1..1581: note = Description of Artificial Sequence: Synthetic coding sequence
  source 1..1581: mol_type = other DNA
atgagcattaccagcgatgaggttaacttcctcgtctacagatacttacaggaaagcgggttctctcactcagctttcacttttggcatagaatcacatatctctcagagcaatattaacggtacccttgtgccacccgctgctcttatctcaatcctccagaagggactgcagtatgtagaagcagagatctctattaatgaggacggaactgtgttcgatgggaggccaatagagagcctatctttaattgatgcagtgatgccagacgtggtacagaccagacagcaggcctttcgtgagaaactggcccagcagcaagccagcgccgcagcagccgcagctgcagccacagctgccgcaacagctgcaaccactaccagcgccggtgttagtcatcagaatccatctaagaatcgcgaagctaccgtcaacggtgaagagaacagggcccattcggtcaataaccacgccaagcccatggagatcgacggcgaagtcgaaatcccatcctcaaaagccactgtgctcaggggacacgagagcgaggtttttatttgtgcttggaatccagtgagtgatctgctcgccagcggctctggcgactctactgcacggatctggaacctgaatgaaaattctaacgggggaagtacccagttggtgcttcggcactgcattcgagagggtgggcacgacgtaccgtccaataaggatgtgacaagcttagattggaacacaaatggaacgctgctggcaaccgggagctatgatggtttcgccagaatttggacagaggacggaaacctggccagcaccctgggtcagcacaaagggccaattttcgccctgaagtggaatcggaagggtaactatattctgagtgctggggtggacaagactacaatcatttgggacgctcacacaggcgaggccaagcaacagttcccctttcacagcgcccctgctctggatgttgattggcagaataatactactttcgctagttgcagtactgacatgtgcatccacgtatgtcgcttagggtgcgatcgccctgtaaaaacctttcagggccacaccaacgaggtgaacgccataaaatgggatccttcaggtatgctgctggcgtcatgttcggatgacatgactctgaaaatttggagtatgaagcaggaagtgtgcatacacgatttgcaggctcataataaagagatctatacaataaagtggagccctaccggccctgcaacatccaaccctaattctaatattatgctggcaagcgcttcctttgactctaccgtccgcctctgggatatcgagcgcggtgtttgtacccacaccctcactaagcaccaggagcctgtgtacagcgtggctttttcacctgacggcaagtacctcgcttccggctcgttcgataaatgtgtgcacatctggaacacacaatctggaaacctagtccacagttaccgcggaactggtggtattttcgaggtttgctggaatgctagaggggataaagtgggggcttccgcttctgacggcagcgtgtgtgtcctcgacctcaggaaatag

SEQ ID NO: 244444 - DNA, 1734 bp, synthetic construct
  misc_feature 1..1734: note = Description of Artificial Sequence: Synthetic coding sequence
  source 1..1734: mol_type = other DNA
atgactgaactggctggagcaagctcttcgtgctgccaccgaccagctgggcgaggagcaatgcagtcggtgctgcaccactttcagcgcctgcgaggtagagagggcggttctcactttattaataccagctcaccacggggtgaggctaaaatgtccataacctccgatgaggtaaacttcttggtgtaccgttatcttcaagagagcggctttagccactcagcctttacttttggtatagaaagccacatcagtcagtcaaatatcaatgggacgttggtaccccctgcagcccttatcagcatcctccagaagggattgcagtatgtcgaagccgaaatttcaatcaacgaggatggcaccgtctttgacggcaggccaatagaaagcctatctctcatcgacgccgtgatgccagacgttgtgcagactcgccagcaagccttccgggagaagctggcacagcaacaagcctctgcagctgctgcggctgctgccgcaacagccgcagccaccgccgcaaccacaacctccgccggtgtgagccaccagaacccatcaaagaatagggaagcaaccgtcaacggagaagagaacagagcacacagcgtgaataaccatgcaaaaccgatggagatcgatggggaagtcgaaattccctccagtaaagcaaccgtgctgagaggccatgaaagtgaagttttcatctgcgcctggaatccagttagtgatctccttgcatctgggtcgggtgactcaacagcgcgaatctggaatctaaatgaaaattcaaatggcggatctactcagctagtgctgcgccattgcattcgggaaggaggccatgacgtcccctccaacaaggacgtgaccagcctggactggaacacgaacggcactctgctggccacaggcagttatgacggcttcgctcggatttggaccgaggatggcaacctggcgtcgaccctcggccagcataagggccctatctttgccctgaagtggaataggaaaggaaattacattttatccgcgggagtcgacaaaacaacgatcatttgggacgctcacacaggggaggccaagcagcagtttcccttccattctgctcctgctctggacgtagattggcaaaacaatactacttttgcgtcgtgcagtacagacatgtgcatacatgtgtgccgcctagggtgcgataggcctgtaaaaaccttccaagggcatacgaatgaagtcaacgctattaagtgggatccctccggaatgttgctggcttcctgctcagacgatatgacacttaagatctggtccatgaaacaggaagtgtgtatccatgaccttcaggcccacaacaaagagatttacacaatcaaatggagtcccacaggccctgccacttccaaccccaactcaaatatcatgctagccagcgcttcattcgactctacagtgagattgtgggatattgaaaggggcgtgtgtactcataccctgacaaagcaccaggaaccagtatatagcgttgcatttagcccagacggcaagtatctggcctcaggttcatttgacaaatgcgtgcatatatggaacacacagtccggaaatctggtgcacagctatcgtggcacaggcggaatattcgaggtgtgctggaatgccaggggcgataaggtcggggcttccgctagcgacgggagcgtctgcgtgctggacctgcggaaatag

SEQ ID NO: 244445 - DNA, 228 bp, synthetic construct
  misc_feature 1..228: note = Description of Artificial Sequence: Synthetic coding sequence
  source 1..228: mol_type = other DNA
atgtcaatcacctctgacgaggtaaactttctggtctatcggtatcttcaagaatcaggattttcacatagtgccttcacatttggtatcgaatcacacatctctcaaagcaacatcaatggtaccctcgttcccccagccgcactcatcagtattcttcagaagggactgcagtatgttgaagcagagattagcatcaacgaggacggaacagtgtttgacggctag

SEQ ID NO: 244446 - DNA, 138 bp, synthetic construct
  misc_feature 1..138: note = Description of Artificial Sequence: Synthetic coding sequence
  source 1..138: mol_type = other DNA
atgagcatcacatccgacgaggttaacttcctggtgtaccgctatctccaggaatccggcttctcccactcagcgtttacatttggaatcgaatcacacattagtcagtcaaacattaatggtactttggtgccatag

SEQ ID NO: 244447 - DNA, 1581 bp, synthetic construct
  misc_feature 1..1581: note = Description of Artificial Sequence: Synthetic coding sequence
  source 1..1581: mol_type = other DNA
atgtccatcacaagcgatgaggtgaatttccttgtgtaccgctatctccaagagtccggcttctcacacagcgcttttacattcggcatcgagtcccacatttctcaatcaaacattaatgggactctcgtgcccccagccgcacttatctctatcctgcagaagggcctgcaatacgtcgaagctgagatttccattaacgaagacgggaccgtatttgatgggaggcccattgagtccctgtcactgatcgatgctgttatgccagacgtcgtccagactaggcaacaggctttcagagaaaaactggcacagcaacaggccagcgccgctgccgctgcagccgcagctaccgccgcagcaacggccgcaacgacaacctccgctggcgtttctcaccagaatccctctaagaaccgtgaagccacggtgaacggggaggaaaatagggcccattcagtgaacaatcatgccaagcccatggaaattgacggagaagtggaaatccctagtagcaaggctactgtactgcggggtcacgaatctgaggtgtttatttgcgcctggaacccagtgtccgatcttttggcaagcggctctggggattctacagcaaggatatggaatctgaatgagaactccaatggaggcagcacccagctggtgctccgacactgcattagggagggaggccacgacgtcccatctaacaaagatgtgacatcccttgactggaataccaatggcacactgttggcaaccggctcttacgacggctttgcccgtatctggaccgaagatggaaatctggctagcacacttggacaacataaaggcccaatctttgcactgaagtggaatcgcaaaggaaattatatcctttcagccggagtagacaagaccactattatttgggacgcccatacaggagaggccaagcagcagttcccatttcactccgctcctgccctggatgttgattggcagaacaataccaccttcgcctcttgctctaccgatatgtgtatacatgtgtgtaggctgggctgcgataggcctgtgaagacctttcagggccacaccaacgaagtcaacgccattaagtgggacccttctggtatgctcctagcttcctgctctgacgatatgacgctcaagatatggagcatgaagcaagaggtctgcattcatgacctgcaggcacataataaagaaatctatacaatcaaatggagtcccacaggccctgccacgtctaatcccaattctaatatcatgctggcatcagccagcttcgactcaaccgtgcgactctgggatatagaacgaggtgtgtgcactcacaccttaacaaagcatcaggaacctgtttatagcgtggccttttctcccgacggcaaatacctggcgagtggttcatttgataagtgtgttcatatctggaatactcagtccggcaacctggtgcacagttaccgaggcactggaggcattttcgaggtgtgttggaacgctagaggagataaggtcggcgctagtgctagcgatggctctgtatgcgttctggatctccggaagtag

SEQ ID NO: 244448 - DNA, 180 bp, synthetic construct
  misc_feature 1..180: note = Description of Artificial Sequence: Synthetic coding sequence
  source 1..180: mol_type = other DNA
atgaccgagctggccggagcaagttcttcatgttgccatcggccagccggtcgtggtgccatgcaatctgtactgcaccacttccagaggttgagaggcagggaagggggatctcatttcatcaatacgagttctccaaggggggaagctaagatgtcaattacttctgacgaagtttag

SEQ ID NO: 244449 - DNA, 243 bp, synthetic construct
  misc_feature 1..243: note = Description of Artificial Sequence: Synthetic coding sequence
  source 1..243: mol_type = other DNA
atgaccgagttagccggtgcgtcctcctcctgctgtcacaggcctgcaggtcggggagcaatgcaaagtgtgctgcaccattttcagaggcttcgtggcagagagggcggtagccacttcataaacaccagttcacccaggggagaagctaagatgagtattactagcgacgaagtgaattttctggtctacagatatttgcaggaaagcgggttctcccattccgcttttaccttcggctag

SEQ ID NO: 244450 - DNA, 1581 bp, synthetic construct
  misc_feature 1..1581: note = Description of Artificial Sequence: Synthetic coding sequence
  source 1..1581: mol_type = other DNA
atgtccataactagcgatgaggtaaactttctcgtgtatcgttatctccaagagagtggtttcagccactcggcttttactttcgggatcgaaagccacatctcgcagtcgaacataaatgggacccttgtgcccccagcggctttgatctcaatcctgcagaaggggctccaatacgtcgaagccgaaatctccatcaatgaggacggaaccgttttcgacggtaggccaatcgagagcctttcactcattgatgccgtgatgcctgatgtggtgcagactaggcagcaggcattccgggaaaagctggctcagcagcaggcgtccgccgctgccgcagccgcagccgcaacagccgctgctacggccgctacgacaactagtgccggtgtgagtcatcagaacccctcgaagaaccgcgaggctaccgtcaacggcgaggagaatagggcacatagcgtgaacaaccacgctaaaccgatggaaatcgatggagaagtagagatcccgtcatcaaaagccacagtattgcggggtcacgagtcagaagtgttcatatgcgcatggaacccagtcagcgatttgctggcctcaggatccggagattccaccgctcgaatttggaatctgaacgagaacagcaatggcggtagcacccagctggtgcttcggcactgcattagggagggtggacatgatgtgccttccaacaaagatgtgacatctctcgactggaacacaaatggaactctgctggctacagggagttacgacggatttgctcgtatttggactgaggacggcaacctcgcctccaccttgggccagcacaagggtcccattttcgccctaaaatggaaccgcaaaggcaactacattctgtctgccggagtcgacaaaaccaccattatctgggatgcccacacaggggaagctaagcagcaatttcctttccacagcgcgccagccctcgatgttgactggcagaataatactacattcgctagctgcagtactgatatgtgtattcatgtatgtagactcggctgtgaccgtcccgtgaagactttccagggccacaccaacgaggttaacgccattaagtgggatccaagtggcatgctcctcgcctcgtgtagcgatgatatgacccttaagatttggagcatgaaacaggaggtctgcatacacgatcttcaggcccataataaggaaatctacaccattaaatggtctcctactggccctgccactagcaatcccaacagcaacattatgcttgcttcagcctctttcgacagtactgttaggctgtgggacattgaaaggggagtttgcacgcatacgctgaccaagcaccaggagcccgtatattccgtagctttttcacctgacggcaagtatctggcgagcggatcttttgataaatgtgttcacatatggaacactcagagcggaaatttggtgcattcttatcgtggcacagggggaatttttgaggtgtgttggaatgcacgaggcgataaggtgggggctagcgcaagcgacggaagcgtatgtgtcctggatctgagaaaatag

SEQ ID NO: 244451 - DNA, 1344 bp, synthetic construct
  misc_feature 1..1344: note = Description of Artificial Sequence: Synthetic coding sequence
  source 1..1344: mol_type = other DNA
atggaacttagccagatgagcgagctcatgggcctgtcagtgctgctgggactgctggctctgatggcgacagctgccgttgcacggggttggttaagagctggcgaggagaggagcggacgccctgcctgtcagaaagctaatggttttccccctgacaagagttcaggtagtaagaagcagaagcagtatcagcgcattcgcaaagagaagcctcagcagcacaattttacccaccgtctcttggcggctgctctgaagtcccacagtggtaatatttcatgtatggatttttctagcaacggtaagtacctggctacatgcgccgatgatagaacgattcgcatctggtccaccaaggatttcctgcaacgggaacatcgttctatgcgtgctaatgtcgaattggatcacgccaccttggtgcggttcagtcctgactgtagagcctttattgtctggttagctaatggagacacgttacgagtcttcaaaatgactaaaagagaggatggaggatacaccttcactgctactccggaggatttccctaaaaaacacaaggccccagtaatcgatatcggcattgctaatactggcaaattcattatgaccgcatcatcagacactactgtgctgatctggagtctgaagggccaggtcctaagcactattaacacaaatcagatgaacaacactcacgctgccgtaagtccctgcggcaggtttgtggctagctgcgggttcactcccgatgtgaaagtctgggaggtgtgctttgggaaaaagggtgagtttcaggaggtggtccgagcctttgaactcaagggtcactcagcagccgttcacagcttcgccttttctaacgatagtagaaggatggcatctgtgtcaaaggatggcacatggaagctttgggacactgatgtagaatataaaaaaaaacaggatccatacctactgaagacaggcagatttgaggaggcggcaggagccgcaccatgtcgcctggcactctcaccgaacgctcaggtgcttgccttggcatccggcagctccattcatttatataacacgcggaggggtgagaaggaggaatgcttcgagcgtgttcatggagaatgcatcgcaaacttgagtttcgacatcacggggcgtttcctagccagctgtggggaccgggctgtgcggcttttccacaatactcccggtcacagagccatggtcgaggagatgcagggtcacctaaaacgggcaagcaatgagagcacacgccagaggcttcagcagcagctaacccaggcccaggagactttgaaatctctgggagctctcaagaaatag

SEQ ID NO: 244452 - DNA, 1341 bp, synthetic construct
  misc_feature 1..1341: note = Description of Artificial Sequence: Synthetic coding sequence
  source 1..1341: mol_type = other DNA
atggagctgtcacagatgtctgaactgatgggattgtccgtccttctcggcctgcttgccttgatggcaacagcagccgttgcacggggatggctgagagctggagaagagaggagcggaagaccagcctgccagaaggctaatgggttccccccagacaagagttcagggagtaagaagcagaaacagtaccagcggatccggaaggagaagccacagcagcacaattttacacatagactactggcagcagccctaaaatctcattctgggaacatctcgtgcatggatttctcatcaaatggcaagtacttagctacgtgcgccgacgacaggacgatcagaatttggagtactaaagattttctccagagagagcatcgctcgatgagagcgaatgtcgagctggatcatgccactctggtgcgattctctcccgactgccgtgcgttcatcgtctggcttgccaatggtgacacactgcgggtgttcaaaatgacaaagcgagaagacggagggtatactttcactgccacccctgaagacttccccaaaaaacataaagccccagtcattgacataggcatcgccaataccggtaaatttatcatgactgcaagctctgatactacggtcttaatctggtcccttaaggggcaggtcctcagtacaatcaacactaatcagatgaacaatacacatgctgcggtttccccgtgcgggagattcgtggcaagttgcggtttcacacccgatgtgaaggtctgggaggtgtgctttgggaagaagggcgagtttcaggaagtggtgagagcgttcgaactgaagggccacagcgcagcagtgcactcttttgcgttttccaacgatagccgtaggatggccagcgtctccaaggacggtacttggaaactatgggatacagatgtcgagtacaaaaagaaacaagacccttatctgttgaaaacaggcaggttcgaagaggctgcgggagctgccccatgtaggttggctctctccccaaacgcgcaggtgttagccctggcatcaggttccagcattcatctttataacacaaggaggggagagaaggaggagtgcttcgaacgggtccatggtgagtgcatcgctaacctgtcctttgatatcacagggagattcttggcctcttgcggagatagagccgtccgcttgttccacaacactcctggtcaccgggcaatggtagaggagatgcagggacaccttaaaagagcttcaaatgagagcacaaggcagagattacagcaacagttgacgcaggcccaggtgaccctggggggacccggagcggaggactag

SEQ ID NO: 244453 - DNA, 2427 bp, synthetic construct
  misc_feature 1..2427: note = Description of Artificial Sequence: Synthetic coding sequence
  source 1..2427: mol_type = other DNA
atggcggaaactgcagcaggggtggggagattcaaaaccaactatgctgttgagaggaagattgaacccttctacaagggcggaaaggctcagctggaccagactgggcagcacctgttttgtgtctgtggaacacgggtgaatattctggaggtcgcatccggggctgtcctgcgaagcctggagcaggaggaccaggaagacattactgcctttgacctgtcccctgacaacgaggttctggtgacagcctctagggctctccttctcgctcagtgggcctggcaggaaggaagtgtgactcgtctgtggaaggctattcacaccgcgccagttgccacaatggctttcgacccgacatccacccttctcgccactggcggttgtgatggcgctgttagagtgtgggatatagtcagacattacgggacccaccactttagaggatctcccggagtagtgcatcttgtggctttccacccggatcctactagactcctgctgttttctagcgccactgacgccgctattcgggtttggtctctccaagatcgttcttgtctggccgtgctcacagctcactactctgccgtgaccagcttagcatttagcgcagatggacataccatgttgtccagcggacgcgataagatttgtataatctgggacttgcagtcttgccaggccaccaggacagtaccggtctttgagtcagttgaggctgccgtgttgctgcctgaggagcccgtgagccaactgggggtcaagtctcccggtctgtattttctgacggccggagatcaaggtaccctacgggtgtgggaagcggcaagcggccaatgtgtatacacacaggctcagcctccaggtcctggccaggagctgacgcattgtacgttggctcacacagcaggggtggtgctgaccgcaaccgcggatcataacctgctgttatacgaggcccgttcattgagactgcagaaacagtttgccggatacagtgaagaggtcctggatgttcggtttctgggccctgaagattcccatgtcgtggtcgccagcaacagtccctgtcttaaggtttttgagcttcagacgtccgcgtgccagattctgcatggtcacaccgacatcgtgttagccctggacgttttccggaagggctggctgttcgctagctgtgcgaaggatcaaagtgtgaggatatggagaatgaataaagctgggcaagtcatgtgcgttgctcagggcagtggtcatacacatagcgtcggcacagtctgctgttcgcgtctgaaagagtctttcctggtcactggtagccaggactgcacagtaaaattgtggcccttgccgaaagctttgctgtccaaaaataccgcccctgacaacggcccaatcctcctccaggcccagaccacccaacggtgccatgataaggatatcaactctgtagccatagctccaaatgacaagctcttagccactggctctcaagaccgcacggctaagctgtgggccctaccacagtgccaactcttaggcgtcttttcgggtcaccgcaggggcctgtggtgtgtgcagttctcaccaatggaccaggtcctggctacagcttcagccgacggcaccatcaagctttgggctcttcaggatttcagttgtctgaaaacgttcgaagggcatgacgctagtgtgctcaaggtggcttttgtctcaagaggaacacagctgctcagtagtggaagtgacggactggttaagctttggacaataaagaacaatgagtgcgtaagaaccctcgatgcccatgaagacaaagtctgggggctccactgctctcggctcgacgatcacgccctgacaggggcaagtgactccagggtgatcctgtggaaggacgtgacagaggccgagcaggccgaggaacaagcccgacaggaagaacaggtggtgaggcagcaggaactcgataacctcttgcacgagaagcgatacctgagagcactgggattggccattagcctggatcgaccccatacggtgctcactgtgatacaggcgatacgtcgcgacccagaagcctgcgagaaactcgaagctaccatgctgcgacttcggagggaccagaaagaggccctgttgcggttctgcgttacatggaataccaattctcgacactgccatgaagcacaggctgttctgggcgtcctgctccggagagaggcccctgaagagctccttgcatacgaaggtgtcagggcagccctcgaggcattgcttccctatactgagagacacttccagagactgtctcgaactcttcaagccgctgcctttctggatttcctctggcacaatatgaaacttccggtacctgcagcagcacccacgccatgggagacacacaagggggctctaccttag

SEQ ID NO: 244454 - DNA, 2427 bp, synthetic construct
  misc_feature 1..2427: note = Description of Artificial Sequence: Synthetic coding sequence
  source 1..2427: mol_type = other DNA
atggccgaaacggccgcaggcgtgggcagatttaagactaactatgccgtggagcgcaaaattgaacccttctacaagggcggtaaggcccagttggaccaaacgggccagcacttgttttgcgtctgcggtacccgcgtgaacatcctcgaagtggcgtcgggagctgtcctccggtccctggaacaggaggaccaggaggatataacagccttcgacctgagcccagataacgaagtgctggtcaccgctagtcgggcacttctgctggcacaatgggcatggcaggagggttctgtgacacgcctgtggaaggctatccatacagcaccagtcgccacaatggccttcgacccaacctctactctactggccactggaggatgcgatggagccgtaagggtctgggatatagtccgccactatggcacccaccactttcgcggatcccctggagtggtgcacttagtggcctttcatccggacccaaccagattgctcctgtttagttccgctacggacgcggctatccgggtgtggagcctccaggaccggagttgcttggcggtgctcaccgcccactattctgccgtgacctccctcgccttctccgccgacggccataccatgctttcttcaggccgtgacaaaatatgtatcatttgggacctgcagtcatgccaggcgacgcggaccgtacccgtcttcgaatcggtcgaagccgctgtgcttctgcccgaggagccagttagtcaacttggtgtcaagtccccaggactctactttctgaccgcaggggaccaggggactctgagggtatgggaggctgcatcaggccaatgcgtttacacccaggcccagcctcctggcccaggccaggagctgactcattgcactttagcgcatacagctggggtcgtgctcacagccacagcagaccataacttactgctgtatgaagcccgttctctccggcttcaaaaacagttcgccggttactcagaagaagttcttgacgtacgcttcttggggcctgaggactctcacgttgtagtggcctctaatagcccatgcctcaaggtatttgagctgcagacctcagcttgccagatcctgcatgggcataccgacatcgtccttgcattggatgttttccgcaagggctggctgttcgcaagttgtgcaaaagatcagtcggttagaatctggagaatgaacaaagccggacaagtgatgtgtgttgcccagggcagtggacatacacatagcgtgggcactgtgtgctgctcaagactcaaggaatcatttcttgtgaccggaagtcaggactgcaccgtgaagctctggcccctccccaaggcgctgctgtctaagaacacagcacctgacaatggccctatcctgctccaggctcaaaccactcagagatgccacgataaggacattaactctgtcgctatcgctcccaatgataagctcctagcaacaggttctcaggacagaacggccaagctatgggccctcccgcagtgccagctcctgggcgtgttttctggccaccgcagaggcctgtggtgcgtgcagttttctccaatggaccaagttctagccaccgccagcgcagatggaaccatcaagctgtgggccttgcaggatttttcctgcctgaaaacctttgagggtcacgatgccagcgtgctcaaggttgcgttcgtgagtagaggtactcagttactgtcctccggatcggatggcttagtgaagctgtggactattaagaataatgagtgtgtgaggactctcgacgctcatgaggacaaagtatggggcctccactgcagtagactggatgaccatgcactgactggtgccagcgatagccgggttatcctgtggaaagacgtgactgaggctgaacaggccgaagagcaggctcggcaggaagaacaggtcgtgagacagcaggaattggataacctgttgcacgagaaaaggtatctgcgggctctgggtctggccatatccctggacaggccccacacggtacttacagtgatccaggcaatcagacgggatcctgaggcttgcgaaaagttagaggccactatgctccggttgaggcgggatcagaaagaagcattactccgcttctgcgtgacctggaacaccaattcacgccattgccatgaggcacaggcggtgctgggtgtgcttctgagacgtgaggctcctgaggagctgctcgcctatgaaggcgtgcgggctgccctagaagctctccttccctacactgaacggcattttcaaaggctgagtaggactcttcaggcagctgcctttctcgatttcttgtggcacaacatgaaactgcctgtgccagctgcagctcccacaccatgggagacccataagggggcattgccctag

SEQ ID NO: 244455 - DNA, 729 bp, synthetic construct
  misc_feature 1..729: note = Description of Artificial Sequence: Synthetic coding sequence
  source 1..729: mol_type = other DNA
atgtttcctcagagccgccaccccactccccaccaggctgctggccagcccttcaaatttacaatccccgagtccctggaccgcatcaaagaggaattccagtttttgcaggcccaataccattccctgaagttggaatgtgagaagttggccagtgagaaaaccgagatgcaacggcattacgtgatgtattatgaaatgtcctacgggttgaatatcgagatgcacaagcagaccgagattgccaaacggttgaatactatatgtgcccaggtcattccattcctgtcacaggagcatcaacagcaggtcgcgcaggccgtggagagggcaaagcaggtcacaatggctgagctaaatgccatcattggcgtcaggggtcttcccggactgcctcccacacagcagcagctgcaggctcaacatctctctcacgggcacggtccgcctgttccacttactccacatcctagtgggctgcagcctccaggcatccctcctttagggggtagcgccggactgttggctttgagttccgcgttgtccggccaatcacacctcgccattaaagacgacaaaaagcatcatgatgcagagcaccacagaggtgagcgaccaggaaagagtaattccttgctcgtccccgattccctcaggggcacagacaagagaagaaatgggcctgagttttcaaacgacatcaagaagcggaaagtcgacgacaagtag

SEQ ID NO: 244456 - DNA, 435 bp, synthetic construct
  misc_feature 1..435: note = Description of Artificial Sequence: Synthetic coding sequence
  source 1..435: mol_type = other DNA
atgcaacgacactacgtgatgtattacgagatgagttacggccttaatattgagatgcacaagcaaaccgaaattgcgaaaaggctgaacaccatttgtgctcaggttatcccctttctgtctcaggagcatcagcagcaggtcgctcaagcagttgaacgtgctaagcaggtcacaatggctgaactaaacgcaattatcggacagcaacagctccaggcacagcatctctcacacggacacgggcctccggtgcctttaactccccatccgtctggcctgcagcctcccggaattcccccattagggggatccgctggcttgctggccctctcttcagccttatcaggacaatctcatctcgctattaaggatgacaagaaacaccacgatgctgagcaccaccggggagaaagacctggaaaacccgattag

SEQ ID NO: 244457 - DNA, 384 bp, synthetic construct
  misc_feature 1..384: note = Description of Artificial Sequence: Synthetic coding sequence
  source 1..384: mol_type = other DNA
atgcccacgccaggaacttcagccactcccggtctgaggccgggtttgggtaagccgcctgcaatcgatcctctggttaaccaggcggctgccggtttaaggacacccttagccgtccccggaccataccccgctcctttcggtatggtacctcatgccggaatgaatggcgaacttaccagccccggagcagcatacgcatctcttcacaacatgagcccccaaatgtccgcagccgcagcggcagcagctgtagttgcctacggccgaagccctatggtggggtttgacccccctccacacatgagggttcccactataccgccaaacctggctggaattcccggtggtaaacctagcctggtaccagcacccgctcactag

SEQ ID NO: 244458 - DNA, 384 bp, synthetic construct
  misc_feature 1..384: note = Description of Artificial Sequence: Synthetic coding sequence
  source 1..384: mol_type = other DNA
atgcctacgcctggtaccagcgccactcccggtctgcggccaggcctggggaaaccacccgcaatcgaccctttagtaaatcaggcagctgccggattgcgaactcccctagccgtgcccggaccctaccctgctcctttcggcatggtgccacatgccggaatgaacggggagctgacgtctcccggagcagcttacgcatccctccataatatgagccctcagatgagcgccgctgccgctgcagctgcagtggtggcatatggcagaagcccgatggtaggcttcgatccacccccacatatgcgtgtgccaacaataccacccaatctggcaggtattccaggcggtaaacctagcctggtccccgcaccagctcactag

SEQ ID NO: 244459 - DNA, 2313 bp, synthetic construct
  misc_feature 1..2313: note = Description of Artificial Sequence: Synthetic coding sequence
  source 1..2313: mol_type = other DNA
atgttccctcagagtaggcaccccacaccacaccaggccgcagggcaaccgttcaagtttacaatacctgagtccctcgacagaatcaaggaggaatttcaattcctgcaagctcagtaccactccttaaagctggagtgcgagaaactggcctctgagaaaactgaaatgcagagacactacgtgatgtattatgaaatgtcttatggtctgaatattgagatgcacaagcagaccgaaatcgcgaagcggctgaacactatatgcgcacaggtgattccatttctgtctcaggagcaccaacagcaagtggctcaggctgtggagcgcgctaaacaagtgaccatggccgaactgaacgccattatcgggcagcagcagctccaggcgcaacacctgtctcatggacatggccctccagtgcccttgacacctcaccctagcggactccagcctcctggaatcccacccctagggggatctgctggcctcttagcactgagcagcgccttgtctggtcagagtcacctggctatcaaagacgacaaaaagcaccatgatgctgagcaccaccgcgacagagagcctggaacttccaacagtttactggtacccgacagcttgaggggaaccgataagaggcggaatgggcctgaattttctaatgatatcaaaaaacggaaggtagatgataaggacagcagccattatgatagcgacggcgataaaagtgacgacaacctggtagtggatgtttctaacgaggacccaagcagtcctagagcgtctccagcccattcccctagagagaatggtatagataagaacagattgctcaaaaaggacgcttccagctccccagccagcacagcctccagcgcctcttcaacgagcttgaagtcgaaggagatgtcacttcatgagaaggcaagtacccctgtcctcaagtctagcacccctacgcctaggtcagatatgcccaccccaggtacatccgccactccagggttacgaccaggattgggcaaaccaccagctatcgaccctctggtgaaccaggcggcagccggtttacgtactcccctggccgtgccaggaccctacccagctccctttggaatggttccccatgccggaatgaacggcgaattgacgtccccaggcgcagcctacgcatctctgcacaatatgagcccccagatgagtgccgcagccgcagccgcagctgtcgtagcctatggccgaagtcctatggtgggcttcgaccccccaccacacatgcgggtcccgactatcccccctaatctggccggaatcccaggcggaaagccagcatactcctttcacgttactgctgatgggcagatgcaaccagtaccctttcctccagacgctcttatcggcccaggcatacccaggcatgcaagacaaatcaataccttgaatcacggcgaggtagtctgcgcagtgaccatctcgaatcccaccagacacgtgtataccggaggcaaaggctgcgttaaggtgtgggacatctcccatcccggtaacaagtcacccgtgagtcagttggattgtttgaaccgggacaattacattaggagttgcaagttgctccccgatggttgcacactgatagtgggaggggaagcctcaacactctccatctgggacctggccgctccaacgccccgaattaaagctgaactcacgagcagtgcgcctgcttgctacgctcttgctatatcccccgattctaaggtctgttttagctgctgtagtgacggtaacattgcagtgtgggatctccataatcagactttagtgaggcagtttcaaggccacaccgacggggcttcctgtattgacataagcaacgacggcacaaagctttggactggcggactggataacacggtgcggtcatgggatctcagggagggccgtcaattacagcagcacgactttacctcgcagatcttttccctcggttactgccctaccggtgagtggttggcagtgggaatggaatcgagcaatgtggaggtcctgcacgttaacaagccagacaagtaccaactccacctgcatgagtcttgtgtgttgagtctgaaattcgcatactgcggcaaatggttcgtgagtactggcaaggataacctgctaaacgcctggcgcactccttacggcgcaagcatctttcagagcaaagagtcaagttcagtcctgagctgtgacatcagcgtggacgacaaatatatcgtcacaggatctggcgacaagaaggcaacagtgtatgaagtgatttattag

SEQ ID NO: 244460 - DNA, 729 bp, synthetic construct
  misc_feature 1..729: note = Description of Artificial Sequence: Synthetic coding sequence
  source 1..729: mol_type = other DNA
atgtttccccaatccaggcaccctactccacatcaggcggctggccagcccttcaaattcacaatcccggagtctcttgacaggattaaagaagaatttcagtttctccaggcccagtatcatagcttaaaacttgagtgcgagaagctggcaagcgaaaagaccgagatgcagcgtcactacgtcatgtactacgaaatgtcatacggattaaatatcgaaatgcataaacaaacagagatcgccaaacggcttaataccatctgtgcacaggttatccctttcctctcccaggagcaccaacagcaggtggcccaggcggtggagagggccaaacaagttacgatggccgagctgaatgcgataataggcgtgcgaggtctgccgggtctaccaccaactcaacagcagctgcaggcacaacatctctcacacgggcacggacccccagtgccactgacaccacatcccagcggactgcaaccccctggcattcctcctttgggtggttctgcaggcctgctcgccctgagttcagcgctctctgggcagtcacacttggctattaaggacgataagaaacatcatgatgccgaacaccaccgagaccgcgagccgggaacctctaacagcctgctggtgcccgactccctgcggggtacagacaaaagaaggaacggaccggaattttccaacgacatcaagaaaagaaaggtggatgataagtag

SEQ ID NO: 244461 - DNA, 2121 bp, synthetic construct
  misc_feature 1..2121: note = Description of Artificial Sequence: Synthetic coding sequence
  source 1..2121: mol_type = other DNA
atggtccaatcccgcctgactgccacttcggcctcccaggactctccggctagtggcctccagaccccactgcagtctggtcagccattcaagttcagtatcctcgaaatctgtgatagaattaaagaggagtttcagttcttacaggcacagtaccattcccttaaactggaatgcgagaaactcgcgtctgaaaagaccgagatgcagaggcattatgtaatgtattacgagatgtcctatggactgaatattgaaatgcataagcaggcagaaatcgtgaaacggttgagcggtatttgcgctcagatcattccttttttgactcaggaacaccaacagcaggtcctgcaggccgtcgagagagcgaaacaagtaacggtcggagagctcaacagcctgattggacagcagcaactgcagcccctttcacaccatgctcccccagtgcctcttaccccccgaccagccggacttgtgggcggatcagcaacaggactgctggcccttagcggggctctagctgctcaagcgcagctggctgcggcagtaaaagaggatagagccggagttgaggcagaaggtagccgggtggagcgagccccaagcaggtcagcttcgccatctccccctgagtccctggtagaggaagagcggccttcgggcccaggaggcggaggcaagcaacgagcagatgaaaaagaaccctctggaccttacgaaagtgacgaggataaatccgactacaatctcgttgtggatgaagatcagcctagtgagccaccaagcccggctaccaccccttgtggtaaggtccctatttgtatccctgcgagacgggacctggtcgactcccccgctagcctggcctcctcactcggatcaccgcttccgagggcaaaggaattgatcctgaacgatctgccagcaagcacaccagctagcaagtcctgtgattccagcccacctcaggacgccagtacacctggtccctccagcgctagccacctgtgtcagcttgccgctaaacccgcaccctcaactgactccgtagccctccggagcccactcaccctgagctccccttttaccacctccttctcgttggggtcacacagcactctcaatggcgatctatccgttcccagctcatacgttagtcttcacctgagcccccaagtgtcaagttccgtcgtgtatggccgttcccccgtcatggcctttgaatcgcacccccatctaaggggatctagtgtgtcctcttctttgccctccatccccggtgggaagcccgcttactccttccatgtatctgccgacgggcagatgcagcctgtgccttttccatccgacgcccttgtcggggcaggcattcccaggcacgctcgtcagttgcataccctggcccacggtgaggtcgtatgtgcagtcactatctccgggtctactcagcacgtgtacacgggcggtaaaggatgtgtgaaggtctgggatgtgggacagcctggcgctaagactcctgtcgcccaactggactgcctgaaccgagataactacattcgctcttgcaagctgctccctgacggacggtctctaatcgtgggtggcgaggcttccaccctgagtatttgggacctggcagcccctactccgaggataaaagctgagctgactagtagtgctcctgcttgctacgccctggctgtgtctcccgacgccaaggtgtgtttttcttgctgtagtgacgggaatattgtcgtgtgggatttacagaaccaaacgatggtcagacaatttcaaggccataccgatggagccagctgcattgacatctcagactacggtacccgcctctggaccggcggactggataacacggtgaggtgctgggatcttagggaaggacgccagcttcaacagcacgacttcagtagccagatcttcagtctgggtcattgtccaaaccaggattggctggccgtgggtatggagtctagtaacgttgaaatccttcacgtccgcaagcctgaaaaataccagctgcacctgcatgagtcctgtgtgctgtctttgaagtttgcgtcatgcgtccagggagtcgtcttgagtcctgaactgtag

SEQ ID NO: 244462 - DNA, 2232 bp, synthetic construct
  misc_feature 1..2232: note = Description of Artificial Sequence: Synthetic coding sequence
  source 1..2232: mol_type = other DNA
atgtacccgcaggggagacacccaactccattgcagtctggccagccatttaagttttcgattctagagatatgcgataggatcaaagaggaattccagttcctgcaagctcagtatcattccctcaagctcgaatgtgagaaactggcctcagaaaagactgagatgcaacggcactacgtcatgtactatgagatgtcatacggtttgaacatagagatgcacaaacaggcagagattgtgaaacgactctccggcatttgcgcacagattatcccgttcctgacacaggaacaccagcagcaggtcctccaagctgtcgaacgggcaaaacaggttacagtcggtgaactcaatagcttgatcggacaacagctgcagcctctcagccaccacgctccgcctgtccccctcacccctagaccagcgggtttggttgggggtagcgcaacggggctgttggccctgtccggcgctcttgccgcacaggcacagctcgcagcagcagtaaaggaagacagggctggagtggaggctgaaggaagtagagtcgagcgcgctccgtctcgatccgccagtccgagccccccagaaagcctcgtggaagaggaacgtccttccggaccagggggaggagggaaacagcgcgctgatgagaaagaacccagcggtccatacgagagcgacgaagataaatccgactataatctggtggtagatgaagatcaaccttccgagcctccctcccccgcaaccacaccttgcgggaaagttcccatctgcatcccagccagacgggacctggttgattctccggcatcgttagcatcctccctggggtcaccattaccaagagccaaagaactaattcttaacgatttaccagcctctacacctgcgagtaaatcatgcgacagctcacctccacaagacgcaagcaccccagggccttcctcagcatctcacctctgccagctggctgccaaacctgcacccagtacagacagcgtcgctctgaggtccccattgactctgtcttccccatttacaacttctttttctctgggctcccattcaacactgaatggcgatttgagcgtgcccagcagctatgtgtctctacacctgagcccacaggtatctagctcagtggtctacggccgtagtccggttatggcattcgagagtcatcctcaccttaggggaagctcggtatccagctcactgcctagcatccccggaggtaaaccagcatattcctttcacgtgtcagcagatggacagatgcagccggtgccttttcctagcgacgcattggtgggggctggcatccctcgccacgcacgtcagttgcacacgttggcacatggagaagtcgtgtgcgccgttaccatttcaggctcgacacagcatgtgtacacgggcggtaaggggtgtgttaaagtgtgggacgtcggccagccaggtgctaagaccccagtggcccaactggactgtctcaatcgcgataactatattaggagttgtaagttgcttcctgacggacgtagtctgattgtgggcggagaggccagcaccctgagcatttgggatctcgcagcgcctaccccgagaattaaggctgaactgacttcttctgcacctgcctgctatgctctcgctgtgagtcctgacgcaaaagtgtgttttagctgctgctcggatggcaacatcgtggtctgggacctgcagaaccaaaccatggtccgacagttccagggacataccgacggggcatcttgcatcgacataagcgactacgggacccggttatggaccggagggttagacaacacagtgaggtgctgggacttacgggaaggccgtcagctacagcagcatgattttagcagccagatcttttccctgggccactgccccaaccaggattggctcgcggttggcatggagagtagcaatgtggagattcttcacgtgaggaagcctgagaaataccagctgcacctccatgagagctgtgtactgtctcttaagttcgcatcgtgtggtagatggtttgtatcaaccggtaaggacaatctgcttaacgcttggcggactccatacggggcttccatctttcagtccaaggaatccagttccgtgctgtcatgtgacatctctaggaataataagtatatcgtcactggtagcggtgataaaaaagccacagtctatgaagtagtttactag

SEQ ID NO: 244463 - DNA, 879 bp, synthetic construct
  misc_feature 1..879: note = Description of Artificial Sequence: Synthetic coding sequence
  source 1..879: mol_type = other DNA
ctggcacatggagaagtcgtgtgtgctgtgactatcagcggctccacacaacatgtatacacagggggaaaaggctgtgtgaaagtctgggatgtagacggcgctgttttcgcaggccagcgcggaggggctcaccaaccgattcgcaatagggacaactacatccggtcttgtaaattactacccgacggaagatctttgatcgtggggggtgaggcgagcacgctatccatctgggatttggccgctcccacccctcgaatcaaagccgagctaacgtcttccgctcccgcttgttatgctctggccgtatcaccagacgctaaggtctgcttttcctgctgttcagacggtaatatcgtcgtctgggacctgcagaaccagactatggttcggcaattccaaggacacacggatggcgcttcctgcatagacatcagtgactacggtacgcgtctgtggacaggcggacttgataacaccgtccgatgttgggacctgcgggaaggacggcagctccaacaacatgactttagttcccagatcttctctctcggccactgcccaaatcaggactggctagccgtcgggatggaaagttcaaatgtggagatcctgcatgtacgcaagccggagaaatatcaactacacttgcacgaatcttgcgtgttatccctaaagttcgcctcctgcggacggtggtttgtgtccactgggaaggacaatctgctgaatgcctggaggactccctatggagcatccatcttccagtccaaagaaagcagcagtgtcctttcctgtgacatcagtagaaacaacaagtacatcgttaccggatccggcgataaaaaagccacagtgtatgaggtagtgtattag

SEQ ID NO: 244464 - DNA, 2121 bp, synthetic construct
  misc_feature 1..2121: note = Description of Artificial Sequence: Synthetic coding sequence
  source 1..2121: mol_type = other DNA
atggtgcagagccgtcttaccgccacctccgcttcacaggactcacccgctagcgggctgcaaaccccactccagtctggtcagcccttcaagttttccatcttagagatttgcgaccggatcaaagaggagttccaatttttgcaggcacagtaccactccttgaaactcgagtgcgagaagctggcaagcgagaagactgagatgcagaggcattacgtgatgtactacgaaatgagctatggcttaaatatcgagatgcataagcaggctgaaatcgtgaagagactgtctgggatttgcgcccagataattccatttctgacccaggaacaccagcagcaagtgctgcaagcggtcgagagggctaaacaagtcaccgtgggagagctgaatagtttaatcggacagcagcaactgcagcccctgagtcaccacgctccgcctgtgcccctgacccccaggccggcaggactggtgggcggatcagcgaccggactgttggccttgtctggcgcactcgctgcacaggctcagctcgccgcagctgtgaaagaggatagagctggggtcgaagccgaaggtagccgggttgagcgagctccttcacgatctgctagtccatctccccctgagtcgcttgtggaagaagagcgacctagtggacctggcggagggggtaagcagagagctgatgagaaagagcccagtggaccgtatgaatctgacgaggataagtccgactataaccttgtggttgatgaggaccagccctccgagccaccttcccctgccacaactccttgcggcaaggtgcctatttgcattcccgctcgtcgtgacctggtcgattcccccgcttctctggcatcatcactgggctctcctctcccacgcgctaaagagttgatcttgaacgatctgccagcatcaacccccgctagtaagtcatgcgatagctccccccctcaggatgcatctacgcccggtccaagcagcgcaagccatctatgccagctggctgccaagccggcaccaagcactgactctgtggcccttcgtagccccctgaccctgtcctcgccgtttacaactagtttttcccttgggtcacactctacgcttaacggtgacctgtccgtgccatccagttatgtgagcctgcatctttcaccccaggtgtcatctagcgtcgtatacgggaggagccccgttatggccttcgaatcacatccacacctgcgcggaagttccgtatcttcgtccctaccaagcattccagggggtaagccagcatacagcttccacgtcagcgccgatggccagatgcagcctgtccctttcccatcggatgcactagtgggagcagggatcccccgtcacgcacgccaactgcacacacttgcccacggagaggtggtgtgcgcagttacgatctcaggatctacacagcatgtctacaccggaggcaaggggtgtgttaaagtctgggatgtgggccagccaggggctaaaacgccggtcgctcagctggattgtctgaacagggataattatatccggtcttgtaaactcttaccagatggccgaagtttaatcgttggcggtgaagcctcaacactgtctatctgggacctggcggcacctacccctcgtataaaggccgagctgacatcaagtgcaccagcatgctatgccctggccgtgtccccagacgcaaaggtgtgtttctcgtgttgttctgatgggaatatagtggtatgggacctccaaaatcagactatggtacggcagtttcaagggcacactgatggtgcctcgtgcattgatattagcgattacggaaccaggctatggaccggcggtctggataacaccgttcgttgctgggacctgcgtgaggggaggcaactccagcagcacgatttcagcagccagattttcagccttgggcattgcccaaatcaggactggttggcagtgggtatggagtcctccaatgttgaaatcctccacgtgcgcaagccagaaaagtaccagctgcatttgcacgagtcgtgcgtgctatcactaaagtttgccagctgcgtccagggagtcgtactgtcccctgagctctag

SEQ ID NO: 244465 - DNA, 1083 bp, synthetic construct
  misc_feature 1..1083: note = Description of Artificial Sequence: Synthetic coding sequence
  source 1..1083: mol_type = other DNA
atgtaccctcagggcaggcacccaaccccactacagtcgggacaacccttcaagttttccatcctggagatctgcgaccgaattaaggaggagttccaatttttacaggctcagtatcacagcctaaaactagaatgcgagaaactggcgtctgagaagactgagatgcagcgacattacgtaatgtattacgaaatgtcctacgggcttaacatcgaaatgcataaacaagccgagatcgtaaagagactctccggcatctgcgctcagattatcccattcttgacacaggagagcgcctcccccagccccccagagtcactcgtcgaagaggaaagaccctctggaccagggggaggaggaaagcagagagcagatgaaaaggaaccttccggcccatatgaatctgacgaggataaaagtgactacaacctagtcgtggacgaagaccagccatcagaaccacctagcccagcgacaactccttgcggcaaggtccccatttgcattcctgcacggcgagacctcgtggactctcctgccagcctcgcctcttcactgggttccccactgccgagggccaaagagttaattctgaatgatcttcccgcatcgactccagcctccaaaagctgtgactcctcgcccccacaggacgcatcaacccctggcccaagcagcgcatcacatctgtgtcagcttgccgctaaaccagctccttctacagacagcgtggctctgcggagtcccctgaccctgtcctccccctttactaccagtttttccctaggctcgcacagcacgttaaacggcgatttgagtgtaccttccagttatgtgagcctgcaccttagcccgcaggtatctagcagcgtcgtgtacgggaggagtccagtcatggcctttgaatcccacccacaccttagaggctctagtgtaagttccagtctgcctagtatccctggaggaaaaccagcttattcttttcatgtgtccgctgacgggcagatgcaaccggtcccatttcctagcgatgccctggtcggggcaggcattcccccatggccctcatctaccgcctag

SEQ ID NO: 244466 - DNA, 1866 bp, synthetic construct
  misc_feature 1..1866: note = Description of Artificial Sequence: Synthetic coding sequence
  source 1..1866: mol_type = other DNA
atgcagcgacactacgttatgtactacgagatgtcatacggcctgaacatcgaaatgcacaagcaggcagagatagtgaaacgtctttctggcatttgcgcccaaattatcccgttcctaacacaggagcaccagcagcaggtcctgcaagcagtagagcgagcaaagcaggtgaccgtcggagagctgaattctcttattgggtctgcttccccttctccaccggaaagccttgtggaagaagagcgtccttccgggcctggaggaggaggcaagcagagggctgatgagaaggagcctagcggaccttacgagagcgacgaggacaagtccgactataatctggtggttgatgaagatcagccatcagaaccccctagccccgcaaccacaccctgcggcaaggttcctatctgcatacctgcgaggcgagacctggttgattctccggcttctctggcctcatctctcggctcccctcttcctcgcgctaaagaattaattctcaacgatttgccggcttcgaccccagcctcgaagtcctgtgacagttccccaccccaggacgcctcaaccccaggaccttcctccgcttcacacctctgccaactagcggctaagccagcacccagcacagactcggtggctcttaggagccctctgaccttgagcagtccatttactactagtttctccctcggcagtcattcaactttgaacggggacttgtcagtaccatcatcctacgtgagcctgcacttatctccccaggttagctcaagtgtggtgtacggacggtcacctgtcatggctttcgaaagccatccccatttacgcggttcttctgtatctagcagcctgccctctattcctggaggcaagcccgcatacagtttccacgtttctgccgatggccaaatgcagccagtcccgtttccttctgacgctctggtcggagcgggaattcccagacatgcgcgtcagctccatacgctggcacatggagaagttgtctgcgctgtgacaatttccggatccacacaacacgtttataccggcggaaaaggctgcgtcaaggtctgggatgtggggcaacccggagctaaaacaccagtggcccaactcgactgtttgaaccgggataattatatccggagctgcaaactgcttcctgatggtaggagcttgattgttggaggcgaggcatccactctttccatctgggatctggcagcgcctactcctcgcatcaaagccgaactcacatcaagcgctccggcatgctatgccttggccgtatcacctgacgccaaggtgtgcttttcatgttgtagtgatgggaatatcgtcgtttgggacctacagaatcagactatggtgcgtcaattccagggacatacagacggcgcttcctgcattgatatctcagattatggaactagattatggacaggcggtttagataatacggtgcggtgttgggacctgcgggagggtcgacagttacagcagcacgatttttctagtcaaatcttctctctcggtcattgccccaatcaggactggttagccgtaggcatggaatcttctaatgtcgaaattcttcacgtacgcaagccagagaagtaccagctgcacctgcacgagagttgcgtgttgagcttgaagttcgcatcatgtgggagatggttcgtgagcacaggcaaagacaacctgctcaacgcatggcgcacaccatacggagccagcatcttccagtccaaggagagttcttcagtcctgtcatgcgatatctctcggaacaacaagtatatagtcaccggcagcggtgataaaaaggcaacagtttatgaggttgtttattag

SEQ ID NO: 244467 - DNA, 1233 bp, synthetic construct
  misc_feature 1..1233: note = Description of Artificial Sequence: Synthetic coding sequence
  source 1..1233: mol_type = other DNA
atgacttttccacccgctctcctccctcctaatccagtcactcctccaagacctcgcactctgccccctccagggccagctcgcccagtcaccagcgcctctttgttaccttctcagcatttgccacggaccgcctcggttagttctagtgttgtgtatgggaggagccctgttatggcctttgagagccatccccacctccggggttcctcggtgagctcgagcctgccatccatccctgggggaaaacccgcttactcattccacgtgtcggccgacgggcaaatgcagccagttccctttcctagcgacgccttggtcggggcaggcatccctcgacacgcgaggcagcttcataccctcgctcacggcgaagtcgtgtgcgctgtgactatctctggatctactcagcacgtttatactggtggcaaaggctgcgtgaaagtttgggacgtcggacaaccgggtgccaaaacacctgtcgctcagctggattgtctcaacagagataattatatcagaagctgcaagctgctcccagatggcaggtccctgattgtcggaggagaggccagcacactgagtatctgggacctcgccgcacccacaccacgtattaaggctgagctcacatctagcgcgccagcgtgttatgctctcgctgtgagtcccgatgccaaggtgtgcttctcttgttgctccgacggaaatattgtggtgtgggatttacagaatcaaaccatggtgcgccagtttcagggtcacactgatggcgcatcgtgcatcgacatcagcgactatggtacacgactttggacaggaggcctcgacaacacagttaggtgctgggatctgagagagggccgtcagctacaacagcacgatttcagcagccagatattttctctgggtcattgtcctaatcaggattggctcgccgtgggaatggagagtagcaacgtggaaattctgcacgttcggaagccggagaaataccagctccaccttcacgaatcttgtgtgctttccttgaagttcgcttcatgtggtaggtggtttgtttcaactggaaaggacaatctgttgaatgcttggagaacgccctacggggcatccatttttcagagcaaggaatccagcagcgtcttatcttgcgatatcagtcgaaacaacaaatacattgtgaccggctccggggataaaaaggcgacggtctacgaggtggtgtactag

SEQ ID NO: 244468 - DNA, 2061 bp, synthetic construct
  misc_feature 1..2061: note = Description of Artificial Sequence: Synthetic coding sequence
  source 1..2061: mol_type = other DNA
caaacaccactgcagtcagggcagccctttaagttctccatcctcgagatctgcgacagaattaaagaggagttccagttcctacaggctcagtatcactctctaaaattggagtgcgaaaagctggcctctgagaagacggagatgcagcggcattacgttatgtattacgagatgtcctatggactgaacatcgagatgcataagcaagcagaaatcgttaagcgcctgagcgggatctgcgctcagatcattccattcctcacccaagagcaccagcagcaggtgttgcaggccgtcgagagggctaagcaggtgacggtcggcgaactgaatagcctaattgggcagcaacagcttcagcccctctcacaccatgccccacctgtgcccctcacaccccgtccggcaggccttgtcggtggtagcgcaactgggttgctggcactgtctggcgcactagcagcacaggcccagctcgccgcagcggtcaaggaggatcgggctggggtggaagccgaggggtcacgtgtcgagcgggcacccagccgcagcgcctcgccctcccccccagagtccctcgtcgaagaagaaaggcccagcggtcccggtggcggaggtaagcaacgggcagatgagaaggaaccctccgggccttacgagagtgatgaagataagagcgattacaacctggtggtggacgaagatcagcccagcgagcctccgtccccggctactaccccctgtggcaaagttcctatttgcattccggcaagaagggacctggtcgatagtccagccagtcttgcatcctcattagggagccctctgcccagggctaaggaacttatcctcaacgacctgccagcatcaacccccgcatcaaaatcctgcgactctagcccaccccaagatgcttccacacccggtccatcctcggcctctcacctctgccaactggccgctaagcctgcaccctcaacggactctgtggccctgcgatctcctttgaccctgtcctccccatttaccaccagtttctccctcgggagccattccacattaaatggcgacctttccgttccatcctcgtatgtgagcctccacctatccccccaggtttcctcgtccgtcgtttacggtcgttcacccgtgatggcattcgaaagccacccacatctgcgaggttcatccgtcagttcttcattacccagcattcctggcggaaagcccgcttacagcttccacgtgtccgcagatggtcaaatgcagcctgtgccctttcccagcgatgccctggtaggagccggtatcccacgccacgccaggcagctgcatactttggcccacggcgaagtggtctgcgctgttacaatttcagggagcactcaacacgtgtacacaggtggaaaaggctgcgtcaaggtctgggatgtcgggcagcccggagctaagacccccgtcgcccagctcgactgtctcaacagggataactacattcggtcctgtaagctgctgccagatggccgttctttaatcgttgggggtgaggccagtactctttccatctgggatctggctgcccctacacctcggatcaaggctgagttgacatcttccgccccagcttgctatgccctcgccgtatcccctgatgcgaaggtctgtttctcctgttgctcagatggcaacatcgtggtttgggatctccagaatcaaacaatggtgagacagttccaggggcataccgacggggcatcttgcatagatatcagcgactacggcaccaggttgtggactgggggtctggacaacacagttagatgctgggacctgagggaggggaggcagctgcaacagcacgattttagctcacagattttctctctcgggcactgtcctaatcaggattggctcgcggtggggatggaatcttcgaatgtcgagattttgcatgtacggaagccagaaaagtaccagcttcatttacatgagagctgtgttttgtccttgaagttcgcatcatgtgtgcagggagtcgtgctcagccctgagctatag

SEQ ID NO: 244469 - DNA, 1866 bp, synthetic construct
  misc_feature 1..1866: note = Description of Artificial Sequence: Synthetic coding sequence
  source 1..1866: mol_type = other DNA
atgcagagacactacgtgatgtattatgagatgtcatacgggctgaatatcgaaatgcataaacaggcagagattgtgaagaggctttccggaatttgcgctcagattattcctttcctgacccaggagcaccaacaacaggtgctgcaggcagtggagcgcgcaaaacaggtgacagtgggtgagttgaatagccttattggatcagcctcaccaagcccaccagagtctctggtagaagaggagagaccaagtggaccgggagggggtggaaagcagcgagcggacgagaaagaaccctcaggtccttacgagtcagacgaagacaaaagcgattataatctagtggtggacgaggatcagccctcggagccaccttccccagcaactacaccctgcggcaaggttccaatatgcatccctgcacgcagagacttggttgatagccccgctagtctggcatccagcctgggttcacctcttccacgggctaaagagcttatactcaatgacttaccggcttcaaccccagcctccaaatcttgtgattcttcccctcctcaggatgcgagcacaccaggcccttctagcgcaagccatctttgccaactcgctgcaaaacccgctccctccacagactctgtggcgctgaggagccctctgaccctctccagcccctttactaccagcttctcattgggttcccactccacattaaacggggacttgagcgtacccagttcatacgtgtccctccatctctcacctcaggtgagcagttctgttgtgtacggacgaagtcctgtcatggccttcgaatcccacccacacttgcgtggctcttcggtgagttcttccctgccatcgatccctggaggcaagccagcttattctttccacgtctcggctgatggacagatgcaacccgtacccttcccatccgacgcgttggtgggtgcagggataccaaggcatgccaggcaactacatactctggctcatggcgaggttgtctgtgcagtgacgataagcggatctactcaacatgtgtacaccggcggaaagggatgcgttaaagtctgggatgtgggccagccgggagctaaaacccccgttgcccagctagattgtctaaaccgggacaattacatcagatcatgtaaactcctgcccgatgggcgttcactgattgtcggcggagaggcttccaccttgtccatctgggacctcgctgccccaacacctaggataaaggccgaactgacttcaagcgcgcctgcttgttacgcattggcagtgagtcccgacgccaaggtgtgcttttcgtgttgctctgatggcaacattgtggtctgggacctccagaatcaaacaatggtgaggcaatttcaaggacatacagacggcgctagttgcattgatatctccgactacggaacacgactgtggaccggcggactcgataacacggtgcgatgctgggacttgagggagggtaggcagctgcaacagcatgatttttccagccaaatattctcactcggccattgtcctaatcaggattggctggctgtggggatggagtctagtaacgtcgaaatcctgcacgtcaggaagcccgagaaataccaactgcatctccacgaaagctgcgtcctgagtctcaagtttgcatcatgtggaagatggttcgtgtcaaccggcaaagacaacctgttgaatgcctggagaactccttatggcgcatctatcttccagtccaaggaaagttctagcgtactttcgtgtgatattagtcggaacaacaagtacattgtaactggaagtggagataaaaaagccaccgtgtatgaagtggtctactag

SEQ ID NO: 244470 - DNA, 2283 bp, synthetic construct
  misc_feature 1..2283: note = Description of Artificial Sequence: Synthetic coding sequence
  source 1..2283: mol_type = other DNA
atgtatccccaaggtcggcatcctgcccctcaccagcctggccagcctggctttaaattcaccgtagctgagtcatgtgaccgaatcaaggatgaattccagttccttcaagcgcaatatcatagtctgaaggtagagtacgacaagctggccaacgagaagaccgaaatgcaacgtcattacgtgatgtactacgagatgagctatgggctaaatatagagatgcataaacaaacagaaatagccaagagattaaatactattctcgcccagatcatgcctttcttgagtcaggagcatcagcaacaggtggctcaggccgtggagagggctaaacaggtcacgatgacggaactcaatgctattatcggacaacagcagttacaggcacagcatctctctcacgctacacacggcccacctgtccagctgccccctcatccttccggcttacagcctcctgggatccctcctgtaacaggatcctcttcaggccttctagccctgggggcactgggctcacaagctcacctgaccgttaaggacgagaaaaatcaccacgaactggatcatcgcgagcgcgaatcatctgccaataattccgtcagtccttctgagtccctccgcgcttctgaaaaacacagaggttccgccgactatagcatggaggccaaaaagcggaaagctgaggagaaggactcactttctagatatgatagtgacggagacaagagcgacgacttggtggttgacgtttctaacgaggaccccgcaaccccccgagtgagccccgctcactcacccccagaaaacggactggacaaagcacggtccctgaagaaggatgccccaactagtcctgcttccgtggcgagctcctcatctacaccttctagcaagaccaaagatttgggccacaacgataagagctccacgcccggactaaaaagcaacacgccgacccctcggaacgacgctccaactcccggtacctccactactcctgggctgcgatcaatgcctgcatccgctttacgcactcctatctcgattacttcaagttatgccgcacctttcgccatgatgtcacatcacgagatgaacgggagtctgacctcacctggggcttatgccggacttcataatatcccgcctcagatgtctgctgctgccgcagcagccgctgcagcctacggcagatccccaatggtgtctttcggcgcagtggggtttgatccccaccctcctatgcgagccacggggctcccatcttcattggcatcaattcccggaggcaagccagcttacagcttccatgtgagtgctgacgggcagatgcagcccgtgccgtttccacatgacgctctggccggtcccggaattcccaggcacgccaggcagataaacacgctctcacatggggaggtggtgtgcgcggtgaccatttcaaatcccacgagacacgtgtacacaggaggaaaggggtgtgtgaaaatctgggacatcagtcagcccggatctaagtctcccatctctcagttggactgcctaaacagggacaactacattcgaagctgcaagttactgcccgacggtcggaccctgatcgtcggtggagaagcgagcaccttaaccatctgggatttggcctctcctacacccaggataaaggctgagctgacatcttccgctccagcctgttacgccttggctatctcacccgatgctaaagtttgtttctcttgttgctctgatggtaacattgcagtgtgggacctccacaaccagactttggttcggcagtttcagggccacactgatggcgctagctgcatagatatatcacacgatggcacgaagttgtggaccgggggactggataatacagtgcgatcatgggacttgagggaagggcgacagctgcagcagcacgacttcacaagccagatcttctccctcgggtattgtcccaccggggaatggctagctgtgggtatggaaagcagtaatgtagaagtattgcatcatactaagcccgataagtatcagcttcacctgcatgagtcctgtgtcctgtctctgaagttcgcctactgtggtaaatggttcgtgtcaaccggaaaggacaatctgctcaacgcctggcggacgccttatggagccagcatctttcagtcgaaggaatcctccagtgtcctatcctgcgatatatcggccgacgacaagtatattgtgacagggtctggcgacaaaaaggccactgtgtatgaagtgatctactag

SEQ ID NO: 244471 - DNA, 2289 bp, synthetic construct
  misc_feature 1..2289: note = Description of Artificial Sequence: Synthetic coding sequence
  source 1..2289: mol_type = other DNA
atggctccccaccagcccggtcagcccggatttaaatttactgtggccgaatcctgtgatcgcattaaggatgagttccagttcctgcaggctcagtaccattctctcaaagtggaatacgacaaattggcaaatgaaaagactgagatgcagaggcactatgtgatgtactatgaaatgtcatacgggcttaacattgaaatgcacaagcaaaccgaaatcgcaaagcgactcaatacgatattggcacagattatgccctttctcagccaggaacaccagcagcaagttgctcaagcagttgagcgcgcaaaacaggtcaccatgacggaattaaatgccattatcggacagcaacagctccaggcccagcacctcagtcacgctacccacgggcctcctgtacagttgcctccacacccgtcaggtttacagccacctggtatccccccagtgaccgggtcatcaagcggcctcctggccttgggggcactgggctctcaggcacatctgaccgtcaaggacgagaaaaatcatcatgaactggaccatcgcgaacgggagagcagcgcaaacaatagcgtttcccctagcgaaagtctgagggccagcgaaaagcatcgcggttccgccgattactccatggaagcgaagaaacgaaaggccgaagaaaaggacagtttgtcccgctacgatagtgacggtgacaaatctgatgaccttgttgtggacgtctctaatgaggacccagcgactcccagagtgtctccagctcattctccacctgagaacggcctagacaaagcacggagtttaaaaaaagatgccccaacctctcccgcttctgtggcatctagttcatccacaccctcctccaagacaaaagacctagggcataatgacaagtcctctacccccggtctcaaatccaatacacccaccccccgaaacgacgcccctacccccggtacatcgacaactcctggactcagatctatgcctggaaaacctccaggcatggatcccattgccagcgccttgagaacaccaatatccataacctccagttatgcagccccttttgctatgatgagtcatcacgaaatgaatggctctctaacaagtccaggggcttatgctggtctgcacaatatccctccccaaatgtctgccgctgccgcagccgctgccgcagcttatggaaggtcaccaatggtatctttcggtgctgtaggatttgaccctcatccacccatgagggcaaccggccttcccagctccttagctagcatccccggtgggaagcccgcatattcgttccacgtcagtgccgatggacagatgcagccagtgcctttcccgcacgatgctttggccggacctggcatcccaaggcacgcccgtcaaattaacaccctgagccatggcgaagtcgtgtgcgccgtgacaatttcaaaccccacccggcatgtgtacacaggagggaaaggatgtgtgaaaatctgggacatctcacagcccggatccaagagcccgatttcacagttggattgtctaaaccgagataattacataagaagctgtaagctgttgccagacggcaggaccttaatagtgggtggtgaagcaagtactttgaccatttgggacctggccagtcccacacccagaattaaggctgaactgacttcatctgcacccgcttgctacgccttggctatctcccctgacgcaaaagtatgcttctcctgctgtagcgacgggaatatcgcagtatgggacctccacaatcagacactggtgaggcagttccagggacacacagacggggcaagctgtatcgatatttctcacgacggtactaagttatggacgggagggttggacaataccgtcaggagctgggacctgagagagggtcggcagcttcaacagcacgactttacatcacagattttttcattgggctattgtcctacaggagagtggttggccgtcgggatggagtcctcaaacgtagaggtgttacaccacaccaagccagacaaatatcagctgcacctccatgaatcgtgtgtgctgtctctgaagtttgcctactgcggaaagtggttcgtctccaccggcaaagataacctgctgaacgcttggagaaccccctatggcgctagcatctttcagagcaaggaatcctcttctgttctgtcatgtgacatcagtgctgacgataaatatattgtaactggatcgggcgacaagaaggccacagtgtacgaagtgatttattag

SEQ ID NO: 244472 - DNA, 2295 bp, synthetic construct
  misc_feature 1..2295: note = Description of Artificial Sequence: Synthetic coding sequence
  source 1..2295: mol_type = other DNA
atgtatccccagggcaggcatccagcaccacaccaacccggacagcctggcttcaaatttacagttgccgagagctgcgatagaatcaaggacgaattccaattcctccaggcacagtatcacagcttgaaagtcgaatacgacaaactcgcaaatgaaaaaacggagatgcagaggcactacgttatgtactatgagatgagctatggtctgaatattgagatgcacaagcagacagaaattgcaaagcggctgaacactattctagcccaaattatgccattcttgagccaggagcatcaacaacaggtcgctcaagccgtagagcgggctaagcaggttaccatgacggaacttaacgccattatcgggcaacaacagttgcaagcgcagcacctcagtcatgcgacccatgggcctccagtgcagctgccgccacatccatctgggctgcagccgcctggcattccacctgtgacggggtcatcctctgggttgctggctcttggggctctcggttcccaggctcatcttacagtgaaagacgaaaagaaccaccacgaactggatcacagagagcgctcaagcgcgagcaacaactccgtttctccatccgagagcttgagggcctcagagaaacaccggggaagcgccgattactctatggaagcgaagaagcgcaaagcagaggagaaagatagtctgagtcgctatgatagcgatggtgacaaaagcgacgacctggtggtggatgtctccaacgaggatcccgctacacccagagtttcgcccgctcactcccctcctgagaatggactcgataaagctagatcactgaaaaaggacgctccaactagccccgcaagtgttgcctccagcagctctaccccctcctccaagactaaagatttgggtcacaacgacaagagttctacccctgggcttaaaagcaacactccaactcctagaaacgacgcgccaacccctgggactagtacaaccccaggcctgagaagtatgcccggaaagccacctggcatggatcctatcgcctccgcgctccgcacaccaatcagcatcacatcaagctacgccgcaccatttgctatgatgagccaccatgagatgaatggctccctgacaagcccaggggcatacgccggactccataacattcccccacagatgagcgctgctgcggctgccgcagctgctgcctacggacgttcacccatggttggatttgatccacacccgcctatgcgggcaactggcctgccttcttccttagctagcatccctgggggtaagcccgcttattctttccatgtcagtgccgatggccagatgcagcccgtcccctttcctcatgacgcgctggctggacccggtatacctcgacacgcccgacagatcaacacgctgagtcacggagaagtcgtgtgtgctgtgacaataagcaacccaactcggcacgtgtacacaggtgggaaagggtgcgtgaagatctgggacatcagccaacccggatcaaagagccccataagtcagctggactgcctgaatcgggacaactacattaggagctgcaagttgctgcccgatgggagaacactgatagttgggggtgaggcaagcacccttaccatttgggatttggcttccccaactcctagaatcaaggctgaactgacatcaagtgcacctgcttgttatgccctggcgatctcacctgatgctaaggtgtgcttcagttgttgcagcgacggaaatatagccgtctgggacctacataatcagactctggtgagacagtttcaggggcacacggacggtgctagttgtatcgacatttcacacgatggcactaagctgtggaccggaggactggataatacggtccgcagttgggacttacgagaaggccgacagttacagcagcacgacttcaccagccaaatcttctctctgggctattgtcccaccggtgagtggctcgctgtgggaatggaatccagtaatgtggaggtgcttcaccatactaagcctgataaataccaactgcacctgcatgagtcctgcgttctcagcctgaaatttgcttattgcgggaaatggtttgtctccacaggcaaagataatctgctcaacgcatggcgtaccccctatggtgctagcattttccaatctaaagagagctcttctgtgctgtcttgcgatatctccgcagacgataagtatattgtaacagggagtggggataagaaggcaactgtgtatgaagtcatctactag

SEQ ID NO: 244473 - DNA, 2310 bp, synthetic construct
  misc_feature 1..2310: note = Description of Artificial Sequence: Synthetic coding sequence
  source 1..2310: mol_type = other DNA
atgtatccacagggcagacatccagcccctcaccagcctggacagccaggctttaaattcactgtcgccgaaagctgcgatagaatcaaagatgaatttcaatttctgcaggctcagtaccattcacttaaggtagagtatgataagttggccaacgagaaaacagagatgcaacggcattatgttatgtactatgagatgtcttatgggctgaacattgagatgcataagcaaacagaaattgctaagaggctcaacaccattctcgcccagataatgcccttcctctcccaggaacatcaacagcaggtggcacaggccgtggagcgggctaagcaggtgacaatgactgagctgaatgccattattggacagcagcagctgcaggcccagcacctatcacacgctacacatgggccacctgtgcagctgccgcctcacccatcaggactgcagccacccggtatccctcccgtgaccggctcaagctctgggctgttggccctgggcgcactggggtcacaggctcaccttaccgttaaggacgagaagaaccaccacgagcttgatcatagggaaagggagtctagcgccaacaacagcgtttccccatctgagagtttgagagcaagcgaaaaacataggggatcagcagactactctatggaggctaagaaacgcaaggctgaagagaaggattccctgagcaggtacgactccgacggggacaagtccgacgatctggttgtggatgtctcgaacgaggatcccgctactcccagagtctcgcccgctcatagcccaccggagaatggactggacaaagctagatctttgaagaaggatgcgccaaccagtcctgccagtgtggctagctcgtccagtacccccagcagcaagacaaaggacctggggcacaatgacaagtccagcacacctggtttgaaatcaaacactcctactccccgtaatgacgccccaacgccagggacgagcactaccccaggacttagaagtatgcccggtaaacccccaggcatggaccccattgcctccgcgctacgaacacctatatctatcacatcaagctatgccgcaccgttcgctatgatgtcacatcacgaaatgaacggatctcttacatcaccaggcgcttatgcgggactccacaatattccaccgcagatgtcagcagctgcggctgccgctgctgccgcatacggcagatctccaatggtctccttcggagctgtggggtttgaccctcacccaccaatgagagctaccggtctgcccagctccttagccagcatccccggtggcaagcctgcctactctttccacgtttccgctgacggtcagatgcagccggttccattccctcacgatgccttggcgggacctggaatccctagacacgcccgtcagatcaacacattgtcccacggcgaggtggtgtgtgccgtgacaattagcaatccgacaaggcatgtgtatactggagggaaagggtgtgttaagatttgggacatctctcaaccaggcagtaaatccccaatcagccagctagattgtttgaaccgggacaactacatcaggtcgtgcaaactgttaccagatggtagaactctcattgtaggaggcgaggcgtctacccttacgatctgggatctcgcctcacctacgccccgtatcaaggcagaattaacatcaagtgcgcctgcctgttatgctctagctataagtcccgacgccaaggtttgcttttcttgttgctctgatggcaatattgcagtctgggatctgcacaatcaaaccttggtcagacaatttcagggtcatactgatggtgccagctgcatcgatatctctcacgatggcacaaaactctggacaggcggactcgacaacaccgtacggtcttgggacctgagagagggacgccagctacaacaacacgactttaccagccagatattctctcttggatactgcccaactggagagtggctcgcggtcggcatggaatccagcaacgtggaagttcttcatcatactaagccggacaagtaccaactgcacctccatgaatcgtgtgttctgtccctaaagttcgcgtactgtgggaagtggtttgtcagtacaggcaaagataatttgctcaatgcctggaggacgccttacggcgcttccatctttcaaagcaaggaaagctcatcagtcctctcgtgcgatatcagcgctgacgataagtacatcgtgaccgggtctggggataagaaggcgacagtttatgaagtgatttactag

SEQ ID NO: 244474 - DNA, 2295 bp, synthetic construct
  misc_feature 1..2295: note = Description of Artificial Sequence: Synthetic coding sequence
  source 1..2295: mol_type = other DNA
atgtatccccagggaaggcaccctgccccacatcagcccggacagcccggtttcaaattcacggttgctgaaagctgcgaccggatcaaggacgaatttcagtttctccaagcccagtaccactcacttaaggtcgagtatgataagctggcaaacgagaagactgaaatgcagcgccattacgtcatgtattatgagatgtcctacggtctgaacatcgagatgcacaagcagaccgaaatcgcaaagagactgaatactatcttggcgcagatcatgccctttctttcccaagagcaccaacaacaagttgcccaggctgttgaacgagctaagcaggtgactatgactgagctaaatgcaatcattggccagcagcaactgcaggcccagcacttgagtcacgccacccatggacctccagtccaactgcctcctcatccatctggtctgcaacccccaggtattccacccgtgaccgggagctcttccgggctccttgcgttgggagcactgggctctcaggctcatttgacagtgaaagacgagaaaaaccaccacgagctggaccatcgcgagagagagtccagcgcgaacaactctgtctctccctcagagtctctcagagcctctgaaaagcataggggctccgccgattacagcatggaagcaaagaaaaggaaggccgaggaaaaggatagcctctctcgctacgatagcgatggggacaaatcagatgatcttgttgtcgacgtgtccaacgaagacccagccacccccagggtctcacccgcacattccccccctgaaaacgggctagataaagcacgatccctgaaaaaggatgcacctacaagccctgcctccgtggccagctccagctccactccctcttcgaaaacaaaggacctggggcacaatgataagtccagcactccgggtcttaagagcaacacccctaccccaaggaacgatgctcccaccccagggacaagtaccacccccggtctgcgcagcatgccgggtaagccccctggcatggaccccatcgcatccgctttgcgtactcctatctccattacctcaagctacgcagcacctttcgctatgatgagtcaccatgagatgaacggttcattgacaagtcctggcgcatacgcaggcttgcacaatattcctccccagatgtccgctgccgctgctgccgctgccgctgcatatggccgaagccctatggtcggcttcgaccctcatcctccgatgcgcgcaacaggactccccagtagcctagcctctattccaggtggtaagcccgcatactcctttcatgtgtccgccgatgggcaaatgcagccagttccgttccctcacgatgcgctagccggaccgggtattccaaggcatgcacggcagattaacactctgtcccacggtgaagtcgtgtgtgccgtgacaatatctaatcccaccaggcatgtctacacgggcggtaaagggtgtgtgaaaatctgggacatttcacagccaggatctaaaagccctatctctcagctggattgtctcaacagggacaactatattcgcagctgcaagctgctgcctgatgggaggacattgatcgtggggggagaggcctcgactctcaccatctgggacttggcgtcaccaacaccgaggattaaggcggagctcacatcttccgctcctgcctgctatgccctggctatcagtccagatgctaaagtttgcttctcatgttgtagcgacggaaatattgctgtttgggacctgcacaaccaaaccttggtccggcagtttcagggacacactgatggcgctagctgtatagacatttcccacgacggaaccaagctgtggacaggcggactggacaataccgtgcggtcttgggatctaagagagggcagacaactccaacagcacgattttactagccagatcttttcgctgggttactgtccaacgggtgagtggctggccgtaggcatggaaagcagcaatgtggaggtgctgcaccacacaaagcccgataagtatcagttacatctgcatgagagctgcgttttgtccctgaagttcgcctattgcgggaaatggttcgtttccacaggtaaggacaatttactcaatgcatggcgtaccccgtacggagccagcattttccaaagcaaggagtcatcgtcagtgttgtcatgcgacatctctgccgacgataaatacatcgttacaggatctggcgacaagaaagctactgtttacgaggtgatctattag

SEQ ID NO: 244475 - DNA, 2319 bp, synthetic construct
  misc_feature 1..2319: note = Description of Artificial Sequence: Synthetic coding sequence
  source 1..2319: mol_type = other DNA
atgtatcctcaaggacgccacccagcaccacaccagcccggacagcctgggttcaaattcaccgtggctgagagctgtgatcggattaaggatgaattccaattcctacaagcacagtatcactccctgaaagtggagtacgataaactggccaatgagaaaaccgagatgcagcggcactacgttatgtactatgaaatgagttacgggctgaacatcgaaatgcacaaacagacagagattgctaaaaggcttaacacaatactcgctcagattatgccctttctgtcacaggaacaccagcaacaggtggcccaagctgttgaaagagccaaacaagttactatgactgagttgaacgcaattatcggtcagcaacagctgcaggcacagcatctcagccacgccactcatggtccgccagtccagttgccaccccacccgagtggcctccagcctcctggcattccacccgttaccggcagttcttccggactcctggcacttggggcacttggatcgcaagcgcatttgacagtaaaagatgagaagaatcaccacgagctagatcaccgcgagcgcgaatcatctgccaacaattctgtcagcccgtctgaatccctgcgggcatctgagaagcaccgtgggagcgccgactactccatggaggccaagaaaaggaaagcagaggagaaggactctctgtcacgctatgattctgatggtgataaaagtgacgacctggtcgtcgatgtgtcaaacgaggatcccgctaccccaagagtgtcacctgcccacagccctcctgagaatggtctcgacaaagcgagatccctcaaaaaagacgccccaacatcacccgcatcagtagcctcctcttcctccacccccagcagcaagacaaaagatctgggacataatgataagtcatcgacccccggtttgaagagcaacaccccgacacctaggaatgacgcgcctaccccaggaacttccacgacacctggcctcaggagtatgccaggaaaaccgcctggtatggacccaattgggatcatggcttccgcactacggacgcccattagcatcacgtcttcttatgctgctcccttcgccatgatgtctcatcacgaaatgaatggctctctcacaagcccaggagcctacgccggactccacaacatcccccctcagatgtctgctgctgcagcagccgctgccgctgcttatgggcgatcaccaatggtttcatttggggctgtgggatttgaccctcaccctccgatgcgggcaactggcctgccaagcagtttggcctcaattcccggaggaaagccagcatattctttccacgttagtgctgatggccagatgcagccagtgcctttccctcacgacgccctcgccggtcccggtatcccacgccacgctcggcagatcaacaccctttcacatggcgaggtcgtctgtgctgtgactatctcaaatcccacaaggcacgtatacacagggggtaagggctgcgtgaagatctgggacatctctcaaccgggatccaagtctcctatttctcagctggattgtctgaaccgtgacaactacatcagaagctgcaagttgttgcctgatggcaggactctcattgttggcggtgaagccagcactctgactatctgggatttggcaagtcccactcctcgcattaaggccgaactcacttcatccgctcccgcttgctacgcactggccatttctcccgatgctaaagtgtgtttttcatgttgctccgatgggaatatcgccgtctgggatctccacaaccagacactggtgcgtcagttccagggacataccgacggcgcttcctgtattgacatatcacacgacggcactaagctgtggaccggcggactcgacaatactgtccgttcttgggacctgcgggagggcagacagctgcaacaacacgacttcaccagccagatcttcagcctcggatactgccccaccggggaatggctggcagtgggtatggaatcttcgaacgtagaggttctgcaccacacgaagcccgacaaataccagctgcacttgcacgagagttgcgtcttgtccctcaagttcgcctactgcggcaagtggttcgtgtccaccgggaaagacaacctcttgaatgcctggcgcactccttacggcgcatccatcttccagagcaaggagtccagttcagtgctgtcatgtgacatttccgcggatgataagtatatagtcaccggtagtggagataaaaaagccacggtgtacgaggtgatatattag

SEQ ID NO: 244476 - DNA, 2319 bp, synthetic construct
  misc_feature 1..2319: note = Description of Artificial Sequence: Synthetic coding sequence
  source 1..2319: mol_type = other DNA
atgcccccaccgccaccactgagttgtctgcggggtttgcaagctccacatcagccaggacaacctgggttcaagttcactgtggccgaatcatgcgaccggataaaagatgaatttcaatttctccaggctcagtatcattccttgaaagtcgagtacgataaactggcgaacgagaagaccgaaatgcagcgtcactacgtgatgtactacgaaatgagctatggcctaaacatcgagatgcataagcagaccgaaatcgcgaaacggctgaataccattctggctcagatcatgccattcctttcgcaggagcatcagcaacaggtggcacaagctgttgaacgcgctaaacaggtcactatgaccgagctgaacgccattattgggcagcagctacaggcacaacatctgagccatgcgacccacggtcctcccgtacagttgccaccccacccttctggcctgcagccgcctggtatacctcccgtgaccgggtcctcgtccggacttcttgccctcggagcccttggctctcaggctcacctaactgtgaaggatgaaaagaatcatcacgaactcgatcacagggagagggaaagctccgcaaacaactccgtctcgccctccgaatcgctgagggctagcgaaaagcaccgtggatccgcggactattcgatggaggctaaaaagcggaaggcagaggagaaagacagcttatcacgctacgacagtgacggagacaagtctgatgacctcgtggtggatgttagcaatgaagacccagccaccccaagggtctctccagcacactctcccccagagaacggtctagataaagctcgctctctgaagaaggacgcccctacctcacccgctagcgtggcctcatcttcgagtactccatcgtccaaaaccaaggatttggggcacaacgacaaatctagtacccctggtctcaaatctaacaccccaaccccgagaaatgacgccccaacaccaggcacatctacgacccccggactcaggtctatgccagggaagcccccaggtatggaccccataggaatcatggcttcagccctccgcactcctatctccattactagctcttatgccgctcctttcgcaatgatgtcccaccatgagatgaatggcagccttacctcacctggtgcttatgcgggactgcataacattccacctcagatgtccgcggcagcggcagccgcagccgcagcttacggaaggtctccaatggttgggttcgatccacatccacctatgagagcgactggcctcccgagctccctggcttccatcccaggagggaagcccgcatactcctttcatgttagcgccgacgggcagatgcagcctgttccattcccccacgatgcactcgccggacccggtatccctcgtcacgccagacagatcaacactctctcccacggagaagtggtgtgcgcggttacaatctccaatcccacccgccatgtgtacacggggggaaaaggatgtgtgaagatttgggacattagccagcccggtagtaaaagcccgataagccagttagattgtctcaatcgagacaattacatccggagctgtaagctcttgcctgacggcagaactctcatagttgggggagaagcctcaacactaacaatctgggacctggcctcacctacaccccgaattaaggccgagctcacttcctccgcaccagcctgttacgcgctcgccatctcaccagacgccaaggtctgcttcagttgttgttcggacggcaacatagccgtctgggatctccataatcaaaccctggtgcggcagttccaaggtcataccgacggcgcttcttgcatagacatcagccacgatggaacaaagctgtggacaggtgggcttgataacactgtgcgatcctgggacctccgtgaagggcgacagctgcaacagcacgacttcaccagccaaatattctccctcggttactgtcccacaggggagtggctggcggttggcatggagtcctctaatgtggaagtgttgcaccacaccaagccagacaagtatcagctccatctgcatgaatcatgtgtcctgtcactgaagttcgcctattgcggcaagtggttcgtgtccacgggtaaagacaatctgctcaatgcttggcggaccccttatggagcatctatttttcagagcaaggagtcctcctctgttctgtcttgtgatatcagcgccgacgataaatacatcgtgaccggatccggggataaaaaggcgactgtatatgaagtgatttattag

SEQ ID NO: 244477 - DNA, 2325 bp, synthetic construct
  misc_feature 1..2325: note = Description of Artificial Sequence: Synthetic coding sequence
  source 1..2325: mol_type = other DNA
atgccgccaccgccaccactctcctgcttgagagggctgcaagcccctcaccagccagggcagcctgggttcaaatttacagtagccgagtcttgcgatcgcatcaaggatgaatttcagtttctgcaggcacagtaccattccctaaaggtggagtacgacaaactcgcgaatgagaagacagaaatgcagagacattacgtgatgtattatgagatgagctatgggctgaatatagagatgcataagcagacagagatcgcaaaaaggcttaatacaatcctcgcccagataatgccattcctgtcacaagaacatcaacagcaggtggctcaggccgtggaacgggcaaaacaagttaccatgaccgaactgaacgcgataatcggccagcagctacaggcccagcatttatctcatgcaacccatgggccacccgtgcagctacctccacacccttccggactccagcctccgggaattccgcctgtgactgggagctcgagcgggctgcttgccttgggagctttaggttctcaagcccacctcactgtgaaagacgaaaagaatcaccacgagcttgatcacagggagagggagagctctgcaaacaactcagtaagtcccagtgagtctctgcgcgcttctgagaaacaccgcggtagtgcagattactcaatggaggctaagaagagaaaggctgaggagaaagactcactctctcgctacgactccgacggagacaaatcagacgacctggttgtagacgtatcaaacgaggacccagccacgccaagagtttcaccagcccattcccctcccgagaacgggctggataaggctcggagcctgaagaaggatgcccctaccagccccgcaagcgttgcaagttccagcagcaccccgagttcaaagactaaagacctcggacataacgataaatccagcacccccggtctcaagagcaacacaccaaccccaaggaatgacgcccctacccccggaacttccaccacaccgggattgcgcagtatgccaggaaagcccccaggcatggatcctatagcctctgcgctccgcactccgattagtatcaccagctcttacgctgccccattcgccatgatgagccatcatgagatgaatggcagcttgacgtcgcccggagcttacgctggattgcacaatatcccacctcagatgtctgcggcagccgcagctgccgctgcggcttacggcaggtcgcctatggtttcgttcggagcagttggatttgacccacacccacccatgagagcaaccggactaccatcatcactagcctctatccctggaggtaagccagcttacagtttccacgtatctgcggatgggcagatgcagccggttcctttcccccatgacgcattggctggaccagggatccctcgccacgccaggcaaatcaataccctgagtcatggggaagtggtatgtgccgttaccatctctaaccctactcgacacgtctacaccggtgggaaggggtgcgtgaaaatttgggacatctctcaacctgggagtaaatcgcccatatcccagctcgactgcttgaatcgggacaactatattcgctcttgcaagctgttgcctgatgggaggactctcattgttggcggagaggcgagtacattgacaatatgggatcttgcaagtccgactccccgaatcaaggcggaacttacatcctccgcacctgcttgctatgctctcgccatcagcccagacgccaaagtttgtttcagttgttgtagtgacggcaacatagctgtttgggacctccacaaccagacccttgttaggcagttccagggccacactgacggagccagctgcatcgacattagtcacgacggcactaagctttggacgggcggtctcgataataccgtgcgatcatgggatctgcgggaaggaaggcagctgcagcaacacgactttaccagccagatcttctcactagggtattgcccaactggcgaatggctcgccgtgggaatggaatctagcaatgtcgaggttctacaccacacgaaacctgacaaataccagttgcatctgcatgagtcatgcgtgctgtctctgaagtttgcatactgcggcaaatggtttgtcagcacaggtaaggacaatctgctgaatgcttggcggacaccatacggggctagcatcttccagtcaaaagaatctagctcggtgctaagctgtgacatttccgccgatgacaagtacatcgttacaggttctggggacaagaaagctactgtctatgaagtgatctactag

SEQ ID NO: 244478 - DNA, 1719 bp, synthetic construct
  misc_feature 1..1719: note = Description of Artificial Sequence: Synthetic coding sequence
  source 1..1719: mol_type = other DNA
atgacatctagggaccagcccaggccgaaagggcctccgaagtctacctcgccctgtccaggcatcagcaattcagagtctagcccaacgctgaactatcaaggcattttaaaccgcctgaagcagtttccacgcttcagccctcacttcgccgcagaactggagtccatctattactcccttcacaaaatccagcaggatgtagccgagcatcataaacagattggaaatgtgcttcagattgtcgaaagttgtagccaactgcaaggctttcagtcagaggaagtctctcctgcagaacctgcctctcccggaacaccccagcaggtgaaagataagactttacaagagtcaagtttcgaggacattatggccaccagatcaagtgactggctgcgtcgcccactgggggaggataaccagcctgaaacacaactgttctgggataaggagccctggttctggcacgacactttgaccgaacaactgtggagaattttcgcgggagtgcacgacgagaaagcaaagccccgagatcgtcagcaagcgcctggactggggcaggagtccaaagcaccaggctcttgtgatcccggaacggatccatgccccgaggatgcttccactcctaggccacctgaagcatctagcagcccacccgaagggtcacaggataggaacacgagctggggcgtcgtgcaggagccccctggaagggcctctagattcttacagtcaatctcatgggatccagaggattttgaggacgcttggaaacggcctgatgctctgcccggacagtccaagaggctagctgttccctgtaaactagagaaaatgaggatcctggcccacggggagctggtcctggccacagccatttcaagctttacaagacatgtgtttacctgtggaagaaggggaattaaggtgtggtcccttaccggacaggttgcagaagacagattccccgaatcccacctgcccattcaaacacctggggctttcctgagaacttgcttgctatcaagcaatagtcggtccctactgacaggaggatacaatctcgcaagcgtgagtgtctgggaccttgccgctccctccctacacgtaaaggagcagcttccgtgtgcaggactcaactgtcaagctctggatgccaatttggacgcaaatcttgcctttgccagtttcaccagcggcgttgtgagaatatgggacctgagggatcaatcagtcgtccgcgatcttaagggctatccggacggagtgaagtctatcgtggtgaagggctacaatatctggactgggggtcccgacgcctgccttcgctgttgggaccagcggactatcatgaagccgctcgaatatcaatttaagtcccagataatgtctctatcacacagcccccaggaagactgggttctgctgggtatggccaatgggcagcagtggctgcaatcgaccagtggaagtcagaggcacatggtgggccagaaggattctgttatcctgtccgtcaagttttctcctttcgggcaatggtgggcctctgtgggtatggatgacttccttggtgtctattctatgccagccggaactaaagtctttgaagtgccagagatgagcccggtgacctgctgcgatgtgtcatcaaataaccgactggtcgtgaccggctcaggcgaacacgcatctgtgtaccagattacgtattag

SEQ ID NO: 244479 - DNA, 1251 bp, synthetic construct
  misc_feature 1..1251: note = Description of Artificial Sequence: Synthetic coding sequence
  source 1..1251: mol_type = other DNA
atggcaacaaggagttcagattggcttcgcagacccctcggcgaggataaccagcccgaaactcagctgttctgggacaaagagccgtggttttggcatgataccctcaccgaacagctttggaggatcttcgccggtgtgcatgatgaaaaggctaagcccagggacagacagcaggcaccgggacttggtcaggaaagtaaggctcctgggtcttgcgaccccggaacagacccatgtcccgaggatgcctcaacacccagaccaccagaggcttcatcatccccacccgaggggagccaggaccggaatactagctggggcgtggtacaagaacctccaggtcgggcatcccggttcctccagtcaatctcttgggacccagaagatttcgaagacgcatggaagaggccagatgctctccctggacagagtaaaaggctggccgtcccctgtaaactggaaaagatgcgaattctggcacatggggagctggtactcgccactgctatcagctcattcaccaggcacgtcttcacttgcgggagaaggggtattaaagtgtggtccctgacaggacaggtggccgaggaccgctttccagagagccatctccccatccagacccccggagccttcctgcgcacttgcttgctgagttctaattccagatctctccttactgggggttacaatttggcctccgtgtcagtttgggacctagcagcgccaagcttgcacgtgaaggagcaattgccgtgtgcaggcctgaactgccaggccctggatgctaatctggacgccaatctggctttcgcatcattcacttctggcgtcgtgcgcatatgggatttacgggaccagagtgtggtccgcgatctgaaaggatacccagacggagtcaaatccattgtggtaaaaggctacaacatatggaccggcggtccagacgcctgcctgcgctgttgggaccagaggaccatcatgaagcccctggagtatcagttcaagtcacagatcatgtctctgagccattccccacaagaggattgggtcctgcttggcatggccaatggacagcagtggctacagagtacctctggctctcaacgccacatggttggccagcgtcaacgtcaccctgagagacaggtcttacccctctggcccgtggttggcaagcggtggaacgggcgtctgccatggcgcttgcaacatgcaggcggagataagtcagtgaggggagcatag

SEQ ID NO: 244480 - DNA, 1719 bp, synthetic construct
  misc_feature 1..1719: note = Description of Artificial Sequence: Synthetic coding sequence
  source 1..1719: mol_type = other DNA
atgacttcaagagaccagcctcgtccgaaaggccctcccaagtccacttccccttgcccagggatctcaaactctgaaagcagccccactctgaactatcagggtatactgaatcgtctgaagcagtttcccagattcagcccacatttcgcagctgaactggagagcatatactatagcttacacaagatccagcaagatgttgccgagcaccacaagcagatcggcaacgtcctgcagatcgtggaatcatgttctcagctgcagggcttccagagtgaagaggtaagtcccgcagaacccgcttcacccggtacacctcagcaggtgaaagacaaaacccttcaggagagtagtttcgaggacatcatggcaactcgcagtagtgactggcttcggaggcctctgggcgaggacaaccagcctgaaactcagttgttttgggataaggagccctggttttggcatgatacgcttacagagcaactctggcggatcttcgcaggtgtgcacgatgaaaaggccaagccaagagacaggcatttttcgatcttccagggtcaggaaagcaaagcgccaggttcttgcgaccccggtactgatccatgcccggaggatgcctctactcccagacctccagaagccagctcatcacctcccgaaggtagccaggacaggaacacctcatggggagtggtgcaggagccgccaggcagagcatcccggttcctgcagagcatttcctgggatcccgaagattttgaagacgcttggaaaagacctgacgcgctgccaggtcaatctaagaggttggcagttccttgcaagctggagaaaatgcgcatcttggcccacggagaactggtgttagctacagctatttcttcattcacccgccacgtcttcacgtgtgggcgacgaggcattaaggtgtggtcgcttaccggtcaggtggcggaggataggttcccggagtcgcacttgccaatacagacccccggagccttcttgcggacttgtctcctttctagcaactccaggtcccttttgacgggagggtacaatctggctagcgtttctgtgtgggacctcgctgctccatcactacatgttaaagaacagctcccgtgtgcaggcttaaactgccaagccctcgacgccaatctggacgccaacctggccttcgcctcgttcacatctggagtcgttaggatttgggatctgcgcgatcagagcgtcgttcgagacctcaaggggtatcccgacggagttaagtctatcgtggtgaaggggtataatatctggaccgggggtccagatgcttgccttcgctgttgggaccagcgcacaattatgaagcctctggaatatcagtttaagagccaaatcatgtctctgtcccactctcctcaggaagactgggtgctgttgggaatggcaaatggacagcagtggctacagagcaccagcgggagtcagaggcacatggtgggccaaaaggatagcgtgatcctcagcgtgaaattctctccatttggccaatggtgggcgtcagtaggcatggacgattttctgggcgtttatagcatgcctgccggaactaaggtgttcgaagtgccggaaatgagccccgtgacctgttgcgatgtgtcctccaacaataggctggtcgtgacggggtccggcgagcacgctagtgtctaccagatcacatattag

SEQ ID NO: 244481 - DNA, 1350 bp, synthetic construct
  misc_feature 1..1350: note = Description of Artificial Sequence: Synthetic coding sequence
  source 1..1350: mol_type = other DNA
atggccactaggtcatcagattggctgaggagaccgctcggagaggataatcagccagaaacacagttgttttgggacaaagagccctggttttggcacgatactctgacagagcagctttggcgcatctttgcaggagtgcacgacgaaaaagccaaaccacgagacaggcaacaagccccaggactcggccaagagagcaaggcgcctggatcttgtgacccgggaaccgatccttgtcctgaagatgcctcgacccctaggcctcccgaggccagctccagtccacctgaggggagtcaagacagaaatacctcgtggggagtggtgcaggagccacctggacgcgcatctagattccttcagagcatttcctgggaccctgaggacttcgaggacgcttggaaaaggccggacgcactgcccggtcagagcaagagactggcagtgccatgtaaattagagaagatgcgcattctggcccatggggaattagtcttggctaccgctattagctcgtttactcggcatgtattcacctgcgggaggcggggtataaaagtgtggtcactcaccggacaggtggccgaggaccgctttccagagtcgcacctacctattcagacacccggtgcattcctcaggacctgtttgcttagctccaattctcgcagtctgctgactgggggttacaacctcgcatcagttagcgtctgggacctggccgcacctagccttcacgtgaaagagcagcttccatgcgctggcttgaactgccaagcactcgacgccaacttggatgcaaacctagccttcgcatctttcacaagcggggtcgtacggatttgggatttgcgcgaccagagtgtcgtacgcgacctgaagggctaccccgacggggtcaagtccatcgttgtgaaaggctataatatttggacgggaggaccagacgcatgtcttcggtgttgggaccagcggactatcatgaaacccctagaataccagttcaaaagtcaaatcatgtcactcagtcactcaccccaagaggactgggtgttgctgggcatggccaacggccagcagtggcttcagtctacttctggatctcagagacatatggtgggacaaaaggactcagtgatcctatctgtcaagttctccccgtttggacagtggtgggcctcagtaggaatggatgactttttgggggtttacagcatgcctgcaggaaccaaagtttttgaggtacctgaaatgtccccagtcacttgttgcgacgtaagttctaataaccgccttgtcgttaccggcagcggggagcatgcatccgtctaccagataacctactag

SEQ ID NO: 244482 - DNA, 1716 bp, synthetic construct
  misc_feature 1..1716: note = Description of Artificial Sequence: Synthetic coding sequence
  source 1..1716: mol_type = other DNA
atgaaccaattgagaggcaagaaaagttgtcacactggtttggggagatctgcaggctggaatattccaatcggcctcctgtactgtgacctgccagagccacgaaaaccgctggaaaaggctgtggctaacttcttctctggttcttgtgcaccatgcgccgacggaactgattttcctcaactctgtcagttgtgccctgggtgtggctgctccacactcaaccagtatttcgggtactctggcgcattcaaatgccttaaagacggggcaggcgatgtggcatttgtcaaacactccaccatctttgagaaccttgctaataaggccgatagggatcagtatgaactcttgtgtctggataatactcgaaaacctgttgatgagtacaaagattgtcacttggcccaagtgccatcgcacacagttgtagccaggtctatgggaggtaaagaggatcttatctgggagctgttgaatcaggctcaagagcatttcggcaaagataagtccaaagaattccagttgttctcgtcccctcatggaaaggacctcctcttcaaggatagcgctcatgggtttctaaaagtcccacccaggatggatgcaaaaatgtacttgggttacgagtatgtgacagcgattagaaacctgagagagggaacctgtccagaggctccgactgatgaatgcaagcccgttaaatggtgtgcattatcccatcacgagaggttgaagtgcgatgagtggtctgttaattctgtcggtaaaatagaatgtgtcagcgcggaaaccactgaggactgcattgcaaagatcatgaacggggaggcagacgcaatgagtttggacggcggtttcgtctacattgccggtaagtgcggactggtgccagtcctggcagaaaattataataaatccgataactgcgaagacacccccgaggctgggtatttcgcaatcgccgtcgttaaaaagtccgcttcagaccttacatgggataatctgaagggcaaaaagagctgtcatacagcagtcggacgcactgccggttggaatatccctatggggctgctgtacaacaagattaaccactgcagatttgacgaattttttagcgaaggatgcgccccaggatccaagaaagactcttcactgtgtaaactgtgtatggggtctggactgaatttatgcgagcccaacaacaaagagggttattacgggtataccggcgctttcaggtgcctggtggagaagggggacgtggctttcgtcaagcaccagacggtcccccagaatacagggggaaagaaccccgatccttgggcaaaaaacttgaacgagaaggactatgaactgctgtgcctcgacggcaccaggaagcccgtggaggagtatgccaattgccatttggctagagcccctaatcatgcagtcgtcacaaggaaggacaaggaggcatgtgtacacaaaattctcagacagcagcagcacctatttgggtccaacgtcaccgactgttctggaaatttctgtctgtttagaagcgagactaaggatctgttatttagagatgacacagtctgtctggcaaagttgcacgacaggaacacatacgaaaaatatttaggggaagagtacgtcaaggctgtcggtaacctgcgcaagtgcagcaccagctctctgctggaggcatgtacatttcgtcgcccttag

SEQ ID NO: 244483 - DNA, 2097 bp, synthetic construct
  misc_feature 1..2097: note = Description of Artificial Sequence: Synthetic coding sequence
  source 1..2097: mol_type = other DNA
atgcggctcgccgtcggggctctcctggtgtgcgctgttcttggcttgtgtcttgccgtgccggacaagaccgtacgatggtgcgccgtatcggaacacgaagcaacgaagtgccaatcttttagagatcacatgaaaagtgtcatcccatccgacggaccttcagtggcctgcgtgaagaaggccagttatctcgactgtattagagccattgcggctaacgaagcagatgcagtgacactggatgccggtctcgtatacgacgcgtatctggcacccaacaatctcaagcctgtggtcgcagagttttatgggtctaaggaggaccctcagacattttactatgccgttgcagtggtgaaaaaagatagcggattccagatgaaccaacttagggggaagaaatcctgccataccggtctgggtaggagcgccggatggaatatacctattggcctcctctactgtgacttgcctgaaccacgtaagcctcttgagaaggccgtcgccaatttctttagcggcagctgcgctccttgtgcagatgggaccgactttccccagctgtgccaattatgtcctggatgcgggtgcagcacccttaaccaatattttggatattcaggggcatttaagtgcctgaaagacggggcaggcgatgtggcattcgtaaagcatagcaccattttcgaaaacttagccaacaaagcagatagagaccagtacgaactgctgtgcctggataacacaaggaaacctgtcgatgaatacaaagattgtcatctcgcgcaagtacccagtcacactgttgtggccagatccatgggaggaaaggaagacctcatctgggaactgttgaaccaggcccaggaacactttggcaaggacaagtcaaaggagtttcagttgttcagcagcccgcacggtaaggacctcctgtttaaagatagtgctcacggctttctcaaagtgccgccaagaatggatgcgaagatgtatctcggctacgaatacgtaactgcgatcaggaacttaagagagggcacctgccctgaggctcccaccgacgaatgcaagccagtgaaatggtgcgcactgagccaccatgagcgtctcaagtgtgacgaatggagcgtcaattcagtgggcaagatagaatgcgtgtctgccgaaaccactgaggactgcatcgctaaaattatgaacggggaggcagacgccatgtccctggacggaggttttgtttatattgcaggcaagtgcggccttgtgcctgtgttagcagaaaattacaacaaatccgacaattgcgaggacacacctgaagcagggtacttcgccattgccgtggtcaagaagagcgcctctgacctgacctgggacaatttgaaaggaaagaagtcctgccacacagccgtaggccgtactgcaggctggaacattccgatgggactgctgtacaacaagattaaccattgtcggtttgatgaatttttcagcgaaggatgtgcgccaggatccaaaaaggattcctcactgtgcaaactgtgcatgggcagcggactcaacctgtgcgaacctaacaacaaggaggggtactacggctatacgggcgctttccggtgtctggtggaaaaaggcgacgtggctttcgttaagcaccaaaccgtccctcaaaatactggcggaaaaaaccctgacccttgggcgaagaacttgaacgagaaagactatgagctactttgcctcgacgggacccgcaaacccgtggaggagtacgccaattgccacctcgccagagctcccaatcatgcagtagtgacaaggaaagacaaggaagcctgtgtgcacaaaatccttcgccagcagcaacatctgttcggttccaacgtcacagactgctcaggcaatttttgtttgttcagatctgagactaaagacctcctcttcagagatgatactgtgtgcctggctaagctccatgatcggaacacctatgaaaaatatttgggagaggagtatgtgaaggccgtcggaaacctccgaaaatgttctacctcgagtcttctggaggcctgtacctttcgcagaccttag

SEQ ID NO: 244484 - DNA, 2283 bp, synthetic construct
  misc_feature 1..2283: note = Description of Artificial Sequence: Synthetic coding sequence
  source 1..2283: mol_type = other DNA
atgatggaccaggccagatcggccttctcgaacctgtttgggggagagcctctaagttacaccagattctcattagctcgccaggttgatggtgacaattcacacgtcgagatgaaactagccgtcgatgaggaagagaatgctgacaacaacacaaaggctaatgtgacaaagccaaagagatgttctgggagcatctgctacggcacaatagcagtgatcgtatttttcctcattggcttcatgattggctatctgggctattgtaagggggtggaaccgaagactgaatgtgaacgactggccggaactgagagccctgttcgcgaggaacccggagaggattttccggctgctaggagattgtattgggatgatctcaagagaaaactaagtgaaaagctagattctacagacttcacaggaaccataaagcttctgaatgaaaatagttacgtgccccgagaagcgggttctcagaaagacgagaatctggctctgtacgttgagaatcagttccgtgagtttaaactttctaaagtctggcgcgatcagcattttgtcaagattcaagtgaaggacagcgcccagaattctgtaatcatcgtcgacaagaacggcaggctggtgtatttagtggaaaatccaggcggatacgtggcctatagtaaagcagccacagtgactggcaaactcgtgcacgcaaactttgggactaaaaaagactttgaggacctttatactcccgtgaacgggtccattgtaattgttcgcgcaggcaagattacctttgcagaaaaggtcgcaaatgcggagtcacttaacgcaatcggcgtcctgatctacatggatcagacgaagttccctatagtaaacgccgaactcagcttttttggacacgcccatctggggaccggagacccctatactcctggttttccctcttttaaccatacgcaattccctccttctcggtcatctggcctgccaaacatccccgtgcaaacaatctcccgtgccgcagctgagaagctgttcggaaacatggagggcgactgtccgtcggattggaagaccgactccacgtgtcgaatggtgacctctgaaagcaagaacgtcaaactaacagtctccaatgtgctgaaggagattaaaattttgaacatatttggggtgataaaagggttcgtcgagcctgatcattacgtggtggtcggtgctcagcgcgatgcatgggggccaggagccgctaaaagcggagttggcactgctctcctgctgaaactcgctcagatgtttagtgacatggtgttgaaagacggattccagccaagcaggagcattatcttcgcctcatggagtgcaggggatttcggatcggtaggagccactgaatggttggagggttaccttagctcactgcacctcaaggcctttacttatatcaatctggacaaagctgtgcttgggacgtctaacttcaaggtgtccgcctccccattattgtatacgctgatagaaaaaaccatgcagaatgtgaagcaccctgtgacgggacaattcctttaccaggatagtaattgggcttctaaagtcgaaaagctgaccctggacaatgcagcattcccgttcctggcctatagcggaatccctgctgtcagtttttgtttctgtgaggacaccgattacccttatctcggcaccacaatggatacctacaaggagctgattgagcggatccccgagttgaataaagtggctcgggcagctgcagaggttgccggtcagttcgtgattaaactgactcacgatgtggaattgaacttagattatgagcggtacaacagccagcttctctcatttgtccgggatttgaaccagtatagggcagacattaaagagatgggcctttcactgcagtggctgtactccgcgaggggagactttttcagagcaaccagcaggctcaccactgattttggcaatgctgaaaagaccgatcggttcgtcatgaaaaaactaaatgatcgtgtaatgcgggtggaatatcactttttgagcccctacgtatcgcccaaagagagcccattcaggcacgtattctggggatctggtagccataccctaccagccctgctcgagaatttaaaattgcggaaacagaataacggagcgttcaacgagactctgttccggaaccagttggcactagcgacttggactatacagggcgctgctaacgccctgtcaggcgatgtgtgggatatcgacaatgagttctag

SEQ ID NO: 244485 - DNA, 2283 bp, synthetic construct
  misc_feature 1..2283: note = Description of Artificial Sequence: Synthetic coding sequence
  source 1..2283: mol_type = other DNA
atgatggatcaagcccgaagcgctttctcaaacctgttcggaggtgagccgctcagctatacgaggttttcccttgcccgtcaggtggacggcgataattcacatgtcgagatgaaactcgcggtagatgaggaggagaatgcagataataataccaaggccaatgttactaagcccaagcgctgttccggctcgatctgttacgggactattgctgttattgtgttttttcttatcggatttatgatcggctacctgggatactgtaagggcgtggagccgaaaacagaatgcgaaagactcgctggcacggagtcgcccgttcgggaagaaccaggcgaggatttccccgcagcaaggaggttgtactgggatgatctgaaacgcaagctgtctgagaagctggactctactgacttcaccggcactattaagctgttgaatgagaacagttacgtgccgcgtgaagcaggatcccaaaaagacgaaaatctggctctttacgtagagaaccagtttagagaattcaaactatctaaagtctggcgggaccagcacttcgtgaaaattcaggtaaaagattccgctcagaacagcgttatcattgtggacaagaatggacgccttgtctatctggtggagaatcccggaggttacgtggcatacagtaaggcagccactgtcaccggcaagctggtccacgctaactttgggacaaaaaaagatttcgaggatctgtacacacccgttaacggctcaatcgtgatcgtgcgagcaggtaagataaccttcgcggaaaaggtggctaacgcagaaagcctgaatgctatcggggtcttaatttatatggaccagaccaagttccctatagtgaatgctgagctttcattctttggacacgcacatcttggaacaggggatccatacactcctggcttcccaagctttaatcatacccagttcccgccatctaggagttccggccttcccaatatccccgttcaaactattagtcgcgcagcagccgagaagctgtttggcaatatggaaggtgattgtccctctgattggaagacagattctacatgcagaatggttacatccgaatctaagaacgtcaagctcaccgtgagtaacgtgctgaaggagattaaaattctgaacatatttggggtcatcaagggattcgtggaaccagaccactatgtggtagttggggcacaacgagatgcttggggccctggagctgccaagtcaggagtaggcacagccttgctcctgaaacttgctcagatgttctcagacatggtcctgaaggatggctttcagcctagtcgatccatcatcttcgcgagctggtcagccggagacttcggctccgtcggcgcaacagaatggcttgaaggctacctctcttccctgcacctaaaagcattcacctacataaacctggataaggcggtgctgggcaccagcaattttaaggtgtccgccagccctttactgtacacccttatagagaaaaccatgcaaaacgttaagcatcctgtgacaggacagttcctgtatcaggattccaactgggcctctaaagtcgaaaagctaaccctcgataatgccgcattcccttttttagcgtacagtgggattcccgctgtgagtttttgcttttgcgaggacaccgactacccctatttgggcactaccatggatacatacaaggagctcatagagagaatacccgaattaaacaaggtagcccgagccgcagctgaggtggccggacaatttgtgataaagcttacacatgatgtggagctcaatttagactatgaacggtataactcacagttgctttccttcgtccgagatctgaatcaatatagggctgacattaaggagatggggctttcccttcagtggttgtacagtgccaggggcgactttttcagggccacctctcggttaactacagactttgggaatgcagagaagacagataggttcgtgatgaaaaagctgaacgaccgggtgatgcgagttgagtaccactttctctcgccctatgtgtctccaaaagagtccccttttcgccatgtcttttggggaagtggctctcatacattaccagctctactggagaatttgaaactccggaaacagaataacggtgcctttaatgagaccctgtttcggaatcagctggccctggcgacttggacaatacagggagccgctaatgccttatctggggacgtttgggacattgataacgaattctag

SEQ ID NO: 244486 - DNA, 1437 bp, synthetic construct
  misc_feature 1..1437: note = Description of Artificial Sequence: Synthetic coding sequence
  source 1..1437: mol_type = other DNA
atggaccaaaccaagtttccaatcgtaaacgctgaactcagtttcttcggccacgctcacctcggcaccggggacccttacacgcctggcttcccttcttttaatcacacccagttccctccttctaggagctcaggacttcccaacattccagtgcaaacaatatccagggcagctgcggagaagcttttcggaaatatggagggcgattgcccatccgattggaaaacggactcaacttgccgaatggtgactagtgagtccaagaatgtcaaactcaccgtgagcaacgtgctaaaagagatcaaaatcttgaacattttcggcgtgatcaagggcttcgtagagccagatcattacgttgtcgtcggggctcaacgggatgcatggggacccggagctgccaagagtggcgtcggaacagctctgctgctgaaattggcacagatgtttagcgatatggtgctcaaggacggtttccagccctcgcgttccatcatttttgcatcttggagtgccggtgacttcggttccgtgggggctaccgagtggctggaaggctatctatcttccctccacctgaaagcctttacctacatcaacctcgacaaggcagtgcttggcacttcaaacttcaaggtcagcgcgagtcccttactttatacattgatcgagaaaaccatgcagaacgtgaagcatcccgtgaccggccagttcctttaccaggactctaactgggcgagcaaagtcgagaaactgacgctggataacgctgcatttcctttcctcgcttacagcggaattcccgcagttagtttttgtttttgcgaggacacagactacccttaccttggaactactatggacacatacaaggagcttattgaacggatacccgaactcaacaaggtggcaagggctgctgccgaagtagcaggccaattcgtcatcaaattaacccacgacgttgagctgaacctggactacgagagatacaacagtcagttactcagcttcgtgagagatctgaatcagtaccgggctgacattaaggagatgggcctgagtttacaatggctgtattcagcgaggggcgatttcttcagggccacaagcaggcttactaccgacttcggcaatgccgaaaaaacagacagattcgtaatgaagaaactcaacgatagggtgatgagggttgagtatcattttctgagcccctacgtgtctcctaaggagagcccatttcgacacgtcttctggggctcaggttcccacacactgccagccctgcttgagaaccttaagttgcggaagcagaacaacggcgcattcaacgaaactctcttcaggaatcagctggcattagcaacctggactatacagggagccgcaaatgccctctccggagatgtgtgggatatcgacaatgaattttag

SEQ ID NO: 244487 - DNA, 42 bp, synthetic construct
  misc_feature 1..42: note = Description of Artificial Sequence: Synthetic coding sequence
  source 1..42: mol_type = other DNA
atggatcaggccaggagcgccttttcaaacctggatctgtag

SEQ ID NO: 244488 - DNA, 11493 bp, synthetic construct
  misc_feature 1..11493: note = Description of Artificial Sequence: Synthetic coding sequence
  source 1..11493: mol_type = other DNA
atggcttttgtcgccacacagggcgctacagtggttgatcagacaacgttgatgaagaagtacttacagtttgtggccgcactgaccgatgtgaatacgcccgacgaaactaaattaaagatgatgcaggaggttagcgaaaactttgaaaacgtcacctccagcccacagtactccactttcctggagcatataataccccgatttttgacgtttttacaggatggcgaagtccagttcctgcaagaaaaacctgcccagcagttgaggaagctcgtgctggaaatcatccatcgtatcccgactaatgagcaccttcgaccacacactaagaacgtactgtccgtgatgttcagatttttggagacagagaatgaggagaacgtgttaatatgtttaagaattatcattgagctccacaaacagtttaggccacccataacacaggaaattcatcatttcctggacttcgtgaaacagatctataaggagttacccaaggtcgtgaacaggtacttcgaaaacccacaggtaattcctgagaatactgtaccacctcccgaaatggtcggaatgatcacaacaattgctgtaaaagtcaaccctgagagggaagactcggaaacgagaacacactctatcattcccagagggagcctgtccttgaaggtgcttgccgaactgccgattatagtcgtcctgatgtaccagctatataagttgaacatccataacgttgtggccgaatttgtgcctctgataatgaacacaatagcaattcaagtaagcgcccaagcaaggcaacacaaactgtacaataaagagttgtatgcggacttcattgcagcacagattaaaacgctaagtttcctggcatatattataaggatctatcaggagttggttacaaaatactcacaacagatggtgaaggggatgctgcagctactcagtaattgtcccgcagaaactgctcacctcagaaaagaacttctcatcgccgcaaaacatattctgacaacagagctgagaaaccagtttataccttgtatggacaaactgtttgatgagtcaatactgattggcagtgggtatacggccagggagacacttagaccactggcatacagcacactcgcggatctggtccatcatgtgagacagcacctccccctgtcagacctgtctctcgctgtgcagctcttcgccaagaatattgacgacgaaagcctgccttccagcatccagactatgtcctgtaaattattgctgaacttggtagattgcattaggagtaagtcggagcaagagtcaggaaacggtcgggacgtattaatgcggatgctggaggtgtttgtcttaaaattccacaccatcgcccgataccagctgagcgcaattttcaagaagtgcaaaccacagtccgagctgggcgcagttgaagccgcactaccaggggtccctactgcgcctgccgctcctggccctgctccatcccctgctccagtgcccgctccacctcctccccctccaccccctcctcccgcaacccctgttacccctgcccctgtcccgccttttgagaagcagggggagaaggacaaggaagacaagcaaaccttccaggttaccgactgccgcagtctcgtgaagacactcgtctgtggggtaaaaaccattacctggggaattactagctgcaaggccccaggcgaagctcagtttatacctaacaagcaacttcagcccaaagagactcaaatctatattaaacttgtgaagtatgcgatgcaggctctcgacatctaccaggtgcagattgcaggcaacggacaaacttacattcgtgtggctaactgccagactgtgaggatgaaagaagaaaaggaagtgttagagcactttgctggtgtttttacaatgatgaacccattgacttttaaggagatcttccagaccactgtcccctacatggtggaacggattagcaagaattacgccttgcagatcgtggcaaattctttcctcgcgaacccaaccacatcagccctcttcgccactatcctggtcgaatatcttttagaccggctgccagagatgggaagcaacgtagagctgtcgaatctatacttaaaactcttcaagctggtcttcggatccgtgagtctctttgccgcagagaacgaacaaatgctcaagccgcacttgcataagatcgttaattccagcatggaactggctcagaccgcaaaggaaccgtacaactacttcctgctgctccgggctttattcaggtccatcggcggtgggtcccatgatcttctgtaccaggagttcttgccattgctacctaatctgctgcagggcctcaatatgctgcagtccgggctgcacaagcagcatatgaaagacctgttcgtcgagctttgtctgacagtccctgtacgtctaagcagtctgttaccctatttgcctatgttaatggaccccctggtgtctgctctgaacggatcacagacacttgttagccaggggctgcgtacactggagttgtgcgtggacaatttgcagcccgactttctctacgaccatatccagccagtgagagcagagctgatgcaggccttatggagaacccttaggaacccagcggactcaatcagccatgtggcatatcgggtattgggcaagttcggagggagcaaccgcaagatgctcaaggagagccagaaactacattacgttgtgacagaagtgcaggggccatccattaccgttgaattcagtgattgtaaggcatccctccaactgcctatggagaaagctatagaaactgccttggattgcctaaagagtgccaatactgagccatactatcgccgacaggcctgggaggtgatcaaatgtttcttggttgcgatgatgtccttggaagacaataaacacgctctgtaccaactcttagcccacccaaatttcacagagaagactattccaaatgtcataattagccacagatacaaggcccaggacactcccgcaaggaagaccttcgaacaggccctgaccggagcctttatgagcgcagtgattaaggatttaaggccttccgcactgccatttgtcgcctccctaattcgtcactacactatggttgccgtcgcccaacagtgcggcccattcttgctgccttgctaccaggtcggatcgcagcctagcacagctatgttccacagcgaggagaatggttcaaagggaatggatccattagttcttattgacgcaattgctatttgtatggcctacgaggaaaaagaattgtgcaagattggggaggtcgcactggccgtgatatttgatgtggcgagcatcatcctaggcagtaaagaaagagcctgccagctgccgctcttctcttacatcgtcgaaagattgtgtgcatgctgttacgaacaagcctggtacgccaaactgggcggagttgtttctatcaaatttttaatggagcggctccctctaacatgggtgttacagaaccagcaaacgtttctcaaggcactcctgttcgtgatgatggatttgaccggagaagtgagcaatggggctgtagcgatggccaaaaccacgcttgagcagctcctgatgaggtgcgctacacccctgaaagatgaggaacgcgcagaggaaattgttgctgcccaggagaagtcattccaccatgtaacacatgatcttgtgcgggaggtcaccagtccaaattcaactgttcggaagcaggccatgcattcactccaggtgctcgcacaagtgactggcaaatccgtaaccgtgatcatggaaccccataaggaagtgctacaggatatggtgcctccgaagaagcacctcttgaggcaccagcctgctaacgcgcagatcggacttatggaaggtaacactttttgtaccacattgcagccaaggctgttcaccatggacctgaatgtggtggagcataaagtgttctatactgagttgctcaacctatgcgaagccgaagattccgccctgacaaagctgccctgttacaaatctctccctagcctcgtgccattgagaatcgctgccctgaatgctttggctgcctgcaattatttgcctcagagtcgtgaaaaaattattgcggctctgtttaaagccctgaatagcaccaactccgaactgcaggaggccggagaggcatgcatgaggaagttcctagagggcgctacaatcgaagtagaccagatccatacgcacatgagacccctcctcatgatgttgggggactaccggtcgctaacactcaacgtggtcaataggctcacttcagtgaccaggcttttcccaaatagctttaatgataagttttgtgaccagatgatgcagcacttacgcaagtggatggaggtagtcgttattacccacaaggggggacaacggagcgatggaaatgaaatgaagatctgcagcgccatcatcaacctgttccatttaatacccgctgccccacagaccctggtgaaacctttgctggaggtggttatgaaaaccgagagagccatgctgatagaggcgggttccccgttcagagagcctctgattaagtttttgaccagacatccttcacaaaccgtagaactcttcatgatggaggcgactctaaacgacccgcagtggtccaggatgtttatgagcttcctgaagcataaagatgctcgtccactgagggacgtccttgctgctaatcccaatcggtttataactctattgctccctgggggagcacagaccgcggtgcgtccaggatctccgtctaccagtactatgagactcgatctacagttccaggctatcaaaataataagcattatcgtaaagaatgacgacagttggctagcttcacaacatagtcttgtaagtcagctgcgaagagtgtgggtgagcgaaaacttccaggagaggcatagaaaggagaacatggctgccacgaactggaaggaaccgaagctgctcgcctattgcctgctgaactattgcaagcgcaattacggagatattgagcttttattccagctcttgagggctttcaccgggcgatttctctgtaatatgactttcttgaaagaatacatggaggaagaaatccccaaaaattactcaatcgcacagaaaagagccctttttttccggtttgtagatttcaatgacccaaattttggcgacgaactcaaggctaaagtcctgcaacacattctgaacccagcttttctgtattcctttgaaaaaggcgagggggaacagctgctggggcctcctaaccccgagggtgataatcccgaatcaatcacatccgtgtttatcaccaaggtgctggaccccgaaaaacaggccgacatgctggattccctgcgcatttacctactccagtacgccaccctactcgtggagcacgcaccgcaccacatacacgacaacaataagaatcgtaactctaaactgagaagattgatgacattcgcctggccctgcctgttgtctaaggcctgtgtggatccagcttgtaagtatagtggccatctgctgcttgcccatatcatcgccaagtttgccatccacaagaaaatcgtccttcaagtgtttcattctctgctaaaagcgcacgcgatggaggctagggctatagttaggcaggccatggcaatactgacgccagctgtccctgccagaatggaagacggtcaccaaatgctgacacactggacccgcaaaattatcgttgaggaaggtcatacagtcccacaacttgtccatattttgcatttgatagtgcagcactttaaggtctattaccccgtccgccaccacctagtgcagcacatggtgtccgctatgcagcggctgggctttacaccctccgttacaattgaacagaggcggctggcagtcgacctgagtgaggtggtaatcaaatgggaactgcagcgaatcaaggaccagcaacccgacagtgacatggatccgaactctagcggcgagggtgtcaatagcgttagctccagcattaagcggggactaagtgtggacagcgctcaagaagtcaagcgcttccgcaccgctacaggagctatctccgccgtgttcggacgtagtcagtcactcccaggggctgattctctgcttgctaagccaatcgacaagcagcacacagataccgttgtgaatttcctgatccgtgtggcatgtcaggtgaatgataacactaacactgctggatctcccggagaggtccttagccggcgatgcgttaacctgcttaagaccgcactgaggccagatatgtggccaaagagtgagctgaagctgcaatggtttgacaagctcctgatgacggtggagcaaccaaaccaagtgaattatggcaatatatgtacggggctcgaggtactctcttttttgctgaccgtgttacaaagccctgccattctaagtagttttaagcctctacagcgaggcattgccgcttgcatgacctgtggaaatactaaggtactccgcgcagtgcactccctcctgtcacggttgatgtcgatattcccaaccgaacccagcacctcatctgtggcctccaagtacgaagagcttgagtgtctatatgctgcagtggggaaagtgatttacgaaggccttaccaactatgagaaagccactaatgcaaacccctcacagctattcgggacactgatgatactgaagagtgcctgctcaaacaatccatcttacatcgaccgtttgatctctgtgtttatgcggagcttacagaaaatggtgcgtgaacatctcaaccctcaggctgcctccggatccaccgaagctacttctggcacttctgagctcgttatgctgtctcttgagttagtgaagacccggctcgccgtaatgtccatggagatgaggaaaaattttatccaagctattcttacatcacttatagagaagagcccagacgccaaaatccttcgagccgtagttaaaatcgtggaagagtgggttaagaataattcccccatggccgcaaaccagacccccacactccgagagaaaagtatccttctcgtgaagatgatgacctacatcgagaaacggtttcccgaggatctggagctgaatgcacaatttcttgaccttgtgaattatgtgtatcgggatgagacactctccggcagcgaactgaccgccaaactggagcccgcatttctgtctgggttgaggtgcgcccaaccgcttatccgcgcaaaatttttcgaagtgtttgataactccatgaaaaggcgcgtgtatgagaggttgctgtacgtcacatgcagtcagaactgggaggccatgggaaaccacttctggattaaacaatgtatcgaactgctcttggctgtttgcgagaaatctactcctattggcactagctgccagggagctatgctgccctccatcaccaatgtgatcaacctggccgatagccatgacagagctgcttttgccatggtaactcacgttaaacaggagccccgtgaacgggagaattctgaatctaaggaggaggatgttgaaatcgacatcgagcttgctcccggagatcagacttctacccccaagaccaaagagctctctgagaaggatataggcaatcaattacacatgttgaccaacagacacgacaaatttttggatactttaagagaagttaaaactggcgctttattatcggctttcgtccaactgtgccatatctccaccacactggctgaaaagacatgggttcagctgtttccgagactatggaaaatcctctctgaccgtcagcagcacgctttggcaggtgagatttcacccttcctgtgttctggcagtcaccaggtgcagcgagattgtcagcctagtgccctgaactgcttcgtggaagctatgtcccaatgcgtcccacccattccgatccggccatgcgtgctgaaataccttggaaaaacgcacaatctttggtttcgttcgacactgatgctcgagcaccaggctttcgagaaggggctgtcgttgcagatcaagcccaagcagaccacggagttctatgaacaagagtctataacccctccccagcaggagatattagattccctcgctgagctttatagcctgctgcaggaagaggacatgtgggccggtttgtggcaaaaaaggtgtaagtattccgagactgcaaccgctatcgcatacgaacaacacggtttcttcgagcaggcccaggaatcgtatgagaaagccatggataaagccaagaaggaacatgaacgaagcaatgcgagtcccgctattttccctgaatatcaactgtgggaagatcactggatccggtgtagtaaggagctgaatcagtgggaagcactcacagagtatggacagtctaagggccacatcaatccatatctggtcctggagtgcgcatggagggtctcaaattggaccgccatgaaagaggccctggtgcaggtggaggtgtcctgccctaaggagatggcatggaaagtgaacatgtataggggctatctggccatctgccatcccgaagagcagcagctctcctttatcgagcgactggtcgagatggcaagtagtctcgctatccgtgagtggaggagacttccccacgttgtctcacacgttcatacgccactgctgcaagccgcacaacagataattgagctgcaggaagccgctcagatcaacgctggcctgcagccgacaaacctggggaggaacaactctttacacgatatgaagaccgtggtgaaaacctggcgaaatcgactccctatcgtgtccgatgatttgtctcactggtcaagcatatttatgtggaggcagcaccattaccaggctattgtgaccgcctacgaaaactcgtcacagcacgaccccagtagcaacaatgcgatgctaggcgtgcatgctagcgcctccgcaattatacaatatggaaaaattgcacggaagcaggggttggttaacgtcgctctggatattttatcaagaatccataccatccccaccgtgcccatcgtggattgtttccagaagattcgccaacaggtgaagtgttacctccagctagctggagtgatggggaaaaacgagtgtatgcaaggcctggaggttattgaatccactaacctaaaatactttactaaagaaatgacagccgagttctacgctctcaaagggatgttcctggctcaaattaacaagtccgaagaagcaaataaagcattcagtgccgctgtgcagatgcacgacgtgcttgtgaaagcctgggcaatgtggggagactacctggaaaacatctttgttaaggagcggcagctccacctgggcgtgagcgctattacctgctacttgcatgcatgtcgacaccagaatgagtctaaatcacggaagtacctggccaaggtcctctggttactgtcctttgatgacgacaaaaataccctcgccgatgccgtcgacaagtattgtatcggcgtgccaccaatccagtggttggcctggatccctcagcttcttacttgcttagtgggcagtgaaggcaagctccttctaaatctcatttcacaggtcggcagagtctacccacaggcggtgtacttccctattagaacgctctacctgactctgaagatagagcagagagagaggtataaatctgatccgggaccaatccgtgccacggcaccgatgtggcgctgctcaagaataatgcatatgcagcgggaattacatcccacacttctgtccagcctggagggcatagtggatcagatggtctggtttcgcgaaaattggcatgaagaggtccttcggcaattgcagcagggccttgccaagtgctactctgtggctttcgagaaaagtggagccgtgtctgatgccaaaatcacccctcacaccttaaactttgttaaaaaactcgtttccactttcggcgtgggcctagaaaacgtgtccaatgtgtcgaccatgttttcctctgctgcgagcgaatctctggcgaggcgagcacaggcgacggcacaggacccggtcttccaaaagctcaaagggcagtttacgactgacttcgatttctctgttccagggagcatgaaactccacaacttgatttctaaacttaaaaagtggattaagatcctggaggccaaaactaaacagctacccaagttctttctgatcgaggagaagtgccgattcttgtctaacttttcggcgcagaccgctgaagtggaaatacccggagaattcctgatgccaaaacctactcattactacatcaaaattgccagattcatgccgcgagtggagatcgtacaaaaacacaacacagccgctcggagactgtacatccggggtcacaacgggaaaatctatccttaccttgtcatgaacgacgcgtgtcttaccgaaagtcggagggaggagcgagttcttcagttactgaggctgctgaatccctgcctggagaagcgaaaggagacaactaaacgccatctattctttacagtacccagagtggtcgctgtgtcgccacaaatgcgccttgtggaggataatccatcatctctttcactggttgagatctacaagcaacgctgcgccaagaagggtatcgaacatgataacccaatcagccgctattatgatcggcttgccactgtccaggccagagggacgcaggcatcacatcaggtacttcgcgacattttgaaggaagtgcagtctaatatggttcctcgcagtatgctgaaggagtgggcattacatacattcccgaacgccactgattattggacctttcgaaaaatgttcacgattcagctcgctctcattggattcgctgaattcgtgctgcacctgaataggctgaatcctgagatgctccagatcgcgcaggataccgggaagctgaacgtagcctacttccgcttcgacatcaacgatgctacaggtgatctagacgcgaacaggcccgtaccatttaggttgactccaaacatcagcgaatttctgactactatcggagtgtctggcccactgacagcgtctatgattgcggtggcgcgatgttttgcccagccaaacttcaaggtcgacggcattcttaaaacagtattgcgcgacgagataattgcgtggcataaaaagacacaggaggacactagctctccgctttctgcagcgggacagccagagaacatggattctcaacagctggtgtcactggtccagaaagcagtcacagcaataatgacacgactgcataaccttgctcaattcgagggaggcgaatctaaagtgaacaccttagtcgccgctgctaatagtttggataacctctgcagaatggacccagcctggcatccttggctgtag

SEQ ID NO: 244489 - DNA, 11580 bp, synthetic construct
  misc_feature 1..11580: note = Description of Artificial Sequence: Synthetic coding sequence
  source 1..11580: mol_type = other DNA
atggccttcgtggccacacagggagcaacagtcgtggaccagaccaccctcatgaaaaagtatctgcagttcgtggcggctcttacagatgtcaacacccctgacgagacaaagctcaaaatgatgcaagaggtgtctgagaatttcgagaatgtgacctcttcaccccagtacagcacattcctggagcacataatcccgagatttctcacattcctgcaggatggagaggttcaattccttcaagagaagccggctcagcaattgaggaagctggtcctggaaatcattcaccggatccccacaaatgaacatctgcgtccccataccaaaaatgtattatccgtgatgttcagatttctggagacagagaatgaggagaacgtgctgatctgcctgcgaatcattatcgagctacataagcagtttagaccgccaatcacacaggagatccaccactttctggatttcgtcaaacagatctacaaagagcttccgaaggttgtgaacaggtatttcgagaacccacaggtaatccccgaaaatactgtgccaccccctgagatggtcggcatgataaccactatcgcagtgaaggttaaccccgaacgggaggattctgaaacccggactcacagtattataccccgaggctctctttccctaaaggtgctggctgaactccccatcattgttgtgctgatgtaccagttgtacaagctgaacatccataatgtggttgcagaattcgtcccactaatcatgaatacaattgcgatacaggtcagcgcccaggcccgacagcacaagctctataataaggagctgtacgccgatttcattgcagcccaaattaaaactctcagcttcctggcctacatcattaggatttatcaggaactcgttactaagtacagccaacagatggtgaaagggatgctgcaattactctctaactgtcctgcggaaactgcccacctccgtaaagaacttctgatcgcggcaaaacatatcctcaccactgaactccgtaaccagttcataccctgtatggataagctgttcgacgaaagtatcctgataggatcaggttacactgccagagagacgctacgcccactagcgtactcgaccttagctgaccttgttcaccacgtgcgccagcacctacctctgagtgatctgtccctggcagtccagctatttgcaaaaaacattgacgatgagagtttaccatctagcattcaaacgatgtcttgtaaacttctcttaaatttagtcgattgcatcagaagcaagtctgagcaggagagtgggaacggacgtgacgtactcatgcgtatgctcgaggtgtttgtgctgaagttccacacgattgccaggtatcaactctctgccatcttcaaaaagtgcaagccgcagtcagagctgggagccgtagaggcagccctgcccggtgtcccgaccgctcccgctgctcctggacccgctccaagtcctgctcccgtacccgcacctccccctccgccaccgccacctcccccagcgacacccgtgacccctgcaccagtcccaccattcgagaagcaaggcgagaaggacaaagaagataaacagactttccaggtgactgactgcaggtcgctcgtgaagactctggtatgtggcgtaaaaaccatcacttgggggattacctcttgtaaggccccaggagaggcccaatttattcctaataaacagctgcagccgaaggagacgcaaatctacattaagctcgtgaaatatgccatgcaagctctggacatttatcaggtgcagatagccggaaatggacaaacctatatacgagtggctaattgccagactgtgcgcatgaaggaggagaaggaagtcctagagcactttgctggcgtgttcacgatgatgaatcctctgacctttaaagaaatattccaaactaccgttccatacatggtggagaggatttctaagaactacgccctccagattgtggcaaatagcttcttggccaaccccaccacctcagcccttttcgcaaccatccttgtcgagtaccttttagacaggctcccagaaatgggcagcaacgtggaactaagtaatctttatctaaagctgtttaagctggtgtttggctcagtgtcactatttgctgccgaaaatgagcaaatgttgaagccacacctccacaaaatagtgaatagttccatggagcttgcccagacagcaaaagaaccctataactattttctcctcctgagggccctgttcagaagcattggcggtggctcacacgacctgctgtaccaagagttcttaccactgcttccaaatttacttcaaggattgaacatgctgcaaagtggcctgcataaacagcatatgaaggacctgtttgtggaactgtgcctaaccgtacccgtgcggctgtcttccctcctgccgtaccttccgatgcttatggatcctctagtgtccgccttaaatggctcccaaactctggtaagccaaggactacgtacgctggagctctgtgtggacaatttacagcccgatttcctgtatgaccacattcagcccgtaagggctgaattgatgcaggctctatggagaaccctccgcaatcctgccgacagcattagccatgttgcatatcgagtgctgggcaagtttgggggttccaatagaaaaatgctcaaggaatctcagaaacttcactacgtggtgacggaggtccaagggccaagtatcactgtggagtttagcgattgcaaggcttccctccagctgcctatggaaaaggcaatagaaactgcgctcgattgcttgaagtcagcgaacacggaaccatactatcggcgacaggcctgggaggtgatcaagtgttttctcgtggcgatgatgtccttggaggataacaagcacgccctctaccaattgcttgctcatcccaatttcactgaaaaaaccatccctaatgtgatcatttcgcatcgctataaggctcaggacacaccagctagaaagacgtttgagcaggctcttacgggggctttcatgtctgccgtgataaaggacctgaggccaagtgctttacccttcgtggcctccctaatccgccactataccatggttgcagtggcacagcagtgcggcccatttctcctcccctgctatcaagtcggcagccagccaagtactgcaatgtttcatagcgaagaaaacgggtcaaaaggcatggatcctctggtgctcatcgatgccattgccatttgtatggcctatgaagagaaagaactctgtaagatcggtgaagtagctcttgcagtaatctttgacgttgcctccattattctggggagcaaggagcgagcctgtcagcttccactgttctcgtacattgttgaacgtctgtgtgcctgctgttacgaacaggcatggtacgcgaagctgggaggagtggtgtctatcaaatttttgatggaacgtctgcctttgacttgggtgctgcagaatcaacagacattcctgaaagctctgctgtttgtgatgatggatctcactggcgaggtgtctaacggagcagtcgcaatggctaaaacgaccctcgagcagttgctgatgagatgcgccacccccttgaaagatgaagaacgcgctgaggagatcgtcgccgcacaggagaagagctttcatcacgtgacgcacgacttggtgcgggaggtaacgtctccgaatagtacagtgcgaaaacaggctatgcacagcctgcaagtcctagcgcaagtaaccggaaaaagcgtaactgttataatggagccccataaggaggtcttgcaagatatggtccccccaaaaaaacatctgctgcgtcatcagccagcaaatgcccagataggactcatggagggaaataccttttgtaccactcttcagccgaggctgttcacaatggacctgaacgtggtggagcataaagtcttctacaccgagttgttgaatctgtgcgaggctgaagattctgccctcaccaaattgccatgctataaatcactgccatcactcgtcccactaagaattgctgcgctgaatgccctggcagcttgcaattacctgcctcagagtcgcgagaagataatcgcagcgctgtttaaggccttgaattccaccaactccgagctgcaggaagcaggcgaagcatgtatgcgcaagttcttggagggcgcaactatagaggtggaccaaattcacactcacatgaggccgctgttaatgatgctaggagattaccgaagtctaactctgaatgttgtcaatagactgaccagcgtcaccaggctgttcccaaactcatttaacgacaagttttgtgatcaaatgatgcagcaccttaggaagtggatggaggtggtggtgattacacacaaaggcggacagcgatctgacggcaatgaatctattagcgagtgcggcagatgtccactctctccattctgtcagtttgaggagatgaaaatctgtagtgcaatcattaacctgtttcacctcattccagctgctcctcagacactcgtaaaacccctgctagaggttgttatgaagacggaacgcgctatgctgatagaggccggaagcccctttcgtgagccactaattaaattcttgacacggcacccaagccaaactgtagagctgtttatgatggaggcaacccttaatgacccccagtggagtcgcatgttcatgtcatttctgaaacataaggatgccagacccctgagagatgtgcttgccgctaacccaaataggtttataactctgttgctgcctgggggagctcaaactgcggttagacccggatccccgtcaacttccaccatgcggctagaccttcaattccaagcaatcaagatcatctccattattgtcaagaatgacgactcatggttggcctcgcagcattccctggtttcacaactcaggcgggtgtgggtgtcggagaacttccaggaaagacaccgaaaagaaaatatggctgctaccaattggaaggagcctaaattgttagcgtattgtttattaaactactgcaagcggaactacggtgatattgagctgttattccagttgttgcgggcattcaccggtagattcctgtgtaacatgaccttcctgaaggagtatatggaagaagaaatacccaagaactatagcattgctcagaaaagagctctcttcttcagatttgtagacttcaacgatccaaatttcggggacgagttaaaagctaaagtccttcagcacatattaaacccagccttcttatactcattcgaaaaaggggaaggagagcagctcctgggccctccgaatcctgagggcgacaatcctgaatcaatcacgagcgtgttcatcacaaaggtgcttgaccctgagaaacaggccgacatgctcgacagcctccggatctacctgctacagtacgccactctcctggtggaacacgctccacaccatattcatgacaacaacaagaatagaaactcaaagctgaggaggttgatgaccttcgcctggccatgccttctgagtaaagcatgcgtggatccagcatgcaaatacagtgggcacctgttgctcgcccacattattgcaaagttcgcaatccacaagaagatcgtattgcaggtgttccattcccttttaaaggcgcatgccatggaggccagagccatcgtgaggcaggccatggctatcctgactccggcagtcccagcgagaatggaggacgggcaccagatgttgacacattggacccgtaagatcatcgttgaagagggtcataccgtccctcagctggttcatatcttacaccttattgtgcaacatttcaaagtttactacccagtgcggcaccaccttgttcagcacatggtgtccgccatgcagcggttgggattcactccttccgtaacaatagaacagcgccgactagccgtggacttgagcgaggttgttatcaaatgggaactacagaggatcaaagaccagcagcccgacagcgacatggacccaaattcttcgggggagggggttaattctgtgtcctcttcaattaagaggggcctttcagtggattccgcccaggaggtaaaaagattccgaaccgctactggcgctatttccgcagtgttcggcaggtcccaatccctgcccggtgccgacagcctgctggctaagcccattgacaagcagcataccgacacagtggtaaatttcctgattcgcgtcgcctgccaggttaacgacaatactaataccgccggttccccaggggaggtattatccagacggtgtgtgaatttattgaagaccgctctcaggccagatatgtggcctaaatcagaacttaaactacaatggtttgacaagctgctgatgacagttgagcagcctaatcaggtcaattacggcaatatatgtacaggtctcgaggtgctgagtttcctgttaacggtgctgcaatcacctgcaatcctctcttcattcaagcccctccagagaggaatcgccgcatgcatgacctgcgggaataccaaagttcttcgagccgtccatagcctgctgagcagattaatgtcgatcttccctaccgagccatccacgagctctgtcgcttcaaagtacgaggagcttgagtgcctctatgcggcagtcgggaaagtaatctacgagggtcttactaattacgagaaggctactaacgcaaacccctcccagttattcgggacactaatgatcctcaagtcggcctgctccaataacccctcctacattgataggttgatctccgtctttatgcggagtctccagaagatggtccgtgaacatttgaatccccaggcagcctctggcagtaccgaggcaacatcaggtacaagtgagttagtgatgctctcactggagcttgtaaaaaccagactggccgtgatgtcaatggaaatgagaaaaaatttcattcaggctattcttacttcactgattgaaaaaagccctgacgccaaaatcttaagagccgtcgtgaagattgtcgaagaatgggtgaagaacaactctccaatggcagccaatcaaactccaaccttacgggagaagtcaatccttctggtcaagatgatgacatatattgagaaacgcttcccagaggatctcgagctgaatgcccagttcctggatctggtgaactacgtatacagagatgagacgctatcgggctccgagttaaccgccaaattagaaccagcttttttatcgggcctgcgttgtgctcagcccctgattcgagcgaaattctttgaagtgttcgacaacagtatgaagcggcgtgtgtatgagagactgttgtacgtgacatgttcacagaactgggaggctatggggaatcacttctggatcaaacaatgcattgaattactgctcgccgtgtgtgagaagtctacacctatcggaaccagctgtcaaggggcaatgttaccatctatcaccaatgtgattaacctggctgacagccatgacagggccgcattcgccatggtcactcatgtgaagcaggagccccgagagagggagaacagcgaaagcaaggaggaggacgttgaaatcgatatcgagttggcacccggagaccagacatccacgcctaagactaaagaattatccgaaaaggacattggcaaccaactacatatgctgactaaccgccatgataagtttctggacacactacgggaagtgaagaccggagccctgctcagtgcttttgtgcagctttgccatatttcgacgaccctggccgagaagacatgggtgcaactgtttcccaggctctggaagattctgtcagatcgccagcagcacgcactagctggcgaaatttctccgtttctctgtagcggcagtcatcaggtgcagcgggattgccagccgtctgcgctgaactgcttcgtcgaagccatgagccagtgcgtgccacctatccccatcaggccttgcgttttgaaatacctggggaagacacacaatctctggttcagaagtaccctcatgttggaacatcaggccttcgaaaagggactgagcctccagattaaacccaagcagaccaccgagttctacgagcaggagagcataactcccccacaacaggaaattctagatagtctggcagagttatattccctcctgcaggaagaggacatgtgggccggattgtggcagaagcgatgcaagtattcagagacagccaccgccattgcatacgagcagcatggatttttcgagcaggcccaggaatcttatgagaaggctatggacaaagccaagaaggagcacgagcgctccaacgccagccccgctatatttcccgagtatcagctttgggaagatcactggatcagatgtagtaaagaacttaaccagtgggaagctctgaccgagtacggacagagcaagggacacatcaatccttatctggttttggagtgcgcatggcgcgtcagcaattggaccgccatgaaggaggctctggtacaagtcgaagtaagctgtcccaaggagatggcctggaaagtgaacatgtaccgcggatacctcgctatatgccaccctgaagagcagcagctgagctttatcgagagattggtggagatggcgtcgtcactggctatcagagagtggcgtcggctcccacatgtggtttctcacgttcacacaccgctattacaggccgctcagcagataatcgagctgcaggaggctgctcagatcaacgctggtctacagcctaccaatctgggtaggaacaattccctgcacgatatgaaaactgtggtaaaaacatggaggaaccggctgccaatcgtttccgacgacctctcgcactggtcaagcatctttatgtggcgacagcatcactatcagggtaagcctacttggtcgggcatgcacagctcgtcgattgtaactgcttatgaaaactccagccagcacgacccttcatccaataacgctatgctaggggtccacgcttctgcttctgctatcatccagtacggcaagatcgctagaaagcagggcctcgtcaacgtcgccctggacatcctcagccggatccacactatcccaactgtaccaatcgtcgattgctttcagaagatccgacagcaggtgaagtgctatcttcaactggccggagtgatgggtaaaaacgagtgcatgcagggactggaagtgatcgaatccactaatctgaagtatttcactaaggagatgacagctgagttttatgcgttgaaaggtatgttcctcgcccagatcaataaatccgaggaagcaaacaaagccttctcggctgcagtgcagatgcacgacgtgctagtgaaggcgtgggccatgtggggcgattacctagaaaatattttcgtcaaggagcgccagctgcaccttggggtgtcagccattacatgttacctgcatgcttgccgccaccagaacgaatccaagtctaggaaatacttagcaaaggtgctttggttgctgagctttgacgatgataagaacaccctggctgatgccgtggataaatactgcatcggcgtgccgccaattcagtggctcgcttggattccccagctcctgacatgcctcgtgggctctgagggcaagctgctgctgaatctaatcagccaggtaggtcgcgtgtacccacaggccgtgtacttccccattaggacactgtacttaaccctgaagattgagcagagggagaggtacaaatccgaccccggacctatccgagccacagccccaatgtggcgctgttcccgcattatgcacatgcagagggaactgcacccaaccctcttatcaagtctggagggcattgtggaccagatggtttggttccgggagaattggcacgaagaagtgcttagacagctccagcaggggcttgccaagtgttacagtgtggcattcgagaagtctggtgccgtgagtgatgctaaaatcactccacacaccttgaattttgtcaaaaagctggtgtccactttcggagtggggcttgagaatgtgagcaacgtaagcaccatgttcagtagcgccgcttcagaatccctggcccgtcgggcacaagcgacagcccaggacccggtgtttcagaaactgaagggtcagtttaccaccgatttcgattttagcgtgcctggatcaatgaagctgcacaacctgataagtaaactgaagaagtggatcaaaattctcgaagctaagactaagcagttgcccaaattcttcctgatcgaggagaagtgtagatttttatctaacttttctgcgcagaccgctgaggtggagatccccggtgaattcctcatgcctaaacctacacattactacattaagattgctagatttatgccccgagtagagatagtgcagaaacacaacactgcagccaggcggctttacattagaggccacaatggaaaaatttacccctacctagttatgaacgatgcctgcctcaccgagagccggagggaggagagagtacttcagttgcttcggctcctgaacccgtgtctcgagaagcgaaaagagacaaccaagaggcacttgttcttcacggttccacgggtggtggctgtgagtccccaaatgaggctggtggaagacaatccgagctctttgtcgttagttgagatctataaacagcgctgcgctaaaaagggaattgagcatgataatccgatctctaggtattatgatcgtttagctaccgtgcaggcaaggggcacccaagcctcacaccaggtgcttcgcgacatactgaaggaagttcagtccaatatggtgcctaggtccatgttaaaggagtgggccttacacacatttccaaatgccactgattattggaccttccggaagatgtttacaatacaattggcgttgattgggttcgccgaatttgttttgcacctgaacaggctcaacccagaaatgttacagatcgctcaagatactggaaaactgaacgtggcatattttcgcttcgatattaacgatgccaccggtgatcttgacgcaaacaggccagttccctttcgcttaacacctaatattagtgagttcctgacaaccatcggagtgtccggtccactgacggccagtatgatcgcggtggcaagatgctttgcacagccaaattttaaggtagacggcatcctcaaaactgtcttgcgagacgagattatcgcatggcataagaagactcaagaggatacctctagtccactgagcgctgcagggcagccagagaacatggacagccagcagctagtgtcgttggtgcaaaaagccgtcactgctattatgactaggctgcataatttagcacagtttgaaggcggagagtcaaaagtgaatactctggtggcagcagcaaatagcctggacaatctctgtcggatggatcccgcttggcacccctggctctac

SEQ ID NO: 244490 - DNA, 216 bp, synthetic construct
  misc_feature 1..216: note = Description of Artificial Sequence: Synthetic coding sequence
  source 1..216: mol_type = other DNA
atggccttcgtggcgacgcagggtgccactgtggtggatcagaccacactcatgaagaaatacctccagtttgtggccgcactaactgacgtcaacaccccagacgaaactaagcttaagatgatgcaggaagtgtccgaaaactttgagaatgtcacatcctcaccgcagtattccacgtttctggagcatattattccgaggtttttaacatag

SEQ ID NO: 244491 - DNA, 117 bp, synthetic construct
  misc_feature 1..117: note = Description of Artificial Sequence: Synthetic coding sequence
  source 1..117: mol_type = other DNA
atgtcggacagtggcgaacagaattacggcgagagggttaacgtggaggaaggaaagtgtggttcacgtcacctcactagctttatcaatgaatacctgaagttgcgcaacaagtag

SEQ ID NO: 244492 - DNA, 567 bp, synthetic construct
  misc_feature 1..567: note = Description of Artificial Sequence: Synthetic coding sequence
  source 1..567: mol_type = other DNA
atgagtaccagacgccgtcatgtgggcaaccgggctaaccctgatccgaattgttgtcttggagtcttcggcctgtccctctacacgactgagagggacctgcgggaggtattttcaaaatatggacctattgccgacgtgagcatcgtttatgatcagcagtctcggaggagtcggggtttcgcctttgtttattttgagaatgtcgacgatgcaaaggaggctaaagagagggctaatggtatggagctcgacggtcgcagaatccgagtggacttttctattaccaagaggccacacacgcccacccccggtatctacatgggacggcctacttacggctcttcacggcgacgtgactactatgaccggggatatgatcgaggatacgatgaccgtgactactatagccggtcctatagggggggaggaggcggagggggtgggtggagagccgcacaggatcgggatcagatctaccgtcggagaagcccctcgccatactactctaggggaggctaccgcagccggagtcgatctcgcagttactcaccgaggcgatattag

SEQ ID NO: 244493 - DNA, 867 bp, synthetic construct
  misc_feature 1..867: note = Description of Artificial Sequence: Synthetic coding sequence
  source 1..867: mol_type = other DNA
atgagtgacagcggtgagcagaattatggggagagagaatccagatctgccagtcgctctgggagcgcccatggaagcggtaaaagcgccagacatacaccggctcggtctcgcagcaaggaggatagcagaaggtccagatctaagagtagatcgcggagcgagtctcgcagccgttccaggcgaagctcccgcaggcattatacgcgaagtagaagccgatcccgatctcatcgccgtagcaggtcaagatcttactcccgggactacagacggagacattctcacagtcactctccaatgagtactcggagaaggcatgtcggcaacagagccaacccagaccccaattgttgtctgggggtgttcggattatctctgtacactacagaacgtgacctgagggaagtgttttctaagtacggccctattgccgacgtctctattgtatatgatcagcagtctaggagaagccggggattcgcctttgtgtatttcgaaaatgtggacgatgcaaaggaagccaaagaaagggcaaacggcatggaactggatggccgtcggatacgcgtcgatttttccataaccaagcgcccacatacaccaacgccaggaatctacatgggtcgaccgacctatggctcatcccgacgcagagactactacgacagagggtacgacagaggctacgatgaccgtgattattattctagatcctaccgcggtgggggtggtggtggcggtgggtggagagctgcacaggatagggaccagatctaccgcaggcgctcacccagtccgtactattccaggggagggtaccgatccaggagccgctccaggagctattctcctaggaggtattag

SEQ ID NO: 244494 - DNA, 483 bp, synthetic construct
  misc_feature 1..483: note = Description of Artificial Sequence: Synthetic coding sequence
  source 1..483: mol_type = other DNA
atggtgccaagtgcaggccaactggcattgttcgcactgggcatcgtgttggcggcatgccaggccctggagaactccacaagccccctctccgcagatccaccagtggcggcagcagtggtgagccatttcaatgactgcccggattctcacactcagttctgttttcatgggacatgtcgttttttagtgcaggaagataaacccgcatgcgtgtgtcactctggctatgtgggcgcacggtgcgaacatgccgacctcctggcagtcgtcgccgcaagccaaaagaagcaggccattaccgccctggttgttgtgagtatcgtcgccctggctgtgctgattatcacgtgtgtgctaatacattgttgtcaggttcggaagcactgcgagtggtgcagagcactcatttgccggcacgagaaaccgtcggcgctgctcaaagggaggaccgcctgctgccactctgaaaccgtggtctag

SEQ ID NO: 244495 - DNA, 480 bp, synthetic construct
  misc_feature 1..480: note = Description of Artificial Sequence: Synthetic coding sequence
  source 1..480: mol_type = other DNA
atggtaccctcggctggtcaattggccttgttcgctcttggaatcgtcttggcagcttgccaggctctggagaattcaactagtcccctgtcagatccacccgtggcggcagctgtggtgagtcactttaacgactgcccagatagccacacccaattttgtttccatggaacctgccggtttctggtgcaggaggacaagcctgcctgcgtgtgccattctggttacgtgggggcacggtgcgaacacgcggatcttctcgctgtcgtcgccgcttcccagaagaagcaggcaatcaccgcccttgtagtcgtcagtatagtggcccttgccgtacttataattacttgcgtgttaattcattgttgtcaggttaggaaacactgtgagtggtgccgggcactgatctgtaggcacgagaagccttcggctctcctgaaagggagaacagcttgttgccacagcgaaactgtagtatag

SEQ ID NO: 244496 - DNA, 2583 bp, synthetic construct
  misc_feature 1..2583: note = Description of Artificial Sequence: Synthetic coding sequence
  source 1..2583: mol_type = other DNA
atgatgagcatcaaggcattcactctggtctcagcagtagagagagagctcttgatgggagataaagagcgagtcaatatcgaatgtgtggaatgctgcgggcgtgacttgtacgttggaacgaacgactgctttgtgtaccacttcctgctagaagagaggcctgttcccgcaggtccggctaccttcacagccactaagcagctgcagaggcatctaggctttaagaagcccgttaacgaactgcgcgcagcatcggcactaaatcgcctactggtgctttgcgataacagtattagcctggtgaacatgctgaacttagaaccagtaccctcaggtgctcgaatcaagggcgcagccaccttcgctctgaatgaaaaccccgtgtcaggagacccattctgtgtcgaagtctgcatcataagtgttaagagaagaacaatccagatgttcctggtgtacgaagacagggtccagattgtgaaggaggtatctacagccgagcagcctcttgccgttgctgtcgacggccatttcctttgcctggcactcaccacacagtacattatccacaattactcaacaggcgtgtcgcaggatctctttccatactgttccgaggaaaggccgccaattgtcaagcggatagggagacaggagtttctgctcgcaggtccagggggactgggcatgtttgcgacagtagcgggtatctctcagagggcccctgtgcactggtccgagaatgtgattggtgccgcagtttcattcccctatgtgattgcactcgacgacgagttcattactgttcacagtatgctcgatcaacagcagaagcagactctgcccttcaaggagggacacatcctgcaggacttcgaagggagggtaatcgttgccacttcgaaaggggtctatatcctggtaccactgcctctcgagaagcaaattcaggatctcctggctagcagacgcgtcgaagaggcgttagtgctcgctaaaggcgcaagacgcaacattccgaaagaaaaatttcaagtgatgtataggagaatcttacagcaggcaggctttatccaattcgcccaattacagtttctggaggcaaaagagttattcaggtcaggtcagctggatgtccgggagctcatcagcctttacccttttctgctgcctacaagcagctcattcactcgttcccaccctcccctgcacgagtatgccgatctcaaccagctgacccagggtgatcaggaaaagatggcaaaatgcaagcgattccttatgtcttacctgaatgaggtgagaagcaccgaggtggcgaatggctataaagaggatattgatacagctctgctgaaactgtatgccgaagccgaccatgactccttattagatctcctggtcacggaaaacttttgtctgctgaccgacagtgcagcctggcttgaaaaacataagaaatacttcgctcttggcctgctgtaccactataataatcaagatgcagctgcagtgcagctctgggtgaatatcgtcaacggggatgttcaagactcaactcgatccgacctctacgagtacatcgtggattttctgacatattgtctcgatgaggaactggtgtgggcctatgccgactgggtgctgcaaaaatctgaagaggtcggggttcaggtgtttactaagcgccctctcgacgagcagcagaaaaactcatttaatcccgatgacatcatcaactgcctgaaaaaatacccaaaggctctcgtcaaatacctggagcacctcgtgatcgataaacgcctgcagaaggaggaatatcacacacatcttgctgtgctttacctcgaggaggtgctcttacagagagcctctgcttcagggaagggtgccgaagctacagagacccaagctaagctccgtcgacttctgcagaagagcgatctatacagagtacactttttgctagagcggttgcagggagctggcttgccaatggaaagcgctatactgcacggtaagctgggagagcatgagaaggctctccacatcctggtacacgaactccaagattttgcagccgctgaagattactgcctgtggtgtagcgagggcagggacccacctcacaggcagcaactgtttcacactctcctggcgatctacctgcatgccggacctactgcgcacgagttggccgtagctgctgtggatcttttaaacagacacgccaccgagtttgatgccgcacaggttcttcaaatgttaccagatacctggtccgtgcagttgttgtgcccatttctgatgggcgctatgagggacagtatacacgccaggcgcactatgcaggtggctctcggcttggcgcgaagtgaaaatctgatttatacttatgataaaatgaaactcaagggttcaagtatccagttgagtgacaaaaaattgtgccaaatctgtcagaatccgttctgcgagccagtttttgtgcgctaccctaatggaggtcttgtccacacgcattgtgcagcatcaaggcatacaaatccctcatcttcctcacccggaactcgaacctag

SEQ ID NO: 244497 - DNA, 2583 bp, synthetic construct
  misc_feature 1..2583: note = Description of Artificial Sequence: Synthetic coding sequence
  source 1..2583: mol_type = other DNA
atgatgtccatcaaagccttcactctggtaagcgccgttgagcgcgaacttctcatgggcgacaaagagagggtgaacatagagtgtgtggagtgctgtggcagagatctgtacgttggcaccaatgactgctttgtgtaccattttctgttagaagagcggcctgtcccggcaggtccagcgactttcactgcgaccaaacagctgcagaggcatttgggcttcaaaaagcccgttaacgagctgagggctgccagcgccctaaacagacttctggtgctgtgtgacaactcaattagtctggttaacatgctgaatctggaacctgtcccctcgggggctcgcattaagggtgctgctacattcgcgctcaatgaaaacccagtgtccggggacccattttgtgttgaggtgtgcatcatttctgttaaacgcagaacaattcagatgttcctggtatacgaagatcgggtgcaaatcgttaaggaggtgtcaaccgctgagcagccactggccgtcgcagttgatgggcactttctgtgcctggctctgaccacgcagtatattattcacaattattctacgggagtaagccaagacctgttcccctactgctctgaagaaagacctcccattgtcaagcgtatcgggagacaagaattcctcctggccggacccggaggtctgggaatgtttgctaccgtcgccggaatcagccagcgtgcaccagtacattggagcgagaatgtgatcggggctgcagttagcttcccctacgttattgccctcgacgatgagtttatcactgtgcacagcatgctggaccagcagcagaaacaaacattgcccttcaaggaaggccatatcctacaggattttgagggcagggtgattgtcgcaacaagtaagggcgtgtacatactggtccctctcccccttgagaagcagatacaggatctgctcgccagcagacgcgtggaagaagctctggtgctggcgaagggggcaaggcgtaatatccctaaagagaaattccaggtgatgtatagacgtattctgcagcaggcaggtttcattcagtttgcccagcttcagttcctggaagctaaagagctcttcagatctggacaactcgacgttcgagagctgatctccttatatccattcttgcttcccaccagtagctcattcaccaggtctcacccccctctgcatgagtacgccgatttaaatcaactaacacaaggggaccaggaaaaaatggctaaatgtaagaggtttctcatgtcatatctgaacgaggtgaggtctacagaggtggcgaacggttacaaagaggatatcgacacagctcttctgaagctgtatgctgaggccgatcacgattccctgctggatctcctggtaactgagaacttttgcctactgacggactccgcagcctggctggaaaagcacaagaaatacttcgcgctgggcctcctgtaccactacaataatcaggatgctgcagctgtgcagttgtgggtcaacattgtcaacggtgacgtgcaggatagcaccaggtccgacttatatgagtacatcgtggatttcctcacctactgcttagatgaagaactggtctgggcctatgcagattgggttctgcagaagagcgaggaggtgggcgtacaggttttcaccaaaagaccactcgatgagcagcagaaaaacagctttaatcccgacgatataatcaattgtctcaaaaagtatccaaaagcactggtaaagtacctggaacatttggtcattgataaacggcttcaaaaggaagaataccacacgcatctggccgtgctttacttggaggaagtgctgctccagcgcgcaagcgcttccggaaagggagccgaggctaccgagacccaagctaaactcagaaggcttttgcagaagtctgatctgtatcgagtgcacttcctgctggagcgtctgcaaggagccggactgcctatggagtctgctatattgcatggcaaactcggagagcacgaaaaagccttgcacatcttggtccatgagcttcaggactttgccgctgcagaggactactgcctgtggtgctccgagggccgtgacccaccccacagacagcagcttttccacacactgctcgcgatctatttgcacgcaggacccactgcacacgagctggcagttgccgcagtggacctgctgaacagacatgctacggagtttgatgcagcgcaggtcctgcagatgcttccagatacctggagtgttcagctcctctgcccattccttatgggagctatgagggactccatccacgcgagacgcacaatgcaggtggctctcgggttagctaggtcagagaatcttatctatacatacgataagatgaaattaaagggatcttccatacagctgagtgataagaagctgtgccagatatgtcaaaaccccttttgcgagcctgtctttgtgcggtacccaaacggaggccttgtgcacacacactgcgcagcatcgcgccataccaacccctcaagtagctctcctggcaccagaacttag

SEQ ID NO: 244498 - DNA, 948 bp, synthetic construct
  misc_feature 1..948: note = Description of Artificial Sequence: Synthetic coding sequence
  source 1..948: mol_type = other DNA
atgctcattgggtcatgccggaaagtgaagagatccgtgcaggtgttcaccaagcgtcccttggatgagcaacaaaagaatagcttcaaccctgacgatattattaattgtcttaagaaataccctaaagcacttgtgaaatatctggagcatttagtaatcgataagcgtctgcagaaagaggagtatcacacacacttggcagtgctgtacttggaagaggtcctgctgcagagggcctccgcgagcgggaagggtgcggaggctacagagacccaagccaagttgagacgacttttgcagaagagcgatttgtatcgcgtgcacttcttgctcgagaggttgcagggagccggtctgcccatggaatctgcaatcctacacggtaaactgggagagcatgaaaaagccctgcacatcttggttcacgaactccaggacttcgccgcagccgaagactattgtctgtggtgttctgaagggagggatccccctcaccgtcagcaactcttccatacccttttggctatttacctgcatgcagggccaacagctcacgaactggccgtggctgcagtggacctactcaaccgacatgcgacagagtttgacgccgctcaagtgcttcaaatgttacccgacacatggtcggtgcagttactttgcccgttcctaatgggagccatgcgagattcaattcatgcaaggcgtacgatgcaggtggccctggggctggccaggtctgagaacctcatttacacatacgacaaaatgaagctgaaaggtagttctatccagctgagcgataaaaagttgtgccaaatatgtcagaacccgttttgtgaacccgtgtttgtgcggtatcccaacggcggtcttgtgcacacacactgcgcagccagcagacatacaaatcccagtagcagttcacccggaacaaggacttag

SEQ ID NO: 244499 - DNA, 1704 bp, synthetic construct
  misc_feature 1..1704: note = Description of Artificial Sequence: Synthetic coding sequence
  source 1..1704: mol_type = other DNA
atgggtcggggattactgagaggactgtggcctctccacatcgtgttgtggacgcggatcgccagcacaatcccccctcatgtccagaaatcggtgaataacgacatgattgtgactgacaataacggagctgtaaagttccctcagctgtgtaagttctgcgacgtgcgctttagcacctgcgacaaccaaaagtcttgcatgtccaactgctcaattactagcatctgcgagaaaccacaggaagtttgcgtggcagtatggcggaagaacgacgaaaacatcacactcgagaccgtgtgtcacgaccctaaactgccttatcatgactttatccttgaggacgcagcgtcccccaagtgcatcatgaaagagaaaaagaaaccaggggagacgttctttatgtgcagctgttcatctgacgaatgcaatgataatattatcttttcagaagagtataataccagcaatcccgacctactgttggtgatattccaggtcacaggcataagcctgttaccaccactcggggtagcaattagtgtaataattattttttactgctatcgggttaaccggcagcaaaagctctcttccacgtgggagacaggaaagacccgtaagctcatggaatttagcgaacattgcgcaatcattcttgaggacgatcgctctgacatcagttcgacatgcgccaacaacattaaccacaacaccgaactgctaccaatagaattagacactctcgtgggaaaaggacgattcgcagaggtgtacaaggcgaaactcaaacagaatacatccgagcagtttgaaaccgtggcagtgaaaatctttccttacgaagaatacgccagctggaaaaccgagaaggacattttcagcgatatcaatctgaagcacgaaaacattctccagtttctaacggcagaagaacgaaagacagagcttgggaagcaatattggttaataaccgctttccacgcgaagggaaacctacaggagtatttgactcggcatgtcattagctgggaggatctgcgtaagctgggctcatctttagccaggggaatcgcacatctgcattctgaccatacaccctgcggcaggcccaagatgcccatcgttcatcgggatttgaaaagctcaaatattctcgtaaaaaatgacttaacttgttgtctgtgtgatttcggcctgtctctgagactcgaccctaccctttcagtcgatgacctggctaactcgggacaggtaggcacagcgaggtacatggcccctgaggttctggagtctcgcatgaacctggagaacgtagagtcattcaaacaaaccgacgtgtacagcatggccctggtgctttgggagatgacctctcgctgcaatgccgtaggcgaggtgaaggattacgagccacctttcggttcaaaggtgagggaacacccatgcgttgaatcaatgaaggacaatgttttgcgagaccgcggaagaccagagatccccagcttttggctgaaccatcaggggatccagatggtatgtgaaactttaacagaatgttgggaccatgatccagaagcaaggctaaccgcccagtgtgtcgctgagcgattttctgagctggaacacctcgatcgcctctcgggacgctcttgcagcgaagagaaaatccctgaggacggcagcttgaacacgacaaaatag

SEQ ID NO: 244500 - DNA, 1779 bp, synthetic construct
  misc_feature 1..1779: note = Description of Artificial Sequence: Synthetic coding sequence
  source 1..1779: mol_type = other DNA
atgggtaggggcctgctcagaggactgtggccattgcacatcgtcctgtggacaagaattgcctcaactatccctcctcacgtccaaaagtcagatgtcgaaatggaggcccaaaaagacgagattatttgtccgagctgcaatcgtacagcgcaccccctgcgacacattaacaacgacatgattgttaccgacaacaatggagccgtcaaattcccgcagttgtgtaaattttgcgatgttcggttctctacctgtgacaatcagaagagttgcatgagtaactgttcaataacatccatttgcgagaaaccccaggaagtctgtgttgcagtctggagaaagaacgacgagaacattacactcgaaaccgtctgtcacgatccaaaactcccatatcacgactttatcctggaggatgcagccagccccaagtgcataatgaaagaaaaaaagaaacccggagagacatttttcatgtgttcatgttctagcgacgagtgcaatgataacatcattttctcggaggaatacaacacgagcaaccctgatctcctgcttgttatcttccaggtcaccggtataagcctgctgccacctttaggtgtggcaatttcagtgatcatcatcttctattgttatcgagttaaccgacaacagaaactttcttcaacatgggaaactggcaagaccagaaagttgatggagttttctgagcattgcgctataattcttgaagatgacagaagcgacatcagctctacttgcgccaataacataaaccacaatactgaactcctgcccatagaattagacaccctggttgggaaagggaggtttgccgaggtttataaggccaagctgaagcagaatacttctgagcaattcgagaccgtggccgttaaaattttcccttacgaggaatacgccagctggaagacggagaaagacattttctctgacataaatctaaagcatgaaaacattcttcagttcctgacagccgaagaaaggaaaaccgagctggggaaacagtattggctgattactgcatttcatgctaaaggcaacttgcaggaatatctcacgaggcacgtgatcagctgggaagacttgcgaaaactggggagtagcctcgcgcgtggcatcgcccatctacactcggaccacacaccatgtggtcgcccaaagatgcctatagtccacagagaccttaaatcttctaatattcttgttaagaatgatcttacgtgctgtttgtgtgacttcggattgtctttaaggttagatccaacactctcagtcgatgacctggccaattctggccaggtgggtaccgcccgatacatggcacctgaagtgctggagtcacggatgaacttagagaatgtagaatcctttaagcagacggatgtttactccatggctctggtcctatgggagatgacatctaggtgcaatgccgtgggagaggtgaaggactacgagccaccatttggcagcaaggtcagggagcatccgtgcgtggagagcatgaaggacaacgtcttacgggaccgtggcaggcccgagatcccgtccttttggttgaaccatcagggaatacagatggtgtgtgagaccctaacagagtgctgggatcacgatccagaagcgcgtctgactgcccaatgcgtcgccgaacgcttttccgagttggagcatctggaccgactttccggacgctcgtgctctgaagagaagatacccgaggatgggtcgctgaacacgactaaatag

SEQ ID NO: 244501 - DNA, 339 bp, synthetic construct
  misc_feature 1..339: note = Description of Artificial Sequence: Synthetic coding sequence
  source 1..339: mol_type = other DNA
atgtgctcttgctcaagcgacgagtgtaatgacaatattattttttccgagggtcgatgcaagattcgccacattggctcgaacaaccgtctccaacggagcacgtgtcagaacacagggtgggaaagtgcacacgtgatgaagactcccggtttccgcgagtacaataccagtaatccagatttattgttagtcatcttccaagttacaggcatttctctactccccccactgggcgtagctatctccgttataattatcttttattgttaccgggtcaaccgccagcagaagctctcctcgacatgggaaacagggaaaacaaggaagttgatgtag

SEQ ID NO: 244502 - DNA, 1194 bp, synthetic construct
  misc_feature 1..1194: note = Description of Artificial Sequence: Synthetic coding sequence
  source 1..1194: mol_type = other DNA
atgtgtagttgctcctctgatgagtgtaacgataacataattttttctgaagagtataacacctctaaccctgatctgctgctggtgatattccaggtcacaggcatttcccttcttccccctctgggcgtggctatcagtgtcataatcatcttctactgctaccgggtaaatcggcagcagaagctgtcttccacctgggagacgggcaagactcgtaaactcatggagttttccgaacactgcgccattatccttgaggatgataggtctgacattagttctacttgtgccaataacattaatcataatactgaactcttaccaattgagctagacactctcgtgggcaaaggccgattcgccgaggtgtacaaggccaagctgaagcacgagaatatcctgcaattcttaacagctgaggagcgcaagacagagctgggaaagcagtattggctaatcaccgcgtttcacgccaaggggaacctgcaggaatacctgacacgacatgtcatctcttgggaggacctcaggaagttgggctcttcgctggcgagaggaatcgcacacttacatagcgatcacaccccatgcggcagacctaagatgcccatcgtgcatcgagacctgaaatcttctaatattctggtgaagaacgacctgacatgttgcttgtgtgatttcgggctatctctgcgccttgatcccactctgtccgtggacgatttggcaaacagcgggcaagtgggtacagcgagatacatggccccagaagtgctggagagtagaatgaacctggaaaatgtcgaaagtttcaaacagaccgatgtgtattcaatggcacttgtcctttgggagatgacgtctaggtgcaacgccgttggagaagtgaaggattacgagcccccttttgggtctaaggtgcgtgagcatccatgcgtagagtcgatgaaagataacgtgttgagagacaggggacggcctgaaattccaagcttttggctgaaccaccagggaatccaaatggtttgtgagactttaacggaatgctgggatcacgatcccgaggccagactcacggcccaatgcgtggcggagcgcttttcggaactcgagcacttggatcgattgtcaggacgctcctgttcagaggaaaaaattccggaggacggctccctcaatacgactaaatag

SEQ ID NO: 244503 - DNA, 2244 bp, synthetic construct
  misc_feature 1..2244: note = Description of Artificial Sequence: Synthetic coding sequence
  source 1..2244: mol_type = other DNA
atggccgacgaagccgcattggctctccagcctggcggttctcccagcgcagccggagccgacagggaagcagctagcagccccgctggcgaacctctgcgaaagagaccaagaagggatggacccggactggaacggtcccccggtgagcccggaggcgctgcgcctgaaagggaagtgcccgctgccgctaggggctgtcctggtgccgctgccgcagctctctggcgtgaagctgaagccgaggccgctgctgctggaggggagcaggaagcgcaggcgacggccgcagctggagagggagataatgggcctggccttcaggggccatctcgagagccacccctcgcagataatctatacgatgaagacgacgacgatgagggagaagaagaggaggaagccgctgccgctgcaatcggataccgtgataatttactgttcggagatgagattatcaccaacggcttccacagctgcgagtcagatgaagaggaccgggcttcccacgccagctccagcgactggacccccagacctcgcatagggccatatacattcgtgcagcagcacttaatgattggcacagatccgcgaacgattctcaaagatctcctgcctgaaaccattccaccaccggaacttgacgatatgacactgtggcagattgtcattaatatcctgagcgagcctcctaaaagaaagaaaagaaaagacatcaacactatcgaggatgccgtcaagctcctgcaggaatgtaagaaaattattgttttaacaggcgctggcgtctccgtgtcctgtgggatccccgacttccgctcgagagacggtatctacgccaggctggctgttgattttccggatctgccagacccccaggcgatgtttgacattgagtactttaggaaagaccctcgccctttcttcaaatttgctaaagagatctacccaggacagtttcaaccaagcctctgtcacaagtttattgctttgtctgataaagaggggaagctgctcaggaactatactcaaaacatcgacacccttgaacaagtggccggaattcagagaatcattcagtgtcacggctctttcgctactgcatcatgtctaatatgtaaatataaagtcgactgtgaagccgtacgaggcgacattttcaatcaggttgttcctcggtgccctcggtgtcctgccgatgaacccctggcaattatgaagccagagatcgtcttctttggggaaaaccttcctgaacagttccatcgagcaatgaaatacgataaggacgaagtcgacctgcttatagtaatcggaagcagcttgaaggtgaggcccgtcgcgctcattcctagctctatccctcacgaagtgccacagatattaattaatagggaacccctcccacacttgcactttgacgtagaactactcggcgactgtgatgtaattatcaacgaattatgccataggctgggcggagagtacgcgaagttatgctgcaacccggtgaagctgagcgaaatcacggaaaaaccacctcggacacaaaaagaactagcctaccttagtgaattacccccaacccctctacatgtgtccgaagactctagcagtcccgagcggacgtctccgccagacagtagcgtgatagtcactctattggaccaagcggcaaaatctaacgacgacctggatgtgtcagagagcaagggctgcatggaagagaaaccacaggaggtccagacctcacgaaatgtcgagtccattgctgaacagatggaaaatcctgacttgaagaatgtgggtagctctacgggagaaaagaacgagagaacgtctgtagccggaaccgtgagaaaatgctggccaaaccgggtggctaaggagcagatctctaggcgcttggacggaaatcagtatctgttcttaccccctaatcgatatatttttcacggcgctgaggtgtacagcgactccgaggatgacgtattaagcagcagcagctgcggctccaacagtgactcaggcacttgccaaagcccttctctagaggaacccatggaggacgagagcgagatcgaagaattttataatggactggaggacgagcctgatgtgccagagagggccggaggagccggattcggtacagacggggatgatcaggaggcaattaacgaagctatttcggtgaagcaggaagtcaccgatatgaactatccgagtaataagtcttag

SEQ ID NO: 244504 - DNA, 2553 bp, synthetic construct
  misc_feature 1..2553: note = Description of Artificial Sequence: Synthetic coding sequence
  source 1..2553: mol_type = other DNA
atgaccagccactatgtgatcgccattttcgccctgatgagctcttgtctggcaacagctggtccagagcccggagcactgtgtgaattatcgccagtatccgcctcgcaccccgtgcaggcattgatggaaagttttaccgtgctctcggggtgtgccagccgagggacaacaggattgccccaagaggtgcacgtactgaatctgagaaccgccggacagggtcccggacaactgcagagggaagtaactctacacttgaaccctatcagctcggtccatatccatcataagagtgtggtgttcctgttgaacagccctcaccccctggtgtggcacctcaaaactgaaaggcttgcgactggggtctctaggttgtttctggtctctgaaggatccgtcgtgcaatttagctcagctaacttctcactgacggcggagaccgaggagaggaattttccccatggaaacgagcacctgctcaactgggctcggaaggagtacggagccgttaccagctttaccgaactaaagatcgctagaaacatctatattaaagtcggcgaggatcaagtattccccccaaaatgcaacattgggaagaattttctttctcttaactatcttgcagaatatctccagccgaaggctgccgagggttgtgtcatgtccagccaacctcaaaatgaggaagtccacatcatcgagctgattacacccaatagcaatccttacagtgccttccaggtcgatatcactatcgatatacgcccaagtcaggaggacctggaagtcgtgaagaacctcattctgatcttaaagtgcaagaaaagcgtcaactgggtcatcaaatcattcgatgtgaaaggctctttaaaaatcattgccccaaattccatcgggttcggcaaagaaagcgagcgctccatgaccatgacaaagtccattcgcgacgacataccgagtacacagggaaaccttgttaagtgggcccttgacaacgggtactcccccatcacaagttatacgatggctccagtagctaaccgattccatctgcggctggaaaataacgaagagatgggggatgaggaggtgcatactattcccccagaacttcgtattctacttgaccctggtgccctgcccgcattgcaaaatccgccaataaggggcggtgaaggccagaatggaggactccctttccctttccctgacatttcaaggagggtgtggaacgaggagggggaagacgggttacctcgccctaaggatccggtgatccccagtattcagttgttcccagggctgagagaacctgaagaagttcagggtagcgtggatatcgcactgtctgtgaagtgtgacaacgaaaagatgattgtggcagtagagaaagatagcttccaggccagcggatacagcggaatggacgtgactctgctggaccctacttgtaaagccaagatgaacggcactcactttgtgctggaatccccattaaatggttgtggtaccagacccaggtggtcggccctggatggtgtggtttactataattccattgtaatccaggtccccgcattaggtgactcctcaggctggccggacggctacgaggatctagaatccggggacaatggctttccaggtgacatggacgaaggcgacgcttctctgttcactaggcccgaaatagtggtgtttaattgttccctccagcaggtgaggaacccatcttcattccaagaacagccacacgggaacatcacttttaacatggaactatataatactgatcttttcctcgtgccctcacagggtgtcttctcggtcccagagaatggtcatgtctatgtcgaggtaagcgtgacaaaggctgaacaggagctgggattcgcgatccagacgtgctttatttcgccgtacagcaacccggaccgtatgtcccactatacaatcattgaaaatatatgcccaaaggacgaaagcgtgaaattctactctcccaagcgtgtacattttccaattcctcaagcagacatggacaaaaagcgcttttcatttgtcttcaagcccgttttcaacacttccctgctgttcctccagtgcgagcttactctttgtaccaagatggagaaacatccacaaaaactccctaagtgcgtgccacccgatgaagcatgtacctccctggacgcctcaataatttgggcgatgatgcagaacaaaaagactttcacaaagcccctggccgttatccatcatgaagcggagagtaaagaaaaaggaccatcaatgaaagagcctaatcctatttccccacctatcttccatggactggacaccttgaccgttatgggcatcgctttcgccgcatttgttatcggggctctgctgacgggggctttatggtatatctactcccacactggcgaaacggccggacgccagcaggtgcctacgtctcccccagcaagcgagaactcttctgccgcacacagcattgggtctacacagtcaactccatgctcatcatcttccacagcctag

SEQ ID NO: 244505 - DNA, 108 bp, synthetic construct
  misc_feature 1..108: note = Description of Artificial Sequence: Synthetic coding sequence
  source 1..108: mol_type = other DNA
atgactagccactatgtgatcgccatcttcgctctgatgagttcgtgtctggctactgctggaccagaacctggcgctctttgtgagctttccccagtctcagcctag

SEQ ID NO: 244506 - DNA, 2553 bp, synthetic construct
  misc_feature 1..2553: note = Description of Artificial Sequence: Synthetic coding sequence
  source 1..2553: mol_type = other DNA
atgaccagccactatgtcatcgccatttttgctctgatgagctcatgtttggcgaccgctggtcccgaacccggagcactgtgtgaactcagtcccgttagcgcgtcccatcccgtccaggcactgatggaatctttcaccgtgctgtctggctgcgcctctcggggaactaccggccttccccaggaagtacatgttcttaaccttagaactgccggacagggacctggtcaattgcaaagggaggtgacactgcacctgaatcccatcagctccgtccacattcaccataagtctgtggtcttcctgcttaattccccacatcctctcgtctggcacctaaagacagaaagactggcaaccggggtctcccgcttatttctcgtcagtgagggttctgtcgtccagttcagtagcgctaacttttcactgactgccgagactgaagaaaggaatttcccacacggcaacgagcacctcttaaactgggctagaaaagaatatggggcagtgacgtcctttactgagctcaagattgccaggaatatatacataaaggtgggtgaagatcaggtctttcctcccaagtgcaacatcgggaagaactttctgagcctgaactacctcgcagaatatctgcagccaaaggccgcagagggatgcgtgatgagctcccagcctcagaacgaggaggtgcacattatcgagctaataacgcccaattctaatccatattccgcctttcaggtcgatattacaatcgacatccgtccctcccaggaggatctggaggtagtgaagaatttgatcctgatattaaagtgcaagaaatctgtcaactgggtgattaaatcctttgacgtgaaaggatcattaaaaatcatcgcgccaaacagcatcgggttcggaaaggaatccgaacggtccatgactatgactaaatctattagggatgacatcccctccacacagggcaacctggtcaagtgggctctggataacggttacagccccatcactagttacacgatggcgcctgtcgcaaaccgctttcacctgcgtcttgaaaacaatgaggagatgggagacgaagaggtgcacaccattccacccgagctccgcatcctccttgacccaggagcactgccagctctgcagaacccacctatccggggtggagaggggcagaatggtgggctgcccttcccctttcccgacatatcaagaagggtatggaacgaagaaggtgaggacggcctgcccagaccaaaagatcctgtgatccccagcatacagctctttccgggattgagggaacccgaggaggtgcaggggtctgttgatattgcccttagcgtaaaatgcgacaacgagaagatgatcgtggccgtggagaaagacagtttccaagcatccggctactctggaatggacgtgactctcttggatcccacgtgcaaggccaagatgaacggcactcactttgtgctggagagcccactcaacggttgtggaacacgtccacgttggtccgcacttgacggtgttgtctactacaacagcatcgttatccaggtaccagctctaggggactctagtggttggcctgacggttacgaagatttggaatcaggcgataacggcttccctggggacatggatgaaggtgatgcctccttgttcaccagacctgaaatcgttgtgttcaattgtagcttgcagcaggtacgaaatccgtctagctttcaggagcagccacatggcaatattacgttcaacatggagctgtacaatactgacctgtttctggtgccctctcaaggtgtgttctccgtgcccgagaatggtcatgtctatgtcgaagtgtcagtgactaaagcagagcaggaactgggtttcgcaatccagacatgtttcatctccccttatagtaatcccgacaggatgtcccactacactatcatcgaaaatatctgtcccaaagacgagtctgttaagttttacagtccaaagcgggtccattttcctataccgcaggctgatatggataaaaaacgcttctcattcgtgtttaaaccagtcttcaatacctccctcttgtttctgcagtgcgaactgacgctctgcacaaagatggaaaaacaccctcagaaattacctaaatgcgttcctcctgacgaggcttgcacttctcttgatgcaagtatcatttgggcaatgatgcaaaacaagaaaacttttacgaaaccactggccgttatccaccatgaagccgaatccaaagaaaaaggaccatctatgaaagaacccaatcctatttctccacccatcttccatggactcgacaccctcacagttatgggcatagcattcgcagcatttgtgatcggggctttgctgaccggggctctgtggtatatttacagccacaccggtgaaaccgcaggtcgccagcaagtgcctacatcccctccagcctcagagaattcttcagccgctcattctatcgggagcactcaatccacaccttgttcgtcatccagcacggcatag

SEQ ID NO: 244507 - DNA, 2556 bp, synthetic construct
  misc_feature 1..2556: note = Description of Artificial Sequence: Synthetic coding sequence
  source 1..2556: mol_type = other DNA
atgacatctcattatgtgatagccatcttcgccttgatgagcagctgtttagccacagctggacccgaaccgggtgcattatgcgaactctctcccgtttctgcctcgcaccctgtacaggctctgatggagtccttcaccgttctgtccggctgcgcctccaggggaacaacagggctccctcaagaagtgcatgtcctgaacctcagaactgcaggccaaggtccaggacagctgcagagagaagtgactctacacctaaaccctatttcttcagtccacattcatcacaagagcgtagtattcttgctcaactcccctcaccctctcgtctggcaccttaaaactgagaggttagccaccggtgtgagtcgcctgtttctggtgagtgagggatccgtggtgcagttttccagtgccaatttctcactgactgccgagactgaggaacgcaattttcctcatggtaacgagcatctactgaactgggcacgcaaggagtacggggcagtcacaagcttcaccgaacttaaaatcgctcgaaacatctacatcaaagtgggcgaggaccaagtctttcctccaaaatgcaacattgggaaaaacttcctgagtctaaattacttggctgagtatcttcagcctaaggcagcggaaggctgtgtgatgagttcccagccacagaatgaggaggtccacatcattgagctgataacccccaattccaacccatattccgccttccaggtcgatatcaccattgacataagaccaagtcaggaagatttggaggtggtcaaaaatctgattctgattttaaagtgcaaaaaatccgtcaactgggtgatcaagagttttgacgtaaaaggtagcctgaaaatcatcgccccaaactccatcggcttcggaaaggaatcggagagaagcatgacaatgactaaatccatcagagatgatatacctagcacgcagggaaatctcgttaagtgggccctagacaatggatactcccccattacatcctacaccatggcaccagtggctaatcgttttcatctgcgcctcgagaacaatgccgaggagatgggagacgaagaagtccatactatccccccagaactcaggatccttctggaccctggagctcttcctgcgctccagaaccccccaattagaggcggtgaaggccagaatgggggacttccatttccatttcccgacattagccggagagtgtggaatgaggaaggggaggatggactgccaaggccaaaagatccggtcatcccaagcatccagctgttccctggactcagagaaccagaagaggtgcagggatccgttgacattgcgctgtccgtcaagtgcgataatgaaaagatgattgtggctgtggaaaaagactccttccaggcttcaggctactcgggtatggacgtgacactcctcgacccgacctgtaaggccaagatgaatgggacgcacttcgtcttggagagcccactgaatggctgtggtacaagaccacgctggtcggctctggacggagtggtgtattataacagtattgtgatccaggttcctgccctgggagattcttctgggtggcccgacggctatgaggatctggagtccggcgacaatggatttcctggggatatggacgagggcgatgccagtctcttcactcgccctgaaatcgtcgtttttaattgttccctccagcaggtacggaatccctcctcctttcaggagcagcctcatggcaatataactttcaatatggagctatataacacggatctgttcctcgtgccttcccaaggcgtgtttagcgttccggagaatgggcacgtgtatgtggaggtgtctgtgactaaggccgagcaggagctcggcttcgccatacagacttgtttcatcagtccctattctaatccagacagaatgtctcactataccattatcgagaacatctgccctaaggacgaatccgtgaaattctattcccctaagagggtccatttcccaatcccacaggcagacatggacaagaaacgattctcattcgtgttcaaaccagtgttcaacacaagcctcttattcttgcagtgcgagctcaccttatgcactaaaatggaaaaacacccacagaagttgccaaagtgtgtccctccggatgaagcatgcacttctctggatgcttctattatatgggctatgatgcaaaataagaaaacgttcacaaagccccttgccgtgatccaccacgaggccgagagcaaggagaagggcccttccatgaaagaaccaaaccctattagccctccaatctttcatggcctcgacacacttactgtgatgggaattgcattcgccgcatttgtcattggagctctgttaacaggagcactgtggtatatctattcccacaccggtgaaacagcaggtagacagcaggtccctacctcacctcctgcgagcgaaaactcctctgccgcacattccatcggatcaacacagtctaccccgtgctcttcttcatccacagcctag

SEQ ID NO: 244508 - DNA, 2052 bp, synthetic construct
  misc_feature 1..2052: note = Description of Artificial Sequence: Synthetic coding sequence
  source 1..2052: mol_type = other DNA
atggcgctgttcgttcggcttttggccctggccctggccttggccctcgggccagccgctactttggccggtccagccaagtcaccgtatcagctggtgttgcagcatagtcggctgagggggaggcaacatggtccgaacgtatgcgcagtacagaaggtaataggaacgaatcggaagtattttaccaactgcaagcagtggtatcaaaggaagatttgcggaaagagcacagtgatctcatacgagtgctgccctggctatgaaaaggtgcctggagagaagggctgcccagccgctttgcctctgagcaacctgtatgagaccctgggagtggtaggatctaccactacacaattatatacagatagaacagagaaattaagaccagaaatggagggcccagggagttttacaatatttgcgccaagtaacgaggcgtgggccagcctgcccgctgaggttctggactctctggtgagcaatgttaacattgagctgctcaatgcccttagataccatatggtgggccgtcgagtgctgactgacgagctgaagcatgggatgactctgactagcatgtaccaaaatagcaatatacagattcaccactaccccaatggaattgttactgtaaattgtgccaggctcttgaaggcggatcaccacgccaccaacggagtggtccacttgattgacaaggtaatttctaccatcacgaataacatccaacagattatagagattgaggatacgtttgaaactctccgtgccgctgtggccgcatctgggctgaataccatgctggagggcaatggacagtacactctgcttgcccctacgaacgaggcatttgaaaagattcctagtgagacccttaaccgaatattgggcgaccctgaagcgttgcgtgacctcctgaataaccacatcttaaagtctgcaatgtgtgccgaggcaattgtcgctggactgtcggtggaaaccctggaagggacaaccctggaggtggggtgctccggggacatgctgacaatcaatggcaaggccattattagcaataaagatatactggcaaccaacggcgtcatccactacatagatgagttgctgattcccgactcggctaaaaccctgtttgagctggccgcagaaagcgatgtgtccactgcgatcgatctgttcagacaagctggcctcgggaatcaccttagtggctctgaacggctgacgctgctggctcctctgaactctgttttcaaagatgggacaccacctattgatgctcacacaagaaatctgctgcgaaaccacattattaaggaccagttggcctctaagtacctctatcatggccagacactggaaacactcggcggaaagaaactccgggttttcgtgtacaggaactctttatgtattgaaaattcctgcattgccgcacacgataagagaggcaggtacggcaccctgttcactatggaccgggtcctgacgcccccaatgggcactgtgatggacgtgctgaagggggacaacagattctcaatgctcgttgctgccattcaatctgctggactcacagaaacattgaaccgggaaggggtatatacagtatttgccccaactaacgaagcatttcgggcactccccccacgcgagcggtctcgcctactcggggatgcaaaagagctggccaacatcctgaaatatcacatcggcgacgagattttagtatccggtgggataggagcactggtacgcctgaagtccctgcagggtgacaagctggaagtgagcctgaagaacaacgtagtgtcagtgaacaaggagcctgtagcagaacctgacatcatggccacaaatggtgtggtccacgtgatcactaatgtgctgcaaccacccgcaaatcgcccacaggagagaggagatgagctcgccgactctgccttggagatttttaaacaggcctccgcgttctctagaccggagcagcctcaggttctgtgcagtcctgtctaccagaaattgctggagcgtatgaaacactag

SEQ ID NO: 244509 - DNA, 1251 bp, synthetic construct
  misc_feature 1..1251: note = Description of Artificial Sequence: Synthetic coding sequence
  source 1..1251: mol_type = other DNA
atgctagagggcaacgggcaatatacactgcttgctcccactaacgaggccttcgagaagataccatctgagactttgaaccgcatcctgggcgatcctgaggctctgagagatctgttaaacaatcatattctgaaatctgcgatgtgcgctgaggcaattgttgctgggttgagcgtggagacattagagggcacaaccttagaggtggggtgctctggggacatgctcaccatcaacggcaaagcaatcatttcaaataaggatatattggccacaaacggcgtgattcattatatcgatgagcttctcatcccggatagcgcaaaaacactgtttgagctcgctgccgaatccgacgtctcaaccgctattgaccttttccggcaggctggcctgggtaaccacttatccggatcagagcgactcacactgttggcacccctaaacagcgtatttaaggatggcacccctcctatcgatgcgcacacaagaaacctgctgaggaatcatattatcaaggatcagcttgcaagtaagtacctgtatcatggacaaacccttgaaacgctcgggggaaagaagctccgagtttttgtatatcgcaacagcctgtgtatagagaactcttgcattgccgcacacgacaaaagaggacgctacgggaccttatttacgatggacagggtgctcacaccaccaatgggaactgttatggacgtgttgaagggcgacaaccgcttctcaatgctggtggcagcaatccagtcagcgggattgaccgagacgttgaatagggagggggtgtataccgttttcgcacctacaaatgaggcttttagggcattgccaccccgagagcgaagccgcctgctgggcgacgcaaaggagctggcgaatatcttaaagtaccacatcggcgacgagattctggtttctggtggaataggggctctggttcgcttgaagtctctgcagggggataaactggaagtatcgctgaaaaacaatgtggtgtcagtgaataaggaacccgtggcggagcctgatattatggcaaccaatggagtcgtgcatgtgattaccaatgtgcttcagccgccagccaacaggccccaggagagaggggatgagctggccgattccgcacttgagatatttaaacaggccagcgcctttagcagggcatctcagaggagcgtccgcctcgcccctgtgtaccagaagctgttggagagaatgaaacactag

SEQ ID NO: 244510 - DNA, 2052 bp, synthetic construct
  misc_feature 1..2052: note = Description of Artificial Sequence: Synthetic coding sequence
  source 1..2052: mol_type = other DNA
atggcgttgtttgttcggttgctggcgcttgccctggctctggctctaggaccagcagcaacactggcaggccctgccaaatccccttatcaattggttctgcagcactccagattgcggggacgacaacacggacctaatgtatgtgccgtccagaaagttatcggtactaatcgcaagtatttcaccaattgtaagcagtggtatcagaggaagatatgtggcaagagcaccgtgatcagctacgaatgttgcccaggatacgagaaagtacccggtgagaaagggtgccccgcagccctccctctgagcaacctttacgagaccctgggtgtcgttggaagcactacaacccagctgtatacagatcgaacagagaagctccgcccagaaatggaggggcctggatcatttactatcttcgcaccatccaacgaagcttgggcgagcctccctgcagaagttttggactccctggtgtctaacgttaatatcgagctgctgaacgcattgcgatatcacatggttggcagacgggtgctgactgatgagctgaagcacggtatgacactgacaagcatgtatcaaaacagtaacatccagattcaccactacccaaacggcattgtgactgtgaattgtgctcggctacttaaggctgatcaccacgctacgaatggggtcgtccacctgatagacaaggtgatcagcacaataacgaataacatacagcaaatcatagagattgaggacacttttgaaaccctgagggctgcggtggcagcctctggcctgaacaccatgttggagggcaatgggcagtacacccttctggcccctaccaacgaagccttcgagaagattccaagtgaaactctcaaccgcatccttggtgacccagaagcgctgcgtgacttactcaataatcacatcttaaaaagtgctatgtgcgccgaagctattgtggccggtctgtctgtggagaccctcgagggcaccactcttgaggtgggttgctctggcgatatgctaactatcaatggtaaagctatcataagtaacaaggatatcttagctacaaacggcgttatccactacattgacgaacttctaatacccgattcagccaagacacttttcgaactggccgcagagtctgatgtctcaaccgctatcgacctgtttcggcaagctgggctgggcaaccacctttcaggtagcgagaggttaaccctgctggccccactgaatagtgtttttaaagatggcactccaccaatcgacgcccatacgagaaacttgttgcgtaaccacatcatcaaggaccagctggcctcgaagtacttataccatggacagacattggagactctggggggaaaaaagcttagagtgttcgtgtatcggaattccctgtgtatcgagaactcctgtattgccgctcacgataaaagaggtcgctatggcactctgtttactatggatcgggtactgacgcctccaatgggtacagtgatggatgtgttgaagggggataataggttctcaatgctggtcgctgccatccagtccgcgggtctgaccgagactctcaatcgtgagggcgtctatactgtcttcgctccaaccaatgaggcctttcgcgctttaccacctagggagaggtccaggcttctgggcgacgccaaggagctggccaatatactgaagtatcacatcggggatgagatattggtctctggagggattggagcactggtcagactcaaaagcctacagggagataagcttgaggtgagcctcaaaaacaacgtggtatccgtaaacaaggaaccagttgctgagcctgatatcatggctaccaacggggtagtccatgttatcaccaacgtgctgcagcccccagctaaccgtcctcaggaacgcggtgatgaactggccgatagtgcccttgagatatttaagcaggctagcgcctttagccgcgcttcccagcgttcagtgcggctggccccagtctaccaaaagctgttggaaaggatgaaacactag

SEQ ID NO: 244511 - DNA, 1188 bp, synthetic construct
  misc_feature 1..1188: note = Description of Artificial Sequence: Synthetic coding sequence
  source 1..1188: mol_type = other DNA
atggccttcagtccctggcagattctgtctccggtccagtgggcaaaatggacgtggagcgccgtccggggaggtgccgcaggcgaagacgaggccggaggtccagagggggaccctgaagaggaggactcgcaggccgaaaccaagtctctttcctttcgcagtggttgtaaagtaaagaagcacgagacccagtcactggctctcgatgcatgttcccgcgatgagggcgctgtcatatcacagatctccgatatctccaaccgcgatggacacgccactgatgaagaaaaattggcaagcacctcatgtggacagaagtcagctggggctgaagtcaagggtgagcctgaggaagatctcgaatactttgagtgttccaatgtgcctgtgtccacaatcaaccatgccttcagctcaagtgaagcaggaattgagaaagagacctgccaaaagatggaggaggacggctctacagttctcgggttactggaaagcagcgctgaaaaagctcctgttagcgtgagctgcgggggagaatcccccctggacggaatctgcctctctgagtccgacaagacggcagtactgacactgattagggaagagatcatcaccaaagaaatagaagcaaatgaatggaaaaaaaagtacgaagaaactaggcaggaggtgctggaaatgaggaagatcgttgcagagtacgaaaagactatagcacagatgattgaggatgagcagagaacttccatgacttcacagaaatctttccagcagctgaccatggaaaaagagcaggccctggcggatctgaatagtgtagaaagaagtctatccgacctgtttcggagatacgagaacctcaaaggtgttctcgagggattcaagaagaatgaagaggcccttaagaagtgtgcacaggattacttggccagagtaaagcaagaggagcagaggtaccaggcccttaaaatccacgccgaagaaaagctggacaaggctaacgaagaaatcgcccaagtgcgtaccaaagccaaagcagagagtgcggcactgcacgcgggattaaggaaggaacagatgaaggtggagtccctcgagagagctttgcagcaaaagaatcaggagatcgaggagctcactaaaatttgcgacgagctgatcgcgaaattagggaagaccgactag

SEQ ID NO: 244512 - DNA, 2418 bp, synthetic construct
  misc_feature 1..2418: note = Description of Artificial Sequence: Synthetic coding sequence
  source 1..2418: mol_type = other DNA
atggccttcagtccttggcagatcctctctcctgtgcagtgggcaaaatggacttggagtgccgtccgcggaggagcagcaggcgaggatgaggcaggagggccagagggcgatcctgaggaggaggattcccaggctgaaaccaaaagcctttcctttagcagcgacagcgagggcaattttgagacaccggaggcagaaacacctattcgctctcccttcaaggaaagctgtgaccctagcctgggccttgctggcccaggcgcaaaaagccaggagtcacaagaagcagatgagcagctcgtcgcagaggtggtggagaaatgtagctcaaaaacctgctccaaaccatccgagaacgaggtcccccagcaagctattgattctcactcagtcaaaaactttcgggaggaacccgaacacgacttcagcaagatttccatcgtgagacctttcagtatagagaccaaggactcgacagatataagcgccgtcctcgggaccaaggccgctcacggctgcgtcaccgccgtgtctggaaaggcccttccctcctcacctccagacgccctgcaggatgaggctatgactgagggctccatgggagtgacccttgaggcttcggctgaagcagatcttaaagccggtaactcctgccctgagctggtgcccagtcgacgaagcaagcttagaaaaccaaaacctgttcctctgcggaaaaaagctatcggcggagagttttcagacaccaatgcagcagtcgaggggacacctcttcccaaagctagttatcacttttcccctgaggagctggacgaaaatacaagcccactcctgggggacgcgcgtttccagaaatccccaccagaccttaaggaaacacctggcacactgtccagcgacacaaacgactctggcgtcgagctgggggaggaaagcagatcatctcctctaaagttggagtttgactttacagaggacactgggaacatagaggcaagaaaggcgcttccccgaaagttgggtagaaaactggggtccaccttgacgcccaagatccagaaggatggaatcagtaagagtgctggactggagcagcccacggaccctgttgccagggatggacctctgagtcagacaagttccaaacccgatcccagccagtgggagtccccatccttcaaccccttcggctcccattccgtgttacagaatagcccgccactgtccagcgaggggtcctatcatttcgaccccgacaactttgatgagtccatggaccccttcaagcctaccactaccctcacgagctctgacttttgcagcccaaccgggaaccatgtcaatgaaattctcgagagccccaaaaaggccaagagtcggttaatcacgtcaggctgtaaagtgaagaagcatgaaactcagagcctggctctcgatgcctgctccagggacgagggggcagttatcagtcagatttctgacatcagcaatcgggacggtcacgcaacagatgaggagaagttagcgagcacttcttgcgggcagaagagtgctggtgccgaagtgaaaggcgagcccgaagaggacctggaatatttcgagtgttctaacgtgccggtatccaccatcaatcacgccttctcttccagcgaggctgggatcgagaaagagacttgtcagaaaatggaggaagacggctcgacggtgctaggcctcctggagtcttccgcggaaaaggctcccgtgagtgtcagttgcggtggtgagtctcccctggatggcatctgcctaagcgagtctgacaagactgcggtgctgacactgatcagggaagaaattattacaaaagaaattgaggcaaacgaatggaagaagaaatatgaggaaacaaggcaggaagtgttagagatgagaaaaattgtcgccgagtacgagaaaacaatcgctcaaatgattgaggacgagcagcgcactagcatgacgtcccaaaagagcttccagcagctgactatggaaaaggagcaggcgcttgctgacctcaactcagtggagaggagcctgtctgacctctttcgcaggtatgagaatttaaagggcgttcttgagggatttaagaaaaatgaggaggccctgaagaagtgcgcccaggattacctggctagagtcaagcaggaggagcagaggtaccaggcactgaagatccatgctgaggagaaactcgataaggcaaacgaagagatcgcccaggtgaggactaaagctaaggccgaaagcgctgctttacatgccggattgcggaaggagcagatgaaagtagagtcgctcgagcgagctttgcagcagaagaatcaggagatcgaagaactgacaaaaatttgcgacgaactgatcgccaaattagggaagacagattag

SEQ ID NO: 244513 - DNA, 1140 bp, synthetic construct
  misc_feature 1..1140: note = Description of Artificial Sequence: Synthetic coding sequence
  source 1..1140: mol_type = other DNA
atgggtggatctcactctcaaactccccgaggaagggagcctgccggagaaagacatccacgcccaactgaaacggcaaccacagagcaggtaaaatttttgtgctttctgttaagcggctgtaaggtaaaaaagcacgagacacagagcctagctctggacgcctgctcccgggatgagggggcagtcatctcccagatctccgacatttctaatcgagatgggcacgcgaccgatgaagaaaagttggcatctacctcctgcgggcagaagtcagccggtgccgaggtcaagggtgagcccgaagaggatcttgagtactttgaatgctcaaacgtgccagtgtctaccatcaatcacgccttctcatcttccgaggctggtattgaaaaggaaacatgccaaaagatggaagaggacggcagcaccgtgttaggattactggagtcctctgccgagaaggcccctgtttctgtctcgtgtggcggtgaatcaccactcgatggtatctgcctgagcgaaagcgataaaactgccgtactgacactaatcagagaagagatcattaccaaggagatcgaggcaaatgaatggaaaaaaaagtacgaagagactaggcaggaggttcttgagatgcgtaagattgtcgcagaatacgagaagactatcgcccagatgattgaggacgagcagcggacttctatgacgagccagaaatctttccagcagctgactatggaaaaagaacaggccttggcagatctgaactctgtggaaaggagcctctctgacctgttcagacgatatgaaaacctgaagggggtgctagagggcttcaagaagaacgaggaagccctcaagaaatgtgcgcaggattatcttgcccgagttaagcaggaagaacagcgttatcaggccctcaagatccatgcagaagagaaactcgacaaggccaacgaggaaatagcacaggtcaggacaaaggctaaggccgagagtgctgcccttcacgccggactgcggaaggaacagatgaaggtagagtccctcgaacgggcattgcagcagaaaaaccaagagatagaagagcttactaagatttgcgacgagctcattgcgaagctgggtaaaactgactag

SEQ ID NO: 244514 - DNA, 1104 bp, synthetic construct
  misc_feature 1..1104: note = Description of Artificial Sequence: Synthetic coding sequence
  source 1..1104: mol_type = other DNA
atgggtgggtctcactctcagacccctcggggacgagaacctgcaggcgaaagacatccaaggcctaccgagaccgccagtggctgcaaggttaagaaacacgaaacacagagcctggctctggatgcatgttccagagatgagggtgccgtgatcagccagatctccgatatctcaaatagggatggccacgcaacggacgaggaaaagctggccagtacttcatgtggtcagaaaagtgctggcgctgaggtcaagggggagccagaagaagatctggaatattttgagtgcagcaacgtccccgtgagtacaatcaaccacgcattcagtagctctgaggctggaatcgaaaaggaaacatgccagaagatggaggaagatgggagtaccgtgctgggcctcctggaatcatctgctgagaaagccccagtcagcgttagctgcgggggtgaaagccctctggacgggatctgcctgagtgagagtgataagaccgcagttttgacactgatcagggaggaaattatcaccaaagaaatcgaggctaatgaatggaagaagaagtacgaggagacacgccaggaagttttggaaatgaggaaaatcgtggccgagtatgagaaaaccatagcacaaatgattgaagatgaacaacgcacttccatgacctcgcagaagagcttccaacagctgaccatggagaaggagcaggccctagctgatttaaactcagtggaacggtcactctccgacttattccggagatatgagaacctgaagggagtgctggagggcttcaagaaaaacgaagaggcccttaagaaatgcgcccaagactacctggccagagtcaagcaggaggaacagcggtaccaggctctcaaaattcacgcagaagagaagctagataaggctaatgaggaaattgcacaagttaggaccaaggcgaaagccgaaagtgccgcattgcacgcaggcttacgcaaagaacaaatgaaagtggaaagcctggaacgtgcattgcaacagaagaatcaggaaattgaagaactaacaaagatctgcgacgaacttatagcaaagttaggcaaaacagactag

SEQ ID NO: 244515 - DNA, 2454 bp, synthetic construct
  misc_feature 1..2454: note = Description of Artificial Sequence: Synthetic coding sequence
  source 1..2454: mol_type = other DNA
atggcattttctccatggcagattttgtcccccgtgcagtgggccaagtggacatggtcagctgtgagaggcggagccgctggagaagacgaggccggtgggccagagggtgaccccgaagaagaggacagccaggcagagactaagagcctgtctttctcctccgactccgagggcaatttcgagacaccagaggcggaaacccctatccggagcccctttaaggaatcatgcgatccaagtctgggcctggccggaccaggagcaaagtctcaggagagccaggaggcggatgagcaattggtggcagaggtagtggaaaaatgttcatccaagacatgttctaagccttccgaaaatgaggtaccccaacaggcgatcgattcccacagcgttaagaattttagggaagagccagagcacgacttttccaaaatttctatcgtgaggccattcagcatcgaaaccaaagacagcaccgacatctctgccgtcctcggaactaaggctgcccatggctgcgttactgccgtgtcaggaaaggctctcccctcctctccccctgatgccctacaggatgaggccatgacggagggctctatgggtgtgacactcgaggcctccgccgaagcagacctgaaagccggaaattcatgtcctgaactggtgcccagtcggaggtccaagctgcgtaagcccaagcccgtacctctgcggaaaaaggcgattggaggcgaattttctgatactaacgcagctgttgaggggactcctctgcctaaggcctcatatcactttagcccagaggaactagacgagaatacatcaccactgttgggggatgcaagatttcagaagagtcctcccgatctgaaagaaaccccgggaaccctgagctccgacaccaacgatagcggtgttgagctgggggaagagtctaggtcaagtccgctgaaacttgagttcgactttaccgaagatacaggaaatatagaggctaggaaggccctgccacggaaacttgggagaaagctcggtagtacccttacgccgaaaattcagaaagacggtatctcgaagtcggccggtctggagcagccaacggatcctgtagcacgggatggccctctgtcgcaaaccagcagcaagcctgatccaagccagtgggagtccccctcttttaacccattcggttcccattcagtgttgcagaactctccacctctatcctcagaagggtcctatcattttgacccagataactttgatgaatccatggatccatttaagcctactacaacactcacatcttccgacttctgttcccccacaggcaatcacgttaacgagattctggaaagtcccaaaaaggctaaatcgcgcttgattaccactaccgagcaggtcaagtttttatgcttccttctctcaggatgcaaggttaagaagcacgagacgcaaagcctggcactcgatgcctgtagtcgggatgaaggagcagttatctctcagatttctgatatatcgaatagggatggtcatgctacagacgaagaaaaattggcttcaacgagttgtggccagaaaagtgccggagctgaggtaaagggggaaccagaagaagacctggagtacttcgagtgttccaacgtgcccgtgtcaaccatcaaccacgcattttccagctcggaagccggaatcgagaaagagacctgtcagaagatggaggaggacggatcaacagtattgggcctactggagagcagcgccgagaaagctccagtgtcggtgtcttgcggcggagagtctccgctagacgggatatgtctttccgagtcggacaagacagctgttctcacactgatccgagaagagatcattaccaaggagatcgaggccaatgagtggaaaaaaaaatatgaggagaccaggcaggaggtgctcgaaatgaggaagatagtggccgagtacgagaagactatcgcccagatgatcgaggatgaacagagaacttcaatgaccagccagaagtccttccagcaactcactatggagaaagaacaggccctggcagacctcaattcagtggagcggtctctgagtgacctcttcaggaggtatgagaatttgaagggggtgctcgagggttttaagaagaatgaggaggctctcaagaagtgcgcgcaggactacctggccagagttaagcaggaggaacaacgctatcaagcccttaaaattcacgctgaggaaaaacttgacaaagcaaacgaggaaatcgcacaggtcaggaccaaagcaaaggcagaatccgctgctttgcacgcagggctgcgcaaggagcaaatgaaagttgagtccctcgagagggctcttcagcagaagaaccaggaaatcgaggagctgacaaaaatttgcgatgagcttatcgccaagcttggtaagaccgactag

SEQ ID NO: 244516 - DNA, 2379 bp, synthetic construct
  misc_feature 1..2379: note = Description of Artificial Sequence: Synthetic coding sequence
  source 1..2379: mol_type = other DNA
atgcaacggcagactatcaagggggctggggcaggcggtgctgcactgatggccttttccccatggcagatcctttctcccgtgcagtgggcaaaatggacttggtccgctgtgcgcggaggtgccgctggagaagacgaggcgggagggccagagggcgaccccgaagaggaggacagtcaagcagagacaaagagcctgtccttctcctcagatagcgaaggcaatttcgaaactcccgaagccgagacacccattcgttcaccttttaaggagtcctgtgatccttcactgggactcgcagggcctggtgccaaaagccaggaaagccaggaggccgacgagcagttagtagccgaagtcgtcgaaaaatgcagctccaaaacctgctctaagccatcagaaaatgaggttccccagcaggcaatcgactcacactccgtcaagaattttcgcgaagaaccagaacatgacttcagtaagattagcatcgtgcggccattctcaatcgagactaaagacagcactgatatttccgcagtgctgggtactaaggccgcacatggttgcgtgactgctgtatccggaaaggctcttccaagctctccgcctgacgcattacaggacgaggctatgacagaaggaagcatgggggtcacactagaagccagcgcagaggctgacctgaaagcgggtaacagttgtcccgagttggtcccttcacgaagatctaagctccgaaaacctaaaccagttcccctcagaaaaaaagccatcggaggtgaattttccgataccaatgccgctgttgaggggacccccctacccaaagcttcttatcactttagtcctgaggagttagatgaaaacacttctcctctcctcggcgatgcacggttccagaagtcccccccagatctgaaagagacacccggaactctcagcagcgatacaaacgactctggggtggagctgggcgaggagtctaggtctagtcccctgaaactggagtttgattttaccgaggatacaggcaacatcgaagcacgcaaggcccttcccagaaaacttgggcgtaaactgggatcgacacttaccccaaagattcaaaaggatggaatctccaaaagtgcgggattagaacagcctacagaccctgtggccagagacggacctcttagtcagaccagcagtaaacccgatccaagccagtgggaatcacccagttttaacccctttggcagtcactcagtattgcagaacagccctccattgagttctgagggttcttaccactttgaccccgacaattttgatgaatccatggacccctttaaaccaacaactacactcacatctagcgacttttgttcaccaaccggcaatcatgtgaacgagatcctggaaagcccgaagaaagctaaatcacggctaataacctctggctgcaaggtgaagaaacatgagacccaatccttggcactcgacgcttgcagccgcgacgagggcgcagttatcagtcagatctctgacattagcaatcgcgatggacacgctaccgacgaggagaagctggcttctacctcgtgcggacaaaaatctgctggggcagaagtgaagggcatcgagaaggagacctgccagaagatggaggaggacggcagcactgtcctgggcctgctagaatcttctgccgagaaagcaccagtatcagtctcgtgtgggggtgaatcaccccttgatggtatttgcctgtcggaaagtgacaaaaccgccgttctaaccctcattcgggaagagatcatcaccaaggaaatcgaagcaaacgagtggaagaaaaagtacgaggaaacaagacaagaagtactggagatgcgtaagatcgtagctgaatacgagaagaccatcgcccaaatgatcgaggacgaacagcgaaccagcatgacgtctcagaagagttttcagcagctgactatggaaaaggagcaggctctggcggatctgaattcagtggagcggagtctgtccgacttgttccggaggtatgagaatcttaagggcgtcctcgaagggtttaagaaaaacgaggaggccttaaagaagtgtgcccaggattacttggccagagtgaagcaggaggaacagaggtatcaggccctgaagattcacgcggaggagaagcttgataaagcaaatgaagagattgcgcaagtgagaacaaaggccaaagcagagagcgctgctctgcatgcagggcttaggaaagagcagatgaaggtcgagtcactagagagagccctgcagcagaagaaccaggagatagaggaactaaccaaaatttgtgacgagttaattgctaagctcggcaaaaccgattag

SEQ ID NO: 244517 - DNA, 1431 bp, synthetic construct
  misc_feature 1..1431: note = Description of Artificial Sequence: Synthetic coding sequence
  source 1..1431: mol_type = other DNA
atgaccgagggttcgatgggcgtgaccttggaggccagcgccgaagctgacctgaaagcaggcaactcatgcccagaattggtaccttcccgaaggtcaaagctcagaaagcctaagccagtgccactgcgaaagaaggccatcggaggggagttcagcgatacaaacgccgcagtggaaggcacaccccttcctaaggcatcctaccacttcagccctgaagagcttgatgagaatacaagcccactgctgggagacgcacgcttccagaaatctcccccagacttgaaggagacaccagggacccttagcagcgacacaaatgacagcggggttgagctgggcgaggagagtcgcagctctccactgaaattagagttcgactttactgaggacaccggtaacatcgaagccagaaaggccttgcctaggaaattagggagaaaactgggttctacactgacacctaaaatccagaaggatggcatctccaagtctgccggactcgagcaacccaccgatccagtcgcgcgtgatgggccactgagccagacctcttctaagcctgatcccagtcagtgggaaagccccagtttcaatccttttggatctcattctgtgctacagaattcccccccactctctagcgaaggtagctaccactttgacccggacaacttcgacgaatcgatggatccgtttaagcccacgacaacattaactagctccgatttttgtagcccaaccggaaatcacgtgaacgaaatcctggaatcccctaagaaggccaaatcccggctgattacttctggatgtaaggtgaagaagcatgaaacacaatctctggccttggacgcatgttctcgcgatgaaggggcagtgatttctcagatctcagatattagcaacagagatgggcacgccactgacgaggaaaagttagcttctacctcttgtggccagaagagtgccggtgccgaagtgaagggagagccagaggaggacctcgagtatttcgagtgtagcaacgtccctgtgtctacaataaaccatgccttctcctcatcggaggccggaatcgagaaggagacttgccagaaaatggaggaagatggatcaactgttcttgggctgctagaatcctcggccgaaaaggctcctgtttccgtctcttgcggcggtgaatctccacttgacggcatttgtctaagtgagtccgacaaaacggccgttctgactttaatccgggaggagattatcacaaaagaaatcgaggcaaatgagtggaaaaagaaatacttcaataaagaggtgttccggggagacatctgtcccaagcggtttggactgcagattcccgtaatattcaagaagcagctcaccacaaagtcactcagccttcatagggtgacagtcaaaaaattgatgtag

SEQ ID NO: 244518 - DNA, 2196 bp, synthetic construct
  misc_feature 1..2196: note = Description of Artificial Sequence: Synthetic coding sequence
  source 1..2196: mol_type = other DNA
atgaacaacatactcaaactgaagtctagcgactctgaagggaatttcgagactccagaagcagaaacccccatcaggagtccctttaaagagtcatgcgacccctccctcggactggcgggtcccggagctaagagccaggagtcacaagaagccgatgagcaattagtggccgaggtagtggaaaaatgttcgtccaaaacatgcagcaaacccagcgagaacgaggtcccccagcaggcgatcgacagccattccgtcaagaacttcagggaagagccagagcacgacttttcgaagatctcaatcgtgcgacctttcagcatcgagactaaagattcaaccgacatatctgctgtcctgggcaccaaggctgctcacggctgtgtaactgcagtatcaggaaaggccctgccatcgtcacctcccgatgccctgcaggatgaggctatgacggagggcagtatgggcgtgacgctggaggcttctgccgaggccgaccttaaggctggcaattcctgtccagaacttgtaccatcacgacgaagtaagttgcgaaagcccaagccagtgcccctgagaaagaaggccattgggggtgaatttagtgacaccaacgcggctgtggaggggactcctctgcctaaggcgtcttaccacttttcccctgaggaacttgacgagaatacctcccctctgctgggagacgcaagattccagaagagtccacctgatttgaaggagacccccggtacgctgtcttctgatactaacgacagtggagtcgagttgggggaagaaagtcgatccagccccctgaagctggaattcgatttcaccgaagataccggaaacatagaggcacgaaaagcgctgccgcgaaagctgggaaggaaacttggtagcacccttacaccaaaaatccaaaaagacggcatttccaagagtgccggactggagcaaccaaccgaccccgtcgcaagagatggacccctgagccagacaagctctaagcccgatccctcgcagtgggagtctccaagcttcaatcccttcggctcccattccgtgctccaaaacagtccccctctcagcagtgaaggatcctaccacttcgaccctgacaactttgatgaatctatggatcccttcaaacccaccacaactctcacctccagcgacttttgtagtccgacaggaaaccatgtgaatgaaatcttggagtctcccaagaaagctaagtccaggctgattacatctggctgtaaagtgaagaagcatgagacacagagcctcgccctggacgcttgcagccgggatgaaggtgcagtgatttctcagatcagcgacatttctaacagggacggccacgccactgacgaggaaaaactcgcatctaccagctgcggccaaaaaagcgccggagccgaggtcaagggcatcgagaaagaaacgtgtcagaaaatggaagaggacggctccacggttttgggcctgcttgaatcttcagctgaaaaggcgcctgtcagcgtgtcttgcggcggagaatcccccctggatggaatctgcctgtcagaatcagataagaccgccgtgctcactctcatccgcgaagaaataataacgaaggagatagaagctaacgagtggaaaaagaaatacgaggagacccgtcaggaggtgctagagatgaggaaaatcgtggccgaatatgagaaaacgatcgcgcaaatgattgaggacgagcagcggactagtatgacctcacagaaatcctttcagcagctcactatggaaaaggaacaggcactggcggatctgaactccgtggagcgttctctatccgacttattcagacgatacgaaaacctgaagggagtgctggaaggttttaagaagaatgaggaagctctgaaaaaatgtgcacaggattacttggctagagtaaagcaggaggaacagcgctatcaggctctaaagatccacgctgaggagaagctggataaggctaacgaggaaattgcacaagttcgtaccaaggcaaaagctgaatcggccgcacttcatgcagggcttcggaaagaacaaatgaaagtggaaagcctggagagggctctgcaacagaagaatcaggaaatagaggagctgaccaagatctgtgatgagcttatagcaaagttggggaaaactgactag

SEQ ID NO: 244519 - DNA, 1833 bp, synthetic construct
  misc_feature 1..1833: note = Description of Artificial Sequence: Synthetic coding sequence
  source 1..1833: mol_type = other DNA
atgacagaaggtagtatgggcgtgaccttagaggcatctgccgaggcagacctgaaggcaggaaatagctgcccagagctggtccccagccgtcggagcaagctgcggaagccgaaacccgtgccactgcgaaaaaaggctatcggaggtgagtttagcgatacaaatgccgctgtcgaaggaacgcccctgccgaaagcgagctaccacttttctcccgaggagcttgacgagaatacaagccctctgcttggagacgcaaggttccagaagtccccccctgacctcaaggaaacacctggcaccctgtcctccgatacaaacgactctggggtggaactgggagaagaatcaagatcatcaccactgaaactggagttcgacttcaccgaggacacggggaatatcgaagccaggaaggcactgcctcgaaaactggggagaaaactgggtagcacactcacacctaaaattcagaaagatggtatcagcaagagtgcgggactagagcaacccacagaccccgtggccagagatggtcctctgtcccagacaagctctaagccagacccctcccagtgggagtctccctcatttaacccattcggctctcattccgttctacagaacagccctcctctgtctagcgagggaagctatcacttcgatcccgacaacttcgacgagtctatggaccctttcaagccgaccaccactcttacgtcgagcgacttttgttctccgacagggaatcatgttaacgaaattctggaaagccccaaaaaagcaaagtcacgccttatcactagcggatgtaaagtaaagaagcatgaaacccagtcactggcgctcgacgcatgttccagagacgagggggcagtcataagccagatctccgacatctcaaacagggatggacatgccactgacgaagagaaactagctagtacatcttgtggccagaaatccgccggtgccgaagtgaagggggagcccgaagaggacctggaatatttcgagtgctccaacgtgcccgtcagtactatcaaccacgccttctctagtagcgaggccggtatcgagaaggaaacatgccagaagatggaagaggacggcagcacggtgctgggcctgctggagtcttctgccgagaaggctccggtcagcgtgtcatgcggcggagaaagcccactggatggaatctgtctctcagagtccgacaagaccgctgtactgacgttaatccgggaggaaatcattacgaaagaaatcgaggctaatgagtggaaaaagaaatacgaagagacaagacaggaagtgctggagatgcgcaaaatcgtggcggagtacgagaaaacaatcgcacagatgatcgaagacgaacaacggacctccatgacctcccagaaaagctttcaacagctgactatggagaaagagcaggccctcgccgatctaaattctgtcgaacggtcgcttagcgacctgtttcgcaggtacgaaaatctgaaaggggtcctggaaggatttaagaagaatgaggaggcccttaagaagtgtgcacaggactacttggctagagtgaagcaggaggaacagcggtaccaggcactgaagatccatgcagaggaaaaactagataaggcaaacgaagaaatcgcccaggtgcggacaaaggcaaaagcagaatccgccgctctgcacgccggacttaggaaggagcagatgaaggtggagagtctcgaacgggctctgcagcagaaaaatcaggagattgaggagctgaccaaaatttgtgacgaactcatagctaagttgggaaaaacagattag

SEQ ID NO: 244520 - DNA, 1746 bp, synthetic construct
  misc_feature 1..1746: note = Description of Artificial Sequence: Synthetic coding sequence
  source 1..1746: mol_type = other DNA
atgaccgaggggtctatgggggtgacattagaagcttctgcagaagcagatctcaaagccggaaactcatgtccagagctcgtgccatctcgacgctcgaagcttaggaagcccaaacctgtgcccctgagaaagaaggccatcggcggtgaattcagcgataccaatgcagcggtggagggcacccccctgcccaaggcatcgtaccatttctcgcccgaggagctggacgagaatacttcccccctgctgggtgatgcaaggttccagaagtccccccctgatctgaaggaaacccccggaaccttgagttcagatactaacgacagtggagttgaactgggggaagagagcagatcaagtccattaaagcttgagttcgatttcaccgaagacaccggtaatatcgaagcgcgtaaggcacttcccaggaagctcggccgaaaactcgggtctaccctcacgcccaagattcagaaggacggtatctccaaaagcgcgggtctggagcagccaacggatccagtggccagagatggccctctgtctcagacaagtagcaaaccggaccccagtcaatgggagtcccccagctttaatcccttcggctctcactctgtgctgcagaactctcctcctctcagctcagaaggtagttaccatttcgatcctgacaatttcgacgaatctatggacccctttaagcctaccacaacacttacttccagtgacttctgctctccgaccggaaaccatgtaaacgagatcctggaatccccaaagaaagccaagagcaggcttatcaccagtggatgcaaagttaagaaacatgaaacgcagagcttagccctggatgcctgtagccgagatgagggagcagtgatatcccaaattagcgatatttcaaaccgggatgggcacgccacagatgaggagaaactcgctagcacctcctgcggccagaagtcggctggcgcagaggtgaagggtatcgagaaggagacttgccaaaaaatggaagaagacgggagcacagtcctcgggctattagaatccagcgctgagaaagctcctgtttcggtgagttgtggtggagagagtcctctcgatggaatatgcctatccgagtctgataaaacggctgtactcaccttgatccgggaagagataatcacgaaggaaatcgaagcaaatgaatggaagaaaaaatacgaggagactcggcaggaggtgcttgagatgaggaagatagtagccgaatatgagaagacaattgctcagatgatcgaggacgagcagcgcacctctatgaccagccagaaatccttccaacagctcacaatggaaaaagagcaggcccttgcagacttgaattcagtggagcgcagcctgtctgacttattccgcaggtacgaaaacctgaagggagtactggagggatttaaaaaaaacgaggaggctttaaagaaatgtgcccaagactacctagcccgagttaagcaagaagagcagaggtatcaagcccttaagatccacgcagaggagaaactcgataaagccaacgaggagatcgctcaggtgcgaacaaaggctaaagccgagtccgccgctttacacgccggtttgcgtaaagaacagatgaaagtggagtcactagagagagcgctgcagcaaaaaaatcaggagatcgaagagctgaccaagatctgtgacgagctaattgccaaactcggcaagactgactag

SEQ ID NO: 244521 - DNA, 93 bp, synthetic construct
  misc_feature 1..93: note = Description of Artificial Sequence: Synthetic coding sequence
  source 1..93: mol_type = other DNA
atgacggagggaagcatgggggtcacgctggaagcttctgccgaggccgatcttaaagcaggcaattcatgcccagagttagttccgtcctag

SEQ ID NO: 244522 - DNA, 417 bp, synthetic construct
  misc_feature 1..417: note = Description of Artificial Sequence: Synthetic coding sequence
  source 1..417: mol_type = other DNA
atgactgaaggatccatgggagtgacactggaagcctccgccgaggcggacctaaaagccggaaactcctgccctgaattggtaccatctcgccgttccaagctcagaaagccaaaacctgttccattgcgaaagaaggccattggcggagagttcagcgacacaaacgcagccgtcgagggcacccccctgcccaaggccagctaccacttcagccctgaagagctggacgaaaatacgtcccccttacttggcgatgcgcgttttcagaaaagccctccagatctgaaagagactcctgggacactgagtagtgatacgaacgatagcggcgtggaacttggcgaggagagtcgatccagcccgcttaaactggagtttgacttcactgaagatactgggaatatcgaagcttag

SEQ ID NO: 244523 - DNA, 186 bp, synthetic construct
  misc_feature 1..186: note = Description of Artificial Sequence: Synthetic coding sequence
  source 1..186: mol_type = other DNA
atgaccgagggaagcatgggggtgaccctggaggccagcgccgaggccgacctcaaagccggaaactcctgccctgaattggtcccttccaggcgcagtaagcttcggaagccgaagcctgtgcccctccggaaaaaagctattggaggagaatttagcgacactaatgcagcagtcgaggggtag

SEQ ID NO: 244524 - DNA, 390 bp, synthetic construct
  misc_feature 1..390: note = Description of Artificial Sequence: Synthetic coding sequence
  source 1..390: mol_type = other DNA
atggccttcagcccttggcagattctgtccccagtgcaatgggccaaatggacctggagtgccgtaagaggcggtgccgcaggtgaggatgaggccggaggacccgagggggatcccgaagaggaggattcgcaagccgagaccaagtctctgagcttttcttcagattcagagggcaatttcgagacccctgaagcggagacacctattcgcagcccattcaaagagagttgcgatcctagtcttggtctcgctggcccaggggcaaagtcacaggagagccaggaggctgacgagcagttggttgccgaggtggtagaaaagtgtagcagcaagacctgcagtaagcctagcgagaacgaggttccgcagcaggccattgatagttag

SEQ ID NO: 244525 - DNA, 3081 bp, synthetic construct
  misc_feature 1..3081: note = Description of Artificial Sequence: Synthetic coding sequence
  source 1..3081: mol_type = other DNA
atggggggttcccaatccctgcagcctgcgccagcgagcgacctgaatcttgaagcttcagaggccatgagttccgattccgaagaggcctttgaaacccccgaaagcacaacaccagtgaaggctccaccagcccctccgccaccacccccagaggtgattcccgagcccgaagtgtcaacccaaccaccacccgaggaacccggttgcggaagcgagaccgtgccagtgcccgacggaccccgtagtgacagcgtggaggggagccctttcagacctccctctcatagttttagcgcagttttcgacgaagataagcccatcgcctcttcaggaacatacaatctggatttcgacaatatagaactagtggacacatttcaaacactcgagcctagggcctcagatgccaaaaatcaggagggtaaagtgaacactcggaggaagtcaacggacagcgtccccatttcaaagtccacactttctagatctctgagcttacaggcctctgactttgatggtgcgtcatcgagcggaaatcctgaggctgtggcactggcccctgacgcttactccactggtagcagcagcgctagtagtaccctgaagcggacgaaaaagcccaggccaccatctttgaagaaaaagcagaccacaaaaaagccaactgaaacaccaccagtcaaggagacacagcaggaacctgacgaagaaagtctagtcccctctggcgagaatctcgcctccgagacgaagacagaatctgcaaaaactgaaggacccagccctgccctgttggaggaaacaccactggaacccgcagttggacccaaagcagcatgccccctcgatagtgagtcagccgagggtgttgtgcctcccgcatctggtgggggtcgggtacagaatagcccccctgtaggtcgcaagacattgcctttgaccacggccccagaagccggtgaagtgactccctccgacagcggaggtcaggaagactcccccgctaaaggcctgtctgtccgcctggaatttgattacagcgaagataaaagcagttgggacaatcaacaggagaacccgccaccaacaaaaaagataggaaaaaagccagtggccaagatgcctctacgtcggccaaaaatgaagaaaactcccgaaaagcttgacaacacgcccgcttcacccccaagatctccagctgaacccaatgatatccccatagccaaagggacctacaccttcgatatcgacaagtgggatgatcccaactttaatcccttcagcagcacttctaagatgcaagagagccctaaattaccacagcagagttacaacttcgacccagatacctgcgacgaatccgttgatccatttaaaaccagctccaaaacgccgagctccccctctaagtcacccgcatccttcgaaatacccgcatccgcaatggaggctaatggtgtagacggagacggcctcaataagccagccaaaaagaagaaaacgcccctgaaaaccgatacgttccgcgtgaaaaagtccccaaaacggtctcctctatctgaccccccaagccaggatccaactccagctgctacacccgagactccccctgtgatctctgcagtggtgcacgccacagatgaagagaagctggccgtgactaaccaaaagtggacctgcatgacagttgacctggaagcggataaacaggactacccccagccatcagacctcagtacattcgtcaatgaaacaaagttttcctcccccactgaggaattagattataggaattcttatgaaattgagtacatggaaaaaattggctcctcgctacctcaggatgacgatgctcctaagaagcaggccctgtatctgatgttcgacacaagtcaggagagtccagtcaagtcaagtccagttcgcatgtccgagtcacctaccccctgtagtgggtccagtttcgaagagacagaagcacttgtaaatactgccgctaaaaaccagcaccccgtcccacgtggtcttgctcctaatcaggagtcacacctgcaggtccctgaaaaaagctcacagaaagaactcgaggcgatgggactgggcaccccatccgaggccattgagatcacggcccctgaaggaagctttgccagcgctgacgctctgttgtcccggctggcgcacccagtaagcctctgtggcgcattggattatctggagccagacctcgcggaaaaaaatccacccctattcgcccagaaactgcaggaagaactggaattcgcaatcatgagaatcgaggcactgaaactggcaaggcagatcgccctggcctcgagaagccatcaggacgctaagagagaagctgcccaccccactgatgtgtctattagtaaaactgcactgtattcgaggatcgggacagcggaggtcgagaagcctgctggccttctgttccagcagcccgaccttgattcagccctccagatcgccagagcggaaatcatcaccaaagaacgcgaagtctcagaatggaaggacaaatatgaggaaagccgccgagaagtgatggagatgcgtaagattgtggccgagtacgagaagacaatagcacagatgatcgaggatgaacagagggagaaatccgtttcacaccagacagttcaacaattggtgttagagaaagagcaggcattagccgacctgaacagcgtcgagaaatccctggccgatctgttccggaggtatgagaagatgaaggaggtcttagagggatttcgcaagaatgaagaggttctgaagcgctgcgctcaggagtacctgagcagagtgaaaaaggaagaacagcgttaccaggctcttaaggtgcacgcagaggaaaagctcgatagggccaatgctgaaatcgcacaagtgcgagggaaggcacagcaggaacaagccgctcaccaagcgtcgttacgcaaagaacaattgcgcgtggacgccttggagagaaccctggaacagaaaaataaggaaatcgaggagctgacaaagatatgcgacgaactcatagccaaaatggggaagtcctag

SEQ ID NO: 244526 - DNA, 8846 bp, synthetic construct
  misc_feature 1..8846: note = Description of Artificial Sequence: Synthetic coding sequence
  source 1..8846: mol_type = other DNA
atggggaatgagaatagcacctccgataatcagcgcactttatcagcacagacaccgaggagcgctcagcctcccggaaacagtcagaatataaagcgcaagcagcaggataccccgggatctccggatcaccgcgacgccagcagcataggcagcgtcggtttgggtggtttctgtactgcctcggagtcgtccgcatccctcgatccttgcctggtgtcccccgaagtgacagagcccagaaaggatcctcagggagcacggggtccagagggatcactactgccgtccccccctcctagccaagaaagggaacatccaagcagcagtatgcctttcgctgagtgcccccctgaggggtgtttggccagtccggctgccgctccagaagatgggcctcagacacagagtcccagacgtgagcccgctcccaacgcacccggagacatcgctgctgcctttcccgctgagcgggacagtagcaccccttaccaggaaatcgccgctgtgccctccgccggacgcgaaaggcagcccaaggaagaagggcagaagtcctccttttcttttagctcgggaattgaccagtccccaggaatgagcccagttcccttgcgcgaacccatgaaggctccgctatgtggtgagggtgatcagccgggaggtttcgagtcccaggagaaggaagcagcgggaggattcccccctgcggagtctagacagggggttgcctcagtacaagtgactcccgaagctccagctgctgcccagcaggggaccgaatcaagcgctgtgctggagaaatcccccctgaagcctatggcccctattccccaggatccagcgcctcgcgcaagcgaccgagagcgaggccagggagaggctccaccccagtatttgactgatgacttggagtttctgcgcgcatgccacctgcccagatctaattccggggcagcacccgaggctgaagttaatgctgccagtcaggaatcatgtcaacagcccgtcggcgcatacctgccgcatgctgaactgccatggggcctgccgagcccagctctcgtgccagaagcgggtggctctgggaaggaagccttggacacaatagatgttcagggacatccacagacaggaatgaggggcactaagccaaaccaggttgtctgcgtggctgctgggggtcagcccgaaggcggtttgcctgtaagcccggagcctagtttgctcactccgaccgaggaagctcacccagctagctccctggcctccttcccggcagcacagatacctattgcagtagaagaacccggttccagctccagagaatccgtctcaaaagccggaatgcctgtcagcgcagacgcagccaaagaggtggtggatgccggacttgtgggactggagagacaggtctcggacttagggagcaagggcgagcacccagaaggcgatcctggggaggtgcccgcaccgtctccgcaagagagaggcgaacatctgaacacggagcaaagccatgaggttcagcccggagtgccaccccctcccctcccaaaggaacaatcccacgaagtgcagcctggcgctccacctcctccgcttcccaaggctccatctgagagtgctcgcggaccccctggcccaaccgatggtgctaaggtgcacgaggatagtacttccccagcggttgcaaaagagggatcccggagtcccggagacagccctgggggtaaggaggaagcgcctgaaccacctgacggcggagatcctgggaatcttcaaggtgaagatagccaagccttctcaagtaaaagggatcctgaggtcggcaaagatgaactcagcaagcctagtagcgatgctgagagtcgagatcaccccagttcacactccgcccaaccacctcgcaaaggcggagcaggacacactgacggccctcattctcagactgctgaggctgatgcctcaggtctgccccacaagctaggtgaagaagacccggtacttcctccggtacctgacggggctggagagcccaccgttcctgaaggagctatttgggaaggatctgggttacagcctaagtgccctgacaccttacagagtcgggaggggctcggacgcatggagtctttcttgacactggagtcagaaaagagcgactttcctcccacccccgtggcagaggtggcacccaaggctcaggaaggcgaatccacccttgaaattagaaaaatgggctcctgcgacggcgagggcctgctgactagtcctgatcagccccgtggacctgcctgcgacgcgagcagacaggaattccacgctggggtgcctcatcccccacaaggtgaaaacttagctgctgatctcggtctaaccgcacttatcctcgatcaggatcagcagggaatcccgagctgtcctggagaaggctggatccgcggagctgcaagcgaatggcctctgctgtcttcagagaagcatcttcagccatcacaggcccaaccagagacttccattttcgacgtgctcaaagagcaggcccaaccacctgagaatggtaaggaaacatctccttcacacccagggttcaaagaccagggtgcagatagctcccaaatccatgtacctgttgagccacaggaggacaataatctgcccactcacggcggacaggagcaggccctaggctccgagctgcagtcccagctcccaaaaggtacactaagcgacactcctacctcctcaccaacggacatggtgtgggaatcctcattaacagaggagagcgaactatcagcgccaactcgtcaaaaactccccgctctcggcgaaaagcgccctgagggggcatgcggtgacggacagtcgagtcgagtgagtccgccagccgctgatgtgctgaaggacttcagcctggcaggcaattttagccgaaaggagacctgttgcaccggccaaggtcccaacaagagtcagcaagccctcgctgatgctctcgaggaggggtcgcagcacgaggaagcatgccagcggcatcctggagcaagcgaagcagccgacggttgtagccccctgtggggcctatcaaaacgcgagatggctagcggcaacacaggagaggccccaccatgccaacccgatagtgttgccttgctcgatgcggtgccctgcctgccagcccttgccccagcctcccctggagtgacaccaacacaagatgctcctgagactgaggcctgtgacgaaacacaggagggccgtcagcagcccgtgcctgctccgcagcagaagatggagtgttgggcaacgtcggacgctgagagtcccaagctgctggcttcatttccaagtgctggggagcagggtggcgaggctggagctgctgaaacaggcggtagtgcaggcgctggcgacccaggcaaacaacaggcacctgaaaaacctggagaggctactctttcctgcggtctcctccagactgagcattgtcttaccagtggagaggaggcctcaaccagtgccctgcgagaaagttgccaggccgagcatcctatggcctcctgccaggatgctttactgcccgcaagagagctgggtgggattccgagatctaccatggatttcagcacacatcaggccgtacctgaccctaaagagctcctgctctcgggaccacccgaagtagccgcacctgacacaccatatctgcatgttgatagtgccgcacaacggggtgcagaggattctggggtgaaagcggtgagcagtgctgacccgagagctcctggggagagcccctgtcctgtaggagaaccccctctggcactcgagaacgcagcgtcactaaaactgttcgccggatctctcgcgcctctgctccagcccggagctgccggaggcgaaattccagctgttcaggcctcttctggatcaccaaaggctcgcacgacggaaggccctgtcgattccatgccatgtttagacaggatgcctttgttggccaaaggcaagcaggctaccggagaggaaaaggccgcaacagctccgggagcaggtgctaaggcaagcggcgaaggtatggcaggtgacgccgcaggcgaaaccgagggctccatggagaggatgggcgagccatctcaagatcctaagcaaggtacaagtgggggagtagatactagctcagagcagatcgcaacgctaaccggcttccctgactttcgagagcacatagccaagatttttgaaaaacccgtgctgggtgcgctcgcaactcccggtgaaaaggcaggcgctggcagatcagccgtggggaaggatctgacacggcctctcggccctgaaaagctgttggacggccctccaggagttgatgtgaccctccttccagcgcctcctgctaggcttcaggtagagaaaaaacagcagttggcaggggaggctgagatctcccatctggccttgcaggacccagccagcgataaattgctgggtcccgctggactcacttgggaacgcaacctgccaggcgctggggtgggaaaagagatggcaggcgtgcccccaacgttgcgcgaagatgaaagacctgaaggccctggggcagcatggcctgggctggaaggccaggcttattcgcagctcgaacgaagccggcaggaactggcctcgggtctcccttcaccggctgctacacaagagctccctgttgagcgggcagcggcatttcaggttgccccacactcacatggtgaagaagccgtcgctcaggaccgaattcctagcggtaaacagcaccaggagaccagcgcatgtgacagcccgcacggcgaggatgggcctggcgattttgcacacaccggagtgcctgggcatgtgcctcggtcaacgtgcgccccttctcctcagcgagaagttttaacggtgccagaagccaactctgaaccctggaccctggatacactgggcggtgagcgacggcctggcgttacagccggaattctggaaatgcgcaacgctctggggaatcagagcacccctgcccctcccaccggcgaagtggctgatacacctctggagccaggcaaggtcgccggagcagccggtgaagcagagggtgacatcaccctctcaactgccgagactcaggcatgtgcaagcggggacctcccagaagcgggaacgacgaggaccttcagcgttgtggctggcgatcttgttctacccggttcgtgccaggatcccgcttgctccgataaagctcctggcatggaaggcactgcagccctccacggcgattcgccagctcgccctcagcaagccaaagagcagcctgggccagaacgacccatacccgctggagatggcaaggtttgtgtgagctcaccccctgaacccgatgaaacccacgatcctaagcttcaacatctggcacccgaagagcttcataccgaccgggagtcccccagacctggaccatccatgctcccaagtgtgccaaaaaaggatgcccctcgcgtgatggataaagtcacctccgatgagactagaggggctgaaggaactgaatctagccccgtagcagatgacatcatacagcccgcagctcctgctgatcttgagagcccgactctcgcagcgagctcctatcacggcgacgtggttggccaggtgagcactgacctcatcgctcagagcatcagtcccgctgctgcacatgcgggactgccaccctctgctgcagagcacattgtttccccctcagcccctgctggtgaccgggtcgaggcatctaccccatcctgtccagatccggctaaggaccttagcaggagcagcgactctgaagaggccttcgaaactcctgagagcactacacccgttaaagcacctcctgctcctccccctcccccaccagaagtaattcccgagcctgaagtctcaacacagcccccacctgaagaacctggatgcgggtcagaaacagttcctgtgcctgatggacccagatccgattctgtagaaggaagtccatttcggcctccctctcactcctttagtgcagtctttgatgaggacaaaccgatagcttcttctggcacttacaacctggacttcgataatattgagctggtggatacattccagacccttgaaccgagagccagtgatgcaaagaatcaggaagggaaggtgaatacaaggcgtaaatctacagactcagttcctattagtaaatcaacactgtctaggtctttatcactgcaggcctccgacttcgacggggcatctagttccgggaaccctgaggcggtggccctcgccccagatgcttattctaccggatcttcaagcgcaagctccacgctgaagcgcacgaaaaaaccgagaccgccatccctaaagaaaaaacagaccaccaagaaacctacggaaaccccccctgtgaaggagacccagcaggaacccgatgaggagtccttggttccaagtggagaaaacctagccagtgaaaccaaaacagagtccgcgaaaaccgagggacccagcccagcattgttggaggagacgcctttggaacccgctgttggacccaaagccgcatgcccacttgacagtgagtctgccgaaggggtagtccctccggctagcggtgggggtagagtgcagaatagcccccctgtgggcaggaagacacttccattaacaaccgcacctgaagcgggagaggtgacaccctcagattcgggtggacaggaagactctcctgcgaaaggtctcagtgtacgtttggaattcgattatagcgaggataagagctcttgggataaccaacaagaaaacccccctcccacgaagaagattggtaaaaagccggtggccaaaatgccattgcgcagacctaagatgaaaaagactcccgagaaactcgacaacactccagccagcccaccgcgaagccccgcagagcctaatgatattccaatcgccaaggggacttatacctttgacatcgataagtgggacgacccaaacttcaatccattttctagcacaagtaagatgcaggaatcccccaagctgccgcagcagtcttacaactttgatccagacacctgcgacgagtccgtagaccccttcaagaccagcagtaaaaccccctcctcacctagtaagtcccccgcatcatttgaaatcccagcttccgccatggaggccaatggggtggatggcgatggcttgaacaaacctgcaaaaaagaaaaaaacacccctgaagactgacacatttagggttaagaagtctccgaaacgtagcccattgagtgatccccctagccaggaccctacacctgctgccaccccagagactcccccagtgatttctgctgtcgttcatgctaccgacgaagagaagttggcggtcaccaaccagaagtggacctgcatgactgttgatcttgaggcagataagcaggattaccctcagccaagtgaccttagtactttcgtgaatgagactaaattctcttcacctaccgaagagctggactatagaaactcctacgagatcgaatacatggaaaagatcggaagttctttgccccaggatgatgatgcccctaagaagcaggcactgtatttaatgtttgatacttcacaggagtctcccgtgaagtcttcaccggttagaatgtctgagtccccgacaccttgcagcgggtcctctttcgaagaaaccgaggccctagtgaatactgccgctaaaaatcagcaccctgtccccagaggccttgctccgaaccaggagtcacacctgcaggtacccgaaaagagcagccagaaagagctggaggcaatgggcctaggcaccccatctgaagccatcgaaattaccgcacctgaaggatcattcgcctccgctgacgccctgctgtcccgattggcacaccccgtctccctctgtggcgctttggactatctcgagcctgacttagccgaaaagaatccacccctgtttgcgcagaagctccaggaggaattggagttcgcgatcatgcgtatcgaagctctgaagctcgcgcgacagattgccctagccagcaggtcacatcaagacgccaaaagagaggccgcacatcctacagatgtctccatcagtaaaacagcactgtacagtagaatcgggacagccgaagttgaaaaacctgccggtttgctgttccagcaaccagatctcgattcggcactacagatcgcgagggctgagatcattaccaaagagcgcgaagtctcagaatggaaggataagtatgaggaatctcgacgcgaagtgatggagatgagaaaaattgtcgcagaatacgagaaaaccattgcccaaatgatcgaagacgaacaacgcgaaaagagtgtctcccatcaaactgtgcagcagctcgtattagaaaaagagcaggcactggctgatctaaattcagtggagaagtccttggctgacctttttcgcagatacgagaagatgaaagaagtattggagggctttagaaaaaacgaggaggtccttaagcggtgcgcgcaagagtatctgtctcgggtgaagaaagaagaacaaaggtaccaggccctgaaggtccacgctgaagagaaactggatcgggcaaatgcagaaatcgcccaggtcagagggaaggcccagcaggagcaggccgcacatcaagcttccctccggaaggagcaactgagggtggacgccctggaacgcacgctagagcaaaagaataaggagattgaggagctcactaaaatttgcgacgaattaattgccaagatggggaagtctta

SEQ ID NO: 244527 - DNA, 8585 bp, synthetic construct
  misc_feature 1..8585: note = Description of Artificial Sequence: Synthetic coding sequence
  source 1..8585: mol_type = other DNA
cagcggacactgagcgcgcagacccccaggagcgcccaaccacctggcaattcgcagaacatcaagcgaaagcagcaggacactccgggttcaccagatcatagggatgcctctagcatcgggtctgtgggattgggaggtttttgtacagcctctgaatcatccgctagtcttgatccttgcctcgtatcccccgaagtcaccgagccgaggaaggatcctcagggggcaagagggccagagggatcacttctcccctcgccgccaccatcccaggaacgggaacacccatcctcgtccatgcccttcgctgagtgtcctcctgagggttgcctggcgtcaccggcagccgctcctgaggacgggcctcagactcagtcaccccgacgcgaacccgcacccaatgctccaggtgacattgcggcagcgttcccagccgagagagatagctccactccgtatcaggaaatcgcggcagtgccaagcgccggtagggagaggcagcctaaagaggaggggcagaagtcgagtttttctttttcatctggcatcgaccagtctcctggcatgtcccctgtccccctgagggaaccaatgaaggccccactgtgcggggagggagaccagcctggtgggttcgagagccaggagaaggaagctgctggcggttttccccctgctgagtcacgacagggggtggcaagcgtgcaggtgaccccagaagcgcctgccgctgcacagcaagggactgaatcatccgctgttctggagaagagtcccttaaagccaatggctcccattcctcaggatcccgcaccaagggcctctgatagagagcgcggtcagggggaggccccaccacagtacctcacagatgatctggagttcctgcgcgcttgccatttgccgcgaagcaactccggcgctgcaccggaggcagaggtgaacgctgcaagccaggagagctgtcagcaacccgtaggagcttacctgccgcacgccgaactcccttggggattaccctcccccgctttggtgccggaagcgggtggttccggaaaagaggctttggatactatcgacgttcaggggcatcctcaaactgggatgagaggtactaaacctaatcaggtggtttgcgtcgccgcaggagggcagcccgaaggagggctgcccgtgagtcctgagccgtcccttctgacccctacagaggaggctcaccctgcatccagcctggcttctttccctgcggcacaaattcccatcgcagtcgaagagcccggtagctcctccagggagtccgtgagcaaagccggaatgccagtatctgccgatgccgcaaaggaggtggtcgacgccggactggtcggtctggagagacaggtgtccgacttgggctccaagggcgagcatccagaaggagaccccggtgaagtccctgctccttctccgcaagagcgaggagaacatctaaatacagaacagtctcacgaggtgcaacccggtgtccctccaccaccactgccaaaagagcagtcccatgaggttcagccaggagctcccccacccccactgcccaaagcgccaagtgagagcgcgcgtggcccacccggtcctaccgacggggctaaggttcatgaagactcaacaagcccagccgtagcaaaagagggcagcagatcccccggagacagtccaggagggaaagaagaggcacccgagcctccggatggtggcgaccccggaaatctccagggcgaagattcccaggcctttagttccaaaagggacccagaggtcgggaaagacgagctgtcgaaaccgtcctctgatgcggaatcccgagaccatccctccagccattcagcccagccccctaggaaaggtggggcaggccacactgacgggccacactcccagacagccgaagcagatgcgtcaggactgccccacaaactgggagaagaggacccggtgttgccccctgttccggacggggcaggagagcctactgtgcccgagggggcaatttgggaggggagcggtctccagccaaaatgccctgataccttacagagtcgagagggcctgggcaggatggaatcctttctgaccctcgaatccgagaagtctgacttcccaccaaccccggtggctgaggttgctcccaaagctcaggaaggagaaagtacgctggaaatccgtaagatgggcagttgtgatggagaaggcttgctcacttcacccgatcagcctcggggaccggcttgtgatgcctctcgacaagagttccacgccggagttccccacccccctcagggcgagaatctggcagctgaccttggccttactgccttgattcttgatcaggaccagcaagggatacccagctgtccaggtgagggttggattaggggggctgcatccgaatggcccctgctgtcctccgaaaagcatttacagccctctcaggctcagcccgagacatcaattttcgacgttctgaaggagcaggcgcagccaccagaaaatggcaaagaaacctctccatcccaccccggttttaaggatcagggcgctgactccagtcagatacacgtccccgtggaaccacaggaagataataatttgccgactcacggaggtcaggagcaagcgctgggctccgagctgcagagccagctgcccaaggggactttgagtgatacccccacttcatcgcccacagacatggtatgggagagcagtttaaccgaggaaagtgaacttagcgcgccaaccagacagaagctgcctgccctcggggaaaagagaccagaaggcgcttgcggagatggacagtctagccgagtgtcgccaccagccgcagacgtcctgaaggatttttctctggcgggtaactttagtaggaaggagacttgctgcaccgggcaggggccaaataaatcccagcaggctctggcggacgccttggaggagggatcacagcatgaggaggcctgccagagacacccaggggctagtgaggcggcagacggctgcagcccactttggggactgtcaaagagagagatggctagcgggaacacaggagaagcgcctccatgccagcccgatagtgtggcgcttttagacgcagtgccatgtctgccagcccttgcgcctgcatcgccgggagtgacgcctacgcaagacgcccctgagaccgaggcctgtgatgaaacacaggagggcagacagcagcctgtaccagcgccacagcagaaaatggagtgctgggctactagcgacgctgaaagcccaaagttactagcatccttcccttctgcaggtgagcagggcggagaagccggtgcagcagaaaccggaggctctgctggagcaggcgaccccggaaagcagcaggcacccgagaagcccggagaggcgacacttagttgtggtttgctacaaacagagcactgcctgacttccggggaagaggcgtcaaccagtgcattgcgtgagtcatgtcaggccgagcacccaatggcctcttgccaggacgcactgctcccagccagggagctcggaggaatacctaggtccaccatggatttctcaactcatcaggccgtacctgacccaaaggagctgctcctgtctgggccacccgaggtcgccgcaccagataccccctacttacacgtggatagcgcagcgcagcgcggagccgaggatagcggggtgaaggctgtctcctcagctgatccgcgagcacccggagagagcccatgccctgtgggtgaaccacctctcgcactagaaaatgctgcctctctgaagctgtttgctgggagcttggcccctctgcttcagcctggggcagcaggtggggagatccctgctgttcaggcgtcttcgggatctcccaaagcccgaaccaccgaaggacctgtagactcaatgccatgtctggatagaatgccactactggccaaaggcaaacaggcaacaggcgaggaaaaagctgccacggctccaggcgcaggcgcaaaagccagtggagagggcatggcgggagatgccgctggcgaaacagagggctcgatggagagaatgggtgagccctcccaagatccaaaacagggaacctcagggggagttgacacctctagcgagcaaattgccaccttgacaggttttccagatttccgggagcatatcgccaagatatttgagaagcccgtactaggcgcacttgcaacccctggggagaaagctggcgctgggcgatctgccgtgggaaaggatttgacccgcccactgggcccagagaagctgctggacggtcccccaggcgtggacgtaaccctccttcccgctcccccagctaggttgcaggtagagaaaaagcagcagctagccggtgaggcagagatttcccaccttgcactgcaggacccagcaagtgacaagttgctcgggccagccggtctaacctgggaaagaaatttgcccggagccggagtggggaaggaaatggcaggagttccgcctaccctgagagaggacgagcgccctgaggggcctggcgctgcctggcctggactcgaaggccaagcttactcccagctggaacggagccgacaggagctggcttccgggctgccttctccagcggctacacaggagctgccggtcgagcgggctgcggcattccaggtcgctcctcactcacacggcgaggaggccgtggctcaggacagaattccttctggtaaacagcaccaagaaacctccgcttgcgatagtcctcacggtgaggatggtccgggtgactttgctcacacaggcgtcccaggccacgtgccacgaagcacatgtgccccaagtcctcagcgcgaagtcctgactgtgccagaagccaattctgagccatggacactggataccctcggaggcgagcggcgtcctggcgttaccgcgggaattttggaaatgcgcaatgcactgggaaaccaaagcacacccgcaccgccaacaggcgaagtggccgatacgcccctggagccgggtaaggtggcaggggctgctggtgaagctgagggcgatattaccctgagtactgcagagacccaggcctgcgcctcaggagatttacctgaggcgggaacaacaaggaccttttcagtggtggctggcgaccttgtgctcccgggaagttgccaggatccagcgtgtagcgacaaagcacctgggatggaaggaaccgctgctctacacggcgactcccccgctcgccctcagcaggcaaaggaacagccagggccagaacgtccaattccagccggagacggcaaggtttgcgtaagtagcccgcctgagcccgatgagacacacgatccaaagctgcagcatctggcccctgaagagctccatactgatagggaaagtccaaggcccggacctagcatgctgcccagtgtgccgaagaaagatgccccaagagtgatggacaaagtgactagtgatgagacaaggggtgccgaagggactgaatcaagcccagtcgccgacgacattattcaaccagccgcaccagccgacctggaatcacctaccttagccgctagcagctaccacggagacgttgttggacaggtgtcaacggatctcattgcacagtctatctcccccgctgccgctcacgccggtctgccaccatcagctgccgagcacattgtatccccttcagcccctgctggtgaccgcgtggaagcatcaacaccttcctgcccggaccccgcaaaggatctctccaggtcttctgattcagaggaggcgtttgagactccagagtccaccacccctgtaaaggccccaccggcacctcctccacccccacctgaggtgattcccgaacctgaggtttccacccagcctcctccagaggaaccaggctgcgggtcagagacagtcccagtaccggatggaccacggtcagactctgtcgagggtagcccattcagaccaccatctcattcctttagtgccgtgtttgatgaagataagcccatcgcttcctccggtacgtataacctagactttgataacatcgagctggtagatacctttcagacactggaacccagagcatcagacgctaagaaccaggagggaaaggtcaacacccggcgaaaaagtaccgattctgtcccaataagcaagtctaccctgagccgcagtctctcattacaggccagcgactttgacggtgcctcatcttctggcaaccccgaggcagtcgcccttgccccagatgcttactcaacgggcagctctagcgccagcagcactctgaaacggaccaagaagcctcgtccaccatccctgaagaaaaaacagaccacaaaaaaacccacggaaacaccccctgtgaaggagacccagcaagagcctgacgaagaaagtttggtcccaagtggcgagaacctcgcctctgagacaaagactgaaagtgctaagacagagggtccaagtccggctttgctggaggaaactccgttagagcctgcagtcgggccaaaagccgcatgccccctggatagcgaaagcgccgaaggcgtcgtgccaccggcatccggtggcggacgagttcaaaattctcctccagtgggacgaaaaacactgcccctcacaacagcgcctgaggcaggagaggttaccccgtcagactctggcggacaggaagatagcccagcaaaggggctgtcagtgagacttgaatttgattactcagaggataagagcagttgggataaccagcaagagaatccaccgcctacgaagaaaatagggaaaaagcccgtagcaaaaatgcccctcagacggccaaagatgaaaaaaactcccgagaaactggataacacccccgcaagccccccacggtcccctgctgagcccaatgacattcccatagctaagggaacctatacttttgacattgataaatgggacgacccgaacttcaacccatttagttctacctcaaagatgcaggaatctcccaaactgcctcagcagtcttacaatttcgatccagacacctgcgacgagagtgtagacccgttcaaaacgtcttccaagacaccatcgagccctagtaaaagtcccgcaagctttgaaatcccggcatctgccatggaagccaatggcgtggacggcgacgggctgaataaacccgctaaaaaaaagaaaaccccactcaaaacagacacctttcgcgttaagaagagcccaaagagaagtcctctgagcgaccctccgtctcaggaccccacaccggctgccacgcccgaaaccccaccagtcatctccgccgtggttcacgccacagacgaggagaagctggcagttacaaaccaaaaatggacctgcatgaccgtagatctggaagcagacaaacaagactatccacagccatcagacctgtcaacattcgtgaatgaaacaaagtttagtagtcccaccgaggaactggactaccgaaattcctacgaaatcgagtatatggagaaaatcggcagctcccttcctcaggatgacgacgcccctaaaaagcaggctttgtacctgatgtttgatacttctcaggagtcccccgtgaagagtagccctgtgcggatgagtgaatctcctacgccctgtagtggaagtagcttcgaagaaactgaagcattggttaatactgcagccaagaatcaacatcctgtgcccagagggcttgcccctaatcaggaaagtcacctgcaggtgcccgagaaaagctcccagaaggaactagaagccatgggacttgggactccctcagaggcaatagagatcagagaggctgcgcacccaaccgacgtgtccataagtaagacagctctgtatagtcgaattggcactgctgaggtcgaaaagcccgctggactgctgtttcagcaaccagacttggactcagccctacagatcgcacgtgctgaaattattaccaaggagagagaggtaagtgagtggaaagacaagtacgaggagagtcgcagggaggtgatggagatgcgaaagatagtcgccgaatatgagaaaaccattgctcagatgatagaagacgaacagagggaaaaaagcgtgtcccaccagaccgtgcagcaacttgtgctggagaaagagcaggcactggccgacctgaactctgtcgaaaaatctctggccgacctttttcgaagatacgagaaaatgaaagaggtgttagaggggtttagaaagaacgaagaggttctcaaaagatgcgcccaggaatatctcagccgcgtcaaaaaagaggagcaacggtaccaggctttaaaagttcatgctgaggagaagcttgatcgggctaatgctgaaattgcgcaggtcagaggaaaagcccagcaggagcaggccgctcaccaggccagcctgcgcaaggagcagctccgcgtggacgcgttagagcggacactcgaacagaagaacaaggaaatcgaagaacttactaagatctgtgacgagctcattgctaaaatggggaagagcta

SEQ ID NO: 244528 - DNA, 3285 bp, synthetic construct
  misc_feature 1..3285: note = Description of Artificial Sequence: Synthetic coding sequence
  source 1..3285: mol_type = other DNA
atgggcaacgaaaattcaacttccgacaatcagaggacattaagcgcacagactcctaggagtgcgcagccgccaggaaattcccagaacatcaaaagaaagcagcaggacacccctgggtcccctgatcacagggatgcttcctcctcaccagtcgctgatgatataatccaacctgcagctcccgcagaccttgagtctccaaccctggcagcttcatcataccacggcgatgtggtcggacaggtctccacagacttgatcgctcagcggtccagcgactcagaggaagcattcgagactcctgaatcaacaactccagtgaaagcccctccagctcccccaccccctcctcctgaggtgattcctgagccagaggtctctactcagcctccccctgaggaacccggatgtggtagcgaaacagtccctgtgcccgacggcccacggtccgacagcgttgaaggctctccctttcgaccgccttctcatagctttagcgctgtttttgacgaggacaaacccatcgcctcttcagggacctacaaccttgactttgataacattgagctggtggataccttccagactctcgaaccaagggcctctgacgccaaaaatcaggaaggaaaggtgaatactcgcagaaaaagtactgactcagtgccgatctccaaaagtacactatcgcgtagcctgtccctgcaggcatccgatttcgacggtgcaagcagtagtgggaatccagaggctgtggcccttgcccctgacgcctattctaccggtagtagctctgcctctagcacccttaaacggacaaagaaacctagaccaccatcgctgaagaagaaacagaccacgaaaaaacccactgaaacgcctccagtaaaagagacacagcaagagccagatgaggagtctctggtcccatctggagagaatctcgcttcagagaccaaaacagagtctgcaaaaacagaaggaccctcccctgccctgctagaggagacccctctggagcccgcagtgggccctaaggccgcttgccccttggacagcgagagcgccgagggcgtggttccacccgcttcagggggtggcagagtgcaaaattctccacctgtgggtcggaaaactctgccacttactaccgcccctgaggcaggtgaggtaacacctagtgattccggaggccaggaggattcaccagctaaggggctatctgtccggctggagttcgactattcggaggataagtcctcgtgggataatcagcaggagaatcctccccctactaaaaagattgggaaaaagcccgtggccaagatgcctctgagaagaccgaagatgaagaaaacacccgaaaaattggataataccccggctagccctcccagatcccccgcagaaccgaatgatatcccaattgctaaaggcacatatacgttcgacatcgacaagtgggatgaccctaattttaaccctttctccagcacttctaagatgcaggaatcaccaaagctgccccagcagtcatacaatttcgacccagatacgtgcgatgaatcggtggatccctttaagaccagttctaagacgcctagctctccgtctaaatcccccgcttccttcgagatccccgcaagcgccatggaggccaatggggtagacggcgacggcctgaataaacccgctaagaagaaaaagacgccactgaagactgatacatttagggtgaagaagtcccctaaacgcagtcctctgtctgatcctcctagccaggaccccacgcccgcagccaccccagagacccccccagtcatctcggccgtagttcatgcaacagatgaggagaagttagcggtgactaaccaaaagtggacctgtatgacagtggacttagaggcagataagcaagattacccccaaccatccgatctcagtacattcgtgaatgaaactaagttctcctccccaaccgaagaactagattacaggaatagctatgagatcgaatacatggagaaaatcggaagttctctgccacaggatgacgacgctccgaaaaaacaggcattgtatcttatgttcgatacctctcaagaatctcctgtgaaaagcagccccgtgcgaatgtctgagagtccaaccccctgctctggcagctctttcgaggagactgaggccctggtcaacacagccgcaaaaaatcaacaccccgtcccccgtggcttggccccaaatcaggagagccacttacaagttcctgagaagtcgtcccagaaagaactcgaggcaatgggcctggggactccatccgaggctatcgagattacagcgcctgagggctctttcgcctctgccgacgctcttctatccagactcgctcaccctgtgagcctctgcggggcactcgactatctggagcctgacttggctgaaaagaacccccctctgttcgcccaaaagctccaggaagagcttgaattcgctataatgcggatcgaagctttaaagttagcgcgacaaatagcactggcctcccggtcccaccaggacgcgaagagggaggccgcacacccaactgacgtgagcatcagcaaaactgctttgtactcacggatcggcacagctgaggtagagaaacccgcaggtctgctgtttcagcagccagatctggactccgccttgcaaatagcacgagctgaaattatcacaaaggagcgggaggtgtcagagtggaaggataagtatgaagaatctcgcagggaggtcatggaaatgagaaaaattgtggctgagtatgagaagaccatcgcccagatgattgaggacgaacagcgcgagaagagtgtgagccatcaaaccgttcagcagctggttctcgagaaagagcaggccctggccgacttgaactctgtggagaagagcctggccgacctttttcgccgatacgaaaaaatgaaagaggtcctcgagggctttagaaagaatgaagaggttctgaagagatgcgcccaggaatatctttctagggtaaaaaaagaagaacagcgataccaagcgctgaaagtacatgctgaggagaagctcgacagagccaacgccgaaatagctcaggtgcgcggtaaagcccagcaggaacaggccgctcatcaagcatcgctgcggaaagaacagctccgcgtagacgccttggagcgcacactggaacaaaaaaacaaggaaatcgaggagttgaccaagatctgcgacgagctgatcgcaaaaatgggaaagtcatag

SEQ ID NO: 244529 - DNA, 2991 bp, synthetic construct
  misc_feature 1..2991: note = Description of Artificial Sequence: Synthetic coding sequence
  source 1..2991: mol_type = other DNA
atgggcggaagtcagagcctgcagccggcaccagcttctgacctgaatctggaggccagcgaggcgatgagtagcgactcagaggaggcattcgagacaccagagagcactaccccagtcaaggcacccccagcccctccacccccaccacccgaagtgatcccggagcccgaggtgagtacacaaccgccaccagaggagcccggatgcggctccgaaactgtccctgttccagacggtcccaggagtgacagtgtggaggggagccctttccgccctccgtcccattctttctccgccgtgttcgacgaggacaagcctatcgcaagctcgggaacctataacctggacttcgacaacatcgaattggtggacacgttccagacccttgagcccagagcatctgacgcaaagaaccaagaaggaaaggtgaacacccgcagaaagtcaaccgactcggtgccaatctcgaagagcactctgtcccgatctctgagtctccaagcctcagactttgacggggcttcctcttctggcaaccccgaggccgtcgctctcgcccctgacgcctactctactggctcaagctcagcctcgagtacccttaaacggaccaagaagccacgacctccgtcattgaagaaaaagcaaacaaccaagaaacccacggagactccccctgtgaaagagactcagcaggaacccgatgaggagtccctggtgccatccggagaaaacctagcaagcgagacgaaaactgaatccgcgaagactgagggcccttcccctgcattacttgaggaaacccctctagaacctgccgttgggccaaaagccgcttgtcctcttgacagcgagagcgcagaaggggtggtgcccccagcttcaggcggaggtcgagtgcagaattcgcctccagtgggaagaaagacgttacctctgaccactgcacctgaagctggcgaggtaacacctagcgactccggtggtcaggaggatagtccagcgaagggcctgtctgtccggctcgagttcgactatagcgaggataagtccagctgggataatcagcaggaaaatccaccacctacaaaaaaaattggcaaaaaacctgtggctaagatgcccctgcggagaccaaagatgaaaaaaactcctgagaagctagataacacacctgcatctccccctcgctctcctgccgaaccaaacgacattccaattgccaagggaacttacacctttgatatcgataagtgggatgacccaaactttaatcccttctcttcaacttcgaaaatgcaagagtccccaaagctcccgcagcagagctacaacttcgacccagacacctgtgacgagagcgtggacccatttaagacctcttcaaagacccccagcagtccttcaaagtcccctgccagcttcgaaatcccagcatctgcaatggaagccaatggcgtggatggcgatggcctcaataaacccgctaaaaagaagaagacacctctgaaaaccgacacatttcgcgtgaagaaatcccccaagcgcagccccttgtctgatccacccagtcaagacccaacacctgccgcaacgccggaaacaccaccagtgatcagcgccgtcgtccatgccaccgatgaggaaaaactggcagtgacgaatcagaaatggacctgcatgacagtcgatctcgaagcggataagcaggactacccacagccatccgacctgtcaacttttgtaaacgagactaaattttcttcgccaacagaggaactggactatcgcaattcatatgagatcgagtatatggaaaagataggctcatccttaccacaagatgacgatgcacctaagaagcaggccctttatttaatgtttgacacaagccaagaaagccccgtaaaatccagtccagttcgcatgtcagagagccccacaccgtgctccgggtcctccttcgaggagaccgaagccctggtaaataccgccgcaaagaaccagcatcctgtgcctcgcggactcgccccaaatcaagagagccatctgcaggtccccgaaaaatcctcacaaaaggagctcgaggcaatgggtttgggtactccgtccgaagctattgaaatcaccgctcctgaaggaagtttcgcttcagccgatgccctgttgagtaggctcgctcatcctgtcagcctatgcggggctctcgactatttagaaccagatctggcggagaagaatcctccactgttcgcccagaagctgcagcgggaagccgctcatccaacagacgtaagcatctccaagaccgcactgtacagcaggataggcactgccgaggtggaaaagcctgcaggactgctctttcaacagccagacctggattctgccctacagattgctagggccgaaatcattacaaaggaaagggaagtatcggagtggaaagataaatacgaagaatcgcggcgagaggttatggaaatgcgaaagattgttgcagagtacgagaaaacaatagctcaaatgatcgaagacgagcaaagggagaagtctgttagccatcagaccgtacagcaacttgtcctggaaaaggagcaggcgctcgccgatcttaatagtgtggaaaaaagcctggcagacttatttcgcagatatgaaaaaatgaaggaagtactcgaaggattccgcaagaatgaagaggtcctgaagaggtgtgcccaggaatatttatctcgggttaagaaagaggagcagagatatcaagctttgaaggttcacgccgaagaaaagcttgatagggctaacgcggagatagcccaggtgaggggtaaggcacagcaggagcaagccgcacaccaggcctctctacgaaaagagcagctgagagtcgatgcactcgagcgcacgctagaacagaagaataaggaaatagaggagctgacaaaaatctgcgacgagctgatagcaaagatgggtaaatcttag

SEQ ID NO: 244530 - DNA, 1716 bp, synthetic construct
  misc_feature 1..1716: note = Description of Artificial Sequence: Synthetic coding sequence
  source 1..1716: mol_type = other DNA
atgcctctgagaaggcctaagatgaaaaaaacgccagaaaaattggataacacaccagccagccctcctaggtcacccgctgagcccaatgacatccctattgctaagggtacatatactttcgacatcgataaatgggacgaccctaactttaatcccttctcatcaacctcaaagatgcaggaatcccccaagctgccacagcaaagttacaattttgaccctgacacttgtgacgaaagcgtggatccgttcaagacgagctcaaaaactccctcgtccccgagcaaatctcctgcttcttttgaaatccctgccagtgccatggaggcaaacggcgttgacggcgatggtctcaacaagcctgctaaaaaaaagaaaactcccctgaagaccgtcaaaaaatcccctaagagatctcccctttcagatccgccatcacaggaccccacaccggcagcaacacccgaaactccacccgtgattagcgccgtcgtgcacgccacagacgaggagaaactcgctgtgaccaaccagaagtggacctgtatgaccgtggatctggaggccgacaagcaagattatccacagccttcagatctgagtacttttgtcaacgagactaagttctcctccccaacagaagaattagattacagaaactcttacgagatcgaatacatggaaaagatcgggagctctctaccccaagatgatgacgccccaaaaaagcaggcactgtatcttatgtttgacacctctcaggagtctcctgtgaaatccagtcctgtacggatgtccgagtcacccacaccctgtagcggcagttccttcgaggagactgaggctcttgtgaataccgcggctaaaaatcagcatcctgtgcctcggggattggcgcctaatcaagagagtcatctgcaggtgccggagaagagttcacaaaaagaactggaggcgatgggcctcgggacgcccagcgaagccatcgaaataagagaagcagcgcatccaacggacgtgtctataagtaagaccgccctctatagcagaataggcacagccgaggttgaaaaacccgcaggcctgctattccagcaacctgaccttgactctgctctccagatcgcccgagccgaaatcatcaccaaagagagggaggtaagcgagtggaaggacaaatacgaagagagtagacgggaagtgatggagatgagaaagattgtggcagaatatgagaagacaatcgctcaaatgattgaggatgagcagagagagaagtcggtatctcatcaaacagtccagcagttagttctcgaaaaggaacaggccttggctgatctgaactcggtagaaaagtcgcttgctgatctttttcgtaggtatgaaaagatgaaggaggtattggaaggattccgtaagaacgaggaagtgcttaagagatgtgcccaggaataccttagtcgggtaaaaaaggaagagcaaagatatcaggctctaaaggtgcacgctgaggagaagctggaccgggctaacgccgagatcgcccaagttcggggaaaagcacagcaagagcaggccgcacatcaggcctctcttcggaaagaacagctgcgagtcgacgcgctagagaggacacttgagcagaagaacaaagaaatcgaggagctgactaagatttgcgacgagctgatagcaaagatggggaaaagctag

SEQ ID NO: 244531 - DNA, 8846 bp, synthetic construct
  misc_feature 1..8846: note = Description of Artificial Sequence: Synthetic coding sequence
  source 1..8846: mol_type = other DNA
atgggcaacgagaacagcaccagtgacaaccagcgtacgttgtccgcacagacccctcggtctgcacagccccctgggaactcccagaatattaagaggaagcagcaagacactccaggctctccagaccaccgggatgcatctagtattggtagcgttggactggggggattttgcaccgcctcagagtccagcgctagtttggatccttgcctagtgtctccagaagttaccgaaccaagaaaagaccctcaaggggcacggggaccagagggctccctgcttccatcccccccaccaagtcaggagcgcgaacaccccagcagcagcatgccttttgcagaatgccccccagaagggtgcctagcgagtcctgccgctgcccctgaggatggcccacagactcagtcccccagacgcgagcctgctcccaatgcccctggggacatcgccgctgccttcccagctgagcgggacagcagcactccatatcaggaaatcgccgcagtgccttcggcgggtcgggagcggcagcccaaagaggagggtcagaagtccagcttctctttcagctctggcatcgaccagagccccggtatgagtccagtgcccctgagggagcccatgaaggcccctctttgtggggaaggggaccagcccggtggattcgagagccaggagaaggaggccgctggcggtttccctcctgccgagtcccgccagggggtcgcctccgtgcaggtgacgcctgaagcaccagccgcagctcagcagggcactgagtcttcggccgtcctcgagaagtctccccttaagcccatggcccctataccacaggatcccgcacccagagccagcgatagggagcgaggtcagggcgaggcccctcctcaatacctaacagatgatctagaattcctgcgtgcctgccacctccctcggtcgaatagtggcgcagcaccagaggctgaggtgaacgcggctagtcaggaatcatgtcagcaaccagtgggggcttatctgcctcacgccgagcttccatgggggctcccaagccctgccctggtgccagaagcgggaggatcaggtaaggaagccctggacacgatcgacgtgcaggggcatccccagacgggaatgagaggcactaagccaaatcaggtggtgtgcgtcgcagctggcggacaacctgaggggggattacccgtcagcccggagcccagcctgctgacaccaaccgaagaagcccacccagctagctcgttagcgagtttccccgcagcacagatccctatagctgttgaagagcccggttcatcctccagagagagcgtgtcgaaggccggtatgccggtctccgccgacgccgcaaaggaggtcgtggatgccggattagttggattggagaggcaggtaagcgatctcggctctaagggagagcatccagagggggatcccggagaagtgcccgctccctcccctcaagaaaggggcgagcatcttaacacagaacaatcgcatgaggttcagccaggggtgccacccccaccactgccaaaagagcagagccacgaggttcagcccggtgctccgccacctccactgccgaaagcgccttctgagagcgccagaggaccccctgggcctacagacggggcaaaggtccacgaagattctacatcgcctgcagtggccaaagaaggaagtagatctcccggagacagccctggcggaaaggaagaggcccctgaacccccagatggaggagacccaggtaacttgcagggagaggattcccaagccttttcctctaagagagatcctgaggtgggcaaggacgaactctctaagccatcctctgatgccgagtccagagaccacccctcctcacattccgcccagcctcccaggaaagggggagccggacatacggacgggcctcacagtcagacagcagaggccgatgcctccggactgccacacaagctgggcgaggaggatccagttctgcctccagtccctgatggcgctggagaacccactgtgcctgaaggcgcaatctgggaaggatcggggctccaacctaaatgcccagatacgctgcagtcaagagaagggttaggtagaatggagtcatttctcacactggagtccgagaagtcagattttccccctacacctgtcgcagaggtcgcccctaaggctcaagagggggagagcactttggagatccgtaaaatgggaagctgcgatggagagggattgctcacgagccccgaccagcccaggggtcccgcatgcgacgcaagcagacaagaattccatgccggtgtgccgcaccccccacagggcgaaaacctggctgccgatctgggtttaaccgcccttatactagatcaagatcagcaggggatcccgtcttgccctggggaaggctggatccggggtgcggcaagtgagtggccgctgctctcttctgaaaaacacctgcagccttctcaggcccaacctgaaacctcgatcttcgatgttttgaaggaacaggcccagcctccagaaaatggcaaagaaacttctcccagccaccctggtttcaaggatcagggagctgacagctcacagattcacgttcccgtggaaccgcaggaggacaacaatctgcctacacatggcggacaggagcaggccctgggaagtgagctgcagagccagctccctaagggaacactgtccgacacccccacgagctcacctactgacatggtgtgggaatctagtcttaccgaggagtcagagctgagcgcccctactaggcagaaactacctgctttgggcgagaagaggcccgaaggagcttgcggtgatggacaatcctcacgcgtgtccccgccagcggctgacgtgttgaaagacttttcccttgccggtaatttttcgaggaaagagacatgctgtaccggacagggacctaacaaatcccagcaggccttggcagacgcccttgaagaaggttcccagcacgaagaggcgtgccagcgccatccaggcgcatcggaggcggctgatggctgctctcccctttggggtctctccaaacgcgagatggcatcagggaacactggtgaggcccctccttgtcagcccgattcagtggctctcctggacgcagtaccttgcctccccgctctagctcccgctagtcccggagtgaccccaacacaggatgcccctgaaactgaagcttgcgacgaaacccaggagggccgacagcagcctgttcccgctccacagcaaaagatggaatgctgggcaacatccgacgctgagagcccaaagctgttggcatcctttccaagtgctggagagcaggggggagaagccggagccgcagaaaccggcggatcagccggtgccggagaccccggtaaacaacaggctccggagaagccaggggaagcaaccctgtcatgcggactcctgcagactgagcactgccttacgagtggcgaggaggcttccacctccgctctccgggaaagctgtcaggccgaacatcctatggctagctgccaggatgccctgctccctgcaagggaactgggaggaataccacggtcaacaatggacttcagcacccatcaagccgttcccgaccctaaggagcttctcctgtcagggcctcccgaagtggctgcgccagatacaccgtatctccacgtggacagcgcggctcagagaggcgcagaggactcaggcgtgaaagcagtgagctcagctgatcccagggcccctggcgaatcgccctgtccggtcggtgagccaccgctcgccttggagaacgccgcttctcttaagctgttcgctggatcactcgctccactactgcaaccaggcgcagcagggggtgagattcctgcagtgcaagccagttccggctcgcccaaagcccgtaccaccgaggggccagtggactcgatgccttgtcttgaccgtatgccccttctggccaagggcaaacaagccaccggagaggagaaagccgcaacggcgccaggcgctggcgcaaaggcgagtggcgaaggaatggctggagatgctgcgggagaaaccgagggcagcatggaacgtatgggagagccatcccaggaccccaagcagggcacctcgggcggtgtggacacgtcctcggagcagatagcaaccctcacaggattcccagattttcgggagcacatcgctaagattttcgagaagcctgtcctgggggctcttgccacgccaggcgaaaaggccggagcaggcaggagcgcagtgggtaaggaccttacccgcccattgggacccgaaaaattactggatggcccacctggcgtggatgttactctgttacccgcaccaccagctcgactgcaagttgagaaaaagcagcagcttgcaggggaggccgagatcagccaccttgctctgcaggacccggcaagcgacaaactgcttgggccagctggacttacctgggaacggaatttgcctggagctggtgtcggcaaagagatggccggtgtgccacccacccttagggaggacgaacgtcctgaaggcccaggcgcagcttggccaggcctcgagggtcaggcctacagccagctggaacggagcaggcaggagctcgccagcggactccctagtcctgctgcgacccaggaactccccgtggagcgtgccgctgcattccaggtcgcgccacacagccatggggaggaggccgtggcccaggatagaataccttctgggaagcagcaccaggagacgtcagcgtgcgactctccacacggggaggatgggccaggtgactttgcccataccggtgttcctggtcatgtcccacgatccacgtgtgctccaagtccacagcgggaggtgctgacagtgcccgaggctaactccgaaccctggactctggatactctggggggagaacgaaggccaggcgttacggccggtatactcgagatgagaaatgccctgggcaaccaaagtacacccgcacctccaaccggtgaggtggccgacaccccattagagccaggcaaagtggcaggggcagctggcgaggctgaaggagacattaccctttctactgccgaaacacaggcttgcgcaagcggcgacctcccagaggctgggaccacccgtacattctcagtcgttgctggcgatctggtgttgcctggatcttgccaggaccctgcctgttctgacaaggccccaggaatggagggaacagctgctctgcacggcgattcccctgctaggccacaacaggctaaagagcagcccggtccggagaggcccatcccagccggtgacggtaaggtgtgcgtttcctctcctccagagcctgatgaaacgcacgatcccaagttgcagcacctagcccctgaagagcttcacacggaccgtgaatcccccaggccaggacccagcatgctgccaagcgtgccaaagaaagatgcccctagagttatggacaaggtgaccagtgatgagacgcgcggtgcagaggggaccgagtcatctcccgtcgccgacgatatcatacaaccggctgcaccggcagatctggaatcccctaccctggcggcaagcagctatcatggagacgtggtcggacaagtatctacagacctcattgcacagtccatttctccagccgcagcccacgcaggcctgcccccttctgcagcagagcatattgtgagcccaagcgcaccagcaggggaccgagtggaggcaagcacccccagctgccctgatcccgctaaagatttgtcaagatcctccgacagcgaggaggcattcgagacacctgaatccacaacgccagtcaaggcccctccagccccaccccctcctcctcccgaagtgattcccgaaccagaggtctcgacccagcccccaccagaagagccaggatgcggatcggaaacagtgccggtgcctgacggcccaaggagcgactctgtggaaggctcccccttccggccaccttcacattcattttccgctgtgtttgacgaagacaagcctatcgcttcgtccggaacctacaacttagatttcgacaatatcgagcttgtggataccttccagacactggagcccagagcttctgatgcaaagaaccaagaaggtaaggttaacacaaggagaaagtctaccgattcggtgccaattagcaagtctacactgagccgctcactcagtttgcaagctagcgatttcgatggcgcttcttcttcgggcaatccggaagcagtggccctcgctcccgatgcctactcaacgggttctagcagcgcttcgtcaactctgaaaaggaccaaaaaacccaggccaccctctctgaagaaaaaacagaccaccaagaagccaactgagacaccacccgtgaaagagacacaacaagaaccggacgaggaatctctcgttccgagcggagaaaatctcgctagtgagaccaagacagagtccgctaaaactgaaggcccttctccagctctgctggaggagacaccgctcgagcccgctgtcgggcctaaggccgcatgcccgctggacagtgaatccgctgaaggggtggtgccaccggcatcgggagggggtcgcgtgcaaaactcccccccagttggcaggaaaacacttccgttgacaacagcgcctgaggctggcgaggttactcctagtgacagcggtgggcaggaggacagtcccgcaaaaggtttgtcagttcggctcgagtttgattattctgaagacaaatcctcctgggacaaccagcaggagaaccccccaccaacaaagaaaatcggcaaaaagcctgtcgcaaaaatgcctctccgacgacctaagatgaagaagacccctgagaagctcgacaacacaccagcctcccccccacgctctcctgctgagcccaatgatattcctattgcaaaaggaacctatacattcgatattgacaaatgggatgacccaaacttcaatcctttttcatccaccagtaaaatgcaagaaagtcctaaactgcctcagcagagctataatttcgaccctgatacatgcgatgagagtgttgatccatttaagactagtagcaaaacgccatcatcaccttcaaagagtcccgcaagcttcgaaattcctgcaagcgcaatggaggccaacggcgtggacggagatgggctgaacaagcctgcaaaaaaaaagaaaactcctctgaagacagatacctttcgggtgaaaaagtctcccaagagaagtcctttgagcgatcctccctctcaggatccgacgccagccgcaacccccgagacacctcccgtaatctcggccgttgtgcatgcgacagacgaggagaagctggccgtgacgaaccagaagtggacttgtatgaccgtggatcttgaagcagacaaacaggactatccccaaccgagcgacctgtccacatttgttaatgaaacaaagttttccagtccaacagaggaactagattaccgcaactcatacgagattgaatatatggaaaaaattggttcctcccttccacaggatgacgatgccccaaagaaacaggccctttacttgatgttcgacacctctcaagagtcgcccgtcaaaagctcacctgtgcgtatgagcgagagcccaaccccctgtagtggtagttcattcgaagagacagaagctctcgtgaatacggcggctaaaaatcagcaccctgtacccagagggctagccccaaaccaggaatctcacttacaggtgccggagaagtcgtcgcagaaagagctggaggcgatggggctaggaacccccagtgaagctatagaaataactgcccctgaaggatcatttgctagtgccgacgcgctgttgtcacgcttagcccaccctgtctccctctgtggcgctctggactacctagaaccagacttagctgagaaaaaccctccgctgtttgcacagaagctccaggaggaactcgagttcgcgatcatgaggatcgaagccctgaagctggccaggcaaattgcactcgcctctcgctcacatcaagacgccaagcgggaagcagcgcacccaaccgacgttagcatctcgaagaccgctctctatagtagaatcggcaccgccgaggtggagaaaccggctggcctgctcttccagcagccggatctggattctgccttgcagattgcaagagcagagataatcactaaagagagggaagtgagtgagtggaaagacaaatacgaggagagccggagggaggtcatggagatgagaaagatagtcgccgaatatgagaaaacaattgcccagatgattgaggatgagcaaagagagaagtccgtgtctcaccagaccgtgcagcagttagtgctggagaaggaacaagcgctggcagacctaaactcagtagagaaatccctggccgatctgttccggcgttacgagaagatgaaagaagttttagaaggcttcaggaagaacgaggaggtgttgaagaggtgtgctcaagagtatctgtcccgcgtaaaaaaagaagagcagaggtatcaggcactgaaggtgcatgccgaggagaagctggatagggccaacgccgagatcgcacaggtcagaggcaaagcccagcaggagcaggctgcccaccaggccagtctgagaaaagagcagctgcgagtcgacgcgctggagagaacactggagcaaaaaaataaagaaatcgaggagctgacaaagatatgtgacgagcttatcgctaagatggggaaatctta

SEQ ID NO: 244532 - DNA, 8627 bp, synthetic construct
  misc_feature 1..8627: note = Description of Artificial Sequence: Synthetic coding sequence
  source 1..8627: mol_type = other DNA
atggggaacgagaactcgacgtcagataatcaaagaaccctcagcgcacagactcctcgctcagcccagccgccagggaattcccagaacatcaagcgtaaacaacaagacaccccaggtagtccggaccaccgagacgcctccagtattggatcagtggggctgggagggttctgcacggcgagtgaatcctcagcatcgttagacccctgtttagtgtcccccgaggtgacagagcctcgcaaggaccctcaaggcgctcgcggacctgagggatctctgctgccttcccctccgccatcccaagaacgcgaacacccttcctcttcaatgccatttgctgagtgcccacccgagggatgcttggcctctcctgcagccgctccagaagatggcccacagacccagtcacccaggcgcgagcccgcaccgaatgcacccggagatatagcagccgcatttcctgctgaacgcgattcatccactccataccaggaaattgcagccgtgccatcagccggacgcgagcgccagcctaaggaggagggacagaaatcaagctttagttttagttcaggtatagatcagagccctggaatgagccccgtgcctttgcgcgaacccatgaaggccccactgtgtggggagggagaccagcccggagggttcgagagtcaggagaaggaggctgccggagggttcccacctgctgagtcaaggcagggcgtggcttccgtgcaggtgactcccgaggcccctgcagccgcacagcagggaaccgagtccagtgctgtcctggaaaagagtcctctgaagcctatggcacctattcctcaggacccagcaccaagggcctcagatagggaaagaggacagggcgaggcaccacctcaatacctgaccgatgatcttgagtttctccgggcttgtcacctgccaaggagcaatagcggggcagctcctgaggcagaagtgaacgccgcatcgcaggagtcctgccagcaaccggtgggtgcctatctgccccatgccgagctcccttgggggctcccatcaccggctctggtaccggaggctggtggcagtggtaaagaagctttagacactattgatgtgcagggacacccgcagaccggtatgcgcggaactaaaccaaaccaggttgtctgcgtggccgcagggggacagcctgaagggggattgcccgtctcaccagaacctagcctactgacgcctacagaagaggctcatccagcgagctcactggcctcattccccgcagcccagatcccaattgccgtagaggaacccggatcaagttcacgtgaatccgtcagcaaagctgggatgcccgtgtccgccgatgcagccaaagaggtcgtggatgcaggactcgtaggccttgaacggcaggtaagtgacctgggaagtaaaggagaacatcctgaaggagatcccggagaagtcccagccccttctccccaagaacgaggggaacacctgaacacagagcagagccacgaggtgcaacccggtgtgccaccgccaccactgcccaaggaacaatcgcacgaagtccagccgggtgctcccccaccacctttaccaaaggcaccttcagagagtgcccgtgggccacctggccctactgacggggctaaggttcatgaggacagcacaagccccgctgtagccaaggaggggtcgcgtagtcctggcgactctcctggcggtaaagaggaagcgcctgaacccccagacggcggagatcctgggaatctacagggcgaggactcacaagccttttcatcgaagagggaccccgaggtaggtaaggatgagctttcaaaaccatcctccgatgccgagtccagagatcacccttctagccactcagcccagcccccacgtaaaggcggagctggacacacggacggtccccacagccaaacagcggaggcggacgctagtggcttacctcataaactgggggaggaggaccccgtgttaccaccggtgcccgacggagctggagagcctaccgtgcctgagggcgcaatctgggaggggagtgggctgcaaccgaagtgcccggatactctccagagccgcgaaggcctgggtaggatggaatctttcttaacactcgagagtgagaaaagcgatttcccgccaacccccgtggccgaggtcgcccctaaggcccaggagggggagtccaccctggaaatccgcaagatgggcagttgcgacggagagggattactgacctccccagaccaaccacgcggtcctgcctgcgacgcctctagacaggaattccacgctggagttccccacccaccccagggcgaaaacctcgccgctgatttaggcctgactgcccttatcctggaccaggaccagcaggggattccatcctgccccggagaagggtggattagaggcgcagcatctgaatggcccctactcagttccgaaaagcacttacagccatcccaagcacagcccgagacttccatctttgatgtgttgaaagagcaagctcagccccctgagaacgggaaggaaacaagcccctctcatcccggtttcaaagaccaaggagcagattcttcgcaaattcacgtccccgtggaaccacaagaggacaacaaccttcccacacatggaggccaggagcaagcgctaggatccgagctgcagagccagctgccaaagggaactttgtctgatactccaacatcaagccctacagacatggtctgggagagcagccttactgaggagtccgagctctctgcccctacacggcaaaaactgccagccctgggggagaaaaggccggagggagcctgcggagatggacagtcttctagagtgagccccccagctgccgacgtgttgaaagatttctctctggcaggtaatttttctaggaaagaaacatgctgtactggtcagggccctaacaagagtcagcaggctctggctgacgccttggaggaagggagccagcacgaggaggcctgtcagaggcaccctggggcatctgaggctgccgacggctgttctcctctgtgggggctgtccaaacgcgagatggcttccgggaacaccggagaggccccaccctgccagcctgatagcgtagccctgttagacgcagtcccctgcctgcccgcactggccccagcttcccctggcgtgacacctacccaagacgccccagagaccgaagcatgcgatgaaacccaggaggggcgacaacagcccgtgcccgcacctcagcagaaaatggaatgctgggcaacatctgacgcagagagcccgaaacttctggccagcttcccaagtgccggtgagcaaggcggagaggcgggtgctgcagagactgggggaagcgccggtgccggagatccagggaaacaacaggcgcctgaaaaacctggcgaagctacgctgtcctgtgggctcctgcaaacagagcattgcttaactagtggggaggaggcatcaactagcgccctgcgggagagctgccaggccgaacatccaatggcgtcctgtcaggacgcactactccctgccagggaactcggcggtatacccagatccacaatggatttttccactcaccaagcagtgcccgaccccaaggagctacttctgtcggggccaccagaggttgcagcccctgacacaccatatctacacgttgatagcgcagcgcagaggggcgctgaggactctggcgttaaagccgttagctctgctgatccgagagcaccaggtgagtctccatgccccgtgggggaacctccgctcgccctggaaaatgcagctagcctcaagctgttcgcaggcagcctagcccctttgctccagcctggtgctgcagggggagagatccccgcagtgcaggcatcttctggcagccctaaggctcgcaccaccgaagggccagtggacagcatgccctgcttagaccgcatgcctcttctcgctaaggggaagcaagccaccggagaagaaaaggctgcaacggctccaggggcaggcgcaaaggccagcggggaggggatggcgggagatgctgcaggggagaccgaaggatctatggaaaggatgggcgagccctcacaggaccctaagcagggtacctctggcggagtggatacctcaagcgaacagattgcgaccctcaccggtttccctgactttcgcgagcacattgccaaaatcttcgaaaaaccagtgctgggcgcacttgctacacccggtgaaaaagcaggcgcaggaaggtcggccgtgggcaaggatctgacgagacccctgggcccagagaagcttctggatggccctccaggtgtggacgtgacccttctcccagcgccacccgcacgcctacaagtcgagaaaaagcaacaattagccggagaagccgaaatcagtcacctggccctccaggatcctgcgagtgacaaactcctgggcccagctggcctcacatgggagcgcaatctgcccggagctggcgtgggcaaggaaatggctggcgtgcctcctacactccgagaagacgaaagaccggagggtcccggtgcagcctggcccggactggagggacaagcctatagccagctggaacggagcagacaggagctcgccagcgggctgcctagtccagcggctactcaagagttgcctgtcgagagggcagccgctttccaggtggctccgcactctcacggagaggaagcagtcgcgcaagatcgtatcccttctggcaagcagcaccaagaaacttccgcctgtgattctcctcacggcgaggacggtccaggcgactttgcccatacaggagtgccagggcatgttcctaggtcaacctgtgccccttccccccagcgcgaggttctcaccgtccccgaggcaaatagtgagccctggacgctggacaccctgggtggtgaacggcgaccgggtgtcacagctggcatcctggagatgaggaacgctctgggaaatcagtccaccccagccccacctaccggagaggtcgcggacactcccttagaacccggaaaagtcgccggagctgccggagaggccgagggggatataaccctgtctaccgctgaaacacaagcttgtgcttccggcgacttgcccgaggcgggtaccactcgcacattttctgtggtggcgggagatttggtgctccccggatcatgccaagatcccgcttgctctgataaagcccctgggatggaggggacagcagcacttcacggggacagtcctgcaagaccccagcaggccaaggagcagcctgggccagaacgcccaataccggcaggggatgggaaggtctgtgtgagttcacctcctgagcccgacgagacccatgacccgaagctgcagcacctcgcaccagaagaacttcacaccgaccgagaaagcccacgccctgggccttcaatgctgccaagcgtgcctaagaaagatgccccaagagtcatggataaagtgacaagcgacgagaccagaggagctgaagggacagagcgctcagcgaaagatataggcctgtggaaagcaatgatgcccagcctggatacagataccctcgatgtactcgagagaagggtggttctcatccagcacgagttcctgcacaaaaaagaagccaacgggcactctagattcatgtactcaagtcctgtggccgatgacataattcagcccgctgctccagccgatctggaaagcccaaccctcgcagccagtagctaccatggtgatgtggtcggtcaggtgtccactgaccttatcgctcaaagaagttcggattccgaggaggctttcgagactccagagtccaccactcctgtcaaggcccctcccgcacctccccctccacccccagaggtgattcccgaaccggaggtgagcactcagccccctcctgaggagcctggctgtggaagcgaaacggttcccgtccctgacggtcctagatccgactctgttgagggctccccatttcggccaccaagtcactctttttcggcagtttttgacgaggacaaacctatagccagcagtggtacatacaacttggattttgataatattgaacttgtggatacattccagacccttgagccccgtgcaagtgatgctaaaaaccaggagggcaaggttaatacaaggagaaaaagtactgattccgttcccattagtaaaagcacgctgagccgatctctctccctccaggcctcagactttgacggggcaagcagctccggcaaccctgaagcagtcgcactggcccctgatgcatactcgactgggagctcgagcgccagttctactctgaagcgcaccaaaaaacctcggcctccgtcattgaagaagaaacagacgactaagaagccaacagagacgcctcccgttaaggagacccagcaggagccagatgaagagagcctcgtaccttccggcgagaacctggcctcagagacaaagaccgagagtgctaaaaccgagggaccatcccccgcactgttagaagagacaccgcttgagcccgctgtgggcccaaaagccgcatgcccactcgattcagaatccgctgaaggagtggtacctccagctagcggcggaggccgtgttcaaaatagtccacccgtgggccgtaaaactctacccctaactaccgctcccgaggcgggagaagtgaccccttctgattcaggcggtcaggaggacagccccgcaaaggggttgtctgtacggctcgagtttgactacagtgaggacaaaagctcctgggataaccagcaggaaaacccgccaccaaccaagaagatcggcaagaagcccgtggccaaaatgcccttgcggcgacctaaaatgaagaaaactcccgagaagctagacaataccccagccagccctccccgttcacctgctgagcccaatgatattcctattgccaaaggcacttacacgttcgacatcgataaatgggacgaccccaattttaatcctttttcctcaacctccaaaatgcaagaaagtcctaagttgccacaacagagctacaacttcgatcccgacacatgcgatgagagtgtggacccatttaaaacaagctcgaagacgccctcttccccttcgaagtcacctgcttcctttgagatcccagcgtcggccatggaggcaaatggagtggatggggatgggctgaacaaaccagcaaaaaagaagaaaacccctttgaagacagatacatttcgtgttaaaaagtcccccaaaagatctcccctgagcgacccgcctagccaggaccccacacctgcagccactccagaaaccccccctgtgatctcagctgtggtccacgctaccgatgaagagaaactggccgtgaccaaccagaagtggacctgcatgaccgtcgatctagaagcagataaacaggactatccgcagccaagcgacctttcaactttcgtgaacgagaccaaattctctagccccacagaagagctcgattaccgcaactcatacgagatcgaatatatggagaagatcggttctagcttaccacaggacgatgatgcacctaagaagcaggccttgtaccttatgttcgacacatcacaagaaagtcccgtgaagagtagcccggtgcggatgtctgagtcccccaccccctgttccggtagctcattcgaggaaaccgaggccttagtgaacaccgctgctaaaaaccagcatcctgtgccaaggggactggccccaaaccaggagtcgcatctgcaagtgcccgagaagagcagccaaaaagagctcgaggccatgggacttgggacaccctctgaggcaatcgagattcgcgaagccgctcatccaaccgacgtatcaatttctaaaaccgccctgtacagccgaatcggcacggcagaggtagaaaagcccgctggcctacttttccagcaacctgacctagacagcgcccttcagatagcaagagcagagatcattactaaggaaagggaggtgtcagagtggaaggacaagtatgaagagtctcggagagaagtaatggaaatgcggaaaatagttgcagaatatgaaaaaaccatcgcacaaatgatcgaagatgagcagcgggaaaagtcggtaagtcatcaaacagtgcaacagctggtgctggaaaaggagcaggctctcgccgacctcaattccgtcgagaaaagccttgcagatctattccggagatatgagaaaatgaaggaagttttagagggctttcgcaaaaatgaggaggtgctgaaaaggtgtgcgcaggagtacctgtctcgggtgaaaaaggaagaacaaaggtaccaggccttgaaggtgcacgccgaagaaaagcttgatcgcgctaatgcagaaatagcccaggttcgagggaaggcgcagcaggaacaggccgctcatcaggcatccctacggaaggaacagctgagagtggacgcccttgagcgtacattagaacagaagaataaagagatcgaggagctcaccaagatttgcgatgagctcattgctaagatgggtaagtccta

SEQ ID NO: 244533 - DNA, 3285 bp, synthetic construct
  misc_feature 1..3285: note = Description of Artificial Sequence: Synthetic coding sequence
  source 1..3285: mol_type = other DNA
atgggaaacgaaaattccactagtgacaaccagcgtaccctctccgcacagacccctaggtcagcacaaccccctggaaacagtcagaacattaagcgcaaacaacaagatacccccggatcacctgatcatcgggacgcatcttcctcacctgtggctgatgatatcatccagcctgccgctccagcagatctggaaagccccacactggcagccagtagctaccacggggatgtcgtaggccaggtctccacggacctgatagcccaaaggagctccgacagcgaggaggccttcgaaactcctgagtcgaccacccccgttaaagctcctcccgctcctcctcctccccctcctgaggtcattccagagccagaggtgtctacgcagcctccaccagaggagccagggtgcggcagtgagactgtccccgttcccgacggccctaggtcagatagcgttgaagggagcccttttaggcccccttcccacagtttttcggccgtgttcgacgaggataagccaatcgcttctagtggaacctacaatctggatttcgataatatcgagctggtggataccttccagaccctggaacctagggcttccgatgccaagaatcaagaagggaaagtgaacacacgtagaaagagtacagatagtgttccaataagcaaatccacgctgagcagatctctaagcctccaggcgtccgacttcgacggcgcatcaagttccgggaatcccgaagccgtcgccctggcgcctgatgcctacagtactggtagcagctctgcatcaagtacactgaaacggaccaagaaacccagaccaccctccctgaagaagaaacagacgacaaaaaaaccaactgagacaccaccggtcaaagaaactcagcaggaaccagacgaggaaagtctggtgccctccggcgagaacctagcgagcgaaaccaagaccgaaagcgcaaaaaccgagggacctagtcctgctctgctggaggaaacgccccttgaacctgctgtggggcctaaggcagcctgtcccctggatagtgaatcagctgaaggcgtcgtgccccctgcctctggaggtgggagagttcagaactcacccccagtggggcgtaagaccctgcctctgaccaccgcaccagaggccggtgaggtaactcctagtgacagcggtgggcaggaagactccccagccaaaggattgtccgttcggctggagtttgactattccgaagacaaaagctcatgggataaccagcaggaaaacccgcctcccaccaaaaagatcggcaagaaacctgtggccaagatgcccctgagacgacctaaaatgaagaagacccccgagaaactagataacacgcctgcctcccccccaagatcacctgctgagccaaatgatatcccaattgccaagggaacgtacaccttcgatatcgacaaatgggacgacccaaatttcaatcctttttccagcacgagcaagatgcaagagagcccaaaactgccacaacagtcctataacttcgaccctgacacttgcgacgagagtgtggatccctttaaaacctcctcaaagacccccagctctccctccaagtctcccgcttcatttgagatacctgctagtgccatggaggccaatggagttgacggagatgggctcaacaagccagctaagaagaaaaagacacccttaaagacagacacatttcgggtgaaaaaaagtcctaaaagaagccccctgtcagatcccccttcccaggacccaacgccagcagcgacaccagagaccccacccgtgatctccgctgtcgtgcacgccacagacgaggagaagctggcggtgacaaaccagaagtggacttgcatgacagtggacctggaagcagataagcaggactatcctcaaccgtccgacctcagcacatttgttaacgagacaaagttttcctctcctaccgaagagctggactatcgcaatagctacgagattgaatatatggagaaaatcgggtcttcactccctcaggatgacgatgcccctaagaaacaggcgttataccttatgttcgatacatctcaggagagcccagtcaagtccagtccagtgcggatgtctgaatcgccaactccctgcagtggctccagtttcgaagagacggaggcgttggtgaatactgccgcaaaaaatcaacacccggttccaaggggcctggcccctaaccaggaaagccacctacaggttccagagaagagctcccagaaggagctcgaggctatggggctgggtactccttctgaagccattgaaattacggccccagagggaagtttcgcttcagccgatgccctactgtcacgtctggctcatccggtcagtctctgcggcgctctggactacttggagccggatctcgcggagaagaatccaccattgtttgcccagaagctccaggaagagctcgaatttgccattatgcgaatcgaagcactcaaacttgctagacagattgccctggccagccgttctcatcaggacgccaaacgggaggccgcacaccccacagatgtgagtatcagtaagacagctctctacagcagaataggcaccgctgaagttgagaagccagcgggtctcctgttccagcagcctgacctggactcagctctccagattgctagagccgagatcataacaaaagagagggaagtgagcgaatggaaagacaaatatgaggaatcaaggcgtgaagtgatggaaatgcggaaaatcgtcgcagagtatgagaaaaccatcgcccagatgatcgaggacgagcagcgcgaaaagtcagtctcgcatcagactgtccagcagctggtcctggagaaagagcaagctctggctgatctgaactctgtggaaaagagcctagcggacttgtttagaagatacgaaaagatgaaggaggttttggaaggtttccgcaaaaacgaagaagtgctcaagagatgtgcccaagaatacctgtcacgggtgaagaaggaggagcagcgctatcaggccttaaaagtccatgccgaggagaagctagatagggcaaacgctgagatcgcccaggtccgtgggaaagctcagcaggaacaagctgcccatcaggcatccctgcggaaagaacaactgagggtcgacgctctagagcggacactggaacagaagaataaggagatcgaggaactgacgaagatctgcgacgagctgatcgccaagatgggtaaaagctag

SEQ ID NO: 244534 - DNA, 2517 bp, synthetic construct
  misc_feature 1..2517: note = Description of Artificial Sequence: Synthetic coding sequence
  source 1..2517: mol_type = other DNA
atgagtttacaggttctcaatgacaaaaacgtctcaaatgaaaaaaacactgagaattgcgatttcctcttctctcctcctgaggtgacaggacgctcaagcgtgctgagggtaagccaaaaggaaaacgttcctccaaagaatcttgctaaagcaatgaaagtcactttccaaaccccattacgtgatcctcagacacatcgtattctgtcaccgtcgatggcctctaagctggaggcaccattcacccaggatgatacactggggctggaaaactcacaccccgtttggactcaaaaggaaaatcaacagctgatcaaagaagtggacgcgaagacgacccacggtatcctgcagaagcccgtggaggctgacacagacctgttgggcgatgccagtcccgcatttggcagtggctcatcttcagaatctggaccaggcgctctggccgacctcgactgctcatcctcgtcccaatcccccggtagttctgagaatcagatggttagccccggtaaggtgtccgggtcacctgagcaagccgtggaagaaaatctgtcctcctacagtctcgaccggcgtgtgacgccagctagtgaaacactggaggatccttgtcgcaccgaatctcagcacaaggctgagacaccgcacggagccgaggaagagtgtaaagccgagactccccacggcgcagaggaagagtgtcgccacgggggtgtgtgcgctcccgctgctgtggccacttctccacccggagctatcccaaaggaggcatgcgggggagcacccctgcaggggctcccgggagaggccttaggttgccccgctggcgtgggcacccctgtcccagccgatggcacccaaacactaacctgcgcccatacttcagcgccagaatcaaccgcgccaactaaccacttggtggctggtcgagctatgactcttagcccccaggaagaagtcgccgctggtcagatggcctcttcatctagaagcggtccagtgaagttggagtttgacgtgagtgacggcgctaccagcaagagagctccgcctccgaggagactgggagagcgcagcggcctcaagcctccactgaggaaagccgcagtgaggcaacagaaggctcctcaggaagtggaggaggacgacggacgatctggcgctggcgaggatcctccaatgccggcatcacgcggttcctatcatctggactgggacaagatggatgacccgaatttcataccattcggcggtgatactaaaagcggttgctctgaagctcagccacctgagtcccctgagacaaggttaggacaaccggctgcggagcagttgcatgctggtccggcaacagaagaacctggcccatgcctttctcagcagctgcattccgccagcgcagaggataccccggtcgtgcaattggccgctgaaactcccaccgccgagagcaaggaacgcgctctcaactccgcaagtacaagcctaccaacatcatgcccgggtagtgaacccgtgcctacacatcagcaggggcagcctgcgctagaattgaaagaagagtcttttcgggatcctgcggaagtcctgggcactggagcagaagtggattacctcgaacaattcggcactagttcattcaaggagagcgccctgcggaagcaatccctgtacctgaaatttgatccgttgctgcgagactcccctgggcgacccgtgcccgttgctacagaaacctcctccatgcatggtgctaacgagacgccttcaggacgcccacgggaagccaagctcgtggagtttgattttctgggagccctggatattcctgtgccgggtcccccaccaggggtgcccgctcctggaggaccgccattatctactggtccaatagtggaccttctccagtattcccagaaagaccttgatgcagtcgttaaggctacacaagaagagaaccgggaactcaggtcgaggtgcgaggagttacatggaaagaacctggagttgggaaaaattatggatcggtttgaggaggtagtataccaggctatggaagaggtacagaagcagaaagagcttagcaaggccgagatccagaaagtgctgaaggagaaggaccaactcacgacagacttaaattcaatggaaaaatcgtttagtgatctgtttaaaagattcgagaagcagaaggaggtcatcgaaggctatcgaaaaaatgaagaaagtcttaaaaagtgcgtggaggattacctggccaggatcactcaggagggccaacggtaccaagcgctcaaggctcatgccgaggagaagctacagctggccaacgaggagattgcacaagtcaggagtaaagctcaggcagaggctttggcccttcaagcctcacttaggaaagagcagatgcgcattcagagcttggaaaagactgtggagcagaagactaaggaaaatgaagagcttacccggatttgcgacgacctgattagcaaaatggagaagatctag

SEQ ID NO: 244535 - DNA, 438 bp, synthetic construct
  misc_feature 1..438: note = Description of Artificial Sequence: Synthetic coding sequence
  source 1..438: mol_type = other DNA
atgtctcttcaagtgctgaatgataagaacgtgagcaatgaaaaaaacaccgaaaactgcgacttcctgttctcccctcccgaggtgactggcaggtccagcgtgctgcgcgtgtctcagaaagaaaacgtgccccctaagaacctggcaaaggccatgaaagtgacctttcagacaccattgcgcgatccacagacccatcggatactgagtccatcaatggcaagcaagctggaggctccattcacgcaggatgatacccttggccttgagaattcccatcctgtttggacacagaaagaaaaagctgcagcttttagtctgagcgggggacatgcttgcggtgcagtgggcagcagggaccccaattctcgagaacagggggagtcgctggagctgtgccagcacctcgcttctcacaagctcagcaggcaatag

SEQ ID NO: 244536 - DNA, 666 bp, synthetic construct
  misc_feature 1..666: note = Description of Artificial Sequence: Synthetic coding sequence
  source 1..666: mol_type = other DNA
atgagcttgcaggtgctcaacgacaaaaatgtctctaatgaaaaaaacaccgaaaactgcgatttcttgttctcgcctccggaggtaaccggcagatcttcagtactgcgcgtcagccaaaaagagaatgtgccacccaaaaatctggccaaagccatgaaagtcactttccagacgccactccgcgacccacagactcacagaattctgtcccccagcatggcttccaagctggaggccccatttactcaagatgataccctcggattggagaatagccaccctgtgtggacacaaaaggaaaatcagcagctgattaaagaggttgatgcaaaaactacccacggaatcctgcaaaagcccgtcgaggctgatactgatctgcttggcgatgcatcaccagccttcggatccgggtcctcatccgaaagtggacctggggctctcgccgacctcgattgcagcagttcaagtcagtcacctgggagcagcgaaaatcagatggtttctcccggaaaggtcagcgggtcccctgaacaggccgttgaggagaatctgtcatcctattcactcgacaggagagtgacacctgcctccgagactctggaggatccatgtagaactgaatcacagcacaaagccgagaccccccacggcgcagagtag

SEQ ID NO: 244537 - DNA, 696 bp, synthetic construct
  misc_feature 1..696: note = Description of Artificial Sequence: Synthetic coding sequence
  source 1..696: mol_type = other DNA
atgtccctacaggtgcttaatgataaaaacgtgtccaatgagaaaaataccgagaattgtgactttctcttttccccaccagaggtgactggtaggagctccgttcttagagtaagccagaaggagaacgtgccgccaaaaaatctggcaaaagcaatgaaggtgacctttcaaacaccattgcgagatccgcaaacgcacaggattctcagtcctagcatggcttcaaaattggaggctcctttcacccaggatgacacattggggctagagaactcacaccctgtgtggacacagaaggaaaatcaacagctgatcaaagaggtggacgccaaaaccactcatggcatcctgcagaaacccgttgaagcggatacggaccttctcggagatgcttcccctgcttttggtagcggttcaagctctgagagcggccctggagccttagcggatcttgattgctcttcatcttctcagagtccaggctcctcagaaaatcagatggtttcaccaggcaaggtgtccgggagtccggagcaggccgtggaggaaaacttgagctcttactcgttagatcgcagagtcaccccagctagcgagaccttagaggatccttgccggacggaatcacaacacaaggcagagacaccacacggggcagaagaggaatgcaaggctgaaaccccacatgggtag

SEQ ID NO: 244538 - DNA, 606 bp, synthetic construct
  misc_feature 1..606: note = Description of Artificial Sequence: Synthetic coding sequence
  source 1..606: mol_type = other DNA
atggcgaacaagggaccttcttacggcatgagccgggaggtacagtcaaaaattgagaagaaatatgatgaagagctggaggagcgcctcgtggaatggattattgttcagtgcggccctgatgtagggcgtccagatagagggaggcttggcttccaggtatggctcaagaacggtgtcattctctcgaaacttgtcaacagcctttatccagatgggtccaagccagtgaaagtacctgagaaccctccttccatggtgttcaaacaaatggagcaggtagcccagttcctgaaggctgccgaagactacggagtaatcaaaactgacatgtttcaaaccgtggacctcttcgaggggaaagacatggccgcagtgcaacgcaccctcatggcgctcggcagccttgcagtgactaagaatgacggtcactacagaggcgaccctaactggttcatgaaaaaagcccaagaacacaaacgcgagttcacagaatctcagcttcaagagggaaagcacgtgatcggacttcagatgggctctaataggggcgcaagtcaagcaggtatgaccggctacggcaggcccaggcagattataagctag

SEQ ID NO: 244539 - DNA, 108 bp, synthetic construct
  misc_feature 1..108: note = Description of Artificial Sequence: Synthetic coding sequence
  source 1..108: mol_type = other DNA
atggccaataaaggcccaagctatgggatgagccgcgaggtccagcccagtaggctggcttgcctgacccatacccgggtagtccctagtgcactggcaaagctgtag

SEQ ID NO: 244540 - DNA, 606 bp, synthetic construct
  misc_feature 1..606: note = Description of Artificial Sequence: Synthetic coding sequence
  source 1..606: mol_type = other DNA
atggcgaataaagggccttcttacgggatgagccgggaagtgcagagcaaaatcgagaagaagtatgacgaggagttagaagaacgactggtggagtggattatagtccagtgtggacccgatgtgggtcgccctgatcggggaaggcttggttttcaggtatggctcaagaatggcgtcattctgagcaaactcgtcaattctctctaccccgatggttccaagcccgtgaaggtgccagaaaatccccctagtatggtgttcaagcagatggaacaggttgcccagtttctgaaggccgctgaagactacggggtaatcaaaacagatatgttccaaaccgtggatctctttgagggcaaagacatggcagcggtgcagaggactctgatggccctgggatcactggcagtgactaaaaatgatggccactacaggggagaccctaattggttcatgaagaaagctcaggaacataagcgagagttcacggagagccagcttcaggaaggtaaacacgtgataggcttgcagatggggtcaaatcggggtgctagccaggcgggtatgacagggtacgggagacccaggcaaatcattagttag

SEQ ID NO: 244541 - DNA, 606 bp, synthetic construct
  misc_feature 1..606: note = Description of Artificial Sequence: Synthetic coding sequence
  source 1..606: mol_type = other DNA
atggcgaataaaggccctagttatgggatgagccgcgaggtccagagcaagatcgagaaaaaatatgatgaagagcttgaagagagactggtggagtggattattgttcagtgcggacctgatgtaggcagacccgatcgcggtcggctcgggtttcaggtgtggttgaaaaatggggtgatccttagcaagcttgtgaatagtctgtacccagatgggagcaaacctgtgaaagtgccagagaatcctccctcgatggtttttaaacagatggaacaggtagctcagtttctcaaggccgctgaagattatggcgtaatcaaaaccgacatgtttcagactgtagacttgttcgaggggaaagacatggccgctgtccaacggaccttaatggctctcggcagcctggccgtgacaaagaatgacggccactacaggggagacccaaattggttcatgaagaaggcacaggagcataaacgagagttcacagagtctcaactgcaggagggtaaacacgtgatcggcctgcagatgggctccaatagaggtgccagccaggccggtatgacaggctacgggagaccgcgacaaatcatttcttag

SEQ ID NO: 244542 - DNA, 276 bp, synthetic construct
  misc_feature 1..276: note = Description of Artificial Sequence: Synthetic coding sequence
  source 1..276: mol_type = other DNA
atggccaacaaagggccttcatatggcatgagtagggaggttcagtccaagattgagaaaaagtatgacgaggagctggaggaacggctggtggagtggattatcgtgcaatgcgggcctgacgtgggcaggccagacagaggaagattagggttccaggtttggctgaaaaacggtgttatcctcagcaagctggtcaattctctttaccccgatggtagcaagcctgtcaaggttcccgagaatcctccctccatggtatttaagcaaatgtag

SEQ ID NO: 244543 - DNA, 606 bp, synthetic construct
  misc_feature 1..606: note = Description of Artificial Sequence: Synthetic coding sequence
  source 1..606: mol_type = other DNA
atggcgaacaaagggccaagttatgggatgagcagagaggtgcagtccaagatcgaaaagaaatatgatgaggaactggaagagcgcctggtagagtggattatcgtgcagtgtggtccagacgtgggaaggcctgaccggggacgcctggggttccaggtctggcttaaaaatggcgtgattctgtctaaactagtcaacagcctttaccctgatggcagcaaaccagtcaaagtgccggagaaccctccctctatggtctttaagcaaatggagcaagtggctcaatttctcaaagccgcagaggattacggtgtgataaagactgatatgttccagacggtggacctattcgagggcaaggatatggccgctgtccagcgtaccttgatggctctgggcagtcttgctgttaccaaaaacgacggacactacagaggcgacccgaactggttcatgaagaaagctcaggagcataaacgcgaattcactgagtctcagttgcaggaagggaagcacgttatcggcctccagatggggagtaaccgtggagcatcacaggcagggatgactgggtatggtaggcctaggcagatcatttcatag

SEQ ID NO: 244544 - DNA, 606 bp, synthetic construct
  misc_feature 1..606: note = Description of Artificial Sequence: Synthetic coding sequence
  source 1..606: mol_type = other DNA
atggcaaataagggtcctagttatggcatgagccgggaagtccagtccaaaattgagaaaaaatatgacgaagagctggaagagagattggtagaatggatcatcgtccagtgtggcccagatgtcggcagaccggatcgcggacgactggggttccaggtctggcttaagaacggcgtgatactttcaaaactcgtcaactcactgtatcctgacggcagtaaacctgtgaaagtcccagagaacccccctagtatggtgttcaagcagatggagcaggtggcacagttcttgaaggcagccgaggactatggagtgataaaaacggacatgttccagaccgtggatctttttgagggcaaggatatggcagccgtgcagcggacactgatggccctaggctccctcgccgtaactaaaaacgatggacactaccggggtgatcccaattggttcatgaaaaaagcccaggagcacaaacgagaattcacagaaagtcaactgcaggaaggcaagcacgttatcggattgcagatgggttcgaatcggggagcttcccaggcagggatgactggatacgggaggcctcgccagataatttcgtag

SEQ ID NO: 244545 - DNA, 600 bp, synthetic construct
  misc_feature 1..600: note = Description of Artificial Sequence: Synthetic coding sequence
  source 1..600: mol_type = other DNA
atggcgaaccgtggacccgcttatggcctgtccagagaggtacagcagaagattgagaaacagtatgacgcggatctagagcaaattctcatccaatggattacaacacaatgtcggaaggacgtcgggaggccccaaccaggcagggagaacttccagaactggctaaaagacgggaccgtactatgcgaactgatcaatgctctgtatccggagggccaggcacccgtaaagaagattcaggcttcaactatggccttcaaacagatggaacaaatatcgcagttcctgcaggcggctgagcggtacggcatcaatacaaccgatatcttccagacagtggacttatgggagggtaaaaatatggcgtgcgtgcaacgcactctgatgaacctgggcggtctagccgtggctcgcgacgacgggctgttctcaggcgaccccaattggtttcccaaaaaaagtaaagaaaacccaaggaactttagcgataaccagctgcaggagggcaagaatgtgataggcttgcaaatggggaccaatcggggagcatcgcaggcgggtatgaccggctatgggatgccccgacagattttgtag

SEQ ID NO: 244546 - DNA, 663 bp, synthetic construct
  misc_feature 1..663: note = Description of Artificial Sequence: Synthetic coding sequence
  source 1..663: mol_type = other DNA
atgtccgctttctcgctcgcgctcgctctcgtttcctctccacagcctccccctcccatcggtatggcaaaccggggtcctgcttacggactgtccagagaagtgcagcagaagatcgagaaacagtatgatgcagacttggaacagatcctgatccagtggattacgacccaatgtcgaaaagatgtaggcagaccgcagccaggacgagagaatttccagaattggctgaaagacggaaccgtcctctgtgaactcattaacgcgttgtatcctgaaggacaggcaccagttaaaaagatacaggcttccacaatggcctttaaacagatggagcagatctcacagtttctgcaggccgctgagcgctatgggattaatactacggatatttttcagaccgtagacctgtgggagggaaagaacatggcgtgtgtgcaacgaacactgatgaatctggggggtttggccgtggcccgagatgacggcctcttctcgggagatcctaattggtttccaaagaaaagtaaggagaatcctcggaatttctccgataaccagctgcaggaaggcaaaaacgtgatcgggctgcagatgggcacaaacagaggcgctagccaggcaggcatgaccgggtacggcatgcctcggcaaatcctctag

SEQ ID NO: 244547 - DNA, 600 bp, synthetic construct
  misc_feature 1..600: note = Description of Artificial Sequence: Synthetic coding sequence
  source 1..600: mol_type = other DNA
atggctaatcggggaccggcttatggactcagtcgcgaagttcagcagaagatcgagaagcagtacgatgctgatctggagcaaatactgatccaatggattaccacacagtgcaggaaggacgtagggaggccccagccgggacgggagaatttccagaattggctcaaagatggcaccgtgctgtgcgagttaatcaatgcattgtatccagaagggcaggctccagtgaaaaaaatacaggcctccacaatggcatttaaacagatggagcagatatctcagttccttcaggccgctgagcggtacggtatcaacaccaccgacatctttcagaccgtggatctgtgggaaggcaagaatatggcctgcgtgcaaagaactctaatgaatcttggcggtctggcagtggcaagagacgatgggctgttttccggggaccctaattggtttcctaagaagtcaaaagagaatcccaggaatttctccgataaccagttacaagaggggaagaatgtgatcgggctccagatgggcactaataggggcgcttcccaggctgggatgacaggttacggcatgccccgacaaatactgtag

SEQ ID NO: 244548 - DNA, 564 bp, synthetic construct
  misc_feature 1..564: note = Description of Artificial Sequence: Synthetic coding sequence
  source 1..564: mol_type = other DNA
atggcaaacagaggcccagcctacggcttgtccagagaggtacaacaaaagatcgagaaacagtatgacgcagatctcgagcagatactcatccaatggatcactacgcagtgtcgaaaagacgtgggccgacctcaaccgggaagagaaaacttccagaattggctgaaggatgggacagtgctttgcgagctgataaatgcactgtacccagaagggcaggctcccgtgaaaaagattcaggcctctaccatggcctttaagcagatggaacagatctctcagtttctccaagcagccgagagatacggcattaacacaaccgacatcttccagacagtggacttgtgggaaggcaagaacatggcctgtgtgcagcggaccttaatgaatttggggggactagccgtggccagagacgatggcctgttttcgggcgatccaaattggttcccaaaaaagagcaaagagaaccccagaaacttcagcgacaaccagctgcaggaaggaaaaaacgtgataggattgcaaatgggcacgaaccgtggggcttcccaggcctag

SEQ ID NO: 244549 - DNA, 3861 bp, synthetic construct
  misc_feature 1..3861: note = Description of Artificial Sequence: Synthetic coding sequence
  source 1..3861: mol_type = other DNA
atgagtcatttagttgatcccacatctggggacctccccgtgagggacatcgacgctattccactcgtcctgccggctagcaaggggaagaacatgaagactcaacctccgctgtctcgaatgaaccgtgaggagttagaagactctttctttaggctgagagaggatcacatgctggtgaaggaactatcatggaagcagcaggatgagattaagcgcttgcgtaccacccttttgaggctaacagcagccggtcgggatctgcgggtcgccgaggaggcggcacctttgagcgagactgcgaggcgcggacaaaaagcgggttggaggcagcgcctatcaatgcaccagcgcccacaaatgcaccggctccagggacactttcattgtgtgggccctgctagtccccgaagggcacagcctcgagtgcaagtcgggcaccgccagctgcataccgccggtgcaccagtcccagaaaagcccaaaagaggacctagggaccggcttagttatacggccccaccttcttttaaggaacacgccaccaatgagaatcgaggcgaggtcgcaagcaagccatctgagctggtgagcgggtccaattctattatcagtttttccagcgtgattagtatggccaagcccatcgggctgtgcatgccgaattccgctcacattatggcatccaacaccatgcaggtggaagagcctccgaagagcccagagaagatgtggccgaaagatgagaatttcgagcagcgctcatccctggagtgtgctcagaaagctgccgagctgcgagcctccatcaaggagaaagtcgagctaattagattgaaaaagctgctgcacgaacgaaatgcgtccctggtcatgactaaagcccagttgacagaggtccaggaggcttgcacatttcttttgacccagaaccaggggatcctttctgccgctcacgaggcgttgctgaagcaggtgaatgaactccgggcagaactgaaggaggagtccaagaaggcagtcagtttgaaaagtcaattggaggatgtgagcattctgcagatgacattgaaggagttccaggagcgcgtcgaggacttggagaaagagcgcaaactcttgaatgacaactatgacaagctgctggagagcatgttggactcctcagatagctcttcccagccccactggtcaaacgaactgatcgctgagcagcttcagcagcaggtgagccagctccaggatcagctggacgcggagctagaggataaacgaaaagtactgctagagctaagcagagaaaaagcacagaatgaagatcttaagctcgaagtcaccaatatcctacagaaacacaagcaggaggtggaactactccagaatgccgctacaatttctcagccaccagatcgacaaagcgagccggctacccaccctgcagtgctccaggaaaacacacaaattgaacctagtgagccaaaaaatcaggaggaaaagaaactcagtcaagtcctgaatgaactccaggtctctcacgccgaaacaaccctggaattggaaaaaacccgcgacatgttgatattgcagaggaaaatcaacgtatgttatcaggaagagctcgaagccatgatgacaaaggctgacaacgataatcgcgatcacaaggaaaagctggagcggctaaccaggctcctcgatctgaaaaacaatcgtataaaacagctggagggaatcctacgttcccacgatctgcctacctcggagcagctgaaggatgtggcttatggtacccggccactttctttgtgcctggaaactctgcccgctcacggcgacgaggataaggtggatattagccttctgcaccaaggcgaaaacttattcgagcttcacattcaccaggcgtttctcacctcagccgctctggcgcaggccggtgatacgcagccaacaacgttttgtacctactcgttttacgattttgagacacattgcaccccattaagcgtgggtcctcagccactctacgatttcacatctcagtacgtgatggaaaccgactctctgttcctgcactacctacaagaagcttccgcacgcctggatattcaccaggcaatggcctcagaacattcgactctcgcagctggctggatctgtttcgatcgggttctcgaaacagtggagaaagtccacgggctagcaaccctgattggagcaggcggtgaagagtttggcgtcctcgagtattggatgagactgaggttccccatcaaaccctcactgcaagcctgcaataaacgcaagaaagcccaggtgtatctgagtactgatgtcttgggcggaagaaaggcgcaagaggaggagttcaggtctgaatcctgggaaccccagaatgagttgtggattgagatcacaaaatgctgcggcctgcgttctcgttggctggggacgcagccgtccccctatgccgtctaccgtttttttactttcagcgaccatgataccgctatcattcctgctagtaacaacccttatttccgtgatcaagccaggttcccagtgttagttaccagcgatttggatcactaccttaggcgtgaagccctgtcgatccatgtattcgacgatgaagatttagagcctggttcttatttgggacgagccagagtacccctgctccctttggccaagaatgagtccattaaaggcgactttaacctgactgatcctgctgagaaacctaatgggtctattcaggtacaactcgactggaagtttccctacatccccccagagagcttcctcaaacccgaggctcagacgaagggaaaggatacaaaagactcgagtaagatctccagcgaggaagagaaggcctcattcccaagccaggatcaaatggcttctcccgaggttcctattgaggccggacagtaccggagcaaacgcaaaccccctcatgggggtgagaggaaggagaaagagcaccaggtggtctcctattctagaagaaagcatggaaaacgcattggggtacaggggaaaaatcgcatggagtacctttcccttaacatccttaacggcaatacaccagagcaggtcaactatactgagtggaagttctcagagacgaactcattcatcggcgatgggtttaagaatcagcacgaagaggaagagatgaccctgagtcactctgccctcaagcagaaggaaccgctgcaccccgtcaatgataaagagagctctgagcagggctctgaagtaagcgaagctcagaccaccgactccgacgacgtcattgtgccgccaatgtcccagaaataccctaaggcggacagcgagaagatgtgtatcgagatcgtttcactggcgttctaccctgaagccgaggttatgagcgacgaaaacattaagcaagtgtacgtggagtataagttttacgatctgccgctaagcgagaccgagactcccgtctctttgagaaagccgcgtgccggtgaagagattcacttccatttctcaaaggttattgacctggacccccaggagcagcagggacggaggagattccttttcgacatgcttaacggtcaggatcccgaccaaggccatttgaaatttacagtggtgtcagaccccctggacgaggaaaaaaaagagtgcgaggaggtggggtacgcctatctccagctgtggcagatcctggagtccggacgcgacatactggaacaggagctggatattgtgagccctgaggacctcgccacccctatcgggcgactcaaagtgagcttgcaggccgctgctgtcctccacgcaatttacaaagaaatgaccgaagacctcttttcctag

SEQ ID NO: 244550 - DNA, 1128 bp, synthetic construct
  misc_feature 1..1128: note = Description of Artificial Sequence: Synthetic coding sequence
  source 1..1128: mol_type = other DNA
atgaaacgaccagatttgccttctggttttgatgggtggcaggttgttgatgccactccccaggagacttctagcggaattttctgctgtggaccatgcagcgtagagtccataaaaaatgggttggtatacatgaagtacgacacgcctttcattttcgccgaagtcaatagcgacaaggtgtattggcaaaggcaggacgacggttcatttaagatcgtgtatgtggaggagaaagctatcggcaccctgatcgttacaaaagccattagtagtaacatgcgagaggatatcacctatttatacaaacacccggaaggttcagatgccgagagaaaagcagtggagaccgccgcagctcacggcagtaagccgaatgtttacgcaaacagaggatccgccgaggacgtagctatgcaggttgaggcccaggacgccgtcatggggcaggacctcatggtttcagtcatgttaataaatcacagctcatcgagacgcactgtgaagctgcatctctacctcagcgttaccttttacactggtgtgagtggcacaatatttaaagaaacaaagaaagaggtggagttagcgccaggcgcatccgaccgcgtgacaatgcccgtagcttacaaggaatatcgccctcatctggtggatcagggggctatgttgttgaacgtcagtggccacgtgaaagagagcggacaggtcctggcaaagcagcacacatttagactgcgtacccctgacttaagtctaactttgttaggcgctgcggtagttggccaggagtgcgaagtgcagatagtgtttaagaacccactaccagtcaccctgacaaatgtggtttttcggctcgaaggaagtggtcttcagagacccaaaatcctcaacgttggtgatatcggaggtaacgagactgtaactttgcgccaatcattcgtgcctgtgaggccgggaccaaggcagcttattgctagcctggacagcccacagttatcccaagttcatggtgtgattcaggtagacgtagccccagccccaggggatgggggatttttcagtgatgcaggcggagactcacacctgggagaaacaattcctatggcttctcgaggtggcgcatag

SEQ ID NO: 244551 - DNA, 408 bp, synthetic construct
  misc_feature 1..408: note = Description of Artificial Sequence: Synthetic coding sequence
  source 1..408: mol_type = other DNA
atgatggatggcccacgaagcgatgtcggaagatggggtggcaatcctctgcagccacctaccacgccctctccagagccagaaccagaacccgacggcaggtcgcgacggggagggggacgtagcttttgggcccgatgctgcggttgctgcagctgcagaaacgccgcagatgacgattgggggccagagccgtcagattctcggggtcgaggcagcagttccggcactcggcgtcctggctctaggggcagtgactccaggcggcctgttagcaggggtagcggcgtcaatgccgctggtgacgggacaattcgtgagggaatgttggttgtgaatggggtggacctgctgtccagccgcagcgaccagaacaggagagagcatcatacagacgagtacgagtag

SEQ ID NO: 244552 - DNA, 129 bp, synthetic construct
  misc_feature 1..129: note = Description of Artificial Sequence: Synthetic coding sequence
  source 1..129: mol_type = other DNA
atgatggacggaccgagatctgatgtgggaagatggggtgggaacccactgcaacctcctacaaccccttctccagaaccggaacccgagccagacggacgatcacgcagaggtggtggcagatcttag

SEQ ID NO: 244553 - DNA, 198 bp, synthetic construct
  misc_feature 1..198: note = Description of Artificial Sequence: Synthetic coding sequence
  source 1..198: mol_type = other DNA
atgatggatggcccacggtccgacgtcggtagatggggcggtaatccgctgcagcctccaacgacccctagcccagagcctgagccggagccagacggaaggagtcgtcggggtggcggaaggtctttctgggcaagatgctgcgggtgttgttcctgccggaatgctgcggacgatgactggggtcccgagccttag

SEQ ID NO: 244554 - DNA, 153 bp, synthetic construct
  misc_feature 1..153: note = Description of Artificial Sequence: Synthetic coding sequence
  source 1..153: mol_type = other DNA
atgatggacggcccaaggtccgacgtggggaggtggggcggaaatcctctacaaccccctaccacccctagcccagagcctgaaccagagcccgacggcagatctcgaagaggaggtggtagatccttctgggcacgttgttgcggatgttag

SEQ ID NO: 244555 - DNA, 30 bp, synthetic construct
  misc_feature 1..30: note = Description of Artificial Sequence: Synthetic coding sequence
  source 1..30: mol_type = other DNA
atgatggacggacccaggagcgatgtatag

SEQ ID NO: 244556 - DNA, 2064 bp, synthetic construct
  misc_feature 1..2064: note = Description of Artificial Sequence: Synthetic coding sequence
  source 1..2064: mol_type = other DNA
atggcggaagaattggtgcttgagaggtgtgacctggagctggaaaccaatggtagagatcaccacactgctgatctgtgtcgggagaagctagtagtgaggcggggtcaacctttctggctcactctgcactttgaaggccgaaactacgaggccagcgtcgactcactaaccttcagcgtggtcactggcccagcacctagccaggaggctggcactaaagcaaggtttcccttacgggacgctgtcgaggagggagattggacagcaactgtcgtcgatcaacaagactgtaccctcagcctccagcttaccactccagccaacgctccaattggcttgtatcggcttagtcttgaggctagcaccgggtaccagggttctagctttgttctgggccactttatcctgctgttcaatgcatggtgtccagccgatgcggtatacttggatagcgaggaagaacgccaggaatatgtcctgacccagcaagggtttatctatcaaggctccgctaaatttattaaaaatattccatggaatttcggacaatttgaagatggcatattggatatatgcctgatcctgctggatgttaaccccaagttcctgaagaacgccggtagagattgctctaggaggtcttcccccgtgtatgtgggacgagtggtgagtggtatggttaattgtaacgatgatcaaggagtcctgttgggtcgatgggacaataattatggcgatggcgtaagtccgatgtcttggattggcagcgtggatattttgcgcagatggaagaaccacggctgtcaacgggtcaagtacggacagtgttgggtgtttgcagcagtcgcctgtaccgtccttcgctgcttgggaatcccaacacgcgtggtaactaactacaactccgctcacgaccagaattcaaatctgttgatcgaatactttcgcaacgaatttggcgagatccagggggacaagagcgagatgatttggaatttccactgctgggtagaatcttggatgactcgaccagacctccagcccggatacgaaggatggcaggcgctcgatcctacacctcaagagaagagcgagggcacatactgttgcggcccagtgcctgtccgggctatcaaggaaggggacctgagcaccaagtatgatgccccttttgtgttcgcggaagtgaacgccgacgtggtggattggatacaacaggacgatgggtcagtccataagtcgattaacagatccttaattgttgggttaaaaatttcaaccaagtccgtcggccgtgacgaacgggaggacattacacatacttataagtatcccgaggggagtagcgaagagcgggaggcctttacgagggctaaccatcttaacaagctcgccgagaaggaggaaacaggcatggcgatgcgcatacgcgtggggcagtctatgaacatgggaagcgacttcgatgtgtttgcacacatcacaaataatacggctgaagaatacgtctgtcgactgctcctttgcgcgaggacagtgtcttataatggaatcctgggccctgaatgtggaaccaagtatctcctgaatctcaacttagagcccttttctgagaagtctgtacccctgtgcatactttatgagaaatacagagattgtctgactgaaagtaacctgatcaaggttagagcactgctggttgaacccgtgatcaactcgtacctcctggctgagcgtgatttgtacctggagaaccccgagattaagatcagaattctcggcgagccaaagcagaaacgtaagctggtcgctgaggtgtccctccaaaacccgcttcctgtggccctggagggttgcacgttcactgtggaaggggcagggcttaccgaggaacaaaaaacagtggagatcccagaccccgtcgaagccggagaggaggtaaaggtgagaatggacttgctgcccttgcacatgggcttgcacaagctggtcgtaaatttcgagtcagacaagctcaaagccgttaagggcttccgcaacgtcatcatcggacccgcatag

SEQ ID NO: 244557 - DNA, 846 bp, synthetic construct
  misc_feature 1..846: note = Description of Artificial Sequence: Synthetic coding sequence
  source 1..846: mol_type = other DNA
atggcagaagagctggtgttggaaaggtgcgatcttgagctggagacaaatggtagagatcaccatacggccgacctgtgtcgggagaagttggttgtcaggcgtggacagccgttctggctcacgctgcacttcgaaggacggaactacgaggcttctgtggacagtctcaccttcagcgtggttactgggccagccccttcgcaggaagccggaaccaaggctaggttccctttgcgggacgctgttgaggaaggcgattggaccgccacagttgtcgatcagcaggattgtactctctccctgcaactcaccacgccagcaaacgccccaattggtttataccggctgagtcttgaggccagcaccggttaccaggggtcctcttttgtcctgggccattttatcctgctttttaatgcatggtgtcccgctgatgccgtgtacctagattcggaagaggagcgacaggagtatgttctaacacagcagggttttatttaccagggatctgcaaaattcatcaagaacataccctggaattttggtcagttcgaagacggcattctggatatttgtctgattctgctcgacgtgaaccctaaatttctgaagaatgccggtagggactgctcccggaggtcttcaccagtatacgttgggagggtggtctccggcatggtcaactgtaatgacgaccagggcgtactcctcggcagatgggataataattacggggacggggtgagccctatgtcttggatagggtccgttgatatcctgagacggtggaagaaccatgggtgccaacgtgtcaagtatgggcaatgctgggtctttgcttag

SEQ ID NO: 244558 - DNA, 483 bp, synthetic construct
  misc_feature 1..483: note = Description of Artificial Sequence: Synthetic coding sequence
  source 1..483: mol_type = other DNA
atggcggaggagttggtgctggagcgatgtgaccttgaactggagactaatggtcgcgaccaccatactgccgatctatgtcgagaaaagcttgtcgttagaaggggacagcctttctggctgaccctccattttgaagggagaaattatgaagcctctgtggactctctgaccttcagcgtagtgacaggaccagcaccctcccaggaggctggcacaaaggcaagatttccattacgcgacgccgtggaggagggcgattggacggccacggttgttgatcagcaagattgtaccttgtccctgcaactcacgactcccgcaaacgctccaatcggcttgtacaggctgtctctcgaagcatctaccggatatcaggggagttcattcgtgctcggccacttcatcttgctcttcaatgcctggtgtcccgctgacgccgtgtacctggactccgaagaggaacgtcaggaatacgtgtag

SEQ ID NO: 244559 - DNA, 1821 bp, synthetic construct
  misc_feature 1..1821: note = Description of Artificial Sequence: Synthetic coding sequence
  source 1..1821: mol_type = other DNA
atggccgaggaactagtactagaaaggtgcgatctggaactggagaccaacggaagagaccaccacaccgcagacctgtgccgggagaagttggtggtgagaaggggtcaacccttttggctgactctgcacttcgagggtagaaattatgaggcaagtgtggactccctcacatttagtgtagtcacagctgatgccgtgtatttggattcagaggaagagagacaggagtacgtacttacacaacaagggtttatctatcaaggatccgccaagtttattaaaaatattccctggaactttggccagttcgaggatggcatcctggatatctgcttaattctattggacgtgaacccaaaattcctgaagaacgccggacgcgattgttcacggagatcgagccccgtatacgtgggacgcgtagtaagcggcatggtaaattgcaacgacgaccagggtgttctgctaggcaggtgggacaataactacggcgacggcgtgtccccgatgtcctggatcggatccgtggacattctccggagatggaagaatcatggctgccagagggtgaagtatggtcagtgttgggtgttcgcagctgtggcttgtacagtcctcagatgccttggtatcccaactcgggtggtgaccaactacaattccgcccacgatcagaactcaaacctcctgattgaatattttcgcaacgagtttggagagattcagggcgacaagagtgaaatgatttggaatttccactgctgggttgaatcatggatgacgcggccagatctccagccagggtacgagggatggcaagctctggaccccaccccccaggaaaagagcgaggggacctattgctgcggccctgtgcccgtgagggcgattaaggagggtgacttgagcacgaaatatgacgcccctttcgtttttgcggaagtcaacgccgacgttgtggattggattcagcaagacgacggcagcgtgcacaagagtatcaatagaagtctgattgtcggtcttaagatctccactaaatcagtgggacgcgacgaacgagaagacatcactcacacctacaagtatcctgaagggagcagtgaagagcgagaggccttcactagggccaaccacctgaacaagctggcggaaaaagaggaaaccggtatggctatgcgcataagggtggggcagtcgatgaacatgggctccgactttgacgtgttcgctcacatcaccaataataccgctgaagagtatgtgtgtcggctgctgctatgtgcaagaacagtgagttataatggcatcctcggacctgagtgtggtactaaatatcttcttaacctgaacctcgaaccctttagcgagaagagtgttcccctgtgtatcctttatgagaaataccgggactgtcttacagagagtaacctgatcaaggtgcgtgccttactggttgagcctgtgattaactcttacttgttggcagaacgcgacttatatttggagaatccggaaattaaaattcggatcctgggagaaccaaaacaaaaaagaaagctcgttgccgaagtttccctccagaatcccttgcccgtcgccttggagggctgtacattcaccgtagagggggcagggctaacagaagaacaaaagactgtggaaattccagaccccgtggaggcaggcgaagaggtaaaggttaggatggacttgttgcctctgcatatggggctgcataagctcgtggtgaactttgagtctgacaagctgaaggctgtaaagggcttccgaaatgtgatcatcggacccgcatag

SEQ ID NO: 244560 - DNA, 1884 bp, synthetic construct
  misc_feature 1..1884: note = Description of Artificial Sequence: Synthetic coding sequence
  source 1..1884: mol_type = other DNA
atggccgagggcccagccccttcccaggaagccggtaccaaggctcggtttcctctcagggatgctgttgaggaaggcgattggacggcaaccgtagtcgaccagcaggattgtacgctatcacttcagttgacaacacccgcaaatgccccaattgggctctacaggctcagtcttgaagcaagcactggctaccaggggagtagctttgttctgggccacttcattctgctgttcaatgcatggtgtcctgcagatgccgtctacctggactctgaagaggagagacaggagtatgtgcttacgcagcaagggttcatctaccagggctctgccaagtttatcaaaaacataccatggaatttcggtcagttcgaggacgggatcctcgacatctgcctgatcttgctggatgtaaatcctaaatttctcaaaaatgccggaagagattgctcaagaagatcctccccggtctacgttggccgagtcgtgtccggtatggtgaactgcaatgatgatcagggcgtcctgttgggtcgttgggataacaactacggcgacggcgtatcacccatgagctggattggatccgttgatatcctccgacggtggaagaatcatggatgtcagcgggtaaaatatggtcaatgttgggtcttcgctgctgtggcctgtacagtcctccggtgcttgggaatccccacgagggtggtcaccaattataattccgcacatgaccaaaatagcaatctactcatcgaatattttagaaacgagttcggggagattcagggagataagtctgagatgatatggaactttcattgttgggtggaatcatggatgacccggcctgacttacagcctggatacgagggatggcaggctctagacccaactccacaagaaaaatcggagggtacatactgctgcgggcctgtgccggtcagggcgatcaaagaaggagacctcagtacaaagtatgacgcccctttcgtatttgccgaggtgaatgccgatgttgtcgattggattcaacaagatgacggcagcgtccataaatctatcaacagaagcctgattgttggactaaagatctctacaaagtccgtcggaagggatgagcgtgaggacatcacccacacatacaaataccccgaaggtagctcggaagaacgcgaggccttcaccagagccaaccacctcaacaagctcgccgaaaaggaagaaacagggatggctatgcggattagagtggggcagagtatgaacatgggctctgactttgacgtgttcgcccacatcacaaataatactgcagaggaatacgtctgcaggctccttctgtgcgcgagaaccgtgtcttataatgggatcctgggaccggaatgtggtactaaatatctactgaacctgaaccttgagccattttccgaaaagtcagttcccctgtgcatcctgtatgaaaagtatcgggactgcctaacagagagtaacttaattaaggtccgagcattactagtggaaccggtgatcaatagttacctcttggccgagcgcgatctgtatctggaaaaccctgagattaagattcgaatccttggcgaacccaagcagaagcgcaagctggtcgctgaggtttcactccaaaaccccttgccagtggcccttgaggggtgtacttttactgtcgagggtgcaggactcacagaggaacagaaaaccgtggaaatcccagatcctgttgaggcaggcgaggaggtcaaggttcgcatggacttgctgccactgcatatgggcctgcataagctggtggtgaattttgaatctgataaattgaaggctgtcaagggatttcggaatgtgataatcggcccagcttag

SEQ ID NO: 244561 - DNA, 2082 bp, synthetic construct
  misc_feature 1..2082: note = Description of Artificial Sequence: Synthetic coding sequence
  source 1..2082: mol_type = other DNA
atggcggctctgggagttcagagtatcaactggcagaccgccttcaaccgccaagcacaccatactgataaattcagctcccaagagttaatcttacgcagaggacagaacttccaggtgctcatgataatgaataagggcctcggaagcaacgagagacttgagttcatcgtctcaaccggaccatacccgtcggaaagcgcgatgactaaagcagtcttcccactgtccaatggctccagcggaggttggagcgctgtactgcaggcttccaatggaaatacactgaccatcagcatctcttcgcctgcctcagcacccatcggtcgctataccatggcgctacaaattttttctcagggtggtataagctccgtcaagctgggcacattcattcttctcttcaatccatggctgaacgttgacagtgtttttatgggcaatcacgctgagagggaagagtacgtgcaggaggatgccggtatcatttttgtgggcagcactaaccgtattgggatgattggatggaacttcggacaattcgaggaagatatattgtctatttgccttagcattttggacaggagcctcaacttccgcagggacgcagctacggacgtcgccagcagaaatgatcccaagtatgtcggaagagtgctgtccgctatgattaacagtaatgatgataatggcgtgctcgcaggcaactggagcggcacctacacaggtgggagggacccgaggtcttggaatggtagtgtggagatcttgaagaactggaagaaatcaggcttcagccctgtgaggtacggccagtgctgggtgtttgcgggaacgctgaatacggcactgcgcagcttagggatcccgagtagagtgatcacgaacttcaacagcgctcatgatacagaccgcaatttgtcggtagacgtgtactacgaccctatgggtaacccgctggacaagggtagcgactctgtgtggaacttccatgtctggaacgaaggctggtttgtgcgctccgacctgggcccatcttatgggggatggcaggtgcttgatgccacgccacaggagcgctcccaaggagtgttccaatgcggtcccgcttccgttattggtgtgcgcgagggtgatgttcagttaaacttcgatatgccattcatattcgccgaggtgaatgccgatcggataacatggctctacgataatactactgggaaacagtggaaaaactcagtgaacagccatactatcggcaggtacatttcaaccaaggccgtcgggagtaatgcacgcatggacgtgactgataaatataagtacccggagggctcggaccaggagagacaggtgtttcaaaaggctctgggtaagttgaagcctaatactccatttgctgccaccagttctatgggcctggagacggaggaacaggaaccctcaatcattggcaagttaaaggtggctggcatgctggcagtgggcaaagaggtgaacctagtattgctgctaaaaaacctgtcacgggacaccaagaccgtgacagttaacatgaccgcctggaccattatatacaacggcaccctggtgcacgaggtttggaaggactctgcaaccatgtcccttgaccccgaagaagaggcagaacacccaattaaaattagttatgctcagtacgagaaatacctcaaaagcgacaatatgatccgtattaccgccgtttgcaaagtgcccgatgagagtgaagtcgttgtggagagggatatcattctggacaatccaacactgacgctcgaggtgttgaacgaggctcgtgtacggaagcccgtgaatgtgcagatgctgttcagtaatcctttagacgagccagtccgcgactgcgtgctgatggtcgagggcagtgggctgctcctcggcaaccttaaaatcgacgtgccgactttaggtcccaaggagggatctcgggtgagatttgacatcctgccctcacgatccggaaccaagcagcttcttgcagatttcagctgtaacaagtttccggcaatcaaagccatgctctcgatcgatgtggcagaatag

SEQ ID NO: 244562 - DNA, 1602 bp, synthetic construct
  misc_feature 1..1602: note = Description of Artificial Sequence: Synthetic coding sequence
  source 1..1602: mol_type = other DNA
atggcagcgcttggggtgcagtccataaactggcagactgcattcaataggcaggctcaccacacagacaagttcagcagccaggagctgatcctgcggagggggcagaattttcaggtgctgatgatcatgaacaaggggctgggctcaaacgagcggctagagtttatcgtaagcacaggcccttacccatccgagtctgccatgacaaaggccgtctttccattatctaacggatcttctggcggttggtctgccgtgctgcaggcaagcaatgggaatacactgaccatttctatatcgtcacccgcttcagcccctatcggccgttataccatggccctgcagatcttcagccagggagggatctctagcgtcaagctggggacctttatcctgctcttcaatccttggctgaatgtggattctgtattcatgggcaaccatgctgagagagaagagtatgtacaggaggatgccggaataattttcgtgggaagtaccaatcggatagggatgatcggatggaatttcgggcagttcgaagaggatatcttgtcaatatgcttgagcatactggaccgctcgctgaattttcggagagatgccgctaccgacgttgcttcccgtaacgaccctaaatacgtagggcgagtgctgtcggcaatgatcaactcaaacgatgacaacggcgtcctcgctggcaactggtcaggcacatatactggcggtcgcgacccaagatcttggaacgggagcgtggagattctgaaaaactggaaaaagtccggttttagcccagtgagatacggtcagtgctgggtattcgctgggactctgaataccgcattgcgctctctgggcatcccctcaagggtgatcactaatttcaactcagcgcatgacaccgaccggaatctctctgtggacgtgtactacgatcccatggggaatcccttggataagggaagcgatagtgtgtggaacttccacgtttggaacgagggatggtttgtgagatccgacctaggcccttcctacggaggatggcaggtgcttgatgccaccccccaggagcgaagccagggcgtatttcagtgtggccctgccagtgtgattggcgttagggaaggcgacgtacagctgaactttgacatgccttttattttcgctgaggttaatgccgaccgcatcacctggctgtacgataacactacaggaaagcagtggaagaactctgtcaattcccacaccatagggagatacataagcaccaaagccgttggatccaacgccaggatggacgtcacagacaagtataagtatccggaaggcagtgaccaggaaagacaggtgtttcagaaggctcttggtaaactgaagccaaacacacccttcgccgcaacctcatccatgggcctggagacagaagaacaggaaccctctatcattggaaagttgaaggtggccggaatgcttgccgtggggaaagaggtgaatctggtgctccttctgataccccacgccctccagtgttgtcgtatggactggcctctaacccagggactgtcgaagcgcgacacaggtgaaaaactggtctag

SEQ ID NO: 244563 - DNA, 2055 bp, synthetic construct
  misc_feature 1..2055: note = Description of Artificial Sequence: Synthetic coding sequence
  source 1..2055: mol_type = other DNA
atgatggacgcttctaaggagttacaggtgttgcacatagatttcctgaaccaggataacgccgtgtcacaccacacctgggagttccagacctccagtccagtgttcagaagaggccaggtgtttcacctaagactcgttctgaaccagcctctgcagtcctaccaccaattgaaattggaattctcaacaggccctaatcctagtatcgcgaaacatacgcttgtggtgttggaccctcgcactccatcagaccactacaattggcaggcgacgttacagaacgagtccgggaaggaggtgaccgtggccgtaacatcctctcccaatgcgatcttgggcaagtatcagcttaatgtcaaaacaggaaaccacattctgaaatccgaggaaaatattctctacctgctgtttaatccttggtgtaaggaagatatggtcttcatgcccgacgaagacgagagaaaagagtacatcctgaacgatacagggtgccattacgtaggagcagccagatcaattaaatgcaaaccttggaacttcgggcagtttgaaaaaaacgtgctggactgttgtattagtcttctgactgagtccagcctcaaacccactgacaggagagacccagtcctggtctgccgcgctatgtgcgccatgatgagcttcgagaagggacagggggtgctgattggcaattggacaggtgattacgagggcggtaccgcaccctacaagtggaccggatccgcccctattcttcagcagtactacaacacaaaacaggcggtgtgcttcggtcagtgctgggtgtttgccggaattcttacgacagtcttgcgggctttgggaattccagcacgttctgtgaccggttttgattcagctcacgacactgaacgcaatctgaccgtcgatacctatgttaacgaaaatggagagaaaataactagcatgactcacgacagtgtttggaatttccatgtctggacagacgcctggatgaaacgccctgacctcccgaaaggatacgacggctggcaggcggttgacgctaccccacaggaaagaagccagggagtgttctgctgtggaccaagtccactgactgctatcagaaagggagatattttcatcgtgtatgacacaagatttgtgttcagcgaagtcaatggcgaccggctgatttggctcgtgaaaatggttaacggacaggaagagctccatgtgatcagcatggagacaacctcaattggaaagaacatttccacaaaggctgtgggccaggacaggcgacgcgatattacatacgagtacaagtacccagagggctcgtcagaggagcggcaagtaatggaccacgcttttttgctgctctcctcagaaagagagcaccgcaggcctgttaaggaaaactttctccatatgtccgtgcagagcgacgatgtgctactgggcaacagcgtcaactttacagtgatactgaagaggaagaccgcggcattgcagaacgtcaacattctcggcagcttcgaattgcaattgtatactggtaagaagatggctaagctgtgcgatctgaataaaaccagccagattcaagggcaagtgtcagaggttacactaacacttgacagtaaaacttacatcaattcactggccattctggatgacgagcccgtgatccgagggtttattatagctgagattgttgaatctaaagaaatcatggcctcagaagtgttcaccagtttccagtatccagaattcagcatcgagttacctaacacaggaagaatagggcaactgctggtttgtaactgcatttttaaaaacaccctggccataccgctcacggatgtcaaattcagcctcgagtcactgggaatctcctcactgcagacttctgatcatgggactgtacagcccggagagacgatccagtcacagataaaatgcaccccaattaaaactggtcctaaaaagtttatagttaagctctcttcaaagcaggtcaaggagataaatgcgcagaagatagtgctaataaccaagtag

SEQ ID NO: 244564 - DNA, 1626 bp, synthetic construct
  misc_feature 1..1626: note = Description of Artificial Sequence: Synthetic coding sequence
  source 1..1626: mol_type = other DNA
atgttctcctggatgggccgtcaggcaggtggaagggaacgagctgggggagctgatgcagtccagaccgtaaccggcggactccggagcctttatctgcgcaaggtgttgccgctggaggaagcgtacagatttcatgagttccattctcccgcattagaagacgctgattttgaaaataagccaatgatcttgctcgtcggccagtactcaaccggcaagaccacctttatccgctacttgcttgaacaggacttcccagggatgagaatcggtcctgagcctacaactgatagcttcatcgctgtcatgtatggggaaactgaaggctcaacccctggaaatgcgcttgtagtggacccaaagaagcccttcaggaagctgtcccggttcggaaacgcctttctgaaccgttttatgtgctcgcagttgccaaatcaggttcttaaatctatcagcgttatcgatagtccaggtattctctcgggcgaaaagcagagaatttcacggggatatgacttttgccaggtcctccagtggtttgcagagagagtcgaccgcatcatcctgctattcgacgcccataaattggacatatccgacgaattcagcgaggcgattaaagcctttaggggccaggacgacaagatccgcgtggtgctcaataaggcagatcaggttgatacgcagcagctcatgagggtgtacggagcactgatgtggagtctggggaaggtgattaacacccccgaagtgctgagagtgtatatcggctccttttgggcgcaacccttacagaatacagacaatcgtaggcttttcgaagcagaagctcaggatctgttccgcgatattcagagtctgccacagaaagcagccgtgagaaagctgaatgaccttataaagagagcacggctcgcaaaagttcacgcatacataatctcctatctgaagaaagaaatgccaagcgtgttcggcaaggagaacaagaaacgggaactcatttcaaggctccccgaaatctacatccaactgcagagggaataccagatctctgctggcgacttcccagaggttaaagcaatgcaggagcagctggagaattacgatttcaccaaatttcactccctcaagccgaagctgatagaggcagttgacaacatgttatctaataaaataagcccactgatgaatctgatatcccaagaggaaacaagtaccccgacccagttagtgcagggcggtgctttcgatggaacaacagagggaccatttaatcagggatacggcgagggggctaaggagggcgctgatgaggaagagtgggtcgtggccaaggataagccagtgtacgatgaacttttttacaccttatcccctatcaatgggaaaatatccggcgtcaacgctaagaaagagatggtgacttctaagctccccaacagcgtgctcggcaagatctggaaacttgccgattgcgactgtgatgggatgttggacgaggaggagttcgccttggcaaagcatctaattaagattaaattggatggctacgagctgccaagctccctcccaccacatctggtcccgccttcccataggaagtctttgcctaaggccgactag

SEQ ID NO: 244565 - DNA, 1917 bp, synthetic construct
  misc_feature 1..1917: note = Description of Artificial Sequence: Synthetic coding sequence
  source 1..1917: mol_type = other DNA
atggcccagggcctggaagtcgcccttactgatttgcagagttccaggaataacgttaggcaccatactgaggagatcaccgtggatcatctcttggtacgcagagggcaggcctttaacctaaccctttatttccggaatagaagcttccaacctggcctcgataatattatttttgtcgtcgaaaccgaagatgccgtctacctcgatagcgagccacaacgtcaggaatacgtaatgaatgattacggattcatctaccagggaagcaagaattggattaggccatgtccctggaattatgggcaattcgaggacaagattattgatatttgtctcaagctactcgacaaatccctccatttccagacggacccggcaacggactgtgctctgcgcggatccccagtttacgtctctagagtcgtatgtgcgatgatcaatagtaacgatgacaatggtgtcctgaacggcaactggtccgagaattacaccgatggcgcaaatccagccgaatggaccggatcggtggccattttgaagcaatggaatgccacaggctgccagcctgttaggtatggacagtgctgggtattcgctgccgttatgtgcactgtaatgaggtgcctggggattccaacgcgggtgattacaaacttcgactcagggcacgacaccgatggcaatctgattattgatgagtactacgacaacactggtagaatactgggcaataagaagaaggataccatctggaacttccatgtgtggaatgagtgctggatggcgaggaaagacctgcccccagcctacggcggttggcaggtcttagacgctaccccccaggaaatgagcaacggagtttactgctgtggccctgcaagcgtgagggcaatcaaagaaggggaagtcgacctcaactacgacacccctttcgtgttttcaatggtgaatgcagactgcatgtcatggttggtccagggcggtaaagagcagaagctccatcaagacactagctcagtaggaaacttcatctctaccaaatctatccagtccgatgagcgggatgacatcacggagaactataagtacgaagaagggtctctgcaggagcgacaggtttttttgaaagctctgcagaaattgaaggcgagatcctttcatgggtcacagaggggagctgaattgcagccatcccgaccgactagtttgagtcaagattccccacgtagtctacatacccctagtctgaggccctcagatgtcgttcaagtgagtctcaagtttaaattgctcgacccacccaatatggggcaggatatttgttttgtcttattggcgctgaatatgagctctcagtttaaagacctaaaggtaaacctgtccgcacagtcgttactccatgacgggtctccactgtcccccttttggcaggacaccgccttcatcaccttgtccccaaaggaagcgaagacgtatccttgcaaaattagttatagtcaatacagccagtatctgtccaccgataagctcatccgcatcagcgcattaggtgaagaaaagtcaagcccggagaaaattctggtaaataagataattactctctcctatcctagcattaccataaatgttcttggcgctgccgtagtgaatcaacccctcagtattcaagtgatctttagtaacccgctgagcgagcaggttgaggactgcgttctaacggtcgagggctcaggcctgtttaagaaacagcaaaaagtgttcttgggcgtactgaaacctcagcatcaggccagcatcattctggaaaccgtcccgtttaaaagcggtcagaggcagatccaggcgaacatgcgctccaacaagttcaaggatataaagggctatcgcaatgtatatgtcgacttcgcgttgtag

SEQ ID NO: 244566 - DNA, 2160 bp, synthetic construct
  misc_feature 1..2160: note = Description of Artificial Sequence: Synthetic coding sequence
  source 1..2160: mol_type = other DNA
gcacagggactcgaagtggccctgacagacctgcagtccagtcggaacaacgtgcgccatcataccgaggagatcaccgtagaccatctcctggtccgcagagggcaggcttttaacctaaccctttacttccgaaataggtctttccaaccaggcttagataacatcatctttgtagtggagaccggtccgctgcccgatctggcgctgggtacgcgcgctgtcttttccctggcccgacaccactcacccagcccatggatagcgtggttagagacaaacggtgcgacaagtactgaggtttcactgtgcgccccacctactgcagccgttggaaggtacttgctcaagattcacatcgacagcttccagggctctgtcacagcctaccaactcggagaattcattttattgtttaacccctggtgccctgaggacgcagtgtaccttgactccgaaccacagagacaggagtacgttatgaatgactacggctttatctaccagggcagcaagaactggatcagaccgtgtccatggaactatgggcagtttgaggataaaattattgatatctgcctcaaactcctggataaaagcctgcacttccagacagaccctgcaactgattgcgctctccgtggcagccctgtgtacgtaagtcgcgtcgtatgcgccatgatcaactctaacgacgataatggggttctaaacggcaactggagcgagaactacacggatggcgctaatccagcagaatggaccggatcagtggctatcctgaaacaatggaacgccactggatgccagccagttcgatatgggcagtgctgggtgtttgcggcagtgatgtgtacagttatgcggtgtttgggtataccaacacgtgtcatcaccaacttcgattcaggccacgataccgacggaaatctgatcatcgacgaatactatgacaataccggcagaattttaggtaacaaaaaaaaggatacaatttggaactttcacgtctggaacgaatgctggatggccaggaaggatctgccaccagcatatggtggttggcaggtactggatgcgacgcctcaggagatgagtaatggagtctattgctgcggtcctgcctctgtgagggccattaaggagggggaggtggatctgaattatgatactccgttcgttttctcaatggtcaacgcggattgcatgtcctggctggtgcagggtggcaaggaacagaaactgcaccaggacacctccagtgtgggtaatttcatcagtaccaagtcaattcagagcgacgagcgggatgacataactgagaattacaaatacgaagagggttctttgcaagagaggcaggtatttctgaaggccctgcagaagttgaaagctcgcagttttcatgggtctcagcgcggtgccgaactgcagccttctaggccgacgtctttgagtcaagatagtcccagaagcttgcatactccatccctgcgacccagcgacgtagtccaggtgtctctgaagttcaaactgttggatccacccaatatgggacaggacatatgctttgtgcttttggcactcaatatgagtagtcaatttaaggatctaaaagtgaatctctctgcacagtccctgctacatgatggtagccccctgtctccattttggcaagatactgccttcataacactcagtcctaaggaggcaaagacttatccttgtaaaatctcctacagccagtacagtcaatacctttcaactgacaaactcattcggattagcgctctgggcgaagagaagtccagtcctgagaagatcctcgtcaataagatcattacattgagctaccctagcataacgataaacgtattgggagccgcagtcgtcaaccagcccctctctattcaggttatattcagcaacccactcagtgagcaggtcgaggactgtgttctgaccgtggaagggtcggggctgtttaagaaacaacaaaaagtctttctaggggtgctcaagccgcaacaccaggcgtccataatcttggaaactgtgccatttaagtccggccagcggcaaattcaagccaacatgcgcagcaacaagtttaaagacatcaaagggtatcgtaatgtttacgtcgacttcgctctgtag

SEQ ID NO: 244567 - DNA, 2121 bp, synthetic construct
  misc_feature 1..2121: note = Description of Artificial Sequence: Synthetic coding sequence
  source 1..2121: mol_type = other DNA
atggcagggatcagggtgactaaagtagattggcagcggtcacggaacggcgctgctcaccacacgcaggagtatccatgtcccgaactggtggttcggagaggtcaaagcttctctctcactctggaactgagcagagctctggactgtgaggagattctcatctttacaatggaaacagggccacgcgcaagcgaagctctgcacacgaaggcagtctttcagacctccgaactcgagcggggagaggggtggacagcagccagggaagctcagatggagaaaactctaacagtgtctcttgccagccctccatcagctgtgatcgggagatacctattgtctattcggctgtctagccatcgtaagcatagcaatcgccgtcttggtgaattcgtactactatttaatccttggtgcgccgaggacgatgtgttcttagcttcagaagaagagaggcaggagtacgtgctgtctgacagcggcatcatcttcaggggagtggagaagcatattcgcgctcagggctggaactatggtcagttcgaagaggacatcctgaatatttgcctttctattctcgatcgcagccccggacaccagaacaacccagcaaccgatgtctcctgtaggcacaacccaatatatgtcaccagggtgatttcggccatggtaaactcaaataatgatcgaggtgtggttcaggggcagtggcagggcaaatacggaggtggcacctccccattgcattggagaggctcagtggctatcctgcagaagtggctgaaggggaggtataagccagtgaagtatgggcagtgttgggtctttgcgggagtcctctgtaccgtactcagatgtcttggtatcgcaactagagtcgtcagcaatttcaactcagcccacgacactgaccaaaacctttcagtagacaaatatgttgattcttttggcaggaccctggaagatttaacagaggactcaatgtggaattttcatgtctggaacgagtcctggtttgcccgtcaggatctggggccttcttacaacgggtggcaggtcttagatgctactccacaggaagaaagcgaaggcgttttccggtgcggaccagccagcgtgacagcaattagagagggagacgtccatctcgctcacgacgggccattcgtgtttgcagaggtgaacgccgattatattacttggctttggcacgaagatgaaagccgagagagggtatacagtaacaccaagaaaattggcaggtgcatatctactaaggctgtgggctctgacagtagagtggacattactgacctgtataagtacccagagggtagcaggaaggagcgacaagtgtactccaaggcggttaacaggctctttggtgtcgaagctagcgggaggcgtatttggatcagaagagcgggagggagatgtttatggcgtgatgatctgctcgagcccgcaacaaagcctagtattgctggcaaattcaaagtactggagccacccatgctaggccatgatttgaggttggcgctctgcctggccaatctaacatctagagcgcaacgcgtgcgcgtcaacctgagcggagcaacaattctgtatacaaggaaacctgtggcagaaatattacatgagtcacatgcagtgaggttagggccacaggaagagaagcgtatccccataactatatcgtactccaaatacaaggaagacctcaccgaggacaaaaagatcctgctggctgcaatgtgcctggtgacgaaaggcgaaaagctccttgtcgaaaaagatatcaccctggaggattttattaccatcaaggtgctgggcccagctatggtcggggtggcagtgactgtggaggtcactgttgtgaaccctctcattgagagggtcaaagactgtgccctgatggtggaaggttctggactcctgcaagagcagctttccattgatgtgcccaccctggaaccccaggaaagagcaagtgtgcagtttgatattacgcctagcaagtctggacctcggcagttacaagtcgacttagtaagtccccattttccggacataaagggattcgtcatcgtccatgtggctactgcaaagtag

SEQ ID NO: 244568 - DNA, 1878 bp, synthetic construct
  misc_feature 1..1878: note = Description of Artificial Sequence: Synthetic coding sequence
  source 1..1878: mol_type = other DNA
atggcaggtatccgcgtgactaaggtggattggcagcgatcacgtaacggcgctgctcatcatacacaggagtatccgtgtcccgagttagtggtccggagaggccagtcatttagtcttaccctggagctgtcacgcgctctggattgcgaggagattctgatctttaccatggaaacaggcccacgggcatccgaggctctacacacgaaggccgtgtttcaaacaagcgagttggaaaggggtgaaggctggactgcagctcgcgaagcccaaatggagaagacgctgaccgtctctctggccagccccccttccgcggtgatcggccgatatctgctgtctatccggctgagttcccatagaaagcacagtaacagacggctgggggaattcgtgttgttatttaatccgtggtgtgccgaggatgatgtgtttctggcttccgaggaggaaagacaggagtatgtgctgtccgattccggaattattttccgcggtgtggagaaacacatccgggctcaggggtggaattatggacagttcgaggaagacattctgaatatctgtttgtctatcctagaccgcagccctggccaccaaaacaatccggctaccgacgtgagctgccgtcacaaccctatatatgtgacacgcgtaattagcgccatggtcaactctaacaacgacaggggagtggtccagggacagtggcagggaaaatatgggggtggcacatctcctctccactggcgcggaagtgtggctattctgcagaaatggttgaaaggtagatacaaacctgttaaatatgggcagtgttgggtattcgccggtgtgctctgcaccgtactgcggtgcctgggaattgctacacgggttgtttccaactttaactctgcccacgacacggaccagaatctctccgtggataaatatgtggatagtttcggacggaccctcgaggatctgacagaagatagcatgtggaacttccacgtgtggaacgaaagttggtttgcacggcaggatcttggcccaagttataatggctggcaggtactagatgcgacgcctcaagaggagtccgaaggggtctttcgttgcggccctgcctcagtgaccgctataagagagggcgatgttcatttagcacacgacggccctttcgtgttcgccgaagtcaatgcagattatattacctggttatggcacgaggacgagtctagggagagagtgtactccaacacgaagaagatagggcgatgcatcagcacgaaagccgttggaagcgattcacgagtcgacattaccgatctctataagtatccagagggctccagaaaggagagacaggtgtactcaaaagcggtaaaccgcttatttggagtggaggctagcggaaggcgcatttggatcagacgagcgggtggacggtgtctgtggcgggatgacttactcgaacccgcaactaaacctagcatcgccggtaaatttaaggttctcgagcctcctatgcttggacatgatttgaggctcgccctgtgtctcgccaatctcactagtcgcgcacagcgggtgcgcgtaaatctctccggagccacgattctgtatacccgcaaacctgtcgcagagatcctgcacgaaagtcatgcagtgcgcctggggcctcaggaggagaagcggatcccaataactatctcatactccaaatacaaggaagacttgaccgaggacaaaaaaatattactggcagccatgtgtctggtcactaagggtgaaaaactgctcgtggagaaggacatcactttggaggacttcataaccataaaacgcgcataccctggtgcctctggcgagggcttatctcctgtctag

SEQ ID NO: 244569 - DNA, 2133 bp, synthetic construct
  misc_feature 1..2133: note = Description of Artificial Sequence: Synthetic coding sequence
  source 1..2133: mol_type = other DNA
atggaccaggtggccacgctgagactggaatcagtcgacctgcagtcaagtagaaacaataaggaacatcacacacaggaaatgggagttaaaaggctgacggttaggcggggacaaccgttctacctacgactctccttttctagaccattccagagtcaaaatgaccatattaccttcgtggccgaaaccggcccaaagcccagtgagctgctgggcacccgtgcaaccttttttttgactcgcgttcagcctggcaatgtgtggtcagcttctgacttcactattgatagcaatagtctgcaggtatccttgtttacacccgcaaatgccgtgatagggcactatactctgaaaatcgaaatcagtcaagggcagggccatagcgtaacatacccactggggactttcattctgctgtttaatccatggtcacccgaggacgatgtctatttgccttctgaaattttactccaagaatacatcatgagggattacggctttgtttataagggacacgagaggttcattacctcatggccatggaactacggtcaattcgaagaagatattattgacatctgtttcgagattctgaataagagtttgtaccatttaaaaaatccagctaaagactgttctcagcggaacgacgtggtgtacgtctgcagagtggtgagcgctatgattaactctaacgacgacaacggcgtgctacagggtaattggggtgaagactacagtaagggggtgagccctctcgaatggaaagggagtgtcgccattttgcagcagtggtctgcccgaggaggacagcctgttaagtacggtcagtgttgggtcttcgcttccgttatgtgcaccgtgatgcgatgtctgggggtacccacgcgggtggttagcaattttagatctgctcacaacgtggaccgtaaccttaccatagatacatactacgaccggaacgcagagatgttgtcgactcagaagagggacaagatttggaactttcacgtttggaatgagtgttggatgatccgtaaagacctgcccccagggtacaacgggtggcaggtattagatcccactccacagcagacatcctccggactgttctgctgcgggccagcctctgttaaggccattcgggaaggtgacgtgcatctcgcctacgatactccatttgtatacgccgaggtgaacgcagacgaggtgatatggctcctgggagacggccaagctcaagaaatcctggctcacaataccagcagtatcggtaaggaaatcagcaccaagatggttgggtctgaccaacgtcagtctataacctcttcttacaagtacccagagggttcacccgaggaaagagccgtgttcatgaaggcaagccgaaaaatgctaggaccccagagggcctccctcccctttctcgatcttcttgagtctggagggctcagggatcagcctgcacagctgcagctccatctcgcccgtattccagagtgggggcaggatcttcagttattactgcgtatacagagagttcccgactccactcatcctcgagggcctatcggcctcgtagtcagattctgcgcacaggctctcctgcatggcggaggaacccagaaaccgttctggaggcacaccgtccgaatgaacctagacttcggcaaagagacccagtggccactcctcctcccgtatagcaactacagaaataaattgacggacgaaaagctgatccgggtgagcggcatagccgaggtggaggaaactgggaggtctatgctggtcctcaaggacatctgtctggaacctccacatctcagtatagaagtcagcgaaagagcggaggtggggaaggctctgagagtccatgttacccttaccaatacgctgatggtggcgctatcctcttgcacaatggtcctggagggcagcggcctcatcaatggacagatagcgaaggatcttggaacactcgtggcgggacacaccctacaaattcagctggatctgtatccaaccaaggcagggcctcgccagctgcaggtgcttataagctcaaatgaggtgaaggaaattaaagggtataaggatattttcgtaaccgttgcgggagctccgtag

SEQ ID NO: 244570 - DNA, 846 bp, synthetic construct
  misc_feature 1..846: note = Description of Artificial Sequence: Synthetic coding sequence
  source 1..846: mol_type = other DNA
atgcgttttgttgtggctttagtgctcctgaatgtagctgcagccggagctgtccctctattggcaacagaatcggtgaaacaggaagaagccggtgtacgaccctccgcgggaaatgtatccacccatccctccttgtcacaaagacctggaggcagcaccaagtcacaccccgagccacagacccccaaagactcaccctccaagagtagctcggaggcgcagactaccaaggatgtaccgaataaatccggcgctgacgggcagacccccaaagatgggtcttccaagtccggggcagaggaccaaacgcctaaggacgtccctaacaagtcaggggctgagaagcagacacctaaagacggcagtaacaaatcaggagctgaagagcagggcccaattgatggaccttcaaagagcggagcagaggagcagacaagcaaagacagccccaataaggaagaggttaaatctagtgaacctaccgaggacgtggagcccaaggaagccgaggacgacgatactggtcctgaagagggctccccacccaaggaagagaaagaaaaaatgtctggtagtgccagctctgagaatagagaaggaacgctgagcgacagcaccgggtctgagaaggatgacttgtaccctaacggaagcggcaacgggtctgcggaaagctcgcactttttcgcttacctcgtaacagcagcgattctggtcgccgtgctgtatatcgcccatcacaacaagaggaaaatcattgcttttgttcttgagggtaaacgaagcaaggttacaagaaggccaaaggcatcagactaccaacgtctggaccagaaatcgtag

SEQ ID NO: 244571 - DNA, 1314 bp, synthetic construct
  misc_feature 1..1314: note = Description of Artificial Sequence: Synthetic coding sequence
  source 1..1314: mol_type = other DNA
atgagattcgttgtagctctggtgttgctcaacgtggctgccgcaggcgctgtcccgttactggctactgagtccgtgaagcaagaagaggcgggagtgagacccagcgcagggaatgtctcgacgcatccttcactgtcccaacgacccggaggatcgaccaagagtcacccagagcctcagacacctaaggactctccttctaagtcctcagccgaggctcagaccccagaggacactcctaacaagtctggggctgaagccaagacacagaaagatagcagtaacaagagtggtgcagaagccaagacgcagaaggggtctactagtaagtccgggtcagaagctcagacaacgaaagatagcacaagcaagtctcacccagagcttcagacacctaaggactcaacaggtaagtcaggggctgaggcccagaccccggaagatagccctaaccggtcgggagcagaggccaagactcagaaggactcaccatctaaatcgggcagcgaagcccagactactaaggacgtcccgaataagtccggggcagatggccagactcccaaggatggctcatcgaagtccggagctgaagaccaaactccgaaggacgttccgaataaaagcggcgctgaaaagcagacccccaaggatgggagtaataagagcggagccgaggagcaagggcctatcgacggacccagtaagagcggggcagaagaacaaaccagcaaagattccccaaataaagttgtaccagagcagcctagtcgaaaggatcacagtaagcccatcagcaatccaagcgacaacaaagaactcccaaaagctgacaccaaccagctagcagacaaaggcaaactgagtccgcacgctttcaagacggagagtggagaagaaaccgatctgatctccccgcctcaggaagaggtaaagtcaagcgaaccaacagaagatgtggagccaaaggaagcagaggacgacgatactggcccagaagagggctcccctccgaaagaggagaaagaaaagatgagtggatccgcctcttcagaaaatagggaggggacacttagcgattccaccggtagtgaaaaggatgacctgtatcccaatggcagcggaaatggaagcgctgagagtagccactttttcgcctacctcgtcactgctgcaatcttagttgcagtcctatacattgctcaccacaataagagaaagattattgcttttgtgcttgaaggtaagcgatctaaagtaacaaggagacccaaggcatctgactatcagcgcttggaccagaaaagctag

SEQ ID NO: 244572 - DNA, 1140 bp, synthetic construct
  misc_feature 1..1140: note = Description of Artificial Sequence: Synthetic coding sequence
  source 1..1140: mol_type = other DNA
atgcggtttgtcgtggcgctagtccttttgaatgtggccgctgccggagcggtgcctctactcgctacagagtctgtgaagcaagaagaagctggagtccgaccatcagctggtaatgtcagtacacacccctccctctcccagagaccaggcggaagcacgaaatcgcatcctgagcctcagacacctaaggacagtccgagtaagagtagcgctgaagcccagacacctgaggatacacctaacaagagcggcgctgaggctaaaacccagaaggactcatccaacaagagcggagccgaggccaaaacccagaaggggagcactagcaaaagcggaagtgaagcccagaccaccaaagatagcacaagtaagtcacatcccgagttgcagacccctaaagactcgaccgggaaatctggggcagaggcacagacaccagaggattctccaaacaggagcggtgcagaggcaaagacccaaaaggatagtcccagtaaatctggaagcgaagcacaaacaacaaaggatgtgccgaataagtccggagccgacggacagacacccaaggatggtagctcgaaatctggggctgaggatcaaactcctaaagacgtgcctaataagagcggggcagagaagcaaacacccaaggacggttcaaataaaagcggagctgaggagcagggcccaatcgatggaccaagtaagagtggggctgaggagcagacaagcaaggacagcccgaacaaagaagaagtgaaatcttcggagcccaccgaggatgtggagccaaaagaggccgaagatgatgatactggacccgaggagggatcccctcctaaggaagaaaaggagaaaatgagcggttccgcctcatccgagaaccgcgagggaaccctgtctgatagcacaggatcggaaaaggacgatctgtaccccaacgggagcggaaacggctctgcagaaagcagtcatttcttcgcctatcttgtgaccgctgccatactcgttgcggtgctttacatcgcccatcataataagcggaagattattgccttcgtacttgaggggaagcgcagcaaggttactcgacggccaaaggcttcagactatcagcgcctggatcagaaaagctag

SEQ ID NO: 244573 - DNA, 1362 bp, synthetic construct
  misc_feature 1..1362: note = Description of Artificial Sequence: Synthetic coding sequence
  source 1..1362: mol_type = other DNA
atgaggtttgtcgtggccctcgtgctgctcaatgttgccgctgcgggagctgtcccactcttggccaccgaatctgtgaaacaggaagaggccggagttcgcccatcagctggaaacgtctctacacaccctagtctgagccagcggccaggcggatccaccaagtcacaccccgagccacagactcctaaggacagcccctccaagagctctgctgaggctcagactcctgaggacacacctaacaagagtggggctgaagccaagacgcagaaagacagctccaacaagagtggcgcagaggccaaaacacaaaaagggtcaacctctaagagcggtagtgaagcccaaacaaccaaagacagcacctccaaatcccatcccgaacttcagactcccaaggatagtaccggtaaaagtggggctgaggcccaaaccccagaggactccccaaatcggagtggcgctgaggccaagacccagaaggactctccttcaaagagcggctcagaggcccagactaccaaagacgttcccaacaaaagtggagccgacggtcaaactcctaaggatggttcctccaaaagcggcgctgaggaccagaccccaaaagacgtgcccaataagagtggtgctgagaagcagacgccgaaagacgggtcaaacaagtctggggctgaagagcagggacctattgacggtccctcaaaaagtggcgcagaagagcaaacatcgaaggattccccgaacaaagtggtgccggaacagccatcccgtaaagaccatagcaaaccaataagtaacccaagtgacaataaggagctccctaaagccgacaccaaccagctggctgacaagggcaaactgagtccacatgcttttaaaacggagtcgggtgaggagactgatcttatttctccccctcaggaggaagtcaaaagctcggaaccaaccgaggatgtcgagcctaaggaagcagaggacgatgatacaggacccgaggagggaagtccccctaaggaggagaaggagaagatgagcggcagtgcttccagtgaaaacagagaagggaccctttctgatagcactggatcagaaaaagatgacttatatcccaacggatcagggaacggcagtgccgagtcatcccatttcttcgcttacctcgtgaccgccgcaattctggtcgccgtgttatacatcgctcaccacaacaagcgtaagattatcgctttcgtcttggagggcaagaggagtaaagtgactcgtcgccctaaggcaagtgattaccaaagactcgatcagaagatcttcttcccgctttcccctaatcgaatggtctattcgtctggaaaacgatag

SEQ ID NO: 244574 - DNA, 693 bp, synthetic construct
  misc_feature 1..693: note = Description of Artificial Sequence: Synthetic coding sequence
  source 1..693: mol_type = other DNA
atgtatgtgagagtttcctttgatacaaaacctgatttgttgttgcacctgatgaccaaggaatggcagctcgaactccctaagttgctgatcagcgtccatggtggtcttcagaacttcgaactccagcctaaactcaaacaggtgttcggcaaagggttaatcaaagcagccatgacgaccggcgcttggatcttcactggcggagtcaacactggggtaatacggcacgtgggcgacgccctgaaggaccatgctagtaaaagcaggggcaagatctgtacaattggcatcgcaccctggggcatcgtggagaaccaggaggatctaatcggccgagacgtcgtccggccttaccagacaatgagtaaccccatgtctaagttaaccgtgctaaactccatgcattcccactttatccttgcagataacggaactactgggaagtacggcgcagaggtgaagctgcgtaggcagctggaaaagcacatcagcttgcaaaagataaatactagaattgggcagggcgtgccggtggttgcactgatcgttgagggagggcctaacgtgatctctatcgtgctcgaatacctccgggacactcccccagtgccagtcgtcgtctgtgacgggtccgggcgtgcatcagacatcctggctttcggacataaatactccgaggaaggcggttag

SEQ ID NO: 244575 - DNA, 2520 bp, synthetic construct
  misc_feature 1..2520: note = Description of Artificial Sequence: Synthetic coding sequence
  source 1..2520: mol_type = other DNA
atgaagaagtggtccagcacagacctgggcgctgccgcagaccccctgcagaaggacacttgcccggatcctctggatggggaccccaatagtagaccgcctcctgctaagcctcagctgtctacagccaagagccggacccgccttttcggaaagggcgattcagaagaggccttcccggtggactgcccccacgaggaaggcgaactggacagttgccctaccattaccgtaagtcctgtgatcaccatccagaggccaggagatggtccaacgggagcccgactgctctcccaggacagcgtggcagcctcgacagagaaaacgctacggctctatgatagaaggagtatttttgaggctgtcgcccaaaacaactgtcaggacctggaaagcctactcttgtttttacaaaagagcaagaaacacctgaccgataatgaatttaaggatcctgaaacggggaaaacgtgcttgctgaaggctatgctgaacctgcacgacggacagaatacaactattcccctgctgttggagatcgcccgacagaccgattccctcaaggaactagtgaacgctagttacacagacagttactacaaaggacagacagcccttcacatcgctatcgagcgcagaaatatggcccttgtaactctgttagtggagaatggagctgacgttcaggccgctgcacacggtgatttttttaagaaaaccaagggaaggccgggtttctattttggcgaactacctttgtcacttgctgcctgtacaaatcagctgggaatcgttaaattcttgcttcagaattcttggcagactgccgacatctcggcgcgagactccgtcggcaatactgtgctgcacgctctcgttgaggtggcggataatacggccgataataccaagtttgttacttccatgtacaacgagattttgatgctcggcgctaaattacaccccaccctgaaactggaggaactgacaaacaagaaaggaatgacacctctagctctggctgccggtacagggaagattggtgtgcttgcctatatcctccagagagaaatccaagagcctgaatgtcgacacctctccaggaaatttactgaatgggcctacggccctgtgcatagttctctttacgaccttagctgcattgacacctgtgagaagaacagcgtactcgaagtcatcgcctactcctccagtgaaacaccaaatagacacgacatgttgctcgtggagccactgaataggctgctccaagacaaatgggaccggttcgtcaagagaatcttttacttcaacttcttggtttactgtctctatatgataatatttaccatggctgcttactatcgaccggtcgatggtctgccaccattcaagatggagaagacaggtgattatttcagagtaactggggagatcttgtcagtgctcgggggagtgtacttttttttccgtggaattcagtattttctccagcgcaggccgtctatgaagacattattcgtggacagctatagtgaaatgctcttcttcctgcagtcactgttcatgttggccaccgtggtcttatattttagccacctgaaggagtacgttgcctctatggtattcagcctcgccttggggtggaccaatatgctgtattacacgaggggctttcagcagatgggcatttatgccgtgatgatcgaaaagatgatcctgagagacctttgtcggtttatgttcgtttacattgtttttctgtttgggttctctacagctgtggtaaccctcatcgaagatggcaaaaacgattctctcccctctgaatctacaagccacagatggcggggaccagcttgcagacctcccgatagctcctataatagcctgtatagcacctgcctagagttgtttaaatttactatcggtatgggagatctcgagttcaccgaaaattatgatttcaaagcagtgttcattatattgttgctcgcttacgtcatcctgacctatatactccttcttaatatgttgattgccctcatgggcgagactgtcaataagattgctcaggagtctaagaatatctggaaactgcagagggccattacaatcctggatacagagaagagtttccttaagtgcatgcgcaaggcctttagaagtggaaagctcctccaagttggctacacacccgacgggaaggatgattacagatggtgtttcagggtagatgaggtgaattggacgacctggaataccaacgtgggaattatcaacgaagatccgggtaactgtgaaggggtgaagcgaacgctttcatttagtctgagatcttcaagggtctcaggccgtcattggaagaattttgccttagtaccgttgttgagggaagcctctgccagagacagacagtcagcacagcccgaagaagtgtatctacgacagttcagtggctccttgaaaccagaggacgccgaagtcttcaaatctcccgcagcaagcggggaaaaatag

SEQ ID NO: 244576 - DNA, 2373 bp, synthetic construct
  misc_feature 1..2373: note = Description of Artificial Sequence: Synthetic coding sequence
  source 1..2373: mol_type = other DNA
atgaaggcccacccaaaagagatggttcccctgatgggcaagcgggtggcggctccatctggcaaccctgctattctacctgagaagagacccgcagagatcactcccactaagaagtccgcacacttttttctggagatcgagggtttcgaacctaatccaacagtggcaaaaaccagtccccctgtgttttccaaaccaatggacagtaatatccgacagtgcatctccggtaattgcgacgatatggatagtccacagagcccacaagatgacgtcactgaaacacctagcaaccctaatagtccttccgcacagcttgctaaagaagagcagagaagaaagaagaggagactgaaaaaacgaatttttgccgcagtcagcgaagggtgtgtagaagagctggtggagctcttggtggaactccaggagttgtgccgccgtaggcacgatgaagatgtgccggactttttgatgcacaaactaaccgcatctgatactgggaagacatgtttgatgaaagcgttactcaacattaacccgaacactaaggagatagtgagaattctcctcgcatttgctgaggaaaatgatattctaggtaggtttattaacgctgaatacaccgaagaggcctacgaggggcaaacagccttgaacattgctatcgaaagacgccagggggatattgccgctctcctgatcgccgctggcgcagacgtgaacgcccacgccaaaggcgctttctttaatccaaaataccagcacgagggcttttattttggggaaacaccactagccctggctgcttgcaccaatcaacccgagatcgtgcagctgcttatggagcacgaacaaacggacattacttcaagagacagccggggaaataatatcctgcacgccttagtaactgtggccgaggatttcaaaacccagaacgacttcgtgaagcggatgtacgatatgatccttctcagaagcggcaattgggaactggagactacccgaaataacgatgggctgactcctctccaattggcagccaagatgggtaaagctgaaattttgaaatatatactctctcgggagattaaggagaagaggcttcgctctctgtctcgcaagtttactgattgggcgtacgggcctgtgtccagctctttgtatgacctcactaacgtggatactaccaccgataatagcgtgctggaaattactgtctacaataccaatatcgataaccgccacgaaatgttgaccctggagcccctgcacactctgctgcatatgaagtggaagaagttcgcaaagcacatgtttttcctttcattctgtttctacttcttttacaacataactttgactctggtgtcttactatcgtcctagggaggaagaggccataccacacccgctagccctgacccataagatgggctggcttcagctgctagggcgtatgtttgttctgatttgggcaatgtgtatttcagtgaaggagggcatcgcgatttttctgctacgacccagcgatttgcagtccattctcagcgacgcttggtttcattttgtcttcttcatccaggccgtgctggttattttaagcgtgtttctgtacttgttcgcctataaagagtacctggcttgcctggtcctcgcaatggcactcggatgggcaaatatgctctattataccaggggatttcagagcatggggatgtacagtgtgatgatccagaaagtgattttgcacgacgtgctgaagtttttgttcgtgtatattgtatttctcttaggattcggcgtggctctggctagccttattgagaagtgtcccaaggacaataaggactgctcttcctacggttccttttcagatgcagtgttggagctgtttaagttgacgattgggttaggagatctgaacattcagcagaattctaaatatccaattctgtttctattcctgctgattacgtatgtaatcctgaccttcgtccttctgcttaacatgctcatcgccttaatgggcgaaaccgtggaaaatgtgtccaaggagtcagaacgtatctggcgtttgcagagggccagaactattcttgaattcgagaagatgctcccagagtggctgcggagcaggtttcggatgggagaactgtgcaaggtggctgaggacgactttagactctgcttacgaattaatgaagtgaagtggacagagtggaagacccacgtatcttttttgaatgaagatcctggcccagtgcggagaaccgattttaataagatccaggacagctccaggaacaattccaagaccacattgaacgcttttgaagaggtggaagagttccctgagacctccgtttag

SEQ ID NO: 244577 - DNA, 3360 bp, synthetic construct
  misc_feature 1..3360: note = Description of Artificial Sequence: Synthetic coding sequence
  source 1..3360: mol_type = other DNA
atgaaaaggagtctgagaaagatgtggcggccaggcgaaaaaaaggaaccacagggagtcgtttatgaggatgttccagacgacacagaggacttcaaagagtccttaaaggttgtgtttgaaggctccgcctacgggcttcagaactttaataagcagaagaagctgaaacggtgtgatgacatggatacattctttctgcattacgccgctgcggagggccagattgaacttatggagaaaattactagagactctagtttagaagttctacacgaaatggacgactacggtaataccccactgcactgcgcagtcgaaaaaaaccaaattgagagtgttaaatttttgttatcaaggggcgctaacccaaatttgcgtaactttaatatgatggccccactacatatcgcagtgcagggaatgaataacgaagtaatgaaagttctactggaacatagaaccatcgacgtcaacctcgaaggtgagaacgggaacaccgccgttataattgcctgtaccaccaacaattctgaagccctgcaaattctgctgaagaaaggcgcaaaaccttgtaaatcaaacaaatgggggtgcttccccatccatcaagccgctttttcaggctccaaggaatgcatggaaattattctgagattcggcgaggaacacggctatagcaggcagttacatatcaactttatgaacaatgggaaagctactcctctccacctagcagttcagaacggcgaccttgaaatgataaagatgtgtcttgacaacggagcccagatcgatcccgttgaaaaaggacgatgtaccgcaattcatttcgccgctacccagggtgcaaccgaaatagtgaagctcatgattagctcctattccggctcagtggatatagtcaacaccaccgacggttgccacgaaactatgcttcacagagcaagcctgtttgatcatcacgagctggccgactaccttatctcggttggcgcagacatcaacaaaatcgatagcgaagggcgttctccgctcattcttgcaactgccagcgcgtcttggaacatagtcaatctcttactgtctaaaggagcgcaggtggatattaaggataacttcgggcgaaatttcctgcacctgaccgtgcagcagccttatggattaaaaaaccttcgacctgagttcatgcagatgcagcagataaaggagctcgtaatggacgaggacaacgacggatgtacgccactgcattatgcatgcagacagggaggcccagggagcgtcaacaatttgcttggctttaatgtttcgatacatagcaaaagcaaagacaaaaagtctcctctgcacttcgcagccagctacggacggatcaacacttgtcagagactgctgcaggacatttcagacactaggctcctgaacgagggtgaccttcatggtatgaccccacttcatctcgcggcaaaaaacgggcacgacaaagtggttcagcttctgctgaagaaaggagcactttttctgtctgatcacaacggctggactgctttacatcatgccagcatgggtggctatacccaaacgatgaaagtaatccttgacacaaacctgaaatgcactgaccggctcgatgaagatggcaacaccgcactccacttcgcggctcgcgaaggacacgctaaggccgtcgccctcttgcttagccacaacgccgatattgtcctaaataagcaacaggcaagtttcctgcacttggccctgcataacaagcgaaaagaggtggtgctaacaatcatccggagtaagcggtgggatgagtgtctgaaaattttctctcacaatagcccaggcaataaatgtcctattaccgagatgattgagtatctcccagagtgtatgaaagttttactggacttttgtatgctccattcaacggaagacaagagctgtcgggactattacatagaatataattttaagtacttgcaatgcccccttgagttcacaaagaagacgcctacgcaggacgttatctacgagcccctgaccgccctgaatgccatggtacaaaacaaccgcatcgagctcttgaaccaccctgtctgtaaggagtatctcctgatgaaatggcttgcctacggctttcgagcccacatgatgaatctcgggtcgtattgcctgggtttgattcctatgacaatcctggtggttaacattaaacccggaatggccttcaattctaccgggatcatcaatgaaacctccgaccactctgaaatcttggacaccaccaattcttatctcattaagacttgcatgatcctcgtatttctttcttcaatcttcggttactgcaaggaggcgggacaaatctttcaacagaaacggaattacttcatggatatctccaacgtactggagtggataatttatacaacgggcattatttttgtattgccactgttcgtcgagataccagctcacctgcagtggcagtgcggagctatagcagtgtacttctactggatgaactttcttctatatttacaacggtttgaaaattgcggaatattcatcgtcatgctcgaagtaattcttaagactctcctcagaagcaccgtggtctttatctttctgctcttggcattcggactctcgttctatatcctgctaaatctacaggacccctttagcagtccccttctttctatcattcagacgttcagtatgatgctgggggacattaactaccgcgaaagttttctggagccctatctaaggaatgaactagcccacccagtcctgagcttcgctcagctagtgagctttaccatttttgtgccgatcgtgcttatgaatctgctgatcgggctggctgtaggcgacatagctgaagtgcagaaacacgcaagtctgaagaggatagctatgcaggtggaactccatacatctctggaaaaaaagctgccactgtggttcttacgtaaggtggaccagaaatctaccattgtgtatccgaacaagccaaggtcaggcggaatgctgttccacatattctgctttctgttctgcacgggcgagatccgtcaggagatccccaacgcggacaagtccctcgagatggagatcctgaagcagaaatatcgtctgaaagacctaacgttcctgttggaaaagcagcacgagctgatcaaactgattatccagaaaatggagattatcagcgagaccgaagacgatgactctcactgctcctttcaggacagattcaaaaaagagcaaatggagcagaggaactcacggtggaacactgtccttcgggctgtaaaggcaaagacgcaccacctggaaccctag

SEQ ID NO: 244578 - DNA, 2280 bp, synthetic construct
  misc_feature 1..2280: note = Description of Artificial Sequence: Synthetic coding sequence
  source 1..2280: mol_type = other DNA
atgatggccgcattgtatccatctaccgatctgtcaggtgcctcctcctctagcctgccatcctcaccaagttcgtccagccccaatgaagtgatggcccttaaggacgtacgtgaggtaaaggaagagaataccctgaacgagaaactgtttttactcgcgtgcgataagggagactattatatggtcaaaaaaatcctcgaagagaactccagtggcgatctgaatatcaactgcgtggatgtgcttgggaggaatgccgtcacgatcactatcgagaacgaaaacctggatatcctccagctcctgttagactatgggtgccagaagctcatggaacgcatccagaacccagagtattctacaacaatggatgtggcccctgttatccttgctgcccacaggaataattacgaaattcttaccatgcttctcaagcaggatgtcagcctgcctaaaccacacgcagtggggtgcgaatgcacactgtgttcagcaaaaaacaagaaggatagtctgcgccatagtagattccggctggatatctaccgttgcctcgcctcccccgcactcatcatgttgaccgaagaagaccccatcctgagagcgtttgagctgtccgcagatctgaaagaactttcactggtggaagtggaattccgaaatgactatgaagagctggctcgtcagtgcaaaatgttcgctaaggatctcctggcccaggcgcgaaactctagagagttggaggtgattctgaatcacactagcagtgatgaaccgctagacaagcggggacttctggaggaacgcatgaatctttctaggctgaaactggctataaagtataatcagaaagaattcgtgagtcagtctaattgccaacagttcctgaataccgtatggttcggccagatgagtggctacaggagaaagccaacgtgcaagaaaatcatgactgtcctgaccgtcggcattttttggcctgtgctgagcctatgctacttgatcgccccaaaatctcaattcggcagaatcattcatactccattcatgaaatttatcatacatggggcatcctatttcactttcctcctccttttaaatctgtactccctcgtctacaacgaggataaaaaaaacaccatgggccctgcgctcgagcgcatcgattacctactaatcctctggataatcggcatgatatggtccgatattaaaagactttggtatgagggactggaggatttcctggaagaaagcagaaaccaactgtcctttgtcatgaattcgctgtaccttgctacatttgcgttaaaagttgttgcacacaataaatttcacgattttgcggataggaaggattgggacgccttccatcctacccttgttgcagaaggcctgtttgcattcgccaacgtgctgtcctatttgagactgttctttatgtacactacatcgtctattttgggtcccctgcagataagcatgggtcaaatgctgcaggatttcgggaagttcctgggtatgtttctgctggtgcttttcagtttcactatcggactcactcagctctacgacaaggggtataccagcaaggaacagaaagattgcgtggggatattctgtgagcagcagagcaatgatacgtttcactcctttatcggcacctgtttcgcgctattttggtacattttcagcctggcccatgtggcaatctttgtgactaggttcagttacggggaagagttgcaatcttttgtgggtgccgtcattgttggcacatacaacgtggttgtggtgatcgtgctcactaagctgctggtggcgatgctccataagtcttttcagttgattgctaatcacgaggacaaagagtggaagttcgcccgagcaaaattgtggctgtcatatttcgatgacaagtgtacactccctcctccgtttaacataatccctagcccaaaaacaatttgctacatgatctcatcactgtccaagtggatttgctctcatacctcaaagggcaaagtgaaacgccagaactcactgaaagaatggcgtaacctcaagcagaagcgagatgagaattatcaaaaggtgatgtgctgcctggtgcacaggtacctgacatctatgcgccaaaagatgcagagcacggaccaggctactgtggagaatcttaatgaacttcgccaggatcttagcaagtttcgcaacgaaattcgggatctcctgggctttagaacgtctaagtatgccatgttctatcctagaaactag

SEQ ID NO: 244579 - DNA, 435 bp, synthetic construct
  misc_feature 1..435: note = Description of Artificial Sequence: Synthetic coding sequence
  source 1..435: mol_type = other DNA
atgatctggtccgacataaaacggctgtggtacgaagggctcgaagatttcctggaagaaagcaggaaccagctgagtttcgtgatgaacagcctgtaccttgctacttttgctctgaaggttgtggcccataataagatctcaatgggccagatgctgcaagacttcgggaaattcctcggtatgttcctcctcgtgctcttctcgtttacaattggtctgacgcagctgtatgataaaggctatacctctaaggagcaaaaggactgtgtgggcatattctgcgagcagcagtctaacgacacgtttcattcttttattggtacatgttttgccctgttctggtatatattctctttggcgcatgtagccattttcgtgacaagattttcttacggcgaagaactgcagtcctttgtcggcgcagtcatttag

SEQ ID NO: 244580 - DNA, 2382 bp, synthetic construct
  misc_feature 1..2382: note = Description of Artificial Sequence: Synthetic coding sequence
  source 1..2382: mol_type = other DNA
atgatggccgctttataccctagtacggacctgtctggcgcatcaagctctagcctgccatcatccccctcctccagtagtcccaatgaagtgatggccctcaaagatgtccgggaagtgaaggaagagaatactctgaatgaaaagttgttcttactggcctgcgataaaggcgattactacatggtcaaaaaaatactcgaggaaaacagttccggggatctcaatattaattgcgtggatgtgctagggcgaaacgccgtcacaattaccatcgaaaacgagaaccttgacatcctacagttgctgctcgattacgggtgtcaatccgcagacgccttgttggtggctatcgacagtgaagttgttggcgctgtcgatattttgctgaaccatcgcccaaaacgaagtagccggccaaccattgtcaaactaatggaaaggatccagaaccctgagtactcgaccacaatggatgtagctcccgtgatcttggcagcccaccggaataattacgagattttgactatgctgctgaaacaggacgtaagcctaccgaagccacacgccgtgggctgcgagtgcacgttgtgctccgctaagaacaaaaaggatagcctgcgacacagccgctttcggctggatatatataggtgtcttgcttcgcctgccttaattatgctcacagaggaagaccccatattgcgggctttcgagttgtcagctgacttaaaagagttatccctggttgaggtggagttccgcaatgactatgaggaattagctcgacagtgtaagatgtttgccaaggacctgctggcccaggctagaaacagccgcgagttggaggtcattttgaaccacacctcatcagatgagcctttagacaaaaggggacttcttgaggaacggatgaacctgtcacggctcaaactcgctattaaatataatcaaaaagagtttgtctcacagagcaattgccagcagtttctcaacactgtctggttcgggcagatgagcggatatcgtcgaaaaccaacctgtaagaagataatgaccgtgctgacagttgggatcttctggcctgtactgtccctgtgctacttgatcgctcccaagagtcagttcgggcgaatcattcatactccttttatgaaattcatcatacacggagccagttatttcacatttctgcttctgcttaatctttattctttggtctataatgaagacaaaaagaacactatgggtccagccctcgagcgaattgattacctgcttatcctatggattatcggcatgatttggtcggacataaagcggctgtggtacgagggtctcgaggacttcctagaagagagccgcaaccagctttcttttgttatgaactccttgtatctagcaactttcgccctgaaggtcgttgcccacaataagtttcatgacttcgcggatcgcaaggattgggacgcgtttcaccccactttggttgccgaaggcctcttcgcatttgctaacgtgctctcctatctccggctgttttttatgtatactacttctagtatcctcgggccactgcagattagtatgggccagatgctgcaggacttcggcaaattcttggggatgtttctgttggttcttttctcttttaccattgggttgacccaactctatgacaagggttacacaagtaaggagcaaaaggattgcgtcggtatattctgcgaacaacagtcaaatgacaccttccattcatttataggcacctgttttgccctattctggtacatattttcactggcacatgtcgccatatttgtcactcgattttcgtatggcgaagagctgcagtcctttgtcggggcagtcatcgtaggtacctacaacgttgtagtggtgattgttctcacaaagcttctagtggcgatgctccataaaagttttcagttgatcgccaaccatgaggataaagagtggaaattcgcaagggctaaactgtggctgtcctatttcgatgataagtgtacactcccaccccctttcaacattattccatcccctaaaacaatctgctatatgatctcgtctctgtctaagtggatctgctctcacacgtctaagggtaaagtgaaaagacagaactccttgaaggagtggcgcaacttgaaacaaaagcgcgatgagaattaccaaaaagttatgtgttgtctggttcaccggtacctcaccagcatgagacagaaaatgcagagcacagaccaggctacggtcgaaaacctgaacgagcttcggcaggacctgagcaagttccgtaacgagatcagagatctcctgggtttccggacatcaaagtatgccatgttctaccctcgtaactag

SEQ ID NO: 244581 - DNA, 2415 bp, synthetic construct
  misc_feature 1..2415: note = Description of Artificial Sequence: Synthetic coding sequence
  source 1..2415: mol_type = other DNA
atggcccagttctactataaaagaaatgttaatgcaccttacagagacaggatccccctacggatcgtaagggcagaaagcgagctcagcccttccgagaaggcctatctcaatgccgtggagaaaggcgattatgcctccgtgaagaaaagcctggaggaagccgaaatctattttaagatcaacatcaactgtattgacccgttgggtcgcaccgccctgttgatcgctatcgaaaacgagaacctcgagttgattgagttgcttctgtcctttaacgtttatgtgggagatgcgctgttgcatgctatcagaaaagaggtggtgggcgctgttgagctcttgctcaatcacaagaagccatcaggggagaagcagtttgtggcccagcccaattgtcagcagttgttggcaagtagatggtacgatgagtttcccggatggcgaaggagacattgggccgtgaagatggtgacctgctttataatcggactgctgttcccagtgttctccgtgtgttacctgattgcccctaagagcccccttgggctgttcattcggaagcccttcatcaagttcatctgccatactgcgtcatatcttacctttttgtttcttctgctacttgcatctcagcacattgatcgcagtgacctaaacaggcaaggaccaccaccgacaattgtcgaatggatgatcctgccctgggtgcttggcttcatctggggagagatcaagcaaatgtgggatgggggtctgcaggattatatccacgactggtggaacctcatggattttgttatgaattcactgtatctagcaacaatttccttgaaaatcgtcgcttttgtcaaatacagcgcgctgaaccccagggaaagctgggatatgtggcaccctaccctcgtcgcagaggctttgtttgccattgccaatatcttcagtagcttacgcctcataagcttattcaccgccaattcacacttggggccactccagatctccctgggcaggatgctcctggatatcctgaagtttctgtttatttattgcctggtgctgctggcttttgccaacggcctcaaccaactctacttttattatgaagaaacgaaggggcttacatgcaaaggaatccgttgtgaaaaacaaaacaacgcgtttagtaccctgtttgagacgctgcaatccttattctggtctattttcgggctcatcaatctatatgtgaccaatgtcaaggcacaacacgagttcaccgaattcgttggcgctacaatgtttgggacctacaacgtgatctccctggttgtcctccttaatatgctcattgcgatgatgaacaactcctaccagttgattgcagaccatgccgatatcgagtggaagtttgctaggactaaactgtggatgtcctacttcgaggaaggaggaactctgcctaccccgtttaatgtcatcccctctccaaagtcactgtggtacctgattaaatggatatggacacatctttgcaagaagaagatgcgcaggaagcccgagtcgtttggtaccatcggcagacgtgccgcagataacctgaggagacatcaccaatatcaggaggttatgcgcaacttagtgaaacggtacgtcgcagccatgattagggatgcaaagaccgaagaaggtctgaccgaggagaacttcaaggaacttaagcaggatatctcgtctttccgtttcgaggttcttggactactccgaggaagtaagctgtcaaccattcagtctgccaacgccagcaaggaaagcagtaattccgccgattcagacgaaaagagtgattcagaagggaactcaaaggacaagaagaagaacttttccctttttgacctgactacactgatccaccctcgcagcgcagccattgcttcagagcgccataatataagtaatggttccgcattagtggttcaggaacctccgagagagaagcaacggaaggtgaacttcgtaaccgacatcaaaaatttcggactgttccacagaagaagcaagcagaatgccgctgaacagaatgcaaatcagatattttcagtgtcagaggaagtggccagacagcaagctgccggacctttggagcggaatatacagctggagtcaagggggctggcttctcgtggagaccttagcatccccggactctcggaacagtgcgtgcttgtggaccaccgggagcgcaatactgatacattgggactgcaagtgggcaagcgtgtgtgtcctttcaaatccgaaaaagtggtcgtggaagacaccgtacctataattcccaaggagaagcatgcaaaggaggaggattcatctatcgattacgatctcaatctgccggacacagtgacccatgaggattatgtcacaactcgcctttag

SEQ ID NO: 244582 - DNA, 2511 bp, synthetic construct
  misc_feature 1..2511: note = Description of Artificial Sequence: Synthetic coding sequence
  source 1..2511: mol_type = other DNA
atggcacagttctattacaagaggaacgtaaacgccccatacagggaccgcattcctctccgcatcgtcagagccgagtcagagctaagtccatctgaaaaagcataccttaacgctgtggaaaagggggactacgcgtccgtgaaaaagagtctcgaagaagcagagatctatttcaagatcaatattaactgtattgatcctctgggcagaaccgctttgctgatcgccatagaaaatgaaaacctggaattaattgaactactgttatcttttaacgtgtacgtgggcgacgccctcctgcatgcaatcaggaaagaagttgttggagcagtggagcttttgctcaatcacaagaagccttctggagaaaagcaggtgccgccaattctcttggataaacagttcagcgaattcacaccagatatcacaccgatcatccttgccgctcataccaataactatgagataataaaattattagtgcaaaagggagtcagtgttcccaggccccatgaggtacggtgcaactgtgttgagtgcgtgagttctagcgatgtggacagcctccggcattcacggtccagattgaatatatacaaggcactggctagtcctagcctgatcgcattgtcttctgaagatcctttcttaacggccttccagctctcatgggagctgcaggagctttcaaaggtggagaatgagttcaaatcggagtatgaagagttgagcagacagtgcaagcagttcgctaaggatctgctcgatcagaccagatcatcacgcgaactggagattattcttaactatcgagacgacaattcactcatcgaggagcagagcggcaatgatctagcacgtctgaaactggcgattaaatatagacagaaagaattcgtggcccagcccaattgtcagcagctgttggcctcacgatggtacgacgagttccccggttggcgcagaaggcactgggccgtgaaaatggttacctgcttcatcatcgggctgttattcccggtattcagtgtctgctacctcattgcacctaaaagtccactggggctgttcatccgtaaacctttcattaagtttatctgccatacagctagctatctcacctttttatttttgctgttgctcgcttctcagcatatcgaccgttcagacctgaatagacaggggccacctcccactatcgtcgaatggatgatcctcccatgggtgctaggattcatttggggtgaaatcaagcagatgtgggacggcggtctgcaggattacatccacgattggtggaatctcatggacttcgtcatgaacagtctttacctcgcaaccatctctcttaagatagtcgcctttgtgaagtactctgccctcaatccaagagagtcttgggatatgtggcatccaaccctggttgccgaggccctgtttgcgatcgccaacatattctcctctttgcgtctaatatccctgttcaccgccaactctcacttggggcctctccaaatttcattgggacgtatgctactggatatactgaagttcctctttatctattgccttgtcttgctcgcattcgcaaacgggctgaatcagctctacttctattatgaggagaccaagggattgacatgtaagggcataagatgcgagaaacaaaataatgcattttccactctcttcgaaaccctgcagtcgctgttctggtccattttcggactgatcaacctgtacgtcaccaacgtcaaggcccagcatgagtttaccgaatttgtcggcgctaccatgtttggcacttacaacgtaatctctctggtagtactcctcaatatgctaattgccatgatgaataacagttatcagttgattgcagaccacgctgatatcgaatggaagtttgctaggacaaaactgtggatgtcctactttgaggaaggcggaacattaccaacaccgttcaatgtaatccctagtccaaagtctctttggtatttgattaagtggatctggactcacctgtgcaaaaagaagatgcgcagaaagcccgagagttttggtacaattgggaggagagccgcagataacctacggagacatcaccagtatcaagaggtcatgcgtaacctggtgaagaggtatgtggctgccatgatacgcgacgcaaagacagaggaggtcgctcgacagcaggctgctgggccactcgaaagaaacattcaactggagagccggggacttgctagtcggggagatctctctataccaggacttagtgagcaatgcgtcttagtcgatcatagggaacgcaatacagacaccctgggcctacaggtgggcaagcgggtgtgcccatttaagtctgagaaagtggtggtggaggatactgtgcctataattcctaaggaaaagcatgcaaaggaggaggacagttcaattgactacgatctgaacctcccagacacagttacacacgaggactacgtgaccacccgcctttag

SEQ ID NO: 244583 - DNA, 2682 bp, synthetic construct
  misc_feature 1..2682: note = Description of Artificial Sequence: Synthetic coding sequence
  source 1..2682: mol_type = other DNA
atggcgcagttttactataaaagaaacgtcaatgcaccataccgggatagaatcccactgagaatagttcgcgctgaatctgagctctccccgtcagagaaagcttatctgaatgcagtcgagaagggcgattacgcttctgtcaagaaatctttggaggaggccgaaatctattttaaaattaatattaattgcattgatcctttgggtaggacagctttgctgatcgcgatcgaaaacgagaacctggagctgatcgaattacttctcagctttaacgtgtacgtgggcgacgctctgcttcatgccatccgcaaggaggtcgtcggagccgtcgagctcctgctgaatcacaagaaaccttcaggtgagaaacaggtaccacctattcttctggacaaacagttttccgagtttacccctgatattacacctatcatactcgcagcacatacaaacaactacgagatcatcaaattgttagtacagaagggagtctcagttcccaggccccatgaggtgagatgcaactgtgttgagtgcgtgagtagctccgacgtcgactcgctgagacactcaaggagtcgcctcaacatttacaaagcattggcatcgccatcgcttattgcgttgtcaagtgaagacccgttcctcacagccttccagctgagctgggaactgcaggaactgtccaaggtggaaaacgagttcaaatccgagtacgaagagctgtcgagacagtgcaagcagtttgccaaagacctcttggatcagacgaggtccagccgggagctcgagatcatattgaattaccgcgacgataactctctgattgaagagcagagcggcaacgacctcgccaggctcaagctggctatcaagtaccgccagaaagaattcgtggcccaaccaaactgccagcagttattagcttctaggtggtatgacgaattcccgggatggcgacgcagacattgggcagtgaagatggttacatgtttcatcatcggtctgttgttccccgtttttagtgtctgttatttgatcgccccaaagtcgccactgggcctctttatcagaaagccttttataaagtttatctgtcacaccgcctcctacctgacattcctgtttcttctgctcctggcttcccaacatatcgacaggagcgatctcaaccgacagggtccaccgcctactattgtggagtggatgattctcccttgggtccttggcttcatatggggcgagatcaagcagatgtgggacggaggcctccaggactatatacacgactggtggaatttaatggattttgtaatgaactccctatacctggctaccatctctctgaaaatcgtcgcattcgttaagtacagcgccctgaatcccagagaaagctgggacatgtggcaccccacccttgtggccgaggcactgtttgcgatcgctaacatcttttctagcctgcggcttatctcccttttcaccgcgaattcccacctgggcccactccagatttcgctcggacgtatgttactggatatcctcaaatttctcttcatttattgtttggtgctgctcgcgtttgctaatggccttaatcagctctacttttactacgaggagacaaagggcctgacctgtaaaggaataaggtgtgagaaacagaataacgcatttagtaccctgttcgagacactgcagagcttgttttggtccattttcggcctgatcaacttatacgtcaccaacgtcaaagcacagcatgagttcaccgagttcgtaggtgccaccatgttcgggacatataacgtgatcagcctggttgttctgctcaacatgctaatcgccatgatgaacaactcgtatcagcttatagccgatcacgccgatatcgagtggaagtttgccagaaccaaactgtggatgtcctatttcgaggagggtgggaccttgccaacccctttcaatgtcattcccagtccaaaaagcctgtggtacttaatcaagtggatatggacccacttatgtaaaaagaaaatgcgcaggaaaccagagagttttggcactataggcaggagagccgctgataacctgagaaggcaccaccagtaccaagaagtgatgcgtaacctggtcaagcggtatgtagcagccatgatacgagatgccaagacagaagaggggctgaccgaggaaaactttaaggaactgaaacaggatatctctagttttaggttcgaagtcttgggccttctgagggggtctaagctgagcactattcagagcgctaatgcgagtaaagagtcaagcaatagcgctgacagtgacgaaaaatcagattctgaggaagaggtcgctcggcagcaggctgccggtccactggagcgcaacattcaactcgaatcgcgagggctcgcttcccgcggagacctcagtatcccgggacttagcgagcagtgcgtgctggtcgatcaccgcgagaggaatactgacactttgggccttcaagtgggcaaacgcgtgtgcccattcaaaagcgagaaagtggtggtagaggatacagtccccatcattcccaaagaaaaacacgctaaagaagaagattctagtatcgattacgacctcaatctgcctgatacagtgacccacgaggactacgtgaccacccgcctgtag

SEQ ID NO: 244584 - DNA, 2487 bp, synthetic construct
  misc_feature 1..2487: note = Description of Artificial Sequence: Synthetic coding sequence
  source 1..2487: mol_type = other DNA
atggcccagttctattacaagaggaatgtgaacgctccttatcgagatagaatccccctacgaatcgtgcgggctgaatctgagttaagtccctcagagaaggcctatctgaatgctgtggaaaagggggactacgcatcagtcaagaagtcattggaagaggccgagatttattttaaaattaatatcaattgcatagatccattaggaagaactgccctgctcattgccatcgagaacgagaatttagaactcatcgaattactgctgtcgttcaacgtctatgtgggtgatgccctgctccacgccattcgcaaggaggttgtgggagctgtcgaactgctactgaatcataagaaacccagcggtgaaaagcaagtccctcctatcctgctggataagcaattttcagaattcactcctgatattaccccaatcatcctcgcggcacatactaacaactacgaaattataaaactgctcgtgcagaaaggcgtcagcgtgcctcgaccccatgaagtgagatgtaattgcgtcgaatgtgtgtcctccagcgacgtcgatagcttgcgccattcccgcagtagattgaacatctacaaagcactggctagcccctccctgatagcattatcgagcgaggacccattcttaactgccttccagctctcctgggaacttcaggagctctcaaaagttgagaacgagtttaaatctgaatatgaggaactgagtcggcaatgcaaacagttcgccaaggacctgcttgatcagacccgctcttctagagaactagaaatcattctgaactatcgggatgataattctttgatcgaagaacagtctgggaacgacctagccagactgaagctagcaattaaatatagacaaaaggagtttgtggctcagcctaactgccagcaattgctcgcctcccgctggtatgacgaattccccggttggaggcgtagacactgggcagtgaaaatggtaacctgtttcatcatcggcctcctgttcccagtgtttagtgtgtgctatcttatcgccccaaaaagtcctctaggtttgttcattaggaaaccattcatcaagtttatttgtcacacagcctcctatctgacttttttattcctcttactgctggcttcccagcacatcgacaggagcgatcttaatcggcagggccctcctcctacaattgtggagtggatgattctaccatgggttctggggttcatatggggtgaaatcaaacagatgtgggatggcggactacaggactacattcatgattggtggaatttgatggactttgtcatgaacagcctgtatcttgcgacgatatccttgaagatcgtggctttcgtaaaatattcagctctgaaccccagagagtcctgggacatgtggcatcccacattagtggcagaagccctctttgcaatcgctaatattttctctagtctgcggcttatctccctgttcactgctaattcacatttggggcctctacagatttctcttggacgcatgctgttagatattctgaagtttctgtttatttattgtctggttttactggctttcgcaaacggccttaatcagctgtacttctattacgaggagacaaagggactcacctgcaaaggaatccgatgcgaaaaacagaataatgcctttagtacacttttcgagaccctgcagtctcttttctggagcatattcggcctaattaacttgtacgtaaccaatgtgaaagcccaacatgagtttacggagtttgtcggcgctactatgttcgggacttataacgtgatttccctggtggtactgctaaatatgctcattgccatgatgaataactcgtatcagttgatcgcgagaagggccgcagacaacctccgcagacatcaccaatatcaggaggtgatgcggaacctggttaagagatacgttgctgccatgatacgcgatgcgaaaaccgaggaggggctgaccgaagagaacttcaaagaactgaagcaagatatctcctcattccgattcgaagttttgggcctcttgcgaggatccaaactttccactatacaaagcgctaatgcctctaaagagagttccaactccgccgacagtgatgagaagtctgattccgaagaagaggtcgcgaggcaacaagctgccggaccattagagcggaatattcagttggagagcagaggacttgcttctaggggagatctttctatacccggattgagcgaacaatgtgtcttggtggatcatcgggaaagaaataccgatacgctcggattgcaggtgggaaaacgtgtgtgcccctttaagtctgagaaggttgtcgtggaggatacagtgccaatcatacctaaagagaaacatgctaaggaagaagacagctccattgattacgacctgaacctgccagacaccgttactcatgaggactatgtcactacccgcctctag

SEQ ID NO: 244585 - DNA, 2415 bp, synthetic construct
  misc_feature 1..2415: note = Description of Artificial Sequence: Synthetic coding sequence
  source 1..2415: mol_type = other DNA
atggctcagttttactataagcggaatgtcaacgcgccttatagggatcgtatacctttacgaatcgtacgtgctgaaagcgagctatcaccaagtgagaaagcctatttaaacgccgtagagaaaggagattatgcatccgtgaagaagagcctggaggaagcagagatttattttaaaatcaacataaactgtatcgacccattaggcagaactgctctattaatcgcaattgagaacgagaacctcgagctaatagagctgctgctgtcctttaacgtgtacgtgggggatgccttgctgcacgcgattagaaaagaagttgttggggctgtggagttattgttgaatcataaaaagccatccggtgagaagcagttcgtggctcaacccaattgccagcagctgttagccagtaggtggtacgatgaatttcctggttggagaaggagacattgggccgtgaaaatggtcacctgctttatcatcggactcctgttcccggtgttctccgtgtgttatctgattgcacccaagtcaccactgggcttattcatccgcaagccctttatcaagttcatctgccatactgcctcttatctcacattcctcttcctccttctcctggcgagccagcatattgaccggagcgacctgaaccgccaggggccaccccctacaatcgtagagtggatgatcctcccttgggttctaggtttcatttggggcgaaatcaaacagatgtgggatggtggtctccaggattatatccacgactggtggaatctgatggactttgtcatgaattccttatatctggctacaataagtctgaaaattgttgctttcgtgaagtacagcgccctaaaccccagagaaagctgggatatgtggcatcctactctggtggccgaagcgctttttgcaatcgccaacatcttttcttcattgagactaatctctctgtttaccgcaaatagtcatctcgggcctcttcagattagcctggggaggatgcttcttgatattttgaaattcctatttatttactgtttggtgttgttagctttcgcgaatgggttgaaccagctctatttttattatgaagagaccaaggggctgacctgcaagggtattcggtgcgagaagcaaaacaacgccttcagcacacttttcgagactctccaatcattattttggtcaatctttgggctaattaacttatacgtgaccaacgttaaggcacaacacgagtttaccgaattcgttggggctacaatgtttggaacttacaacgttatcagccttgtggttcttctaaatatgttgattgctatgatgaacaatagctaccagttgatcgcggaccatgccgacatcgagtggaaattcgccaggacaaaactgtggatgtcctacttcgaagaaggaggaacattgccgacgcccttcaacgtgatccccagtcctaaatccctctggtacctgatcaagtggatttggactcatttgtgcaagaagaagatgagacgcaagcccgagagtttcgggaccattgggcgtagggctgccgacaatctgagacggcaccaccagtaccaggaagtcatgaggaacctggtgaaacgctacgttgccgctatgatccgtgacgcaaaaacagaagagggtttgaccgaggagaactttaaggagctcaaacaggatatctctagcttccgattcgaagtgctcgggctgttgcgcggatccaaacttagtaccatccagtccgctaatgcctctaaggaatcctcaaatagcgccgattcagacgagaagtccgacagtgaggggaacagtaaggataaaaagaagaacttcagcctgttcgacttgactaccttgatacatcccagaagtgcagctatcgcctccgaaagacacaacatttctaatggcagtgctctggtcgttcaggagccccctcgggagaaacaacgcaaagtgaacttcgtaaccgacatcaaaaattttgggttgttccacaggcggtcaaagcagaacgccgctgaacagaatgccaatcagatttttagtgtctcagaggaggtggccaggcagcaggccgcaggcccactcgaacgaaacattcagctggaaagccggggtcttgcctcccgaggggatctcagcattccgggtctgagcgaacaatgcgttctggtcgatcaccgagagcgtaatactgatacgctcggtctgcaggtcgggaaaagggtatgccccttcaagagtgagaaggtggtcgttgaggacacagtgccaataatccccaaggaaaaacacgcaaaggaagaagattcctctatagattatgatttgaacctaccagatacagttacacacgaagactacgtgacgacacggctgtag

SEQ ID NO: 244586 - DNA, 2949 bp, synthetic construct
  misc_feature 1..2949: note = Description of Artificial Sequence: Synthetic coding sequence
  source 1..2949: mol_type = other DNA
atggcccagttttactataaaaggaacgtgaacgctccgtaccgggatcgaattccactccgcatagttagagctgagtcagaactgagcccgtctgagaaggcttatttgaatgccgtggagaaaggagattatgcctccgttaagaaatctctagaggaggctgaaatttacttcaagatcaatatcaattgtatcgaccccttaggccgaacagccctgctgattgccatagagaacgagaacttggagcttatagagctgctccttagctttaacgtatatgtaggtgatgccctgctgcatgccatccgtaaagaagtcgtgggggctgtggagttactcttaaaccataagaaaccatccggcgagaagcaggtacctcctatcctcttggacaagcaattctctgagtttacacctgacattaccccaatcatcctagccgctcatactaataattatgaaatcatcaagctgctggtgcagaaaggggtatccgtgcctagaccgcacgaagtgcggtgcaactgtgttgagtgcgtgtctagttctgatgttgacagcctgaggcatagccgcagtaggctcaatatttataaggctctggctagcccttcccttattgctctttcctcagaagacccgttcctaacggcattccagctatcgtgggagctccaagaactcagcaaagtggagaatgaatttaagagcgaatacgaggaattatcaaggcaatgcaagcagttcgccaaggatctgctggaccagactaggtcatcccgagagctggaaattatactgaactatagggacgataactcgctgatcgaagaacagtctgggaacgacctcgcacgattaaagctcgccatcaagtaccgacagaaggagtttgtggcccagcccaactgccagcagctcctcgcatcccggtggtatgacgaattcccagggtggaggagacgtcattgggctgtcaaaatggtcacctgttttattattggcctactattccctgttttttcggtctgttacctcattgcgcctaagtctcctctggggctgttcattaggaagcccttcatcaagtttatttgccataccgcttcttacctcacgtttctgtttcttctgcttctggcttcacagcatatcgaccgctccgacctgaacaggcaagggcctccacccacaatcgtggagtggatgatactgccttgggtgctcgggtttatatggggagaaattaaacaaatgtgggacgggggtctgcaggactacattcacgactggtggaacctgatggacttcgtcatgaactcactgtatctggccaccatatctctgaagatcgttgccttcgtgaagtattcagccttgaatccccgtgaaagctgggatatgtggcatccgacactcgtcgccgaagcactgtttgctatagcaaacatttttagctctctcaggctcatctccctctttacagccaacagtcatcttggacccttacagatcagtttggggcgaatgctgcttgacatcctgaaattcttgtttatctactgcctggtgcttttagcgttcgcaaacggactgaatcagctctatttttattatgaggagacaaagggtctaacttgcaaggggattagatgtgagaagcagaacaacgcatttagtacattgtttgagacacttcaaagtcttttttggtcaatttttgggctcattaatttgtacgtgactaacgtgaaggcccaacatgagtttacagagttcgttggagcgactatgttcgggacgtacaatgtgatctctctcgttgttctgctcaatatgctgattgctatgatgaataattcctaccaacttatcgcagaccacgccgacatcgaatggaaatttgcacgcaccaaactctggatgtcatatttcgaggaggggggaaccctgcccacaccttttaacgtgataccgtcgccaaaaagtctgtggtatcttatcaaatggatatggactcacctgtgtaagaagaagatgcgccgtaagcccgagagcttcggaacaattggggttcggacccagcatcgtagggctgccgataacctccggagacaccatcagtaccaggaagtgatgcggaaccttgtgaaacggtacgtggccgcaatgatccgagatgccaagaccgaggagggcctgacagaagaaaatttcaaagagctcaaacaggatatctctagctttcggtttgaagtgctcggtttgctgcggggatctaaacttagtacgatccagagtgcgaacgcgtccaaggagtcctccaattctgccgactccgatgagaaaagcgatagtgagggcaactccaaggacaagaagaagaactttagcctatttgacctcaccaccctgatccaccctcgcagcgcagctatagcctcagagagacacaacattagtaatggttccgctctcgtggtccaggaacccccacgcgagaaacaacgcaaagtcaatttcgtgacagatatcaagaatttcggactcttccaccggagatccaagcagaacgccgctgaacaaaacgccaaccaaatcttttccgtgtcagaagaagtggcaagacagcaggctgctggcccactggagcgcaacattcagctggagagccgaggccttgcaagccggggagatttgtctatccctgggttaagcgaacagtgtgtgttggtagatcatagagagcgaaacacggataccctcggtctgcaggtcggtaagcgggtgtgcccatttaagagcgaaaaagtcgtcgtggaagacaccgtccccattattcctaaagagaagcatgccaaggaggaggactctagcatagactatgacttgaatttacctgataccgttactcacgaggactatgtcaccactcggctctag

SEQ ID NO: 244587 - DNA, 2934 bp, synthetic construct
  misc_feature 1..2934: note = Description of Artificial Sequence: Synthetic coding sequence
  source 1..2934: mol_type = other DNA
atggctcaattctactataagcgcaacgtaaacgccccataccgagacaggataccacttcgcatcgtgcgcgcagagagcgaactgagccctagtgagaaggcctacctgaacgccgtagaaaagggtgactacgcctccgtaaagaaatccctggaggaggcggagatctacttcaagatcaatatcaactgcattgatccattgggtcgaactgcattgttaatcgccatcgaaaacgaaaatttagagctgattgaactgctgctgtcgttcaatgtgtacgtcggagatgccctgttacacgctattcggaaagaagtggtcggcgcagtggaattactgttaaatcacaaaaaaccgtccggtgagaaacaggtgcccccaatactgctggacaagcagttttcagagttcactccagacatcacccctattatcctggccgctcacaccaacaattatgaaattattaagctattagtacagaagggtgtcagcgtgccccgtccacacgaggtgcgctgtaactgtgtggaatgcgttagttcatctgatgtagacagcctacggcactcgaggagcaggctcaacatctataaagctctggcatccccgtctttgattgctctgtcttcagaagaccctttcctgacagcgttccaactgagttgggagctccaggaactctccaaagtggaaaatgagttcaagtctgagtatgaggagctgtctcgccaatgtaagcagtttgccaaggacctgttggaccaaaccaggagcagccgagaattggaaatcatcttaaactacagggacgacaatagccttatcgaggaacagtccggcaacgatctggcacgtctgaaactcgctatcaaataccgccagaaagagtttgtggcacaaccgaattgccagcagctcctcgcctctcgctggtatgacgagtttcccggttggcgcaggcgccactgggcggtgaaaatggtaacctgtttcatcatcgggctattgttccctgtgttctctgtgtgttacctgatcgcacccaaatctcccctagggcttttcatccggaagcccttcattaaattcatatgccatacggcatcctatctgacatttttgtttctcctgcttcttgcctcgcagcatatcgaccgaagcgaccttaataggcagggtcccccaccaacaattgttgagtggatgattctgccatgggtgctgggattcatttggggggagatcaaacaaatgtgggatggtggcctgcaggactacattcatgactggtggaacctgatggactttgtcatgaattctctctacttagcaacgatctcattgaaaatcgtggcttttgtcaaatatagtgcactcaatccacgggagtcatgggacatgtggcacccaacactggtcgccgaagccctgtttgccattgccaacatcttttcctccctgcgactcatttccctttttaccgcaaactcacacctcggcccactccagatttcattagggagaatgctgcttgacatcctgaagtttctgttcatatattgcctggtactgttggctttcgctaatgggctgaaccaactgtatttctactatgaagaaactaagggcttgacctgcaaaggaatcagatgcgagaaacagaataacgctttctctactttatttgaaaccctgcagtctttgttttggtcaattttcggactaattaacctgtacgtgaccaatgtgaaggcccaacatgagttcacggagttcgtgggagctacaatgtttggcacttataacgtaatctctctggttgtgcttctgaatatgttgattgccatgatgaacaattcatatcagctgatcgccgatcatgcagatatagagtggaagttcgcacggacgaaactttggatgagttactttgaggaaggcggaacactacccactcctttcaatgtcattcccagcccgaagagcctatggtatctaataaaatggatttggacacacttatgcaaaaagaagatgcgtcgcaaacctgaatcattcggtacgataggacgccgagccgcagacaatctgcgacgccaccaccagtaccaagaggtcatgagaaatttagttaaacgatacgtggctgctatgattcgggacgcaaagaccgaggagggactgactgaagagaatttcaaggaactgaaacaggatatatcttccttccgatttgaggttctcggacttctgcgaggctctaaattatcaacaatccagtctgccaacgccagcaaggagtcctctaattcggcggactctgatgagaagagtgattcggaaggcaacagcaaggataaaaagaagaacttttcgctgtttgatctcacgacactgattcatccacgctccgccgctattgcatccgagcgtcataacatatcaaatggcagcgccctggttgtccaggaaccgccacgagaaaaacaacgcaaggtgaatttcgtgaccgatatcaaaaatttcggactctttcacagacggagcaaacagaacgccgcagagcaaaatgctaaccagatttttagcgtgtctgaagaagtcgccagacagcaggcagccggacctttggaacgaaatatccagttagagagtcggggtctggcttctcgcggagatctgtccattcccggactttccgagcagtgcgtcctggtcgatcatcgggagaggaacacagataccctcggattgcaggttggaaagagggtgtgcccattcaaatccgaaaaggtcgttgtagaggacaccgtgccaatcattccaaaggaaaagcatgcgaaggaggaagactccagtattgattatgacttgaaccttcccgacacggtcacccacgaggattacgtgactaccagactttag

SEQ ID NO: 244588 - DNA, 1383 bp, synthetic construct
  misc_feature 1..1383: note = Description of Artificial Sequence: Synthetic coding sequence
  source 1..1383: mol_type = other DNA
atggcccaattttactacaagaggaacgtgaatgctccttatagagacagaatcccactgagaattgtgcgagcagaatctgagctcagcccctcagaaaaggcatatctgaacgctgtcgaaaagggcgattacgccagcgtaaaaaagagccttgaagaagcggaaatatatttcaaaatcaacattaattgcatcgatccccttgggagaacagccctcctaattgcgatcgagaacgaaaatctggagttgatcgagctgcttctatcttttaacgtctacgttggggacgccctgctccacgctattcgtaaagaagtggtcggtgccgtggaactgctcctgaatcacaaaaagccgagtggcgagaagcaagtccctcctatcctgctcgataagcagttcagcgaattcaccccagacatcacccccataatccttgccgcacacacgaataactatgaaatcatcaaactactagttcaaaagggagttagcgtgcctaggcctcacgaggtcagatgcaactgtgttgagtgtgtctctagctcagatgtggatagcctcagacatagccgatccagactcaatatctataaggccttggcttccccaagccttattgctctcagctccgaagacccttttcttaccgctttccagctgagctgggagctgcaggagctgtccaaggtcgaaaatgaatttaagtccgaatatgaggaactgtcgagacagtgtaagcagtttgccaaggatctactggaccaaacaagaagttcaagagaactcgaaatcatcctgaattaccgtgacgataacagcctgattgaagaacagagcggcaatgatttggctagactgaagttggctatcaagtatcgccagaaggagtttgttgctcagccaaattgtcagcagttgttggctagcaggtggtatgacgagtttcccggatggcggagacgccattgggccgttaagatggtgacctgttttataattgggctgctgttccctgtgtttagcgtttgctacctgatagcccctaaaagtccgctgggtctgtttatccgtaagccttttatcaaatttatttgccacactgcctcctaccttaccttcctgtttcttctgctcctggcgagccaacacatcgaccgctcagatctcaaccggcaaggcccacccccaaccatcgtggagtggatgatcctcccctgggtcctaggttttatatggggtgagattaagcagatgtgggacggcggtcttcaggactacatacatgattggtggaatctgatggacttcgtcatgaactctttgtatctagctactatttcgcttaagatcgtagcatttgtgaaggtgatctag

SEQ ID NO: 244589 - DNA, 2511 bp, synthetic construct
  misc_feature 1..2511: note = Description of Artificial Sequence: Synthetic coding sequence
  source 1..2511: mol_type = other DNA
atggcccagttttactataagcgcaatgtaaacgcaccttatagagatcggatccccctcagaattgttagggccgagagcgagctatccccaagcgagaaagcttacctgaatgcagttgagaaaggtgattacgcatcagtgaaaaagagtctggaggaagccgaaatatactttaaaattaatatcaactgtattgacccactcggcaggaccgcgctcttaatcgctattgaaaacgagaacctggaactcattgaactgttactctccttcaacgtctatgtcggcgacgctctgctccatgccatccgaaaggaggttgtgggtgccgttgagctgttgctgaaccacaaaaaaccttccggagagaaacaggtgccccctattctgcttgataaacagttttcggagtttacccccgacatcacccccattattttagctgctcacaccaacaactacgagataatcaagctactggtgcagaagggcgtgagtgttccgaggccccacgaagttagatgtaactgcgtggaatgtgtaagttcatctgatgtagattccttgcgccattcacgatcaaggctcaacatatataaggcgttagctagtccatcattgatcgcactctctagtgaagatccattcctgacggcgttccagttgagctgggaacttcaagagttgagcaaagtagagaatgagttcaagagcgaatatgaggagctttcgaggcaatgtaaacaatttgcgaaggacctgcttgatcagactcggtcatcacgcgaactggaaattattctcaactatcgggatgacaattctctaatagaggagcagagtggcaacgatctagctcgacttaagctggcaattaaatatcgacagaaggagttcgtggctcagcctaattgtcagcagctgctggcttcaaggtggtacgatgaatttcccggatggcggaggcggcattgggctgtcaaaatggtaacctgtttcataattggccttctttttcctgtgttttcagtctgttacttgatcgcacccaagtctcccctcggcctgttcatcagaaaaccgtttatcaaattcatatgccataccgcgtcatatcttaccttcctgtttctgcttctgctggcaagtcagcatatcgacaggtccgatctcaatcgccaggggccacccccaactattgtggaatggatgatccttccctgggtgctgggtttcatctggggcgagattaagcagatgtgggacggaggtctgcaggattatatccacgactggtggaaccttatggatttcgtgatgaatagcctgtacctggccacaatcagccttaagattgtcgcctttgttaagtactctgcactgaaccctagggaaagctgggatatgtggcaccctaccctagttgcggaagccctcttcgccatcgcaaatattttctcatctctgcgcttaatcagcctgtttacggctaactcacatttggggccactccaaatatctcttggacgcatgctgctggacatattaaagtttctgtttatctactgcctggtgctcctcgcattcgcaaacggactgaaccaactgtacttctactatgaagagaccaaaggcctcacctgcaaagggatacggtgcgagaaacagaacaacgcttttagcaccctgtttgagacattacagagcctattttggagcatctttgggttgataaacctgtacgtgaccaatgtgaaagcccagcatgagtttaccgaatttgtgggagctacaatgttcgggacctataacgtaatcagtttagtggtactgttgaatatgctcattgccatgatgaataattcatatcagttaatcgccgatcatgcagacatcgagtggaaatttgctcggacaaaactgtggatgtcctatttcgaggagggtggaacacttcctacaccatttaatgtcatcccaagtcctaaatcattgtggtacctgattaagtggatctggacacatctgtgcaaaaaaaagatgcgcagaaagccagaatccttcggaaccattggaaggcgcgcagctgacaacctacgcagacatcaccagtaccaggaggtgatgcgtaatctggtaaagcgctacgtggcagccatgattcgggatgccaagaccgaggaggtcgccagacaacaggctgcaggccctctcgagcggaacatccagcttgagtcacggggactcgcctctcgaggcgatctgtctatccctggcctgtccgaacagtgcgtcttggtggaccaccgggaacgcaataccgacacactgggactccaggttgggaagcgcgtctgtccctttaaatccgaaaaggttgtggtggaggacacagtgcccataatccccaaggaaaagcacgccaaagaggaggattcatccatcgactacgacctaaatttacctgacaccgtgactcacgaagattatgtcaccacccgactttag

SEQ ID NO: 244590 - DNA, 2394 bp, synthetic construct
  misc_feature 1..2394: note = Description of Artificial Sequence: Synthetic coding sequence
  source 1..2394: mol_type = other DNA
atggctgctgccccagttgctgccggttcgggcgcaggaagaggaagaaggtctgcagccaccgtagcagcctggggcggttggggcggaaggcccagacctggcaatattcttttacaactgaggcaaggccagctcacaggtcggggattagtcagagccgtgcaatttacggaaacgtttctcacagaacgggataaacagtccaagtggtctggaatcccccagctgctcctgaagctacacacaacgtcccacttgcacagcgattttgtcgagtgtcagaacattctgaaggagatctcccccctcctcagtatggaagcaatggcatttgtcaccgaggaacgcaagctgacccaggaaaccacgtaccctaacacatacattttcgaccttttcggtggcgtggatctcctcgttgaaattttaatgcgaccgacaattagcattaggggacagaagcttaagatcagcgacgagatgtccaaagactgcttgtctatattgtataacacttgcgtctgcacagagggggtgactaagaggctggctgaaaaaaatgatttcgtcatatttctgttcacgctgatgacaagcaagaagacctttctccaaactgccacgttgatcgaggacattctgggagtgaagaaagaaatgattcggttagatgaggtacctaacctgtccagtctggtctccaacttcgatcagcagcagctggctaatttttgtcggatcctggctgtcactatttcagaaatggacaccgggaatgacgacaagcacaccctactggcaaagaacgctcaacagaagaaaagcctgtccctcgggccttcagcagccgaaattaatcaagctgccctcctctccattcctggtttcgtcgagcggttgtgcaagctagccacgcgcaaggtgtccgagagtaccggcaccgcctcattcctacaggagctagaggagtggtacacatggttagacaacgctctcgtattggacgccctaatgagagtagcaaacgaagaatctgaacacaaccaggccagtattgtgtttccaccccctggcgcaagcgaggagaacgggctgcctcacacaagtgcgagaacccagctgcctcagtcaatgaagattatgcatgagataatgtacaaactcgaggtgttatatgtgctgtgcgtgcttctcatggggagacagagaaaccaagtgcataggatgattgcggagtttaagcttattcccggactaaacaacctgttcgataagcttatttggagaaagcacagcgccagtgccctggtactgcacggccataaccaaaactgtgactgcagccccgacataacgctgaagattcagtttcttcgactgctgcagtctttttcagaccatcacgagaacaaatacctgttattaaacaaccaggagctcaatgagctttccgccatctctctcaaagccaacatacctgaagtggaggcagttctgaacaccgaccgcagccttgtatgtgatggaaagagaggcctgctgaccaggctcctccaggtgatgaagaaagaacccgctgagtcctcattcagattttggcaggcaagggctgtggaatcgttccttagggggacaacctcttatgccgatcaaatgttccttctcaagcggggacttttggaacacattctgtattgcatcgtggacagcgagtgtaaatccagagatgtcctccaaagttattttgatctgctaggagaactgatgaagttcaacgtggacgctttcaagagatttaacaaatacatcaataccgacgccaaattccaggtgtttcttaagcaaattaactcatctctggtggatagcaacatgcttgtccggtgcgtgactttgtctttagacagattcgagaatcaggtggacatgaaggttgctgaagtgctctcagagtgccggctgctagcgtacatatctcaagtgcctactcaaatgtcatttctattcagattgatcaacatcatccatgtgcagacacttacacaggaaaacgtcagttgcctgaatacatcattggtgattcttatgctggcccgaaggaaggagcgccttccgctgtacctccgccttcttcagaggatggagcactctaagaagtaccctgggttcctgctcaataattttcacaacttactccgcttctggcagcagcattacctgcataaggacaaagattccacatgtctggagaattcgagctgtatatccttctcttattggaaggaaactgtgtctatcttgttaaatcctgatcggcagtctccgagcgctctcgtcagttatatcgaggagccatatatggatattgatcgagattttaccgaagaatag

SEQ ID NO: 244591 - DNA, 2277 bp, synthetic construct
  misc_feature 1..2277: note = Description of Artificial Sequence: Synthetic coding sequence
  source 1..2277: mol_type = other DNA
atggccgctgccccagtggctgccggatcaggggcaggtagaggcagaaggtccgccgctacggtcgctgcctggggcggttgggggggtcggccaagacctggtaacatcctgctgcagcttagacagggccaactgaccggccgaggcctggtgagggccgtacaattcaccgagacgtttctcacagagcgggacaaacaatcaaaatggagcggcatcccacagctgctgctgaagctgcacactacatcgcatttacactctgattttgtcgagtgtcagaacattcttaagctcctcgtcgaaatcctcatgaggccgacaatctcaatacggggacagaagctaaagatatctgatgaaatgtctaaagattgccttagtatcctgtataacacctgcgtgtgcacagagggcgtaaccaaaagactggcagagaagaatgatttcgtcatctttctcttcactctgatgaccagtaagaagacctttcttcagacagctacactgattgaggatatcctcggagtgaagaaagaaatgatccggctggatgaggtgccgaacctcagctccctcgtgtccaacttcgaccaacagcagctggcgaatttttgccgcatcctcgcggtaaccatttcggaaatggacactggaaacgacgataagcacacccttctagctaaaaacgcccaacagaagaaatccctgtcccttggcccatcggctgctgagatcaatcaggccgctctactttccattcctggatttgttgagagactgtgcaaattagcgaccagaaaggtttctgagtcgacaggaaccgcgagtttccttcaggaactggaggaatggtatacctggctcgacaacgcgctggtgctcgatgctctgatgagggtcgcaaacgaagagtccgagcacaaccaagcttcaattgtctttccgccacccggtgcatccgaggaaaatggccttccacacacttctgctcgaacccagctgccacaatctatgaagataatgcacgaaatcatgtataaactcgaggtgctttacgtcctttgcgtccttctgatgggaagacagcgcaatcaggttcacaggatgatcgccgaattcaaacttattcctggtttgaacaacctgttcgataaactgatctggaggaaacatagtgcttctgcactagtgttacatggacacaaccaaaattgtgattgctcacctgatataactttaaaaatacagttcctcaggcttctgcaaagctttagtgaccatcacgagaataagtaccttctcctaaataatcaggagcttaacgagctgagcgccatcagtctgaaggctaacattcccgaggtggaggctgtgcttaacactgaccgaagcctcgtgtgtgatggcaagagaggacttttgacacggctattgcaagttatgaagaaggaacccgcagagtccagcttccggttctggcaggccagagcagttgagtccttcttgcggggaaccacatcctatgctgaccaaatgttcctacttaaacgcggactgctggagcatatcctttattgtattgtcgactcggagtgtaaatcacgagatgtgcttcagagctatttcgacctacttggagaactaatgaagttcaacgtggacgcatttaagaggttcaacaagtacatcaataccgacgcaaaatttcaggtgtttctaaaacagattaattcctcgttggtggacagcaatatgctggtgcgatgcgtcacactgtccctggatcgcttcgagaaccaggttgacatgaaggtcgccgaggtcctaagcgagtgccgccttctagcctacatctcccaagtgcctacgcagatgagttttctattcagactgataaatatcatccacgtgcagaccctcacgcaggaaaacgtgtcctgccttaacacttcgctcgtgatcctcatgctggcacggaggaaagagcggcttcctctgtatctgcgactgttacaacgcatggaacactcaaaaaaatacccaggattccttttgaataacttccacaatctgctgcgtttttggcagcaacactatcttcacaaagataaggactcaacatgtctggagaacagtagttgcatctcattcagctactggaaagagacagtcagcattctgctaaaccccgacagacagtcacccagcgctttagtatcctatatcgaggagccttatatggatattgaccgggatttcacagaggagtag

SEQ ID NO: 244592 - DNA, 2370 bp, synthetic construct
  misc_feature 1..2370: note = Description of Artificial Sequence: Synthetic coding sequence
  source 1..2370: mol_type = other DNA
atggcagcggcacctgtggcagccggtagtggggctgggcgaggacggaggagcgcagcgaccgttgccgcttggggcggttgggggggacggcctaggccaggtaatattctactgcagttgcgacaaggccaactgacgggcagagggcttgtgagggccgtgcagttcacagaaacctttctgaccgagagagataagcagagcaaatggagcggaattccccagctgctgctgaagctccacaccacttctcacttgcattcggatttcgtggaatgtcagaacattctgaaggaaatttctcctctgctgtctatggaagcgatggccttcgtgacagaagagcgtaaattgacacaggaaaccacataccctaacacgtacatcttcgacctattcggcggagttgatctactcgttgagatcctcatgagaccaaccatttcaatcagagggcagaaacttaagatttcagatgagatgagcaaagattgcttaagcatactctataacacttgtgtgtgtacagaaggcgtaacaaaacgcctggcagagaagaacgatttcgtgatctttttgttcacgctgatgacatccaagaagacctttctccaaaccgctacattgatcgaggatattctcggcgtcaaaaaggagatgattcggcttgacgaggtacctaacttgtcatccttagtgagcaattttgaccaacagcagttagctaacttctgccggatacttgccgtaacaatttctgaaatggatacaggcaacgatgataagcacacactcttggccaaaaacgcacagcaaaagaagagcctctcattggggccatcagcggcagaaattaatcaggcagccctgctgtcaatccctgggttcgtggagaggctatgtaaattagcgacccggaaggttagtgagtcaacgggcaccgcatcattccttcaggaacttgaagaatggtacacatggctggacaatgccttagtgctggacgcccttatgcgcgtggccaatgaggagtcagaacacaatcagggggcttccgaggagaacggtctcccccacacgagcgccaggactcagttaccccagagcatgaaaattatgcacgaaatcatgtacaaattagaggtgctttacgtcttgtgtgttctgctgatgggccgacagcggaaccaagtacatcgtatgattgccgagtttaagctgatccccggtctaaacaacttgtttgataaactgatttggaggaaacatagcgcatcagctctggtccttcatgggcacaaccagaactgcgactgttcccccgacatcaccttaaagatacagttcctgcgtttattgcagtcgtttagtgatcatcatgagaacaaatatctgctgctcaacaaccaagagctcaatgagctctcggcaatctccctcaaagctaatatcccagaggtggaagccgtgctgaacaccgaccggtccctggtatgcgacggcaagagaggcctgttgacgcgacttctccaggtgatgaagaaagagcccgcagaaagctcatttcggttttggcaggcccgtgccgtcgaatccttccttcgaggaaccacaagttatgctgatcagatgttccttctgaaacgcggacttttggagcacatattgtactgtattgtcgattcagagtgcaagtccagggacgtgttacagtcttattttgatttgctgggtgagctgatgaagttcaacgtcgacgcctttaagcgattcaacaaatacatcaacactgatgccaagttccaggtgtttttaaaacagatcaatagcagcctggtcgattctaatatgctggtgagatgtgtgaccctgagcctcgatagatttgagaaccaggtagacatgaaagttgccgaggttttatctgagtgcagactgcttgcttacatctcgcaggtccccacccagatgagcttcctgtttcggttgataaatatcattcacgtgcagacacttacacaggagaacgtaagctgcctgaatacgagccttgtgattctgatgctggctagacggaaggagcgcctgcccctttatctccggctgctccagcggatggagcatagtaagaagtacccaggtttcctgttaaacaacttccacaacttgctcagattttggcagcagcactatctacataaagacaaagacagtacttgcttagagaattcgtcgtgtattagtttctcctattggaaggaaactgtgtcgatactccttaaccctgataggcagtctccatccgcactggtctcctacattgaagaaccttatatggacatcgatcgagattttaccgaggaatag

SEQ ID NO: 244593 - DNA, 1200 bp, synthetic construct
  misc_feature 1..1200: note = Description of Artificial Sequence: Synthetic coding sequence
  source 1..1200: mol_type = other DNA
atgaggtctcagagtacaataaaggtccataggatgatcgcagaatttaagctgatccccggactcaacaacctgttcgacaaactgatttggagaaaacacagtgccagtgcactagtcctgcatggccacaatcaaaattgtgactgttcacctgatataaccctaaaaattcagttccttagactgctgcaaagtttctcagatcaccacgagaacaagtatctgctcctcaataaccaagaactcaatgaattgagcgctatcagcctgaaggctaacatccctgaagtcgaggcggtactgaatactgatagatctctggtatgtgacggcaagagaggattgctgactcggctgctgcaggtgatgaagaaggagcctgccgaatcaagcttccgattctggcaagcccgtgctgtggaatcgtttctgcggggaaccacttcctatgccgatcagatgtttttgctgaaaagagggctactggagcacatcctctactgtatcgttgactccgagtgcaaatcaagggacgttcttcagagttactttgatctactgggcgaattgatgaagttcaacgtggacgccttcaagagatttaataagtacatcaatactgatgccaaatttcaagtgttcctaaaacagattaactcttctcttgtcgacagcaatatgctggtacgctgcgtcactttatcacttgaccgtttcgagaaccaggttgatatgaaagtggccgaagtgctgagtgagtgtagactcctggcgtatattagccaggtgcccacacagatgagcttcctgtttaggctaattaatataatccatgttcagacattaacccaagaaaacgtgtcctgcctgaacacgtccctggtgattctgatgctggccaggcgcaaggagcgactgcccctctacttacgattgcttcagcgcatggaacattctaagaagtaccctgggtttctgctcaataacttccacaaccttctacgcttctggcaacagcactatctccacaaggacaaagattcgacttgtctcgaaaacagctcctgcattagcttttcttattggaaggagaccgtgagcattttattgaaccccgaccggcagtccccgtctgcacttgtgtcatatatcgaggagccttacatggacatcgatagggacttcaccgaagaatag

SEQ ID NO: 244594 - DNA, 2349 bp, synthetic construct
  misc_feature 1..2349: note = Description of Artificial Sequence: Synthetic coding sequence
  source 1..2349: mol_type = other DNA
atggccgcagctccagttgcggctgggtccggggcaggtcggggtaggaggtcagccgctaccgtggccgcttggggcggatggggccagctgacaggccgaggtctcgtgagggctgttcagttcacagagacgtttttaacggaaagggacaagcagtcaaaatggtccggcatcccgcaactgctgctgaagctccacacaacttcccatctgcacagtgattttgttgagtgccaaaatatcctcaaggaaatcagcccactcctctccatggaagcaatggcttttgtcacggaagaacgcaaactgacacaggagacaacctatccaaacacttatatatttgatctgttcggaggagtggatctcctagtcgaaatcctgatgcgacctacgatatcaatccgaggtcaaaagcttaaaatcagcgacgagatgagtaaggactgcttatccatcctgtacaacacttgcgtttgtacagagggggtcacaaagcgcctagccgaaaaaaacgacttcgtgatattcctctttactttgatgacctctaagaaaacattcttacaaacggctacactgattgaagatatcctgggggtaaaaaaggaaatgatacgcctggacgaggttcccaacctaagtagtttggtgtccaactttgatcagcaacagctcgccaatttttgtaggatcttggccgtcacaatttctgaaatggacaccgggaacgatgacaaacatactcttctagccaagaatgcacagcagaaaaagtccctttctttggggcctagcgctgccgagatcaaccaagctgctctgctttcaatccctggattcgtggaacgcctgtgtaagctggcaacccggaaggtaagcgaaagtactgggactgcatccttcctccaggaactggaagaatggtatacctggttagataacgccctggtgctggatgccctgatgagagtcgctaacgaagaatcagaacacaaccaggcgtcaattgtcttccctccacctggcgcttccgaagagaacggcctgcctcacacctcggcccgaacccaactgccacaatcaatgaaaattatgcacgagatcatgtacaaactggaagtgctttacgtcttgtgtgtactcctcatgggaagacaaaggaatcaggttcataggatgatcgccgagttcaagctgattcccggtctgaacaacctgttcgataagctcatctggagaaaacactcagcttccgcgctggtattgcacggccataatcagaactgcgattgcagccctgatatcaccctcaaaatccagttcctgaggttgcttcagtcattttccgaccaccacgagaacaagtacctgcttctcaacaatcaggagcttaacgagctctccgcaattagtctgaaggccaatatccccgaagtggaagctgtactcaacacagaccgttctttggtctgcgacggtaaaagaggcttactcacaaggctactccaggtgatgaaaaaggagcccgcagaatcctctttccgattctggcaggctcgggctgtggagagcttcctgcgcggtacaacatcctacgctgaccagatgtttttgctgaagagaggcttattggagcatatcttatattgcatcgtggactccgagtgcaagtctcgggatgtactgcagtcatatttcgacctcctcggagaactgatgaagttcaacgtggatgcattcaagaggtttaacaaatacatcaacactgacgccaagttccaggtttttctgaaacaaattaacagctctctggtggactccaatatgctggtcaggtgtgtgaccctgagcctcgatagattcgaaaaccaagtggatatgaaagtggcagaagtcctgagcgaatgccggctgttggcatacatttctcaggtgccaacacagatgtctttcttgttcaggctgattaatataattcacgtccagactttgacgcaagagaatgtctcttgtcttaatacgtccctcgtgatcctgatgctagccagaagaaaggagcggctaccactctacttgcgacttctgcagagaatggagcacagcaagaagtacccaggtttcctgttaaacaacttccataatctgttgcgattctggcaacagcattatttgcataaggacaaagactcaacctgtttagagaacagcagttgcatatcattctcttattggaaagagaccgtaagcatccttttgaaccccgacagacagtccccaagcgctctggttagctatatagaagagccttatatggacattgatcgagactttaccgaagaatag

SEQ ID NO: 244595 - DNA, 2922 bp, synthetic construct
  misc_feature 1..2922: note = Description of Artificial Sequence: Synthetic coding sequence
  source 1..2922: mol_type = other DNA
atggcacaactgtattataaaaaggttaattattcgccctacagagacaggatccccctgcaaatcgtcagggctgagacggagctctcagctgaggagaaagcctttctaaatgcagtcgagaaaggcgactacgctaccgtcaagcaagccttgcaggaggcagagatttactacaatgttaatatcaactgcatggatcccctgggccgatctgcactgctgattgccatagagaacgaaaaccttgagattatggaacttctgctgaaccactctgtctacgtgggggatgctcttctgtatgctatccgcaaagaggttgtgggggctgtggaactactcctgtcctatcggaggccaagcggagaaaagcaggtaccaaccctcatgatggacactcagttctccgaatttacaccggacataacccctatcatgttagccgcacatacaaacaattatgagattatcaaactactagttcagaagagggtaaccataccaaggccccaccagattagatgcaactgtgtggaatgcgtgagcagcagcgaagttgacagtctccgccattctagaagcaggctgaacatctacaaggcgctggcctccccctcactaatcgcactgtcctccgaggaccctatcttaactgcctttcgactggggtgggaactgaaggaactgtccaaggtcgagaacgagttcaaagccgaatatgaagagctgagccagcagtgcaaactattcgccaaagatctcctcgaccaggcccgttcgtcccgggagctcgagattatcttaaaccaccgagatgatcacagtgaggaattggacccgcagaaataccacgaccttgcaaagctaaaagttgccattaagtaccaccagaaggaatttgtggcccagccgaattgtcagcagctgctggccaccctgtggtatgatggcttccccggttggaggcggaagcactgggtggttaagttactgacatgtatgactatagggtttctctttcccatgctgtctattgcctatctcatttcccctcgctcaaacctggggctgttcatcaagaaaccatttattaagtttatttgtcacactgcctcgtatctgacatttttgtttatgcttctgcttgcgagtcagcacattgtgagaactgatttgcacgtccaggggcctccccctaccgtggtggagtggatgattctgccatgggtacttggctttatctggggggagattaaagaaatgtgggatggcggttttaccgagtatatccatgattggtggaatctaatggattttgccatgaacagcctgtatctggctaccatctctctaaagatagtcgcctatgttaagtacaatgggtcacgaccgcgtgaagagtgggaaatgtggcacccaactttaatcgccgaagccctcttcgctatttccaatatcttgtcctccctgagactgataagcctcttcaccgccaacagccacttaggacctctgcagatttcactcggaaggatgcttcttgatatcctcaaattcctgtttatatactgcttagtcctgctcgccttcgctaatggtctgaatcagctctatttttactatgaaacacgggctattgacgaaccaaataattgcaaaggcattcggtgtgagaaacagaacaatgctttttccacgctgttcgaaacactgcaaagcctgttttggagtgtgtttggattgctgaacttatacgtcaccaatgtaaaggcacggcacgaattcacagagttcgtcggtgcaaccatgtttggtacatataatgtgatctccttggtcgtgctcctcaatatgctcattgcgatgatgaataacagctaccagcttattgcggatcacgccgacatagaatggaaattcgcacgcactaaactctggatgtcctacttcgacgagggcggaaccctgccacctcctttcaatatcattccttcccccaagagctttctatacctgggcaattggttcaacaataccttttgcccaaagagggatccggacggcagacgtcgaaggagaaacctgagaagcttcaccgagagaaatgctgattcattgattcagaatcaacattaccaggaagtgatacgcaatttggtaaaaaggtatgttgctgctatgattagaaactccaaaactcatgaggggttgaccgaagagaactttaaggaactgaaacaggatattagctctttcaggtacgaagtgctggatcttctggggaatcggaagcatccccgatcgttttctacctcttctaccgagttgtcacaaagagatgataataatgatggatccgggggagcccgagcaaagagcaagtcggtgtccttcaaccttggatgtaagaagaaaacctgtcacgggccaccccttatccggacaatgcccaggtctagtggggcacaagggaagagcaaggccgaaagcagctcaaaacgctcctttatgggcccatctcttaaaaaactgggactcctcttcagcaagttcaacggccacatgtctgaaccaagctccgaacccatgtataccatttctgacggtatagtacaacagcactgtatgtggcaagatattaggtactcgcagatggaaaagggcaaggccgaagcttgcagccagtcagagattaacctgtccgaagtagaactgggggaggtccaaggagctgcccagtctagcgagtgccctttggcttgttcatcatctctgcactgtgccagctccatctgctcctccaacagcaagctgctcgactctagcgaagacgtcttcgagacatggggcgaggcctgcgacttgttgatgcacaagtggggagacggtcaggaagaacaagttactaccagactatag

SEQ ID NO: 244596 - DNA, 2796 bp, synthetic construct
  misc_feature 1..2796: note = Description of Artificial Sequence: Synthetic coding sequence
  source 1..2796: mol_type = other DNA
atgtctcaatcacccgcttttggccctcgaagagggagttctcccaggggggcagcaggcgctgcagccaggaggaatgagagtcaggattatctgctgatggattcagaactcggagaggatggctgtcctcaggcgcctctgccctgttacggatattacccatgtttcaggggaagcgacaacaggctcgcccataggagacagactgttctgcgcgaaaagggtagacgtcttgccaatcggggtccagcttatatgttttctgatcggagtacctctctgagcattgaggaagagagattcctcgatgccgcagagtacggtaacatacctgttgtccgaaagatgttggaggagtgtcactcccttaacgtcaactgtgtggattatatgggtcaaaacgccttacagctagcagttgccaacgagcatctcgaaattaccgaattgctcctgaagaaggagaacttaagccgtgtcggcgacgctttactgctggcaatcagtaagggatacgtacgcatcgtggaggccatcttaagccaccccgcatttgccgaggggaagagactggccaccagcccttctcagagtgagctgcagcaggatgatttttatgcctacgacgaagatgggactcggttttcacacgacgtgaccccaattatcttagctgctcattgtcaagagtatgagatcgtccacacactgctgcggaagggtgccaggatagagcgccctcacgactatttttgcaaatgcaatgattgcaatcaaaagcagaaacacgacagcttctcgcacagtaggtctagaatcaatgcttacaaaggcctggcttcccccgcttacctatctctgtcgtcggaagatcctgtaatgacggctctggagctttctaacgagctggcagtcttggccaacattgaaaaggaattcaagaacgattataaaaagttgagcatgcagtgtaaggattttgtggttggtcttttggatctgtgtaggaacacagaggaggttgaagctattttgaacggtgacgtggaaacgctacagtcgggcgatcacggtcgacccaatctatctagattgaagctagccatcaaatatgaagttaaaaaatttgtcgcacatcctaactgccagcagcagttactgtccatctggtacgagaacttgtccggcctgagacagcagaccatggccgtcaaattcctggtggtgctggccgtggccataggtctgccttttcttgccttgatttactggttcgccccatgtagcaagatgggaaagatcatgcgcggtccctttatgaagtttgttgcccacgccgcttcatttaccatctttctgggtctgctcgtgatgaatgccgcagacagatttgaaggaaccaagctactccctaatgaaacctcaaccgataacgccaagcagttgttccgcatgaaaacaagttgtttctcatggatggaaatgctgatcatttcttgggtgatcggcatgatttgggccgagtgtaaggagatttggactcagggccctaaagaatacctgttcgagctatggaatatgttggatttcggaatgttggcaatttttgctgcctcattcatagccaggtttatggccttctggcatgcaagcaaggcacagtccattattgacgccaacgacacgcttaaggaccttaccaaggtgactctaggcgacaacgtgaagtattataacctagctcgcattaagtgggatcctagtgacccccagatcattagtgaaggactttacgctatcgccgtcgtcctgagcttctccagaatagcctatattcttcccgcaaatgaatcatttgggccactgcagatctctctcgggcgaaccgtaaaagacatcttcaaatttatggtcatatttattatggttttcgttgccttcatgatcggcatgttcaatttgtatagctattacattggcgctaaacagaatgaagcattcaccaccgtggaagagtccttcaagacactgttttgggccatttttggtctctccgaagtcaagtccgtcgtgattaattataaccataagttcatcgagaacattggttacgtgctgtacggtgtatacaacgttacaatggttatcgtgcttctgaatatgctcatcgccatgataaattccagctttcaggagatagaggacgatgctgacgtggagtggaaattcgctcgagccaagctctggttctcttatttcgaggaaggtcgaacattgcccgtacccttcaacttagtcccttctcctaaatcgttgttttacctgctgcttaagctgaaaaaatggatctccgaattgtttcagggccataaaaagggtttccaagaggacgccgagatgaacaaaattaacgaggagaagaagcttggcattcttggtagccatgaagacttgagcaagctcagcctggacaaaaaacaggtgggacacaacaaacagccctctatccgctcctccgaggattttcatctcaattctttcaataatcctcctcgccagtaccaaaaaattatgaagcgcctgatcaagaggtatgttcttcaagcacagatcgataaggagagcgacgaggtaaatgaaggggagctgaaggaaataaaacaggacattagttcactgcgttacgagctgctcgaagagaagtcccagaatacagaagatcttgctgaattgatccgcgagctgggggagaaactcagcatggaaccaaatcaggaggaaaccaatcggtag

SEQ ID NO: 244597 - DNA, 2448 bp, synthetic construct
  misc_feature 1..2448: note = Description of Artificial Sequence: Synthetic coding sequence
  source 1..2448: mol_type = other DNA
atgtcacagagtccagccttcggtccaaggcgcggatccagtcctaggggagccgctggcgcagccgctagaaggaacgagagtcaggattacctgctgatggattcagaacttggcgaggatggatgcccacaggcacccctgccatgctacggctattacccctgcttcagagggagtgataaccgcttagctcaccgccgacaaactgttctccgcgagaagggcaggaggttagccaatcggggacctgcatatatgtttagtgatcggtcaacatccctgtctattgaagaagagcgattccttgacgccgcagaatacggcaatatcccggtggtacgcaagatgctggaagaatgtcactctttgaatgtgaactgcgttgactatatgggccaaaatgccctccaattggcagtggcaaacgaacatctggagattacggagttgcttcttaagaaggagaacctatctagagtgggagacgctctgctgctcgcgatttcaaaagggtatgttcggatagtggaggccatcctatcccaccccgcatttgctgagggtaagcgactcgccactagcccttcacagtcagagcttcagcaggacgacttctacgcatacgacgaagatggaacaagattctcccatgacgtgactcccatcatactggcagcccactgtcaggagtatgagattgtgcacacactgcttcgcaagggggcaaggatcgaacgcccacacgattacttttgcaaatgcaatgactgcaatcaaaagcagaagcatgattctttcagtcatagtcggagcaggattaacgcttataaaggcttggcgagtccggcttacttatcactttcatctgaggatccagtgatgacggccctggagctaagcaatgagctggccgtgttggctaacatcgaaaaagaatttaagatgggcaaaatcatgaggggaccttttatgaagttcgtggcccacgccgctagtttcaccatctttctgggcttgctggttatgaatgcagccgatagatttgagggaacaaagctcctaccaaatgagacctccactgataatgcaaagcaattatttaggatgaagacctcttgttttagttggatggagatgcttatcatctcatgggttattggcatgatttgggctgaatgtaaggagatctggacacagggcccaaaagagtacttatttgagttgtggaacatgctggactttgggatgctggcaatatttgccgcttcttttatcgcacgcttcatggcgttctggcacgccagtaaagcgcagtctattattgatgccaatgacacactcaaagatctcaccaaagtcactctgggggataatgtcaagtattataatttggcgaggatcaagtgggatccctccgacccacagatcattagtgagggcctttatgctattgcggtcgtgctgagctttagtagaatcgcgtacattcttccagctaacgaaagcttcggacctttgcaaatctccttaggacgcactgtgaaggatattttcaagttcatggtgatctttatcatggtgttcgtcgctttcatgatagggatgttcaatctatactcctactacatcggcgcaaagcaaaatgaggccttcacaactgtggaagagtcttttaaaacactgttttgggccatcttcggtctgtccgaggtgaagtccgtcgttatcaactataaccataaattcattgaaaacattggctatgtcctgtacggggtgtataacgtcacgatggtgatcgtgctcttgaacatgctgattgctatgatcaactcttccttccaggaaattgaagatgacgctgatgtggaatggaagttcgcaagggcgaagctgtggttcagctatttcgaggaaggaagaactctgccagttcctttcaatttggtccctagcccaaaatccctgttttatctgctgctgaaactcaagaaatggatctcggagctttttcagggtcataagaagggattccaggaagatgccgagatgaacaagattaatgaggaaaaaaagctgggcatcttggggtctcacgaggatctttcgaagttgtcactcgacaagaagcaagtcggccacaataaacagccttccattagaagctcggaggattttcatctgaactcctttaacaaccccccaagacagtaccagaaaattatgaagagattgataaagaggtatgtgctgcaggcccagatcgacaaagagtctgacgaggtgaatgagggcgaactcaaagaaataaaacaagatatttcatccctgaggtatgagctcttggaagagaagtctcaaaacactgaagatctggcggaactgattagagaactgggtgaaaagttgtcaatggagccgaaccaggaggaaaccaaccggtag

SEQ ID NO: 244598 - DNA, 2631 bp, synthetic construct
  misc_feature 1..2631: note = Description of Artificial Sequence: Synthetic coding sequence
  source 1..2631: mol_type = other DNA
atgagtcaaagtcccgcttttgggccaagaaggggatcttctcctaggggggcagctggtgctgccgctcgacgcaacgaatctcaggactatctgctgatggactctgagctgggagaagacggctgtcctcaggcacctcttccgtgttacggttactatccttgctttcggggaagtgacaatcggctggcacataggcggcagaccgtgctccgagaaaaggggcgtcgacttgccaaccgaggcccagcttacatgttctcagatcggagtacttctttatccatagaggaggaaaggttcttggacgccgcagagtacggcaatattcccgttgttagaaagatgctcgaagaatgtcactcgctgaacgtgaactgcgtagactacatgggccaaaacgcactgcagctggctgtggctaatgaacacctggagataacagagctccttctaaaaaaggaaaatctctctcgggttggagacgccctactgctggcaatatctaaaggttatgtgagaattgtggaggcgattctttctcaccctgcatttgcggagggcaagcgacttgctacatctcccagccagtcagagctccagcaagacgatttttacgcatatgatgaagacggaacccgttttagtcacgatgtgactccaattattctcgctgcccactgccaggagtacgagatcgttcatactctgctccgaaaaggtgcaagaatcgaacgccctcacgactacttctgcaagtgcaacgactgcaaccaaaaacagaagcacgacagttttagccactctcggagccggatcaacgcctataagggactcgcaagtcctgcatatttatcgctctctagcgaagaccccgttatgactgcccttgagctgagtaatgaattggcagtcttagctaacatagaaaaagaattcaagaacgattataagaaactttcgatgcagtgcaaggatttcgtggtaggactcctggacctatgtcgcaacaccgaagaagttgaggctatcttgaacggagatgtcgagactctgcaaagcggcgatcacggcagaccaaatctctccagactcaagctggctatcaaatacgaagtcaaaaagatgggcaaaattatgaggggtccttttatgaagttcgtcgcacacgcagctagctttactatatttctcgggttactggtgatgaatgccgctgatcggttcgaaggaaccaaactcttgccaaatgagacctcaacagataatgcaaaacagctcttccgcatgaaaacctcttgcttttcttggatggagatgctgatcatatcttgggtcatcggcatgatatgggccgaatgcaaagagatctggactcagggaccaaaggagtacctgtttgagctttggaatatgctcgatttcgggatgctggctatttttgccgctagctttatagccagattcatggctttctggcatgcttccaaggcacagagcatcatagatgctaatgacacattaaaagaccttactaaggtaactctgggcgacaatgtgaagtactacaacctggccaggataaaatgggacccctccgatccgcagataatttccgaaggtttgtatgctatagcagtagtcctcagcttcagtagaatcgcctacatcctgcccgctaacgaaagtttcgggcctcttcagattagcctgggtagaactgtcaaagacatcttcaagttcatggtgatatttattatggtcttcgtggcttttatgattggaatgtttaacctttactcatactatatcggcgcaaaacagaacgaagctttcactaccgttgaggagtcctttaaaacactcttctgggcgatctttggcttgtccgaagttaagtccgtggtcatcaactataatcataaatttatcgagaacataggatatgtactgtatggcgtctataacgttacgatggtcatagtcttacttaacatgctgatcgccatgattaactcaagctttcaagagattgaagatgatgccgatgtggagtggaaattcgcgcgtgcaaagctctggttttcttacttcgaggaaggccgaactcttccagtccctttcaatctcgtgccatctccaaaatctctgttctaccttcttctaaagctcaagaagtggatcagcgaactgttccagggacacaaaaaaggattccaagaggacgcagaaatgaacaagattaacgaggagaagaagttgggcattctgggtagccacgaggatctgtccaagttgagtttagataagaaacaggtgggccataacaaacagccttctatccgctccagcgaagatttccatctcaattcattcaataacccaccacgccagtaccaaaagatcatgaagagactaataaaaaggtacgttctgcaagctcagatagacaaggaatcagatgaagtaaatgaaggagagctgaaggagatcaagcaggatatttcttctttgcggtacgagcttctggaggagaaatcccaaaacaccgaggatttagccgaactgattcgggaactcggcgagaaactgtcaatggaacctaaccaagaggaaaccaacaggtag

SEQ ID NO: 244599 - DNA, 2406 bp, synthetic construct
  misc_feature 1..2406: note = Description of Artificial Sequence: Synthetic coding sequence
  source 1..2406: mol_type = other DNA
atgttgcgcaactctacgttcaaaaatatgcagcggaggcacacaaccctacgtgagaaggggaggcgtcaagccatccgcggaccggcatacatgttcaatgagaagggtactagccttacacccgaggaggagaggttcttagactccgcagaatatgggaacattcccgttgtgcgaaagatgctcgaggaaagcaagacattaaactttaattgcgtcgattacatgggccagaatgccctacagcttgcagttggcaatgagcacctcgaggtcacagagctgctgctgaaaaaagaaaacctcgcgcgtgtgggcgatgccttactgctggctattagtaagggctatgtccgcattgttgaagcgatcctgaaccatcctgcattcgcccagggccaaagactcaccctgtctcctctcgaacaggagttgagagatgacgacttctatgcttatgatgaagatgggacaagattctcgcacgacatcacgccgataattctggccgcacactgccaggagtacgagattgtccacattctgttgctgaagggagctaggattgagcgtccccatgattatttctgcaagtgcaacgaatgtacagagaagcagcgaaaagactccttttctcattctcgctctcgcatgaatgcctataaaggactggcaagtgcagcatatctctccttatcaagcgaagatccagttctgactgccctggaactctccaatgagctggctcgcctcgcaaatattgaaactgaatttaaattcgttgcccatcctaactgtcagcagcagctgttaaccatgtggtacgagaacctgtctggacttcgacagcagtccatcgcggtcaagttcctggcagtgttcggggtttctatcggtctgccatttctggctatcgcatattggatcgctccttgttccaaactcgggaggacgctgaggtctcctttcatgaaattcgtggcccacgccgtttctttcacaatttttctcgggctgctcgtagttaacgcttcggacagattcgagggcgttaagacattacccaatgagacctttacagattatccaaagcaaatattcagagtgaaaaccactcagttcagctggacagaaatgctgatcatgaaatgggtgctaggaatgatttggagcgaatgcaaggagatttgggaagagggtcctcgggaatacgtgctccatctgtggaatttgttggactttggaatgctgtccatcttcgtcgcctcattcaccgcaagatttatggctttcctcaaggccactgaagcccagctgtatgtggaccaacatgttcaggacgataccctgcataatgtgagcctgcccccagaggttgcatattttacttatgctcgtgacaaatggtggccctccgacccgcaaattataagcgaaggcctttatgccatcgcagttgtccttagcttctcccggattgcatacattttaccagcgaacgagtcttttgggcctcttcagatctctctaggcagaaccgtgaaggacatctttaaattcatggtgatctttataatggttttcgttgctttcatgatcggcatgttcaacctttatagttactaccggggagccaagtataacccagctttcactactgtggaggagtccttcaagactctgttttggtctatatttggtctcagtgaggtgatctcagtagtccttaagtatgaccataagttcatcgagaatatcgggtacgtgctctacggtgtgtacaacgtgaccatggtggtggtcctgctcaatatgctgatcgcaatgatcaacaattcttaccaggagatagaagaagacgccgacgtggaatggaaattcgctagggccaagctgtggctgtcgtactttgacgaaggcagaaccctgcccgctccatttaatttggtcccgtccccaaagtccttctactatcttattatgcggattaagatgtgtctcatcaagttatgtaagtcaaaggccaagtcgtgcgagaacgacctggagatgggtatgctgaactcaaaatttaagaagacccggtaccaggccggtatgagaaactccgaaaaccttacagccaataatacactatctaagcccacccggtatcagaagataatgaagaggctaatcaagcgctatgtcctgaaggcacaagttgacagagagaacgatgaggtgaacgagggagagctcaaagagatcaagcaggacattagttctctacgctacgagctgctggaagagaaatcgcaggcgacaggcgagcttgcagaccttatccagcagctgtccgaaaaattcggcaagaatctgaataaagatcacttaagagttaacaagggtaaggacatttag

SEQ ID NO: 244600 - DNA, 2241 bp, synthetic construct
  misc_feature 1..2241: note = Description of Artificial Sequence: Synthetic coding sequence
  source 1..2241: mol_type = other DNA
atgctgcgtaactccacctttaagaacatgcagcggagacataccacactgcgagaaaaaggtagaagacaagccatccggggacccgcatacatgttcaacgagaagggtacctcgctcaccccagaggaagaaagattcctcgattctgccgagtatggaaacattccagttgtgaggaagatgttggaggaatccaaaactttaaacttcaactgcgtcgactatatgggccagaatgctctgcaattggccgtcggcaacgaacacctggaggtaactgagctgctcctgaaaaaagaaaatctggcccgagtgggcgacgccctgctgttagccatttccaagggatacgtgagaatcgtagaggccatcctgaatcaccccgcttttgcacagggacaacgcctgacactcagcccactggaacaggagctcagagatgacgatttttatgcatacgacgaagatgggacacggttcagccatgacatcactcccataatcctggctgcccattgtcaagaatacgaaatcgtgcacatacttctgttgaaaggggcaagaatagaacgcccacacgactatttctgcaagtgcaatgagtgcacagagaaacagcggaaggactcattttcacacagtcgttctcgcatgaacgcatataaaggccttgccagcgccgcttacctttctctctcaagcgaggatcccgtactaacagctctcgagctctctaatgagctcgcacggttggccaacattgaaaccgagtttaaattaggtcggactttgcgatcaccatttatgaaattcgtcgctcatgccgtgagttttacaatctttctgggtctgcttgtggtcaatgccagcgaccgattcgaaggcgttaaaaccctccccaatgagaccttcacagattatccgaaacagatctttagggtgaaaaccactcaatttagctggactgagatgctgataatgaagtgggtccttggaatgatctggagtgagtgtaaggaaatttgggaggaaggtcctcgtgaatacgtgttgcacctgtggaacctgctggattttggcatgctcagcatttttgttgcttcctttactgcgaggtttatggccttccttaaggctaccgaggcccagctgtacgtggaccagcacgtgcaggacgacaccctgcataacgtcagtcttccccctgaggttgcatacttcacttatgcacgggacaagtggtggccatctgatcctcaaataatcagcgagggactctacgctattgctgttgttctgagcttctccagaatcgcatacatcctccccgctaatgagtcgttcgggcctctgcagatcagcctgggacgtacggtgaaagacatcttcaaattcatggtgatttttatcatggtatttgtggccttcatgatcggtatgtttaatctgtacagctattataggggtgccaaatataatccggcattcactacagtagaagaaagctttaaaacactgttttggagcatattcgggttaagcgaggttatttctgtggttctcaagtacgaccataaattcattgaaaacatagggtatgtactgtacggtgtctacaatgtgaccatggttgtagtcctcttgaacatgctgattgccatgatcaataatagctaccaggagattgaggaagatgccgatgtggagtggaagtttgcacgcgctaaactctggttgtcgtactttgatgaaggccgtacccttccagcgccattcaacctagtccccagccctaaaagtttctactatctgattatgcggataaaaatgtgcctcattaagctctgcaagagtaaagcaaaatcttgtgaaaatgatttggaaatgggcatgctgaattccaagtttaagaagacaaggtaccaagctggcatgaggaatagtgagaacttaacggcgaacaatacactttccaagcccaccaggtatcagaaaatcatgaagaggcttataaagcggtacgtgctgaaagcacaggtggaccgagagaacgacgaggtgaatgaaggcgagcttaaggagataaagcaagacatctcctctctaagatatgagctgctcgaagaaaagtcccaggccaccggcgagttagcagatcttattcagcagttgagtgagaagtttgggaagaatctaaacaaggaccatcttcgggttaacaagggaaaggacatctag

SEQ ID NO: 244601 - DNA, 2589 bp, synthetic construct
  misc_feature 1..2589: note = Description of Artificial Sequence: Synthetic coding sequence
  source 1..2589: mol_type = other DNA
atgttaagaaattcaacctttaaaaacatgcaaagacggcataccactctgcgcgagaaaggaagacggcaggcgataagaggcccagcctatatgtttaacgaaaaaggtacgtcactgacgccagaggaagagcgttttctcgatagcgcagagtacggcaatatccccgtcgtcaggaaaatgctggaagagtcaaagactttgaacttcaactgtgtagactatatgggccagaacgcactgcagctcgccgtgggtaacgaacacctggaggtcaccgaactactgctgaagaaggagaatttggcacgtgtcggagacgctctgctcctggccatctcaaaaggctatgtcaggatagtcgaggcgatcttgaatcatccagcgttcgctcagggacagaggctgacgcttagtccattggagcaagaactgcgcgatgacgatttctacgcctatgacgaggacgggacccggttttcacacgacattacacccatcattctggccgctcactgccaggagtacgagatcgttcacatcttgctcctgaagggtgcaaggattgagcgcccacatgattacttctgtaaatgtaacgagtgcaccgagaagcaaagaaaggactcctttagccattcacgatctaggatgaatgcctataagggattagcttctgctgcctatctgtcgctgtcatctgaggaccccgtacttaccgccctcgagttaagtaacgagctggccaggctcgctaatatagagactgaattcaaaaacgactaccgtaaactgtccatgcaatgcaaagatttcgttgtgggagtgctagatctttgtcgagacacggaagaagtcgaggctattttaaacggcgacgtgaactttcaagtctggagtgaccatcatcgtcctagcctgagtcgaatcaaactggcaatcaagtacgaggtcaagaagtttgtggctcatccaaactgtcagcagcagctgctcactatgtggtatgagaacctctcaggcctgcgccagcagtctatcgccgtgaagttccttgccgttttcggagtttcaatcggcctgcctttcctggcgattgcttattggatcgcgccatgcagcaagctcggtcgcaccctgcgaagcccgttcatgaaatttgttgcgcatgcggtttcttttactatttttctgggcttactggtcgtgaacgcatctgacagatttgaaggcgttaagactctgccaaacgagacattcactgattaccccaagcagatctttagagtcaagacgactcagttttcctggaccgagatgctcattatgaaatgggtcctgggaatgatttggtcagagtgtaaggaaatatgggaggaaggtcctcgggaatatgtgctgcacttgtggaacctgctggactttggaatgctgtctatctttgtagctagtttcaccgcaagattcatggcattcctcaaggcaactgaggcacagctatatgtggatcaacatgtacaagatgacacactacacaatgtgtcacttccccctgaagtagcatatttcacatacgccagggacaaatggtggcccagtgacccacagatcattagcgagggcttgtatgctatagcagtcgttctcagctttagtcggatcgcatatatcttgccagctaacgagagctttgggccacttcaaatttctctgggcagaaccgtaaaggatatattcaaattcatggtgatttttattatggtctttgtggcttttatgatcggtatgttcaacctgtattcatactataggggcgcaaaatataacccagcattcacaacagtggaagagtccttcaagacccttttctggagtatctttggattgagcgaagtaattagcgtggtgctaaagtacgaccataagttcattgaaaatatcgggtatgtcctctacggtgtgtataacgtaaccatggtggtagtgctacttaatatgctgattgccatgatcaataattcttaccaggaaatcgaagaagacgccgatgtggaatggaaattcgctcgcgcaaagctttggttaagttactttgacgagggcaggacgttgcctgccccttttaacctggtgccttcaccaaagagcttctactacttaatcatgcgcatcaaaatgtgccttatcaaactgtgcaagtcaaaggcgaaaagctgtgagaacgacctcgagatgggcatgttaaactccaagtttaagaaaacccggtatcaggccggaatgcgaaactctgagaatttgactgccaataataccctcagcaaaccaacaaggtatcagaaaatcatgaaaagattgattaagcggtatgtcctgaaagcccaagtggaccgggaaaatgatgaagtgaacgaaggagagctgaaagagatcaaacaggatatttctagcctgaggtatgagctgctcgaagagaagagtcaggcaacaggcgaactggcagatcttatccagcagttgagtgaaaaattcggaaagaatctgaataaagaccacctcagggttaataagggaaaggacatctag

SEQ ID NO: 244602 - DNA, 4350 bp, synthetic construct
  misc_feature 1..4350: note = Description of Artificial Sequence: Synthetic coding sequence
  source 1..4350: mol_type = other DNA
atggagccctccgctctgaggaaagctgggagtgaacaggaggaaggctttgaaggcctcccacgacgcgttaccgatttaggaatggtttccaatcttcggagatcgaattcctccctgtttaaaagctggagactgcaatgtccttttggcaataacgacaagcaggaatccctctcctcttggattcctgaaaacatcaagaaaaaggagtgcgtctattttgtggagagctcgaagctttctgatgctggtaaggtcgtctgtcagtgtggttacacacatgagcagcatttggaagaagcaaccaagccccacacttttcaaggaacccaatgggatccaaagaaacacgtgcaggaaatgcccaccgacgctttcggagacatcgtttttacaggactgtcacagaaagtaaagaaatacgtaagagtgagtcaggacactccatctagcgtcatctaccacctgatgactcagcactggggcctggatgtgccaaacttactcatatcagtcacaggcggtgccaagaactttaacatgaagcccagactcaaatcaatatttagaagagggttggtgaaggtagctcaaaccaccggtgcttggattataacaggagggtcacatacaggggttatgaaacaggtcggggaggcagttagggactttagccttagtagtagctacaaagagggagagctgattaccataggtgtcgccacgtggggcaccgtccaccgaagagaagggctcattcacccaaccggatctttccctgcggaatacatattggatgaggacggccaggggaatctaacatgcttagattctaatcactctcattttatcctcgtggatgatgggactcacgggcagtacggagtggagattccactgcgaacaagactagaaaagttcatctctgagcagaccaaagaaaggggcggtgtcgccattaagatccctatcgtatgcgtggtactggagggaggtcccggaacacttcatacgattgacaacgcaaccactaacggaacaccatgcgttgtcgtggaagggtctggtagagtggctgacgtcatcgcccaggtggccaatctacccgtgtccgatattaccatcagtctgatacagcaaaagctctccgtcttctttcaggagatgtttgagacgttcaccgagagccggatcgtcgaatggactaagaagattcaggacatcgtgcggaggaggcagctactcactgttttccgggaggggaaggatggccagcaagatgtcgacgtcgccattctccaagccctgctaaaggcatctcggtcccaggatcattttggccacgaaaattgggaccaccagctgaagcttgccgtagcttggaaccgggtggacatcgccaggagcgagatttttatggacgagtggcagtggaagccgtcagatctccaccctaccatgaccgccgctctcatctccaataaacctgaatttgtgaaattattcttggagaacggggtgcagctgaaggaatttgtaacttgggataccctactttacctttatgaaaatctggatcctagctgcctgttccacagtaagctgcagatgcatcatgtggcccaggtgctgcgggagctgcttggggatttcactcagcctctgtacccaagacctaggcacaatgacaggctgcgcctgctgctgccagtgccacatgttaaactgaatgtacaaggcgtgtcacttaggtctctgtacaagagaagctctggacatgtaacctttacaatggatccgatccgcgatctgcttatctgggccatcgtccaaaatcgtcgcgaattggctggaatcatttgggcccagagtcaggattgcatcgcggctgctctggcgtgcagcaagattttaaaagagctaagcaaagaggaagaggacaccgactcatcagaggagatgttagcactcgcggaggaatacgagcaccgcgcaataggagtgtttacggagtgttaccgcaaagacgaggaaagagctcaaaagcttcttacccgtgtctcagaagcttggggaaaaacaacctgtctccagttagccttagaggctaaggacatgaagttcgtttctcatggcggtatccaggcctttttgaccaaggtctggtggggccagttgagcgtggacaatggtctgtggcgcgtcacactctgcatgttggcatttcctctgctgctgactggactgatctcctttagagaaaagagacttcaagacgtcggcactccagcagcgagggccagagctttcttcacggcaccggtggtggtgtttcatctgaacatcctctcatacttcgcgttcctgtgtctttttgcgtacgtgctgatggttgactttcagcctgtgccatcatggtgcgagtgtgcaatatatctgtggctgttctctctcgtatgcgaggagatgaggcagctgttttatgacccagacgagtgtggtctcatgaagaaggctgccctctatttctccgacttctggaataagcttgatgtcggggctattctactgttcgtggccggactgacgtgccggctgattcccgctaccctgtaccccggacgcgtgattctgagcctggattttatacttttctgtctgaggttaatgcacatcttcaccattagcaagacgcttggtcccaagatcatcatagtgaagcgaatgatgaaagatgtgtttttcttcttattcttgcttgccgtgtgggtagtgtcattcggagtggcaaaacaggcgatactcattcacaacgaacggagagtggactggctgtttagaggggcagtgtatcacagctaccttactatcttcggccagatccccggatatattgacggagtgaatttcaatcccgagcattgctccccgaatggcactgacccctataagccgaagtgtccggaatctgatgccacccaacagcgccctgctttcccggagtggcttactgtgctgttactgtgtctgtacctgttattcacaaacattctactgcttaatctcctgatagcaatgttcaactacactttccaacaggttcaggagcatactgatcagatttggaaatttcaacgccacgacctgatcgaagagtatcatggcagaccagccgctccgccacctttcatcctcctgtcacatttgcagctttttatcaagagagtagtccttaagacccccgcaaagcggcacaaacagctgaagaacaaactggaaaaaaatgaggaggctgcccttctcagctgggagatttaccttaaggagaattatctgcagaaccggcagttccaacagaagcaacgcccagagcagaaaatcgaggatattagcaacaaggtggacgccatggtggacttactagacctggatcctctgaaaaggtcaggctctatggagcagcgcctcgcttccttggaggagcaggtagcacagaccgcccaggcacttcactggattgtcagaacactccgagcatctggattttccagtgaggcagacgtacccaccttagcctcacagaaagctgccgaggagccagatgccgagcccggaggaagaaagaagacagaggagcccggtgactcctatcatgtaaatgcgagacatctcctatatcccaattgtcccgttacacggtttccggttccaaatgagaaagtcccttgggaaacagaatttctcatctacgatccccctttttacacagctgagcgcaaagacgctgcagccatggatcccatgggagaaaaccctatgggtcggactggactgagagggcgtgggagtctatcttgctttggccctaaccacacactatacccgatggtcacccggtggcgcagaaatgaggacggagcaatctgcaggaagtcaattaaaaagatgcttgaggtgttagtagtgaagctacctctgagtgagcactgggcactcccgggtgggtccagagaaccaggtgagatgctcccccgaaaactgaagagaatcctgcggcaagagcactggccgagtttcgaaaatcttttaaaatgtgggatggaggtgtataaggggtacatggatgacccacgcaacacggataacgcttggatcgaaacggttgcagtctctgtccactttcaggaccaaaacgatgtggaactgaatcgtctgaactccaatctgcacgcttgtgactccggggctagcatccgctggcaggtggtcgatcgcagaatacctctttatgccaaccataaaactctcctgcaaaaagccgctgccgaatttggtgcccactactag

SEQ ID NO: 244603 - DNA, 4512 bp, synthetic construct
  misc_feature 1..4512: note = Description of Artificial Sequence: Synthetic coding sequence
  source 1..4512: mol_type = other DNA
atggaacctagcgcactccgtaaagctggatccgagcaagaggaagggttcgagggattacctcgcagggtcacagaccttgggatggtgtctaacctgcgccgttccaattccagtctcttcaagtcttggcggctccagtgcccttttggcaacaatgacaagcaagagagtttgtccagctggattccagagaatatcaaaaaaaaagagtgcgtatactttgtcgaaagttctaaactgagtgatgccggaaaggtggtgtgccagtgtggttacacccacgagcagcatctggaggaggctaccaagccccacacatttcagggtactcagtgggatcccaagaagcacgtgcaggaaatgcccaccgacgcctttggggatatcgtgttcaccggcctttcacagaaggttaaaaaatatgtcagggtgtcacaggacacaccttccagcgtgatctatcatctgatgacgcagcattggggtcttgatgtccctaacttgctcattagcgtgactggtggtgcaaaaaattttaatatgaaacccagactcaaaagtatttttaggagggggctggttaaggtagcacagactacgggagcttggattatcaccggcggtagtcatacaggcgtcatgaagcaggtcggcgaggcggtgagagacttttcactgtctagttcttacaaggagggcgaactgataacaattggcgtggccacttggggaacagtgcatcgccgagagggtctgatccacccgaccggcagctttcccgctgaatatatactggacgaggacggacagggaaacctgacctgcctggacagtaaccattcccactttattctagtggacgacggaacacatggccagtacggtgttgagattcccttgaggactaggctggagaaatttatatcagagcagactaaggagcgaggcggagtggctattaagattcctattgtgtgtgtagtgttagagggcggtccaggtaccctgcataccattgacaacgcgacaaccaacggaacaccctgcgtggtggtggaaggcagcggccgagtggctgatgttattgcgcaggttgctaatttgccggtgtctgatatcacaatcagccttatccaacagaaactgagtgtgttttttcaggagatgttcgaaacttttactgaatctaggattgtggagtggacaaagaagattcaggatatcgtacggagaaggcagctgctcacggtctttcgcgagggcaaggatggacagcaggatgttgatgtggcaattttgcaggccctgctgaaagcctcacggtcacaggatcacttcggccacgaaaactgggaccaccagctcaaactggccgtggcttggaacagagtggatatcgcacgcagtgaaatcttcatggacgaatggcagtggaagccatcggatttgcatccaacaatgacggccgctttaatcagcaacaagcccgagtttgtcaaactctttctcgaaaatggcgtgcaactgaaagagttcgttacgtgggacacattgctttatctgtacgaaaacctggacccgtcttgccttttccacagcaaattgcagaaggtgctcgttgaggaccccgaacggcctgcatgcgctcctgcggcaccgagattgcagatgcaccacgtcgctcaggtccttcgagagctcctgggcgacttcacacaaccactctatccacgacctcgccacaatgatagactgaggttactcctgcctgtcccgcatgtgaagctaaatgtgcaaggtgtatcgctgcggtccctgtacaagagaagcagcgggcatgttactttcacaatggatcctatccgggacctgctgatatgggccatcgtccagaaccggcgagagcttgcaggaatcatctgggctcagtcccaggattgcatcgctgccgcactagcctgctctaaaatactgaaagagctgtctaaagaagaggaagatacagactcctccgaagagatgttagcccttgctgaagagtacgaacatagggctatcggcgtgttcacagagtgttacagaaaagacgaggagagagcccagaaactgctcacccgggtatctgaggcgtggggcaaaactacttgtttgcagcttgccttggaggcaaaggacatgaagtttgttagtcatgggggaatccaggcatttcttacaaaggtctggtggggacagctgtctgtggacaacggcctttggagggtcacattatgtatgttagcctttcccctgctactgacggggttaattagctttagagagaagcgtctgcaggatgtaggcacccctgcagccagggcaagagcatttttcacagcccctgttgttgtgttccatctcaacatccttagctactttgcctttctctgtctcttcgcatacgtcctcatggttgatttccaaccagttccaagttggtgtgaatgtgcgatctacctgtggctgttttctttagtctgtgaagagatgcgccagctcttttacgatcccgatgagtgcgggctaatgaaaaaggcagcactctacttcagtgatttctggaataaattagatgttggcgcaatccttctgtttgtcgcgggtctgacctgcagattaatccctgccaccttgtacccaggccgtgtcatccttagcttagattttatcctcttctgcttgcgccttatgcacattttcacgatctcaaaaaccctgggacctaaaattataattgttaagagaatgatgaaggacgtgttttttttcctcttcctgctcgcggtctgggtggtcagcttcggtgtcgcaaaacaggcgatcctcatccacaatgagcggagggtcgactggctcttcaggggagcagtgtatcatagctacttgactattttcggacagattcctggatatattgatggtgtgaacttcaaccccgagcattgttcacctaacggtacggacccctataaaccgaaatgcccagaatctgatgccacacagcagcggccagccttccctgagtggctcaccgtgctccttctgtgtctctacctgctgtttaccaacatcctgctattaaacctgcttatagccatgtttaactacacttttcaacaggtgcaggaacatactgaccagatctggaaattccaaagacatgacctgattgaagaatatcacggcaggccagcagctcctccgccttttatcctcttgagtcatttgcagctttttattaagcgcgtcgtgttaaaaactccggcaaaacgccacaagcagctgaagaataagttagagaagaacgaagaggcggctttactctcttgggaaatctacctgaaggagaactacttacaaaacagacagttccagcagaaacaaagaccagagcagaagatcgaagatatatcaaataaagtggacgcaatggtcgatctcctggacttggatcctctgaagcgctctggatccatggagcagcgcttggcatcactagaggagcaagtggcccagacagcgcaggctctgcattggatcgtacgcaccttgcgcgcaagcggattcagctcggaagccgatgtgccaacgctcgcctcccagaaagccgctgaagagcccgacgccgagcccggtggcagaaagaaaaccgaagagccaggcgactcgtaccatgtgaacgctagacacctgttataccccaattgccccgttacccgcttcccagtccctaacgaaaaagtcccttgggagaccgagttcctgatttatgaccctcccttctatactgccgaaagaaaagacgctgccgctatggatcctatgggggacacattggaacccctgagcaccatacagtataatgtggttgacgggctccgggaccggagatcgttccatggcccttacacagtgcaagctggactgcccctaaatcccatgggaagaaccgggctgagggggcgtggtagcctaagctgcttcggccctaatcatacactctatcccatggtgacacgctggaggaggaatgaggacggagcaatctgcagaaagtctatcaaaaaaatgctcgaagtcctcgtcgtgaagctacccctttcggaacactgggccctgccgggaggatcacgggaaccaggcgaaatgctgcctagaaaactgaagaggatcctgcgtcaggagcactggccgagtttcgagaatctgctcaaatgcgggatggaggtctataagggctacatggacgaccccaggaacactgataatgcttggattgagacagtggccgtgtccgtgcacttccaggatcagaacgatgttgagctgaatagactgaattcaaatctacacgcttgcgacagcggcgcttctatcaggtggcaagttgttgatcgcagaattccattgtatgcaaatcacaagactcttctccaaaaagccgcagccgagttcggcgctcactactag

SEQ ID NO: 244604 - DNA, 4512 bp, synthetic construct
  misc_feature 1..4512: note = Description of Artificial Sequence: Synthetic coding sequence
  source 1..4512: mol_type = other DNA
atggagccctctgccctgcgaaaagccggaagcgagcaggaggaaggcttcgaagggttgccgcgacgggtgacagacctcggcatggtgtccaatctccgtcgttcaaattcatccctctttaaatcatggagactccagtgtccattcgggaataacgataagcaagaatccttatcctcgtggatcccggagaacataaaaaaaaaagaatgcgtgtattttgtggagagcagcaaactgtctgacgcaggaaaggtcgtatgccagtgtggctacactcatgagcagcacttggaggaagctactaaaccccatacgttccaaggcacccagtgggaccccaagaagcacgtgcaagaaatgcctacggatgcctttggtgacattgtgtttaccggactgagccagaaggtcaagaagtacgtccgtgtgtctcaggacaccccgtcctcagtcatctaccacctgatgacacagcattggggcctcgatgtcccgaacttactcatcagcgtgacaggtggtgcaaaaaatttcaatatgaagccgagactaaaaagcatcttccggcgtgggttggtcaaagttgcccagaccaccggcgcatggattattacaggcggtagccacactggcgttatgaagcaggtaggcgaggccgtgcgtgactttagcctgagctcgtcctataaggagggcgaactgattactataggggtagccacttgggggaccgttcatcggagggagggcctgattcatcctacaggtagtttccctgcggaatatatactggatgaagatggccagggaaatcttacctgcctggactcaaaccactcacacttcattttagtggatgacggtactcacggccagtacggtgtcgagatccccttacgcacacgcttggaaaaatttatctccgaacaaacaaaggagcgcggtggtgtcgccatcaagattcccatagtttgtgtggtcttggagggcggtcccggaacactgcatacaattgataatgccaccacaaatggcacaccttgtgttgttgtcgagggcagcggccgagtggccgatgtgatagcacaagttgctaatctacccgtgtccgatataacgattagcttaatacagcagaagctctccgtgttctttcaggagatgttcgagaccttcactgaaagtaggattgttgagtggacaaaaaagatccaggacattgtgaggagacgccagttactaacagttttccgcgagggtaaggacggtcaacaggatgtggatgtggccattctgcaggcgctcttgaaggccagccgtagccaggatcattttggccatgagaattgggatcatcagctgaaactcgccgtcgcctggaatagggtggacattgccaggagtgagatttttatggacgagtggcagtggaaaccctccgacctgcacccgacgatgacagcagccctcatctcaaacaagcctgagtttgtgaagctgttcctggaaaacggcgtccagttgaaagaattcgtaacatgggatacactcctctatttatacgagaatctcgaccctagctgcctgttccattcaaagttacagaaggtgctcgtcgaggaccctgaacggccagcctgcgcacctgccgcacctagattacagatgcaccatgtggcgcaagtactcagggagctgttgggagatttcacgcagcccctgtaccctcgccctagacataatgatagactgcgccttcttctaccagtgccccacgtgaaacttaatgtacaaggtgtctcactcagatctctctataaaagaagctctggtcacgtgacctttaccatggatcctattagggacctgcttatttgggcaattgttcaaaatcgcagggaattagccggaattatatgggctcagtcacaagattgtattgcggctgcactggcctgttctaaaattctgaaggagctgagcaaagaagaggaggacaccgattctagcgaggagatgctcgcacttgccgaagagtatgagcaccgggctatcggggtgttcacagaatgttacagaaaggatgaagagagggcgcagaagctcctgaccagggtgtcggaggcttgggggaagactacctgcctgcagctggccctggaggcaaaagacatgaaattcgtctcccacgggggtatccaggcttttctgacaaaagtgtggtggggacagctgagcgtggacaatggactgtggcgtgtcaccctatgtatgctggcgtttccactgcttcttactgggctgatttccttcagggaaaaaaggcttcaggacgtaggtactcccgcagccagggcgcgagccttttttacagccccagttgttgttttccatcttaacatcctttcatacttcgcatttctttgcctgttcgcctacgtgttaatggtggattttcagccagttccctcctggtgcgagtgcgccatctacctgtggctgttcagtttggtgtgcgaggaaatgcgacagctgttctatgaccccgacgagtgcggcctgatgaagaaagctgcgctctacttctccgacttttggaacaaacttgacgtgggagcaatccttctcttcgtcgctggtctgacttgtcgactaatacctgctaccctatacccaggcagagtgattctgtcattagattttatcctattttgccttcgactgatgcatatttttacaatctccaagactctgggacccaaaatcattatcgttaagagaatgatgaaggacgtgttctttttcctgtttctcctggcggtttgggtggtatccttcggggtggctaagcaggctatactgatccacaacgagcggagggtggattggttgttcaggggagcggtttatcactcttacctgacgatttttggacagatccccggatacatcgatggggtcaatttcaatccagagcattgttctcccaacggcactgatccatataagcccaaatgtccagagtcggacgcgacccagcagcgccctgccttccccgaatggctgacggttctgttgttgtgtttgtaccttctctttacgaatattcttttactcaatttgcttatagcaatgttcaattacaccttccagcaggtgcaagaacatactgaccaaatatggaagtttcaaagacatgacttgatagaggagtaccacggacgcccagctgcccctccacctttcatcctgctgtcccatttgcagctatttataaaacgcgtggtgctgaagactcccgcaaagagacataagcagctgaagaataagctagagaaaaacgaagaggctgcccttctttcatgggaaatatatttgaaagagaactatctgcagaacaggcaatttcagcagaagcagcggccagaacagaaaatcgaggatatcagtaataaagtggatgccatggtggacctgctcgacctcgatcccctaaagagatcggggtcaatggagcagagactggcctctttagaggagcaggtagcccaaaccgcccaggcactgcactggattgtgaggaccttacgtgcaagcgggttctcaagcgaagctgacgttccgacattggcatcacaaaaggctgcggaggagcccgacgcagaaccaggcggacggaaaaagaccgaggaacccggagacagctatcacgtcaacgccagacatctactgtaccctaattgcccggtgactagattcccagtgcctaacgagaaggttccgtgggagaccgagtttttgatctacgatcccccattctacaccgccgagcgcaaggatgccgcagcgatggacccaatgggggacacactcgagccccttagcactattcagtacaatgtggtggacggcctgcgggaccgcaggagctttcatggaccctatactgtgcaagccggacttccacttaacccaatgggcagaaccggcctgcgcggacgcggatctctctcgtgcttcggacccaatcacactctctacccgatggttaccagatggaggagaaacgaagatggggcaatctgccgcaagagcataaagaaaatgctcgaagtcttagtcgtcaagctccctctgtcagagcattgggcgctgccgggtggctcacgagagcccggagagatgttaccaaggaagctgaaacgtattctgcgtcaggaacattggccctcttttgagaacctgctgaagtgtggcatggaggtatacaaaggatatatggatgatcctcggaataccgacaatgcttggatcgagaccgtggccgtgtctgtgcactttcaggatcagaacgatgtggagctcaatcggttaaattctaatctgcacgcttgtgattctggcgcatccatacgatggcaagttgtggaccggaggattcctctgtacgctaaccacaagactttgctgcagaaagcagcagccgagtttggggcacactattag

SEQ ID NO: 244605 - DNA, 435 bp, synthetic construct
  misc_feature 1..435: note = Description of Artificial Sequence: Synthetic coding sequence
  source 1..435: mol_type = other DNA
atggagccttctgcactcagaaaagcgggatcagagcaagaggagggctttgaaggccttccacgtcgggtaaccgacctaggcatggtgtccaaccttcggcgatctaattcctccctgttcaagtcgtggagactgcagtgcccctttggcaacaacgacaaacaggagtccctgtcctcgtggatacctgaaaatatcaaaaagaaggaatgcgtctacttcgtggaaagcagcaaactctcagatgccggtaaggtcgtgtgtcaatgtgggtatacacacgaacagcacctggaagaagccacgaagcctcatacatttcagggaacccaatgggatccgaaaaagcacgtccaggaaatgcccaccgacgcatttggagacatcgttttcactggactgtcccagaaggtaaagaagtacgtgcgatag

SEQ ID NO: 244606 - DNA, 744 bp, synthetic construct
  misc_feature 1..744: note = Description of Artificial Sequence: Synthetic coding sequence
  source 1..744: mol_type = other DNA
atgttatctagggaacaggaagaggacggcggagccggtcggcaatatcatgtgaacgctaggcatctgctgtatcctaactgcccagtaactcggttcccagtgccaaacgaaaaggtgccatgggagacggaatttctcatctatgatcctccattttacaccgcagaacgaaaagacgctgccgcaatggaccccatgggcgaaaaccccatgggacggactgggctccggggacgcggtagtctgtcttgctttggacccaaccacactttatacccaatggttactcgctggcggcgaaacgaagacggggctatttgtagaaagtcaatcaaaaagatgctggaagtcttggtggttaagctgccactatctgaacactgggcacttcccggaggcagccgggagcccggagagatgctgccgagaaagctgaaacgcattttacggcaggagcactggccctctttcgaaaacctcctgaagtgtgggatggaagtgtataaagggtatatggacgatcctagaaatacagataacgcctggattgagaccgtcgccgtctccgttcactttcaagatcagaacgatgtcgaactgaataggctgaacagtaaccttcacgcctgcgatagcggggcttctatcagatggcaggtcgttgacagaagaatccctctatacgccaatcacaagaccctcctgcagaaagctgccgctgagttcggcgcacactattag

SEQ ID NO: 244607 - DNA, 5136 bp, synthetic construct
  misc_feature 1..5136: note = Description of Artificial Sequence: Synthetic coding sequence
  source 1..5136: mol_type = other DNA
atgggaaaaaaatggagggacgcagctgagatggagagaggatgttccgatagagaagataacgcagagagccgcagacggtctagatctgccagcagggggaggtttgcggaaagttggaaaagactctcatctaagcaggggagcactaaaaggtctggcctgccctcgcagcaaactcctgcccagaagtcctggatcgaacgcgcattttacaaaagagagtgtgtgcatattattcctagtactaaggaccctcacaggtgctgctgcggtcgcctgattggacaacatgtcggtctgacgccaagtatctctgttctgcagaacgagaaaaacgagagtaggctatctcgcaacgatatacagagtgagaagtggtccatctcaaagcacacacaactgtcacccacagatgcatttggcacaattgaattccagggtgggggacactccaataaagcaatgtatgtgagagtgtcctttgatacaaagcccgacctgcttctgcatcttatgaccaaggagtggcagcttgaattgccaaaactgcttatcagcgtgcatgggggactgcagaatttcgagctgcaaccaaagttaaagcaagtcttcgggaaaggccttatcaaggccgctatgacgaccggggcatggatctttacaggcggtgttaataccggggtgatacggcacgtcggagatgccctgaaagaccacgcttcaaagagccggggaaagatctgcaccatcgggatagccccatggggaatcgttgagaaccaggaggatttgatcggtagagatgtcgtccgaccttatcagacgatgagtaaccccatgtctaagctaacagtgttgaattcgatgcatagccactttattctcgctgacaatggtactaccggtaagtatggagctgaggtgaagctgagaagacagctggagaagcacatcagtctccagaagattaatactagaatcggacagggcgtgccagtggtggccttgatcgttgaaggcggaccgaatgtgattagcatcgtgctggaatatctgcgagacactccacccgtgcctgtggtcgtgtgcgatggtagtggcagagccagtgatatactcgcttttgggcacaaatattctgaagagggcggtctgattaacgagtctctaagggaccaacttttggtgactattcagaagacattcacatatacaagaactcaagcccagcacctgttcatcatcttgatggagtgtatgaaaaaaaaggagttgattactgtgtttcggatgggctccgaagggcatcaggacatagatttggctattctgacagccctgcttaaaggcgcaaacgcgagcgcaccggatcagctgagcctggccctggcatggaacagagtcgatattgcccgatctcagatattcatctacggccaacagtggcccgtgggctccttggagcaagctatgttagacgccctcgtcttggatagggtggatttcgttaaacttttgatcgaaaatggcgtgtccatgcaccgttttttgacaatctccagactggaggaactctataatacccgacacggaccttctaacacgttgtaccatttggtcagggatgtgaaaaaaagggagtatccaggcttcggctggatctattttaagggtaacctcccccctgactaccggataagtctgatagatattggcctggtgatagagtatctgatggggggtgcttataggtgtaactacacccgcaaaaggtttcggactttatatcacaacctgtttggaccgaagcgggatgatatcccccttaggcgcggacggaaaaccaccaagaagcgtgaggaggaagtcgacatagatttggacgaccctgagatcaaccatttcccattccccttccatgaactgatggtgtgggcagtgctcatgaagcggcaaaaaatggccctgttcttctggcaacacggagaagaagcaatggctaaagcccttgtggcgtgcaaactctgcaaggcaatggctcatgaggcctctgaaaatgatatggtggacgacattagtcaggagctgaaccataacagtcgcgatttcggacagctggccgtcgagctgctcgaccagtcatataagcaggatgaacagctggccatgaagttgctgacttacgaacttaaaaattggtctaatgccacctgtctgcaactcgctgttgctgctaaacaccgggactttatcgcacacacttgctcacaaatgctgctgactgacatgtggatgggacgactgcggatgagaaaaaactccggactgaaagtgatcctgggtatactcctccccccaagtattctttccttagagttcaaaaataaagacgatatgccttatatgagccaggcccaggagattcacctccaggagaaagaagccgaagaacctgagaaaccaacaaaagaaaaagaggaagaagacatggagctcacagctatgctgggtagaaataatggagaatcttcgcgtaagaaggatgaggaggaggtgcaatctaaacacagactgatcccactgggcaggaaaatttacgagttttacaacgcgcctattgtgaagttttggttttacaccttggcatatataggttatctgatgctctttaactacattgtactagtcaaaatggaaaggtggccttccacccaggagtggattgtaatcagctatatcttcaccctagggatagaaaaaatgagggagatactcatgagcgaaccaggcaaactcctccaaaaagtgaaggtgtggttacaggagtactggaacgtgacggacctgatcgcaatccttcttttcagcgtcggcatgattctaaggttgcaagatcagccgtttcgctccgacgggagagtgatttactgcgtcaacattatctactggtatattagactgttggacatatttggcgtgaataagtaccttgggccatatgtaatgatgattgggaaaatgatgatcgatatgatgtactttgttatcattatgctcgtggtgctgatgagcttcggtgtggcaaggcaggctattctgtttcccaatgaagaaccttcatggaagttagccaagaacatattctacatgccctattggatgatttatggtgaggtcttcgcagaccagatcgaccccccttgtggtcagaatgaaacccgcgaggacggcaaaatcatacagttgccaccctgtaagacgggtgcgtggatcgttcctgccataatggcctgctacctgctggtggcaaatattctcttggtcaacttgctcattgcggtcttcaacaatacattcttcgaggtcaagtccatatccaaccaagtctggaagtttcagcgatatcagctcataatgactttccatgaaaggccagtgctcccgccacccctgatcatcttcagccatatgacaatgatttttcaacatctttgttgtcgctggcgtaagcacgagagcgacccagatgagcgcgattacggattgaagctgttcattaccgatgacgaactgaaaaaggtgcatgattttgaggaacagtgcattgaagaatatttcagagagaaggacgaccggtttaacagctccaacgacgagcggatccgggtaacttcagaaagggtagaaaacatgtccatgaggcttgaagaagtgaatgagagggagcactctatgaaggcctcgctgcagaccgtggatataagactcgcgcagctcgaagatctgattggcaggatggcgaccgctctagaaaggcttaccggcctggagagagccgaatccaataaaatcaggtcaaggaccagcagcgactgcactgatgctgcctatatcgttaggcagtctagttttaattcacaagaggggaataccttcaagctgcaagaatccatagatccagctggtgaggaaacaatgtccccaacatcacccaccctcatgcctcgtatgcgatcccacagcttctacagcgtcaatatgaaggacaagggtggaatcgaaaagttagaaagcatcttcaaggagcggagcctctctctgcacagggcaacctcctcccatagtgtagccaaggagcctaaagcgcctgctgcccctgcgaatacactggcgattgtgccagatagtcgacgtcccagtagctgcatagacatctacgttagtgcgatggatgagcttcactgtgacatagatccactcgataactccgtaaacatactgggacttggagaaccatcgtttagtaccccagtaccttctacagccccaagcagctcggcctatgccactctggcacccaccgacagaccaccatcacggagcatagatttcgaggacataactagcatggacaccaggtcgttctcaagtgactacacacacttgcccgagtgccagaatccttgggactcagagcctcctatgtaccatacgattgagcgtagcaaaagttcccgataccttgctaccacgccctttcttctcgaggaagcaccaatcgtcaagtcacattcctttatgttttccccatcaagatcttattacgccaacttcggagtcccggttaagacggcagaatatacgagtatcactgactgtattgacacacgttgtgtgaacgcccctcaagcaatcgccgaccgcgcagcattccccggaggtctcggagataaagtggaagatctcacatgctgtcaccctgagcgcgaagccgaactgagccacccctcatccgactccgaggagaatgaagccaagggtcgacgggctactattgcgatctctagccaggaaggtgataacagcgagcgaactctgtccaacaatattacagtcccaaaaattgaaagagctaatagttattccgcggaggaacccagtgccccatacgcacacactagaaaatccttttctattagcgataagcttgatagacagcgaaataccgcgagcctgcggaatccattccagcggagtaagtcctccaaaccggaaggtcgaggagactcactaagcatgaggagactaagtagaacatccgctttccagtcttttgagtccaagcacaattag

SEQ ID NO: 244608 - DNA, 4710 bp, synthetic construct
  misc_feature 1..4710: note = Description of Artificial Sequence: Synthetic coding sequence
  source 1..4710: mol_type = other DNA
atgtatgtgagggtgagtttcgacactaagccagacctgctgttgcacctcatgactaaagaatggcagttagagctgccaaaacttcttatttcagtccatggcggtctccagaatttcgagcttcagccaaagcttaaacaggtttttggcaaaggactgatcaaagccgctatgacaacaggggcatggattttcactgggggagtcaataccggtgtgatacgacacgtgggggatgctctgaaggatcacgcctccaagagccggggtaagatttgcacgataggtatcgccccttggggcatcgtggagaatcaggaggacttgatcggacgcgatgtggtcaggccataccagacaatgtcaaaccctatgagcaaactgaccgtgctaaactcaatgcactctcacttcatcctggctgacaacgggacaacggggaaatatggagcagaagtcaagctgcgacggcagttagagaagcacatctccctacagaaaattaatacaaggtgtctcccatttttctccctggacagccgactgttttatagcttctgggggtcctgccagctcgattctgtgggtatcggacagggtgtacccgtagtggccttgattgtcgaaggaggtcccaacgttattagcattgtcttagagtatcttcgcgacactccgcctgttccggttgttgtttgcgatggatccggcagggcatctgatattctcgccttcggtcataagtacagtgaggaaggtgggctgatcaatgaatcactgagggaccagctgttggtgacgatccaaaagactttcacctatacgaggacacaggctcagcatttattcatcatactgatggagtgtatgaaaaaaaaagaactgatcaccgttttccgtatgggtagcgagggccaccaagacatcgatctcgctatccttacggccctacttaagggcgcaaacgccagcgccccagatcagctatctctggcactggcctggaacagagtcgacattgctaggagccagatctttatctacggtcagcagtggcccgtaggctcattagaacaagccatgctggatgcactcgtattggatcgagtcgattttgttaaactgctcatcgagaacggggtgtccatgcacaggtttctgaccatcagcagactcgaggaactgtacaacactagacacggcccatcgaacaccttgtaccatctcgtccgtgatgtaaaaaaaggaaatctaccgcctgactatagaatctctctgattgatataggactcgtaattgagtatctgatggggggtgcatacagatgcaattacacacgcaagcgctttaggacactgtatcacaacctgtttggacctaagagagacgacatcccactgaggagaggcaggaagacgacgaaaaaaagagaagaagaagtagacatcgatctggatgacccagagatcaatcacttccccttccccttccacgagctgatggtgtgggccgtgctcatgaagagacagaagatggccttgttcttctggcagcatggcgaggaagccatggccaaagccctggtagcttgtaaactctgcaaagcgatggcacatgaagcctcggaaaacgatatggtcgacgatatctcacaggaactgaaccacaatagccgcgattttggtcaactggccgtcgagctgttggaccagtcttacaagcaggatgaacagcttgccatgaagttgcttacctacgagttgaagaactggtcaaatgcgacctgcctgcagctcgcggtcgccgctaagcacagagacttcatcgcccatacatgcagtcaaatgcttttaaccgatatgtggatgggccgtttgagaatgagaaagaactccggcctgaaggttattctggggattctgctccctccgtccatcctgagcctggagttcaaaaataaagatgatatgccttacatgtcccaggctcaagagatccacctgcaggagaaagaagcggaggagcctgaaaagcctacgaaagagaaggaggaagaagatatggagctgacagcaatgctggggagaaataacggggagagttctaggaagaaggatgaagaggaagttcaatcaaagcaccggctgatccctctcggaaggaagatctatgagttctacaatgcacctatcgtgaaattctggttttatacacttgcttacatcgggtatctaatgctgtttaattacatagtcctggtgaagatggagcggtggccttcaacccaggaatggattgtgatctcatacatattcactcttgggatagagaagatgcgggaaattctcatgtccgagccaggtaagctccttcagaaggttaaggtgtggctgcaagagtactggaacgtcaccgacctgatcgccattctcctattctccgtggggatgatcctgagactccaggatcagcctttccgcagcgatggaagagtaatatattgcgtgaacatcatttactggtatattcgtctcttagacattttcggcgtcaataagtatctggggccttatgtgatgatgatcggtaagatgatgatagatatgatgtacttcgttataatcatgctagtcgtgttgatgtccttcggagtggctaggcaggccatcctattcccaaacgaggagccatcctggaagctcgcgaaaaacattttctatatgccatactggatgatttatggcgaagtgtttgccgaccagatagaccctccatgcggccaaaatgaaacacgggaggatggaaagattatccagctgccaccctgtaagacgggtgcttggatcgtgcccgcaataatggcctgttatctgctggtggctaacattctcttggttaatttactgatcgcagtttttaacaacacatttttcgaggtcaaaagcattagtaatcaggtatggaagttccagcggtaccaactgattatgaccttccacgagcgtccagtcctcccgccacccttaataattttcagtcatatgactatgatctttcaacatctctgctgcaggtggcgtaagcacgagtccgatcccgatgagagggattatggcctcaaactgttcataacagatgatgagttaaagaaggtacatgactttgaggaacagtgcattgaggagtatttcagggaaaaagatgaccgatttaacagctcaaatgacgaaagaatccgtgttacatctgagcgtgtcgaaaacatgtctatgaggctcgaagaggttaacgagcgagaacattccatgaaggcaagtctgcagaccgtggatattcggttggcccagctggaagatcttattgggaggatggccaccgccctcgagcggctcacggggttggaaagggctgaatctaacaaaatccgcagtagaacgagctcagactgtaccgacgccgcatatatcgttcggcaatctagttttaattcccaggaggggaacacctttaagcttcaggagtctatagaccctgccggtgaggagaccatgtcacccacttctcccacacttatgcctcgcatgagatcgcattcattttacagtgtgaatatgaaagataagggtggcatcgaaaagctcgagagtatattcaaggaacgcagcctatctctacatagggcaacaagctctcacagcgtcgcaaaggagcccaaagcgcctgcggctcccgcaaatacgcttgcgatagtgccagacagccggcgtccgtcatcatgcatcgatatttacgtgtccgcaatggatgaattgcactgcgatatagaccctctcgacaattcagttaacattctagggcttggagagccaagcttttccacacccgtgccgtccaccgccccatcctcctcagcctatgctacacttgccccaaccgatcggcctccatccaggtcaattgatttcgaggacatcactagcatggacaccagaagcttctcaagtgactatacgcaccttcccgaatgccagaacccatgggatagtgaacctcctatgtatcatacaattgaaaggtctaagtcctctagatacttagccaccacgccatttttacttgaggaggcacccattgtgaagagtcattcctttatgtttagtccttcacgcagctactacgctaactttggggttccggtgaagaccgcggaatatacctctatcaccgactgtattgacacacgctgtgtgaatgcccctcaggccatcgctgatcgcgcagcttttccagggggtctcggcgataaggtggaagacctaacttgctgtcaccccgagcgggaggcagaactgtcccacccctcctccgacagcgaggagaatgaggccaagggcagaagagcgaccatagccatcagcagccaggagggagacaattccgagcgaacactatctaacaatatcacggtcccaaagatcgagagagcaaattcctattctgcagaagagccttcagccccatacgcccatacccgcaaaagcttcagcatcagcgataaactggaccgacagcggaataccgcatccctgcggaacccctttcaacgatctaagagctcaaagccagagggaagaggggatagtctcagcatgaggagattgtcgagaacatcagcatttcagagtttcgaatctaagcacaactag

SEQ ID NO: 244609 - DNA, 4710 bp, synthetic construct
  misc_feature 1..4710: note = Description of Artificial Sequence: Synthetic coding sequence
  source 1..4710: mol_type = other DNA
atgtacgtgcgcgtgagctttgacacaaagccagatctattgctgcatcttatgacgaaggaatggcagttggaactccccaaactgctgatctcagttcacgggggtctgcagaacttcgagcttcaacccaaacttaagcaggtctttggcaaagggctgatcaaggccgcaatgaccacaggagcatggattttcacaggtggggtcaataccggcgtgatcagacacgttggcgatgctttaaaagaccacgcgagcaagagtcgaggcaaaatctgcaccatcggtatcgcgccatgggggatcgtggaaaaccaagaagatctcatcggcagggatgtcgtacggccatatcagacaatgtctaacccaatgtcgaaactaactgtcctgaattcaatgcactcccacttcatcctggctgataacggaaccactgggaagtatggggctgaggtcaaactaaggaggcagctcgaaaagcatattagcctccaaaagattaacactagatgcctcccgtttttctctctggactcacggctgttttattctttttgggggtcatgccagctggatagtgtgggcattggccaaggagtccccgtcgtggcactgattgtggaaggcggtcccaatgtaattagcattgtcctcgagtatctcagggacaccccacctgtgcccgttgtcgtatgcgatggaagcggtcgcgcaagcgacattttagctttcgggcacaagtactcagaagagggtgggctgattaatgagtcactgagagaccaacttttggtgacaatccagaagacattcacttatacccggacacaggcacagcatctcttcatcattcttatggaatgcatgaaaaaaaaagaactcattaccgttttccggatgggctcagagggtcatcaagatattgacctcgcaatcctcaccgccctattgaaaggcgcaaatgcatccgcaccagaccaactgagtctggcccttgcttggaatcgcgtggacattgctcgtagccagatctttatctatggacagcagtggcccgtgggctccttggagcaggcgatgctggacgcacttgttctggatagggtggattttgtgaaactgttaatagagaacggggtctccatgcacagatttctaaccatcagcaggttggaggaactctataacactaggcacggaccctctaacacgctataccacctcgtgagggatgtcaagaaaggcaacctccccccagattaccggatatcactgattgatatagggctcgtaatcgaataccttatgggaggagcttaccgatgcaactacacgcgcaaaagatttaggactttgtatcacaacctgttcgggcctaagcgcgacgatatcccactgcgacgaggccgaaagactacgaaaaaacgtgaggaggaagtggatatcgacctggatgatccggagatcaaccacttccccttcccctttcacgagctgatggtttgggcagtgttgatgaaaaggcagaagatggcactgttcttttggcagcacggcgaggaggccatggccaaagccctggtcgcttgcaagctctgcaaagcaatggctcatgaagccagtgaaaatgatatggtagacgacatttctcaagagttaaaccacaattcacgcgactttggccagcttgccgtagagctgttagatcaaagctacaagcaggatgaacagctcgccatgaagctactcacctacgagttgaaaaactggagcaatgccacatgcctgcagctagcagtggccgctaagcatagagactttatagctcatacctgcagccagatgctgctgacagacatgtggatgggacggctacgcatgagaaagaattccgggctgaaggtcatccttggtattttattgccacccagcattctgagtcttgagtttaaaaacaaggacgatatgccttatatgtctcaggcacaagaaatccatctgcaagagaaggaggccgaagagccagagaagcccaccaaggaaaaggaggaagaggacatggagctgaccgcgatgcttggaaggaataatggtgaaagtagtcgaaaaaaagacgaggaagaggtgcagagtaagcatagactgatccctctgggcagaaagatctatgagttctataacgcgccaatagtcaaattttggttttatactctcgcctatatcggctatctcatgctctttaattatattgtccttgtgaaaatggagcgttggccctcaacacaagagtggatcgtgatttcttatattttcactctggggattgaaaaaatgagagaaatactgatgagtgaaccaggcaaattactgcagaaagtcaaggtgtggctgcaagaatactggaacgtgaccgaccttatagccatcctgctgttttcagtaggcatgattctgcgcctgcaggatcagcctttcagaagcgacggcagagtaatctattgtgtcaacattatctactggtacatccggctgctggacatctttggcgtgaacaaatatctgggcccatacgtaatgatgatcggcaagatgatgattgacatgatgtacttcgtgatcatcatgcttgtcgtccttatgtcatttggtgtggccagacaggcaattcttttccccaacgaggagccctcttggaagctggctaagaacattttttacatgccctactggatgatttacggtgaagtgttcgcagaccaaattgatcccccatgtggacagaatgagacgagagaggatgggaagataatccaactccctccttgcaaaaccggagcctggattgtgcccgcaatcatggcgtgctacctcctcgtcgccaacattcttctggtcaatctgttgatcgcagtgtttaataacacttttttcgaggtcaaatcaatctctaaccaagtttggaagtttcagagataccagctcatcatgacatttcatgagcgcccagttctgcccccacccctgatcatcttttcccacatgacgatgatattccagcacctgtgctgtaggtggagaaaacatgagtccgacccagacgagagagactatggcctaaaactcttcattaccgacgacgaactgaagaaggtgcacgactttgaggaacaatgcattgaagaatactttcgcgagaaagacgacaggtttaatagttccaatgacgaacgtattcgagtcacgtccgagcgcgtggagaacatgtccatgcggctggaggaggtgaatgagcgagaacattctatgaaggcatctttgcagactgtggacatcagattagcccagcttgaggaccttatcggcaggatggccaccgctctggagagactgacaggactcgaacgcgcagagtcgaacaagatccggagccggacttctagcgactgcactgatgccgcttatatcgttaggcagagttccttcaattcacaggagggtaacacttttaaactccaggaatctatcgaccccgcaggtgaagagacgatgagtccaaccagcccaactctgatgccgaggatgagaagtcatagcttttacagtgttaatatgaaggataaggggggaatcgaaaaactcgaaagcattttcaaggaaagaagcctatcactacatcgggcaactagctcccactccgtggccaaggaacccaaagccccagcagccccagcgaatactcttgctattgtacctgacagccgtagacccagttcatgcatagacatatatgtttccgcaatggacgagttacactgcgatattgaccccttggataacagcgtgaacatccttgggttaggcgagccaagtttctcaacccccgtccccagcacagcaccctctagttccgcttacgccactcttgctcccacagaccgaccaccttcacgatcgatcgatttcgaggacatcacatccatggatactcggtccttttcctctgattatacccatttaccggagtgtcagaatccatgggacagcgaacctcccatgtaccacactatcgagagatctaagtcctcacgctatttagccactacgccgtttcttctggaagaagcgccaatcgtcaaaagccactcttttatgttcagcccttcccggagctattacgccaattttggggtaccagttaagactgccgaatacactagtataaccgattgtattgacacacgttgcgtgaacgccccacaggccatagcagaccgcgcagcatttccgggtggcctgggcgataaggtggaggacctgacctgctgtcaccccgagcgggaggcagaactctcccatccaagctccgactccgaggaaaacgaggctaagggtcggagggccacaatcgccatttctagtcaggagggcgataatagtgagcgtacactgtccaacaatatcaccgtgcccaagatagagagggccaacagctattccgcagaggaaccatccgcaccctacgcgcacacgcgaaagtccttcagcattagcgataagcttgaccgccagcgaaatacagccagcctgaggaacccctttcagcgcagcaaatctagcaagcccgaaggcagaggggacagcttatcaatgaggcgcctctcgagaacctcggccttccagtcatttgaatccaagcacaattag

SEQ ID NO: 244610 - DNA, 4701 bp, synthetic construct
  misc_feature 1..4701: note = Description of Artificial Sequence: Synthetic coding sequence
  source 1..4701: mol_type = other DNA
atgtacgtccgcgtttctttcgataccaagcccgacttgctgcttcatctcatgaccaaggagtggcagctcgagcttccaaagctcctaatatccgtccacgggggtctccaaaatttcgaacttcagccaaaactcaagcaagtttttggtaaggggctgatcaaggccgcaatgaccacaggagcctggatattcaccggaggagtaaatacaggcgtgattcgccatgttggtgacgccctgaaagatcatgcctccaaaagtagaggcaagatctgtactattggaatcgcgccttggggcatcgtggagaatcaggaggacctgatcggcagggatgtcgtgcgcccttaccagactatgagcaatcccatgagcaagctgacagtgctgaactcaatgcacagccacttcatactcgctgacaacggaacaaccggcaaatacggagcagaggttaagttgcgcagacaactcgagaagcacatttctttgcagaaaatcaacacccgtattggacagggagttcctgtggtcgcgttaatcgttgaaggtggccctaacgtgatctcgattgtgcttgagtatctcagagatactccccctgtgcccgtcgtagtgtgtgacgggtctgggagggcatccgacatcttagcctttggacacaagtatagcgaggagggaggtttaatcaacgagagtctgagagaccaattgctggtcacaatccaaaaaacctttacatatacgcgtactcaagcacaacacctgtttatcatcctcatggagtgtatgaagaagaaagagctcataaccgtgttcagaatgggaagcgagggtcatcaggatatcgatctcgccattctcacagctctgctgaagggggcaaatgccagtgcacccgaccaactttctctagcactcgcatggaaccgcgtagacatcgccaggtcccagatatttatatatggacagcagtggcctgtagggtcactcgaacaagcaatgctggatgcactggttttggatcgggtggatttcgttaaacttctgatagaaaatggggtcagcatgcatagattcctcaccatctcccgccttgaagagctgtataacacccgtcatggcccttccaacactctgtaccacctagtccgtgacgtgaagaaacgggaatatccaggcttcggctggatctactttaaaggtaacttacctcccgattatagaatcagtcttattgacatcggacttgtgatagagtacctgatgggcggagcatacaggtgtaactacactagaaagcgctttcgcactctctaccacaacctgttcgggcctaaacgccctaaagccctgaagctcctcggtatggaggacgatatcccactgcggcgaggaagaaaaaccacgaaaaaacgtgaggaggaagtcgacattgacttggacgatccagagataaatcattttccttttcccttccacgagttgatggtgtgggctgtgcttatgaaacgtcagaaaatggctctgtttttctggcagcatggagaagaggcgatggccaaggctctggtcgcctgcaagctttgcaaagcaatggctcatgaggccagcgaaaacgacatggttgatgatatctcacaggagcttaaccacaatagtcgagatttcggccaactggccgttgagttactggatcagagctacaagcaggatgagcagcttgctatgaagctcctgacctacgaacttaagaattggagcaatgcaacttgcttgcagcttgcagttgctgcaaaacacagggacttcattgcacacacctgctcccaaatgctgctcactgatatgtggatgggtagactgagaatgcgcaagaattccggcctaaaggtcattttgggcatcctgctacctccaagtatcttaagcctcgagttcaagaataaagatgatatgccttatatgagtcaggcccaggaaatccatttgcaggagaaagaggccgaggaacctgagaaaccaacgaaggagaaggaagaggaggacatggaacttactgctatgctcggcaggaacaatggagagtcctcgaggaagaaagatgaggaggaggtgcagtctaaacatcgtctcatcccactggggcgaaaaatctacgagttctacaacgctccaatcgttaagttctggttctacacgctggcttatatcgggtatctgatgctgttcaactatattgttctggtaaagatggaaaggtggcctagtacccaggaatggatcgttatctcgtacatcttcacgctaggcattgaaaagatgcgcgagatcctgatgagcgaacccggtaagctgctgcagaaggtcaaggtgtggctgcaggagtattggaacgtgaccgatctgatagccattctcctgttctctgtaggaatgatactccggctgcaggatcagccattccgatcagatggcagagtaatttactgtgtcaatatcatttattggtatattcgcttgctggatatctttggtgtcaacaagtacctcggcccttatgtgatgatgataggaaagatgatgatcgacatgatgtatttcgtgattatcatgctggtagtcctgatgagctttggagtcgcacgacaggcaatcctgtttcctaatgaggaaccctcgtggaagctggccaagaacatcttctacatgccctattggatgatatatggtgaggtgtttgccgatcaaatcgaccctccttgtggacagaatgagacgcgtgaggatggcaagataatacagttgccgccatgtaaaaccggtgcgtggatagtcccagctatcatggcctgctacctactcgttgccaatatacttctcgttaacctgttgatagctgtgttcaataataccttttttgaggttaaatctatctccaaccaggtgtggaaatttcagcgttaccaactcataatgactttccatgaacgcccagtgctgccccctccactaattatcttctctcatatgacgatgatcttccaacacctgtgctgtcgttggaggaagcacgagtctgacccagatgagagagactacggcctgaagctttttataaccgacgacgaactgaaaaaagtccatgacttcgaagaacagtgtatcgaagaatacttcagggagaaggatgaccgctttaacagtagcaatgacgaaaggattcgagtgacgtccgagagagttgagaacatgtcaatgcgcctggaagaggtcaacgagcgagagcacagcatgaaggctagcctccagacggtcgacatacgtttggctcaactcgaggatttgattggccgtatggctacagcgctagagcgtttgaccggtctggagagagccgagtctaataagatacgctctcgcaccagttcggattgcaccgacgccgcttacatcgtgcgtcagagctcatttaattcacaggagggcaatacctttaaactgcaagagtcgatcgaccccgctggagaggagaccatgtcacccacaagccccacccttatgcctcgcatgcgcagccacagcttttactctgttaatatgaaagacaagggtgggatcgaaaagctcgagtctatttttaaggagcgatcattgtccctgcatagggccacaagctctcattctgtggcaaaagaacccaaagctcctgctgccccagcaaatactcttgccattgtgccagacagccgcagaccatcttcctgtatcgatatttacgtgtccgccatggacgaactgcactgtgacattgacccactggataatagcgtcaatattctgggcctgggagagccaagtttctcaacccctgtaccgtcgactgcaccgtcctccagcgcatacgcgacactggcgcctactgatcgcccaccaagcaggtctatcgattttgaagatattacgagcatggatactaggtccttcagttctgactacacccatttgcctgaatgccaaaacccttgggacagcgagcctccaatgtaccacaccattgaaaggagtaaaagttcacgatatctggccacaaccccatttttgctcgaagaggctccaattgttaagtcacactcattcatgttttcaccgtctaggtcctactatgctaattttggcgtgccagtaaagaccgccgaatatacttccattacagactgtatcgatacccgatgcgtaaatgcacctcaggccatcgccgaccgcgctgctttccctggagggctcggtgacaaggtcgaggatcttacttgctgccatccagagagagaagccgagctgtcccacccttcatcagattcagaggaaaacgaagcaaaagggcgacgggcaaccattgcaatatccagtcaagaaggcgacaattcggaaagaaccttgtccaataatattacggttcccaagattgaacgggcaaattcttacagcgcggaagagccttcggccccttacgcacatacgagaaaaagctttagcatctcggataaactcgacaggcagagaaatacagcctccctcaggaatccattccagcgcagcaaatcatcgaagcccgaaggccgtggggacagcttaagtatgcgcaggctctcccggacgtccgccttccaatcgtttgagagcaagcataattag

SEQ ID NO: 244611 - DNA, 4740 bp, synthetic construct
  misc_feature 1..4740: note = Description of Artificial Sequence: Synthetic coding sequence
  source 1..4740: mol_type = other DNA
atgtatgtgagagtgtcgtttgatactaaaccggacctcctcctccacctcatgacaaaagagtggcaactggaacttcctaaattgctgataagcgtacatggcggtctgcaaaacttcgagctacagcctaaactaaagcaagtgttcggaaaaggcttgattaaagccgcaatgacaaccggcgcatggatctttactggcggtgtcaatacaggcgttatcagacatgttggcgatgcactgaaggaccacgccagtaagtcacggggaaagatctgcacaattggaatagcaccttgggggatagtggagaaccaagaagaccttatcgggcgagatgtggtccggccttatcagaccatgtctaacccaatgtccaaacttactgtgctgaatagcatgcatagccacttcattcttgccgacaacggcacgacagggaaatatggggcagaagtgaagctgagacggcagctggaaaagcacattagcttgcaaaaaataaacacccgctgtctgccattctttagccttgattcccggctgttttactcattctggggaagttgtcaactagatagtgtgggcatcggacaaggggtgcccgtggtagcgctgatcgtggaaggcggtccaaacgtgatctccatcgtgctggagtatcttcgggatacaccgccagtccccgttgttgtatgcgatggatctggcagggcatctgatattctggcttttggtcacaaatacagcgaggaagggggactgatcaacgagtcactccgggaccagctcctggtcaccatacagaaaacttttacatatacccgcacccaggcgcaacatttgtttataatcctgatggagtgtatgaagaagaaggaacttattacagtgttccgcatgggatcagagggtcaccaggacatcgacctagctatcctgaccgccctcctgaagggggctaacgcttcggcccctgaccaactcagcctggcgctcgcatggaatagggtagacatcgccaggagtcagatctttatctacggccagcagtggccggtgggttctctggagcaagccatgctggacgctctggtgctagaccgagtggactttgtgaagctgttgatagagaatggcgtaagtatgcaccgcttcttaacaattagtaggctggaggagctgtacaacaccagacacggaccatctaataccctgtaccacctggtgagagacgttaaaaagggaaatctaccacccgactatcgcatatccctgatagatatcggcctggttattgaatatttaatgggcggtgcttacagatgcaattataccaggaaacgtttcagaacactctatcacaatctgttcggtccaaagcggccaaaagccctaaagttgctgggaatggaggacgacatcccactgcggagaggaaggaagaccaccaaaaaacgggaagaggaagtcgatattgatctggatgacccagagataaatcattttcctttccctttccatgaacttatggtatgggctgtcttaatgaaacggcagaagatggccctttttttttggcaacacggagaagaggctatggccaaagctctggttgcttgcaagctctgtaaggcgatggcccacgaggcttccgagaatgacatggtagacgatatctcccaagaattgaaccacaattcccgtgacttcggccagttggctgtggaacttttagaccagtcatacaagcaggatgagcagctggctatgaaattgcttacctacgagctcaaaaattggagcaacgcgacttgcctgcagctggcagtggccgctaagcatagagacttcatcgcccacacatgtagccagatgctcctgacagatatgtggatgggaagactgagaatgagaaagaactcaggtctgaaggtgatactggggattttactcccccctagcatcctctcccttgagttcaaaaataaggacgatatgccttatatgagccaggcacaggagatccatctccaggagaaggaggccgaggaaccagaaaagcctactaaagagaaagaggaggaagacatggaactcaccgcaatgctcggacgaaataacggagagtcttctcgcaaaaaggatgaggaggaagtgcagtctaaacacagactcattccattagggcgtaagatttacgaattttacaatgcaccaatcgtaaagttctggttctacacattggcttatatcggctacctgatgttgttcaactacatcgtcctggtaaaaatggagcgctggccctccactcaggagtggattgtcataagttacatttttacgctcggaatcgaaaagatgagagaaattcttatgagcgagccaggcaagttacttcagaaggtgaaagtatggctccaagagtattggaatgtcacagatctcatcgctattctgcttttcagtgttggtatgatcctccgactgcaagaccagccatttagaagcgacgggcgtgtgatctattgcgtcaatattatctattggtacataaggttgctagatatctttggcgtgaacaagtacttagggccttacgtcatgatgattggcaagatgatgatagacatgatgtacttcgttattattatgctggtcgtgctcatgtcattcggggtggccagacaggctattctgtttcctaatgaagaaccatcctggaaactggcgaaaaacattttttacatgccctattggatgatatatggcgaggtgtttgccgatcagatcgatccaccctgcggccagaacgagacccgtgaagacggcaaaattattcagttacccccatgcaaaaccggcgcttggatagttcccgcaatcatggcctgctacctactggtcgcaaacattttgctggtaaacctgcttatagccgtgtttaataacacatttttcgaggtaaagtccatttccaaccaggtgtggaagttccagagatatcagctaatcatgacatttcacgaaagaccagttctgcctccgcctttaattatcttctcccacatgacaatgatcttccaacacctctgctgtcgctggaggaagcatgagagcgatcctgacgagcgagactatggtctgaaactgtttatcacagacgacgagctcaagaaggtgcacgactttgaggagcaatgcattgaagagtattttcgcgaaaaagacgatcgatttaattcatctaacgacgaacgcatcagagttacaagtgaaagagtggagaacatgtcgatgcgtcttgaggaggtgaatgagagggagcactccatgaaggctagtttacagactgtcgatatccgactggcgcagctggaggatctgatcgggcgaatggcaaccgctttggagagactcacaggcctggaacgagcagagagtaacaagattcgttcacgtacttccagcgattgcaccgacgccgcatacatcgtccgacaatcatccttcaactctcaggaaggaaatacatttaagctgcaggagtctattgatccggcaggcgaggaaacaatgagtccgacttcccctactctcatgcccagaatgcgctcccactctttttatagcgtaaatatgaaggataaaggtgggatagagaaactagagtcaatctttaaggagagatctctaagcctccatagagcgacttctagccactcggtagctaaagagcccaaggcgccagccgctccggcaaacaccctagcaatagtgcccgacagcaggaggccgagcagctgcattgacatctatgtgagcgcaatggatgagctccactgtgacatcgatccccttgataacagcgtgaatatacttgggctcggcgagccttccttctccacacctgtcccatcaacagctccttctagctctgcctacgccaccctggcccctacagaccggccaccgagtcgcagtatagactttgaggacatcacaagcatggacacacgttctttcagctccgactacacacatctccccgaatgccaaaatccttgggacagcgagccacccatgtaccacacaatcgagagaagtaagtcctcacggtaccttgccaccacacctttcttgttggaagaggctccaatcgtgaagagtcacagttttatgttctctccatctagatcatactatgctaacttcggcgtacccgtaaagaccgcagagtacaccagcataaccgattgcatagataccaggtgcgtcaacgcccctcaggccatcgcggacagagcagctttccctggaggactgggcgacaaggtcgaagaccttacttgctgtcatcctgaaagggaggctgagctgtcacatccctcctctgacagcgaagagaatgaggccaaaggcagaagagcaactatcgcgatcagctcccaggagggagacaacagcgagcgcacattgtcaaacaacattaccgtccctaagatcgagcgggcaaatagctatagcgcagaggagccctcagctccctacgctcatactagaaaatcattttccatttcagacaagctcgaccgtcagagaaacaccgctagcctccggaacccgttccaaaggagcaaatcttccaagcccgaagggaggggggactccctgtccatgaggaggttgagcaggacctctgctttccagtcatttgagtcaaagcataactag

SEQ ID NO: 244612 - DNA, 5123 bp, synthetic construct
  misc_feature 1..5123: note = Description of Artificial Sequence: Synthetic coding sequence
  source 1..5123: mol_type = other DNA
atgcccgagccttgggggactgtttacttcctcggaatcgctcaggtcttctctttcctgttctcctggtggaacctggaaggggtgatgaaccaagcggacgctcctagaccacttaactggactattcggaagttgtgtcacgccgcatttctgccctccgttcggctcctcaaagcccagaagtcctggattgaaagggccttttacaaacgagaatgtgtgcacatcattccatcaacaaaagatccccatcgatgctgctgcggacgactgattgggcaacatgtgggcctaacaccttcgatcagcgtcttgcaaaacgagaaaaatgagagtcgtttgagccggaacgatatccagagcgagaaatggagcatctccaaacacacgcagttgtcgcccacagatgccttcggcactattgaattccagggagggggacactctaataaggcgatgtatgtccgggtttcattcgatactaaacccgatttacttctccacctgatgaccaaggagtggcagttagagttgcctaagttactcattagtgtgcatggtggattgcagaatttcgagctgcagcctaagctgaaacaggtgtttgggaaaggacttatcaaagcggcaatgaccactggcgcttggatttttactgggggagtcaataccggcgttatcagacatgttggcgatgctctgaaggatcacgcttctaagagtcggggaaaaatctgtacaattgggattgctccttggggaatagtggaaaatcaggaggatttgatcggccgagacgtggtaagaccatatcagaccatgtctaaccccatgtcaaagctgaccgttctcaactccatgcattcccactttattttggccgataacggaacaacgggcaagtacggggcagaagttaaactgcggaggcaactggagaaacatataagtcttcagaaaattaacacacgcatcggacagggagtccccgttgtggcactgattgtcgaggggggacccaatgtgatttctatcgtgctagagtacttgcgggatacccccccagtgccagtggtagtgtgtgatggctccgggagggccagtgatattttggcatttggacataaatattccgaagaaggcggactcataaatgaaagcctgagggaccaattgctcgtgaccattcagaagacctttacatacactaggacacaggcacagcatcttttcattatcctaatggaatgcatgaaaaaaaaagagctgataaccgtgttccgtatgggcagcgaaggccaccaggacattgacctcgcaatcttaaccgccttactcaaaggcgcaaatgcttctgccccagatcagctttcactggccctcgcctggaatcgggtggacattgctaggagtcagatcttcatctacggccagcagtggcctgtggggtcactggagcaggcgatgttagacgccctggtcctggaccgcgttgactttgtcaaactgctgatagaaaatggcgtgagtatgcatcggttcctcacaattagccgcctcgaggagttgtacaataccaggcatgggccaagcaatacactttaccacctggttcgcgacgtgaagaagggtaatctcccacccgattacaggatcagtctgatagatatagggctcgtgatagaatatctgatgggtggggcttatcgctgtaattacaccaggaaaaggttccggactctgtatcataacctgttcggacctaaaaggccaaaagccctcaaattgttgggaatggaggacgacatacccctccgacgcggtcgcaagactaccaaaaagcgagaggaggaagtcgacattgatttggatgaccccgagataaaccatttccccttcccttttcacgaactgatggtctgggctgtgctaatgaagaggcagaagatggcactgtttttctggcagcacggagaagaggcaatggcaaaggcactggtcgcttgcaagctttgcaaggcgatggcccacgaagcctccgaaaacgatatggtagacgacattagtcaagagctgaaccataatagccgcgatttcgggcaattggccgttgagctcctcgaccagagttataagcaggatgagcagcttgccatgaagcttttgacgtacgagctgaaaaactggtccaatgcaacttgtctccagctggccgtcgcggctaaacaccgagacttcatagcgcatacttgctctcagatgctgctgactgatatgtggatgggcaggctgcgaatgagaaagaacagcggccttaaggttattctcggtatcctccttccccctagtattttgtccctcgagtttaaaaataaagacgatatgccctacatgtctcaagcacaggagatacacctacaagagaaagaagcggaggagccagaaaagcccactaaagaaaaggaagaggaagatatggagctaacggcaatgctgggcaggaataatggagagtctagccgcaagaaagatgaggaggaggtgcagtctaagcatcgcctgattccactgggcaggaagatctatgagttttacaatgccccaatcgtgaaattctggttctacactttagcgtatataggctacctgatgctgttcaattacatagtgctggtgaagatggagaggtggccttcaacccaagagtggatcgttattagttacattttcaccctgggcatagagaaaatgcgcgagatcctgatgagcgagcccggaaaacttctccaaaaggtcaaagtgtggttacaggaatactggaacgtgacagatctcatcgccattttactatttagcgtcggcatgatcctgcgcttacaggaccagccgttcaggtctgacggccgagttatctactgcgtgaatataatctactggtacattagattgttagacatttttggagtcaacaagtatcttggcccatacgtgatgatgatcggcaagatgatgatcgacatgatgtactttgtgattattatgctggtagtgttaatgtcgttcggagttgccaggcaagctattctcttcccaaacgaggagccttcttggaaacttgccaagaacattttctatatgccctattggatgatctatggagaagtgtttgccgatcagatagaccccccatgcgggcagaatgaaaccagggaagatgggaaaattattcagctcccaccctgcaaaacaggtgcttggatcgtccctgccataatggcatgttacctgctggttgccaatatcctgctggtgaacctgcttatcgcagtctttaataatacgttctttgaagttaagagtatctctaatcaggtgtggaagttccagcgataccaactgatcatgacatttcatgaacgtcctgtgctgccccctccactgatcattttttctcacatgaccatgatatttcagcatctgtgctgcagatggagaaaacacgagagtgatcccgatgaacgggactacggcctgaaactatttattactgatgacgagcttaaaaaggttcacgatttcgaggaacagtgtattgaggaatattttagggaaaaagacgaccgattcaactcctccaatgacgagagaattcgtgtcacgagcgagcgggttgaaaatatgtctatgcggctggaggaggtgaacgaacgggagcatagcatgaaggccagtctgcaaactgtcgacatccgccttgcccagctggaggacctgattggccgtatggctaccgcgctggagagactgacaggcctagagcgagccgaaagcaataagatccgcagtagaacctcctcagactgtactgacgccgcttatattgtgagacagagctcatttaactcccaggagggtaacaccttcaaactgcaagaatcaattgatcctgcgggagaggaaaccatgtcacccacgtcccctacattgatgcctcgaatgaggtctcacagcttctactcggtcaatatgaaggacaaagggggaatcgagaaactcgaatcaatcttcaaggagcgaagtctgtctcttcacagagctacttctagccactctgtggctaaggaaccaaaagcaccagctgcgcctgccaacaccctggctatagtacctgactcccgacgccctagttcatgtatcgatatttacgtgagcgccatggatgagctgcattgcgacattgacccattggataacagcgtgaatattctcggcctcggcgagccatcattctctacacctgtgccttccacggcaccatctagctctgcatatgctacgctcgcccctaccgacaggccccctagtcggagcattgatttcgaggacatcacgtctatggacacgaggtcatttagttccgactatacacacctgcccgagtgtcaaaacccctgggactctgagccacccatgtaccatacgatcgagagatccaagtcatcccgataccttgctaccactccatttttgttagaggaagcaccgatcgttaagagccactcattcatgttctcacctagtcgaagctactacgccaacttcggggttcctgtgaagaccgccgagtatacctcaatcacagattgtatcgacactcggtgtgtcaacgcaccccaagccatagcagatcgtgcggcatttccaggtggcctgggcgacaaagtcgaggacctgacgtgttgccaccctgaacgtgaggccgaactgtcacacccctcatctgatagcgaggagaacgaggccaagggcaggagagccaccattgccatcagctcccaagaaggcgataatagtgagaggactctgtcaaataacatcacagtccctaaaatcgaaagagcgaattcgtacagcgccgaggaaccttctgcaccatacgcccatacccgaaaaagcttttccatttccgacaaactggacaggcagaggaacaccgcctccttgaggaaccccttccagcgaagcaaaagttctaaacccgaggggcgaggagattccctgagtatgcgaaggctgagtcggacaagtgcctttcagtcgtttgaatcgaagcataatta

SEQ ID NO: 244613 - DNA, 3978 bp, synthetic construct
  misc_feature 1..3978: note = Description of Artificial Sequence: Synthetic coding sequence
  source 1..3978: mol_type = other DNA
atgcctgaaccatgggggaccgtttattttctgggaatcgcacaggtgttcagttttctcttctcttggtggaacctggagggggtgatgaaccaggctgacgcccctaggccgcttaactggactataaggaagctttgtcacgcagcgtttctacccagtgtcaggctgttaaaggcgcagaaatcttggatcgagcgggctttttacaaacgcgagtgtgtgcacataattcctagcaccaaggaccctcatagatgttgctgtggacggttgatcgggcagcatgtggggttgaccccatcaatcagtgttctccagaatgagaagaatgagagccgcctgtcccgaaatgatatccaatctgagaaatggtccatttctaagcatacacagctttcgcccaccgatgcctttggcaccatcgaattccagggaggaggtcattccaacaaggccatgtacgtgagagtgagtttcgacactaagcctgacttacttctgcatttgatgaccaaggaatggcagctggaactacccaagttgctcatctcggtgcatggaggccttcagaacttcgagcttcagcctaagttgaagcaggtttttggcaagggcttaattaaagcagccatgactactggggcatggatctttacagggggagtcaacacaggtgttatccgccacgttggtgatgcattaaaagaccatgcctctaagagtcgaggtaaaatctgtactattggaatcgcaccatgggggatagtggaaaaccaggaagatctgatcggtagagacgtggtccgtccataccagaccatgtccaatcccatgagtaagctaacagtgttaaactcaatgcacagccatttcattctggccgacaacggtaccaccgggaagtatggagccgaggtgaagttgcgtcgacagttagagaaacacatctccctccagaagatcaacacacgaatcggtcagggcgtgccagtggtggcgctcatagttgagggcggacctaacgtaattagtatcgttctggagtaccttcgggacactcctcccgtgccagtggtcgtttgcgacggctcaggcagagcctctgatattctggctttcggtcataagtatagcgaggaaggcggattgataaatgaaagccttagagaccagctgcttgtgacaatccagaaaaccttcacatatacaaggacacaggcacagcacctatttatcatcttaatggaatgcatgaagaaaaaggagctaataactgtattcagaatgggaagcgaaggccatcaggatattgatctggccatactgacagcattacttaagggtgctaacgctagcgcccctgaccagctgagccttgccttagcctggaaccgtgtggacatcgctcgctcgcaaatattcatctatgggcagcaatggccggtgggctctctcgagcaggctatgctcgacgccctggtgctggacagagtcgactttgtaaagctgctgattgagaacggggtgagcatgcacaggttcctgacaatttcacggctcgaagagctctacaacacaagacacgggccttctaatactttgtaccacctagtgcgggacgtaaaaaagggcaacttgcctcccgattatagaatttcactgatcgatattggcctggtcatagaatatttaatgggaggggcttatcgctgcaattatacacggaaacggttccgaaccctgtaccacaatctgttcgggccaaaacggcctaaagccttgaagctcttaggaatggaagatgacatcccactcagacgcggaagaaaaaccaccaaaaagcgcgaggaggaagtggatatcgatctcgatgaccctgaaatcaatcactttcccttccccttccacgagcttatggtttgggcggtgctcatgaaacgtcagaagatggccctcttcttctggcagcatggagaagaggcgatggccaaggcactggttgcttgtaagttatgtaaggcaatggcccacgaagcaagcgaaaatgacatggtggatgacatttcccaggagttgaaccataactctcgtgatttcggacaattagccgttgaactgctggaccagtcatacaagcaggacgagcagttggccatgaagcttctcacctatgagctgaagaattggagcaatgctacttgcctgcagctggctgtcgccgcaaagcacagggacttcatcgctcatacttgctctcagatgctcctaactgatatgtggatgggacgcctgaggatgaggaagaactcaggactgaaggtgattttgggcatattgttgcctccatcaatactcagtctcgaatttaagaataaggatgatatgccctacatgtcccaggcccaggagatccatctgcaggaaaaggaagcagaagaaccagagaagccaactaaagaaaaggaagaagaggacatggagctgaccgctatgctgggaagaaacaacggggaaagtagtcgtaagaaggatgaagaggaggtccagtccaagcatcgcttaattccgctaggcaggaagatctacgagttttataatgctcccatagtgaaattctggttctacacactggcctacatcgggtacctcatgttgtttaactatattgtgctggtgaagatggagcggtggccttctacccaggagtggatcgtgatatcttatatttttactctgggcattgagaaaatgagagaaattttaatgtctgagcccggaaaactattgcaaaaggtgaaagtctggttgcaggaatattggaacgtgactgacttgatcgcaatcttactgttttctgttgggatgattctgaggctgcaagaccagcccttcaggtctgatggtagagttatttactgtgtgaatattatttactggtacatcagactgctagatattttcggcgttaacaagtacctgggtccatacgtaatgatgatagggaaaatgatgatcgacatgatgtactttgtcatcattatgttggtcgtgctgatgagtttcggggtggcccgacaggccatcctctttccaaacgaagagccctcatggaagttagccaagaacattttttacatgccatattggatgatctatggggaagtcttcgctgatcagatcgatcccccatgcggccaaaatgaaactcgggaagatggcaaaatcatccaactgcctccgtgtaagacaggagcttggatcgtacctgccattatggcctgttatctgctcgtcgctaatattcttttggttaatttgttgatagcagtgttcaataataccttcttcgaagttaagagcatttcaaaccaggtctggaagttccagcgttaccagctcatcatgaccttccacgaaaggcctgttcttcctcccccacttataatcttctcacacatgaccatgattttccaacatttgtgctgccgctggcgcaagcacgaatctgaccctgatgagcgagattacggacttaagctgtttatcacagacgatgaactgaaaaaagtccacgatttcgaagaacagtgcatcgaggaatacttcagagagaaagatgataggttcaacagcagcaatgatgaacgcatcagagttacttctgagagggtcgaaaatatgagtatgaggctggaggaagtgaacgaaagggagcattcaatgaaagcctcactgcagaccgttgacatcaggctagcacaactagaggacctaatcgggcgaatggccacagccctggagcgtttgaccggtctggaaagagccgagagcaataagatcaggtccaggactagctcggattgtaccgacgctgcttatatcgttcgccagtcttctttcaacagccaggagggcaacacattcaagctgcaggagagcattgacccagcagagcaccccctgtactcagtgtag

SEQ ID NO: 244614 - DNA, 4671 bp, synthetic construct
  misc_feature 1..4671: note = Description of Artificial Sequence: Synthetic coding sequence
  source 1..4671: mol_type = other DNA
tgatacgtgcgagtgtcttttgatactaaacccgatcttctcttgcatttgatgacgaaagagtggcagctggagctcccaaaactgctgattagcgttcacggcggacttcagaatttcgagttgcagcctaagctcaagcaggtctttgggaagggcctcattaaggccgctatgacaactggggcatggatcttcaccggcggagttaatacaggggtcattcgccatgtgggggatgccctgaaggaccatgcgagtaaaagccgagggaagatttgcaccattggcatcgcaccatggggcatcgtggagaaccaagaagatctgataggacgggacgtcgtgcgcccatatcagacgatgtctaatcccatgagcaaattaacagtgctaaattccatgcacagccacttcattctggctgataacggcaccactgggaaatacggagctgaggtgaagctcaggagacagttagaaaagcatatctccctgcagaagattaatactcgtataggacaaggagtccctgtggtcgcactgatcgtcgaggggggtcccaatgtgatatcaattgttctagaataccttcgcgacacccctcccgttcctgtggtggtgtgcgatgggtctggacgggcttccgatattctggcattcgggcacaaatactcagaggaagggggactcattaacgagagtctccgagaccagttgctggtgaccattcagaagaccttcacttacaccagaacacaagcccagcacctctttattatcctcatggaatgcatgaaaaaaaaggagctgatcactgtctttagaatgggttccgaaggccatcaggatatcgatctggctattcttaccgcgctgctgaaaggagccaatgcaagcgcaccagaccagctgagcctggctttggcgtggaaccgggttgacattgctcgtagtcagatctttatttacggacaacaatggcccgtgggatctctggagcaagctatgctggacgcacttgtgctggatcgcgtggacttcgttaaactgctgatcgagaatggagtttcaatgcatagattcctaaccatttcaagattagaggagttgtacaataccagacacggtccatcaaataccctctatcacctggtccgggatgttaaaaagagggagtatcctggctttggctggatatattttaaaggcaatctgcctcccgattatcggatcagtctgatcgatataggactcgtcattgagtacctgatgggaggggcttaccggtgtaattacactcggaagagatttcgaaccctatatcacaacctttttggaccaaagcgggatgacattcccctgagacgcggtcgtaagaccacaaagaaacgcgaggaggaagtggatatcgatctggatgaccccgagataaaccatttcccttttcctttccatgaactaatggtttgggccgttcttatgaagcgccagaagatggcactgtttttctggcaacacggtgaggaggccatggctaaagccctagtggcctgcaaactgtgtaaggcaatggcacacgaagcctctgagaatgacatggttgatgacatttcccaagaattaaatcataattcgcgcgattttgggcagctggccgtcgagctactagaccagagctacaagcaggacgagcagctcgccatgaagctgctcacctatgagctcaagaattggtcaaacgccacctgcctacagttagccgtcgcagcaaagcacagggatttcatcgcccatacttgcagccagatgctgctgacagacatgtggatgggtagactgaggatgaggaaaaacagtggtctcaaagtcattctgggtatattgttgccaccaagcattctgtcattagagtttaagaataaggatgacatgccatatatgtcgcaggcccaggaaattcacttgcaggaaaaagaagcagaggagccggaaaagcctacaaaggagaaagaggaggaagacatggagcttacggccatgttggggcgaaacaacggggagtcatcaaggaagaaggacgaagaggaggtgcagtcaaagcatagacttatcccactgggccgtaagatctacgagttctacaatgctcctatagtgaaattttggttttacactctcgcttatatcggatacttaatgctttttaactacattgtcctggtgaagatggaacgctggccctcaacccaggagtggatcgtgataagttacatatttactttgggcatcgaaaagatgagggagattctgatgtcagaaccaggcaagcttctccagaaggtcaaggtatggctacaggaatattggaatgttaccgacctgatagcaattctgctcttctctgttggcatgatcctccgcctccaggatcagccattccggtcagacggccgagtcatctactgcgtaaatattatatattggtacattcggctgctggacatcttcggggtgaacaaatatctcggtccgtatgtcatgatgatcgggaaaatgatgatcgatatgatgtactttgtcatcatcatgctggtagtcctgatgtcctttggggtagccagacaggccatactgtttcccaatgaggagccatcttggaagctggctaaaaacatcttttatatgccttactggatgatctacggcgaggtcttcgcagaccaaatagaccctccttgcggccagaatgaaacacgggaggacgggaagattatccagcttccaccttgtaaaaccggagcgtggatcgtcccagcgatcatggcctgttacttgctggtggccaacattttgctggtgaacctgctcatagccgtgtttaacaacactttttttgaggtgaagagcatttccaaccaggtctggaagttccagcgataccagctgattatgacttttcatgagcgcccagtactgcctcctcctctgatcatcttttctcacatgaccatgatctttcagcatctctgttgtaggtggcgcaagcacgagtcagatcctgatgagagggattatggtctgaaactgttcatcacagatgatgaattaaaaaaagtccacgatttcgaggaacagtgcattgaggagtacttccgggaaaaggacgacagattcaactccagtaacgatgaaagaatacgtgtcacttccgagcgggtggaaaacatgtcgatgagactggaagaggtcaatgagcgggaacactcaatgaaagccagcttgcagactgtggacataagactggcacaactggaggacctgataggacggatggcgacagcactcgaacgcctgactggcttggagcgggctgaatctaacaagatccggtcccggacctcttctgactgtacagatgcagcatatatcgtgagacaatctagcttcaacagccaggagggtaacacatttaagctccaggagagcatcgaccctgctggagaggagactatgagtcccaccagtcctaccttgatgccccgtatgcgctcacacagtttctactctgtgaacatgaaggacaagggagggatcgagaagttggagtccatcttcaaggaaagatcactttcgttacaccgagccacgtccagtcactctgtggcgaaggaacctaaagccccagctgctccagcaaatacgttagccatcgtgccagattctaggcgcccttcatcatgtatcgatatctacgtgtcagccatggacgagctgcattgtgacatagaccctttagataactctgtaaacatcctgggcctgggagagccttcattcagtacacccgtgccttccacagcaccgtccagcagtgcctatgccacactggcgccaactgatcggccaccgtccaggtccatcgatttcgaagacattacctccatggacaccaggagcttctcatctgactacacacacttgccagaatgtcagaacccatgggatagtgagccccctatgtatcacaccattgagaggagcaagtccagccgttatctggcgacgaccccctttctgctcgaggaagcaccaattgtgaaatcacacagctttatgttttctccgagccggagctattatgcaaactttggtgtgcccgtaaagactgcggagtacacgagcatcacagactgcatcgatacccgctgcgtgaatgccccacaggctatagcagaccgcgcagcttttccaggcggtttgggcgataaggtggaggatcttacatgctgccatcctgagagggaggccgaactgagccacccttcctccgacagtgaagaaaacgaagctaaaggccgacgagccacaattgcaattagcagccaagagggggataattcggagagaacgctctctaacaacatcacagtgcccaagattgagcgagccaactcgtacagtgctgaagagcctagcgctccatacgcccatacccgcaaatccttttctatatctgataaactagaccgacaaaggaacaccgcctcactgcgcaaccctttccagcgatctaagagctccaagccagaaggtcggggtgactccctatccatgcgtcggctgtctcggacaagtgccttccagagcttcgaaagtaagcataactag

SEQ ID NO: 244615 - DNA, 4701 bp, synthetic construct
  misc_feature 1..4701: note = Description of Artificial Sequence: Synthetic coding sequence
  source 1..4701: mol_type = other DNA
atgtacgtgagggtgagctttgacaccaagcccgatctcttactgcacctcatgaccaaagaatggcagctggagcttcctaagttgctgatatctgttcacggaggtctgcagaacttcgagctccagcccaagcttaagcaggttttcggtaaaggcctcattaaagccgcaatgaccactggtgcctggatctttaccggtggcgtcaacaccggggtgattcgacacgtaggagacgccctcaaagaccacgcctcgaagtcccggggaaaaatatgtaccattggtatcgctccttggggcattgttgaaaatcaggaggatctcataggaagggacgtggtccggccttaccagacaatgagcaaccctatgagtaagctcacggtgctgaactctatgcactcacactttatcttggccgacaacggcacaacaggcaagtatggtgccgaggttaagcttagacgacagctcgaaaagcatatttctcttcaaaagattaatacacgaattggtcagggcgtgcccgtcgtggctttaattgtggaagggggacccaatgttattagtatagtgctcgagtatttgcgagacacacctccagttcctgtggtggtgtgcgacggttccggtcgggcttctgacattttagcttttgggcataaatacagtgaggaaggaggactcatcaacgaaagccttagggaccaattactggtcaccattcagaaaacgttcacttataccaggacacaggcccaacatttattcattattcttatggagtgcatgaagaaaaaggaactgatcaccgtgttccgcatgggctctgagggacaccaggacatcgacctggccatcttaaccgcgctgctgaagggggcaaatgccagtgcccctgaccagctgtctctcgctttggcctggaaccgcgtcgatatagctcgttctcagatttttatttatggccagcagtggccagtcggttccctggaacaggctatgctggatgctctcgtgttggaccgtgttgacttcgtgaaactcctgattgagaacggcgtctcaatgcatcggtttctgaccatatcaaggctggaagagctttataatacacgccacggtccaagtaacaccttgtaccatttggtccgcgacgtaaagaaaggaaatctgccacctgactaccgtatcagtcttattgacatcgggctggtgattgagtatctgatggggggtgcctacagatgtaactacaccagaaaaaggtttaggacgctttatcacaacctttttggcccaaagaggccaaaggccctcaagttgctcgggatggaagatgatatccctctgagaagaggaaggaagaccaccaaaaagagagaggaggaagtcgatattgatttagacgatcccgagattaatcacttcccttttcccttccacgagctgatggtctgggcagtgcttatgaaacgacagaaaatggctctgtttttctggcagcacggtgaagaagctatggcaaaggctttggtagcctgtaagctgtgcaaagcaatggcacacgaggcttcagagaatgatatggtggacgacatttctcaagagctcaaccacaattcacgagactttggacagctggccgtggagctcttagaccagtcttataaacaggacgaacagctggccatgaagctgttgacgtatgagctaaaaaattggagcaacgccacatgcctgcagcttgccgtagccgctaagcaccgagactttatagcccatacttgcagccagatgctattgactgatatgtggatggggaggcttaggatgcgcaagaattcaggcctcaaggtgatactcgggattcttctcccaccgtccatcctgagtctcgaatttaagaacaaagacgatatgccctatatgagtcaagcacaggaaatacacctgcaggaaaaggaggcagaagagccagagaaacctacgaaagaaaaggaggaagaggacatggaactaaccgcaatgctggggcgtaataatggcgaaagttccaggaagaaggatgaagaggaagtacagagtaaacacagactgatccctctagggagaaagatctatgagttctataacgcaccaatcgttaagttctggttctacaccctggcttacattgggtacctaatgcttttcaactacatcgtgttggtgaagatggagaggtggccctccacccaggaatggatagtcattagttacatctttacgctcggaatcgagaaaatgcgagagattctgatgtcagagcccggtaaactgttacagaaagtcaaagtgtggctccaggaatattggaatgtcactgatttgattgccatacttctattcagcgtagggatgatcctccggctccaggaccagccattcagatctgatggaagggtcatatactgtgtgaatataatctattggtacatccggctgcttgacatctttggggtcaataagtatctcggcccatacgtgatgatgatcggcaagatgatgattgacatgatgtactttgtgatcattatgttggtagtgttgatgtcatttggagtggctcgccaagctattctctttccaaacgaggagccaagctggaagctcgctaagaacatcttttacatgccatattggatgatatatggcgaggtcttcgccgaccaaatcgaccggaaacaggtttacgactcccatacacctaagagcgctccctgcggacagaacgaaactcgagaggatggaaagataattcaactgcctccgtgcaagaccggggcatggatagtgccagccattatggcgtgctacctgcttgtcgccaatatactgttggttaatcttttgatagccgttttcaataacactttcttcgaggtaaagtcaatttccaaccaggtgtggaaatttcagcggtatcaactgataatgacattccacgagagacctgtattaccccctccccttatcatttttagccacatgacgatgatcttccaacacctctgctgtcggtggcgaaagcacgaatccgaccccgacgaacgggactatggtctcaagctgttcattaccgacgatgagctgaaaaaggtccatgactttgaggagcagtgtatcgaagagtacttcagggagaaagacgaccgctttaacagtagcaatgacgaacggatacgggtcacatcggaaagagtggagaacatgagtatgaggctggaggaagtaaatgaaagggagcattcaatgaaagcaagtctacaaacagtagatatccggctcgcccagctggaggacctgatcgggcgaatggctaccgccctcgagagacttaccgggctggaacgggctgaaagtaacaaaatccgctctagaacatcctctgactgtacagatgcagcatatatcgtgcgccagagtagctttaattcacaggaaggcaatacttttaagctccaggaaagcatcgacccagctggagaggaaaccatgtcacccacttcaccgaccctcatgcctaggatgcgctcccattcattttattccgtcaatatgaaagataagggcggaatcgagaagctggaatcaatcttcaaggaaagatccctcagcctccatagagctacaagttctcactccgtcgcaaaagagcctaaagcaccggcagctccggcaaataccctggcaatagtcccagactccagacgacccagctcttgtatagacatttacgtgtccgctatggacgaattacattgtgacatcgatccgcttgacaacagtgtcaacatacttgggctgggcgagccttcgttctctacacccgtcccttcgacagcccctagttccagcgcttacgccaccttagcaccgaccgacaggccccctagcaggtcgatcgactttgaagacataacttctatggacacccgttctttttccagcgattacacccacctgccagagtgtcaaaacccttgggatagcgagccaccaatgtatcacacaatagaacgatccaaatccagtcgatacctcgccactacaccatttctgctggaggaagctcccatcgtcaaaagtcattcctttatgttctctcccagcaggtcctactatgcaaactttggagttcccgttaaaaccgcagagtatacctctatcaccgactgcatagatacaagatgtgtgaatgcacctcaagctattgctgacagggccgctttccctggcggactaggagacaaggtagaggacctgacatgttgccaccctgaacgcgaggctgagctctcccacccatcgtcggatagcgaagagaacgaagctaaggggaggcgtgccacaatagccatctcctctcaagagggcgacaacagcgaaagaacattatccaacaacataactgtcccaaagatcgagagggctaacagctatagcgccgaggagccttcagcgccatacgcacatacacgcaagtctttcagtatcagcgataagctcgacaggcaaagaaataccgcctccctgcgcaatcccttccagcggtctaagtcgagcaagcctgaaggtcggggagactctctctctatgcgcaggctgtcgcgcaccagcgcttttcagtcgttcgagtccaagcacaactag

SEQ ID NO: 244616 - DNA, 4740 bp, synthetic construct
  misc_feature 1..4740: note = Description of Artificial Sequence: Synthetic coding sequence
  source 1..4740: mol_type = other DNA
atgtacgtcagagtgtcttttgacactaaacccgacctcttactgcacttaatgactaaagagtggcagctcgaattgcctaagctcttgatcagtgtgcacgggggattacagaatttcgagttgcagccaaaactgaaacaggtgtttggaaaaggattgatcaaggcagcaatgacaacaggggcatggatattcaccggaggagtgaatacaggagtgatcagacatgtgggggatgcacttaaggatcacgcaagcaaaagcagaggcaagatttgcacaattgggattgccccatgggggattgtggaaaatcaggaggatctgattgggagggacgtggtccgaccctatcagacgatgtctaaccctatgtcgaaactcactgtccttaattctatgcacagtcactttattctcgccgataacgggacgaccggtaaatatggcgctgaagtcaagctgcgcagacagctggaaaaacatattagtctccagaaaattaacactagatgcttaccttttttttcactggattcacgtttattttattccttctggggctcctgccagctagattccgtgggcatcgggcagggcgtgccggtggttgcattaatcgtggagggcggacctaacgtgatcagcattgtccttgaataccttagagacacacctccggtgcccgtggtggtgtgcgatggatccggcagagcatcagatattctggcctttgggcacaagtacagcgaggagggcggactcatcaacgaatccttgagagatcaactcctggttaccatccaaaagacattcacctacacccggactcaggctcagcacctgtttattatactgatggagtgcatgaaaaagaaagagttaattactgtgtttcgcatgggaagcgagggccatcaggatatcgatcttgctattctgaccgctctgctgaagggcgcaaacgctagtgcacctgatcagctgtcactggccctggcatggaaccgggtggatattgccaggagccagatttttatctatggccaacagtggccagtgggtagtctggagcaagccatgctggacgcactggttcttgaccgggtggactttgtcaaactcctcatcgaaaatggcgtaagcatgcaccggtttctcactatctcccgactggaggaattgtacaatactcgccatgggcctagcaatactctatatcacttggtgagggatgtgaaaaagggcaacctcccacccgactatcggatttctttgatcgacattggcttagtaatcgagtatctaatgggtggagcataccgatgcaactatacgcgcaaaaggttcagaacactgtatcacaatctgttcggaccgaagaggcccaaggcactcaagcttctcggcatggaggatgacatccctcttcgcagggggcgaaagaccacaaagaagagggaagaggaagtcgatatcgatctcgatgaccccgaaatcaaccacttcccgtttccgtttcacgagttgatggtgtgggccgtgcttatgaaaaggcagaagatggccttgtttttttggcagcacggagaggaggccatggcaaaagcactcgtcgcatgtaagctgtgtaaagctatggctcatgaggcatcagaaaacgacatggtagatgacatctcccaggaacttaatcacaattctagggactttgggcaactggctgtcgaacttctcgatcaaagctataaacaggatgaacaactggctatgaagcttctcacatacgagttaaaaaactggtctaacgcaacttgtctgcagttggcagttgctgccaagcaccgcgactttatagctcatacctgttcccagatgctattgactgacatgtggatgggaagacttcgaatgcgtaagaactccgggctaaaagtcatcctgggaattctgctccccccatctattctgtcacttgaattcaagaataaggacgacatgccatacatgtctcaggcgcaggaaatccatttgcaagaaaaggaggcagaggagccagaaaaaccaactaaggagaaggaagaagaagacatggagttgacagcgatgctgggcaggaataatggggaatcgtctcgcaagaaagacgaggaagaagtgcagagtaagcaccggttgatcccgcttgggaggaagatctatgaattctataacgccccaatagtgaagttttggttctataccctggcatatatcggctacttgatgcttttcaactatatcgtacttgtaaagatggagaggtggccatcaactcaagaatggatcgtgatcagctacatcttcaccctggggatcgaaaagatgagagagattttgatgagcgagccaggcaagttacttcagaaagtgaaggtctggctccaggaatattggaacgtgacggatctgattgctatcctgttgttctccgtgggtatgatcctgcgcctccaagatcagccttttagatcagatggcagagttatctattgcgtgaacatcatttattggtacatccgtctgctggatatcttcggcgtaaacaagtacctgggcccttacgtcatgatgatcggcaagatgatgatcgacatgatgtactttgtgatcatcatgttggtcgtcctcatgtctttcggggtggcaagacaggcaatattgtttcctaatgaggaaccttcgtggaagttggccaaaaatatcttttacatgccttattggatgatttatggagaagttttcgctgaccagatcgaccccccatgtggtcaaaacgaaactcgagaagacggcaagatcattcagctaccgccatgcaaaaccggggcatggattgttccagccattatggcttgctatctccttgtcgccaacattctgctcgttaacctgctcatcgcagtattcaataacaccttttttgaggttaagagcatctccaaccaggtctggaaattccaacggtaccaacttatcatgacctttcatgaacggcctgtgcttccacccccactgataatcttcagccacatgaccatgatttttcagcacctgtgctgccggtggagaaaacacgaaagtgatcctgacgagcgagattatggactcaaactattcatcaccgatgacgagttaaaaaaggtgcatgattttgaagagcagtgtatagaggagtattttagggagaaagacgaccggtttaacagctctaacgacgaaaggataagggtgacgagtgagagggtggaaaacatgtctatgcgcctcgaagaggtgaacgaaagggaacactccatgaaagcttcccttcagactgtcgacatcagactggctcagctcgaagacttaatcggcaggatggccaccgcactggaaaggctgaccggattggaaagagcagaaagtaacaagattcgcagtcgaacttcttcagactgtactgacgccgcatatatcgtgaggcagtcctccttcaacagccaagaaggaaacacttttaagctgcaggaatccatagaccccgctggagaggagaccatgagccccactagtcccaccctgatgccacgaatgcggagccactccttctattctgtcaatatgaaagataagggcggaatagagaagctggagtcaattttcaaggaacgcagtctatcacttcatagggccacatctagtcattctgtagccaaggagccaaaagctccagccgctccagcgaacacattggctattgtgcctgatagcaggcgccctagcagctgcatagatatctacgtgtccgccatggacgaactacattgtgacatagacccactggataactccgtgaatatcctcggcttgggcgaaccgtcgttttctactccagtgccaagtacagcaccatcctcttctgcctacgcaaccttggccccaactgaccgtcccccttcccgctcaatcgactttgaggatatcacaagcatggatacgcggagcttttcatccgattacacgcacctcccagaatgccaaaacccttgggatagcgagcctcccatgtaccacaccatcgaacgatccaaatcctcccggtatttggccactacaccattccttctggaggaggcccctatcgtgaagagtcactccttcatgtttagccctagcaggagctattatgctaatttcggcgttccagtcaagaccgcggaatacacttcaattacagattgcatcgatacccgatgtgtcaacgcaccacaagcaatagcggatcgggctgccttccctggcggactgggggataaagtggaggatctcacatgttgtcatccagaacgcgaggcagagctgtcacacccctcctcagatagcgaagaaaacgaggcgaaaggcaggcgagccaccattgccatctcttctcaggagggtgacaacagcgagcgcacactgtcaaacaatataactgtcccgaagatagaacgcgcaaattcctatagcgcagaggagccctctgccccatatgcacacaccaggaaaagcttcagcatttctgataaactggatcggcagcgcaatacggccagtctcagaaacccttttcagcgctcaaagtcctcaaagcccgagggcagaggggattcacttagcatgcgccgtttgtcacggacctccgctttccagtcattcgagagcaagcacaattag

SEQ ID NO: 244617 - DNA, 4701 bp, synthetic construct
  misc_feature 1..4701: note = Description of Artificial Sequence: Synthetic coding sequence
  source 1..4701: mol_type = other DNA
atgtacgtccgagtatccttcgacacaaagccggatcttcttctgcatctcatgaccaaggaatggcagctggagttgccgaagctgcttataagcgtgcacgggggtctgcagaatttcgagctgcagccaaagctcaagcaggttttcgggaagggtctcattaaggccgctatgacaaccggggcatggatttttaccggtggcgtcaacactggtgtaattcgccatgttggggatgcactgaaggaccatgcctccaaaagtagaggtaaaatttgcactatagggattgcaccctggggcatcgtagagaatcaggaggatctgatcggtcgggacgtggttcgtccctaccagactatgtcaaacccaatgagcaaactcaccgtactgaactctatgcattcccacttcattttggcagataatggcaccacaggcaagtacggcgctgaggtgaaactgcgccgacagctagagaaacacatctcccttcagaagattaacacccggattggacagggggttccagtggtggctcttatcgtagaagggggtcccaacgtaatctcaatcgttcttgagtaccttcgagacacaccccctgttcctgtggtggtctgtgacggttctggcagagcaagcgacattttagcatttgggcacaagtattctgaggaagggggattgattaatgaatcgctgcgggaccagctattggtaacaatccagaaaacatttacatacacccgcacacaggcccagcatctcttcataatcctgatggaatgtatgaaaaagaaggaactcatcaccgtgttccgaatgggatctgaagggcatcaagacattgacctggctatcctcacggccctgctgaagggtgcaaacgcctccgccccagatcagctttctctcgctctcgcgtggaatagggtcgacatcgccagatcccagatctttatttacggacagcaatggccggtaggtagccttgagcaggctatgcttgatgccctggtgttggaccgggttgacttcgtaaagctactgatagagaacggagtatccatgcacaggttccttaccatctcccgtttagaggagctgtataacacgaggcacggacccagcaatacgctgtatcacctagtccgtgacgtgaagaaaagagagtacccaggcttcggctggatttattttaaaggcaatctaccccctgactacagaatctctcttattgatattggccttgtgatcgagtacctaatgggcggagcctaccggtgtaactatacccgtaaacggtttcgaaccctctatcacaatctttttggacccaagcggccaaaagccctgaagctgctgggtatggaagatgatattccactcagaaggggtcgaaaaaccacgaagaaaagagaggaggaagtggatattgacctggacgaccccgagataaaccactttccattcccattccacgaattgatggtgtgggccgtgctgatgaaacgtcagaagatggcgctgttcttctggcaacatggggaggaggccatggcaaaagctctggtcgcgtgtaagctttgcaaggccatggcccatgaggcttctgagaacgatatggtcgacgacataagccaggagctaaatcacaattcccgggattttgggcagctggccgttgagctcctcgaccaaagctataagcaagatgagcagctggctatgaagcttttgacctatgagctcaaaaattggagtaacgctacttgtctgcagttggctgtggccgcaaagcatcgcgacttcatcgcccacacctgtagtcagatgctgctgacagatatgtggatgggcagattgcggatgagaaaaaattctggtctgaaagtgatcttgggaatactcctgccaccctcaatcttgtctcttgagttcaagaacaaggacgacatgccatacatgtcacaagctcaggaaatccacctacaggaaaaagaagctgaagagccggaaaaacccaccaaggaaaaggaagaagaggatatggaacttacggccatgcttggccgtaataatggggagagctcgcgaaagaaggatgaggaggaggtgcagagtaaacatcggctgatcccactgggtaggaagatatatgaattttacaacgccccaatcgttaagttttggttttacacactagcgtacataggatacctgatgttatttaattacatcgtgttagtgaagatggagaggtggcccagtactcaggaatggatcgtgatcagctacatcttcactcttggcattgagaaaatgcgcgaaatcctgatgagcgaaccaggaaagctcctccaaaaagttaaagtctggctgcaggagtactggaacgtgaccgacctcatcgctatattattattctccgtgggaatgatcctgcggttgcaggatcaacccttcaggagtgatggacgtgtcatttactgcgtaaacataatttactggtatattcgtttgcttgacatctttggtgtaaataagtacctcgggccatacgtcatgatgatcggtaagatgatgatcgatatgatgtatttcgtcatcatcatgctggttgtgctgatgtccttcggtgttgctcggcaggcaatcctgttcccaaatgaggagccaagctggaagctcgcaaagaacatattttacatgccttactggatgatctacggcgaggttttcgcggaccagattgaccccccatgcggtcaaaacgagacacgtgaggatgggaagattatccaactgccgccttgcaagactggtgcttggatcgtgccagccatcatggcatgctacctcctggtggccaatattctacttgtcaaccttcttattgctgtcttcaataacactttctttgaggtaaagtccatttctaaccaagtgtggaagttccagcgttaccaactgatcatgacatttcacgagaggcctgttctcccacctccccttataatcttctcccatatgacaatgattttccaacacctttgctgtcgctggcggaagcacgagtctgatcccgatgaacgtgattacgggctcaaattgttcataacggatgacgagcttaaaaaggtacatgatttcgaggagcagtgcatcgaggaatatttcagagagaaggacgaccggtttaattcttccaatgatgagcgaatcagggtgacgtccgagcgagtggagaacatgtccatgaggctggaagaggtaaacgaaagagaacatagtatgaaagctagcctgcagaccgttgacattcggctggcacagctggaggacctcattggaagaatggcgactgcattggagaggctcacggggcttgagagagcggagtcaaacaagatccgaagcagaacaagcagcgactgcacagacgccgcttatattgtacggcagtcctcctttaacagccaggagggaaataccttcaagctccaagaaagtattgaccctgcaggagaggaaaccatgagccccacgtctccaacattgatgcccaggatgcgttcccatagcttttatagtgtaaatatgaaggataagggcggaattgaaaagctggaatcaatctttaaagaacgctctctctcattgcaccgggctacctcatctcatagcgttgctaaagagcctaaggccccagcagcacctgccaacaccttagccattgtgcctgacagccggcgaccaagttcttgcatcgatatttatgtgtcagccatggatgaactgcactgtgacatcgacccgctggataatagtgttaatattctaggtcttggagaacctagtttctccacccctgtccctagcacagcccctagctcctcagcttacgccactcttgcccctacagaccggcctccaagccgaagtattgacttcgaagatattacatccatggatacaaggtccttctcaagtgattatacacatttacccgaatgccagaacccctgggattccgaaccccctatgtaccacacaattgagcgctccaagtcgtctaggtacctcgccaccactccttttctgctcgaggaggcacccatagtaaaatctcattcctttatgttctccccaagcaggtcctattacgcaaacttcggtgtgcccgtgaagacagccgaatacacgagtattaccgactgcatcgatacccgctgcgtgaatgcccctcaagctattgcagacagagctgctttcccaggtggtctgggagataaggtcgaggacctgacctgctgtcatcctgagcgtgaggctgagctgagccacccttcctctgattccgaggaaaacgaggcaaagggcagacgagccactatcgcaatttcctcacaagagggtgacaattccgagcggactcttagcaataatatcacagtgcctaagatagagcgcgctaacagctattctgctgaggagcctagtgctccttacgcacacactagaaagtcctttagcattagcgataaactcgataggcagaggaacaccgccagcttgagaaacccgttccagcggagcaagtctagtaaaccagagggcaggggggactccctgagtatgcgaaggctgagtaggacctcggcttttcagagcttcgagtcgaagcacaactag

SEQ ID NO: 244618 - DNA, 5204 bp, synthetic construct
  misc_feature 1..5204: note = Description of Artificial Sequence: Synthetic coding sequence
  source 1..5204: mol_type = other DNA
atggggaaaaagtggagagacgcagccgaaatggaacggggttgctcggaccgcgaagacaacgcggagagtaggaggcggagcagatctgcatcccgcggtcgatttgctgagagctggaagagactgagctctaaacagggctcaactaaacgttctgggctcccttcacagcagaccccagctcaaaagtcttggatcgaaagggcattctataaaagagagtgcgtacacataatcccgagcaccaaggatcctcaccgttgctgctgtggcagattgatcggacagcatgtcgggctgaccccctccatttctgtcctccaaaatgagaagaacgaaagccgcctgtcaagaaatgatattcaaagcgagaagtggagcatctccaagcacactcagctgtccccaacagacgccttcgggaccatagagttccagggaggaggccacagcaacaaggcaatgtacgtgagggtttctttcgatactaagccagaccttcttttgcatctcatgacaaaagagtggcagttggagttgccaaaacttctgataagtgtgcacggaggcctgcagaacttcgagttgcagcccaaacttaaacaggtttttggaaaaggcctgattaaggcggcaatgactaccggcgcttggatctttacagggggagtgaacaccggggtgatcagacacgtgggggatgcactaaaagatcacgctagcaagtctagggggaagatttgtaccatcggaatcgccccttggggaattgtggagaatcaggaggacctgatcggcagagacgtggttcggccataccagacaatgtccaacccaatgagcaagctgaccgtgttgaactcaatgcattctcattttatcttggctgataacggaacgaccgggaagtatggtgccgaggtgaagttgcggcgacagctagaaaagcatatttctctccagaaaattaatacgcgctgcctgcctttcttttccctcgatagtcggcttttctacagtttttggggaagctgccagcttgattctgtcggtatcggccagggagtccctgtggtcgccttaatcgtcgagggcggacctaacgtgatctcaattgttctcgaatatttgcgcgacacaccacccgtgccagttgttgtgtgcgacgggtccgggagggctagcgacatactggcttttggacataagtatagcgaagagggcggtttgatcaatgagagcctgcgcgaccagctgctcgtgaccattcagaagacctttacctatacacggacccaagcgcagcacctgttcataatcctgatggagtgtatgaagaagaaagaacttatcacggtgttcagaatgggaagtgaaggacaccaggatattgacctcgcaatactgacagccctgctgaaaggcgctaacgcttctgcccctgatcagctgtctttggccctggcctggaaccgtgtggacatcgccaggtcccagatcttcatctatggccaacaatggcccgtgggcagcctagaacaggctatgctagatgcactggtgctcgatcgcgtagacttcgtgaagctgcttatcgaaaacggggtctccatgcaccgttttctgacaatttctcgcttagaggaactttataatacacgccacggaccaagcaacacactgtaccacctggtgagggacgtgaagaaaggcaatttacccccagactaccgtattagtctgatagatatcggcctggtgattgagtacctgatgggcggagcctatcggtgtaactatacaaggaaacggttcaggaccctgtaccataatctgtttgggccaaagagacccaaagcattgaaactccttggcatggaagacgatatccctctgcgacggggacgaaagaccactaagaagagggaagaagaggtagatatcgacctagatgatccagaaatcaaccacttcccattccccttccacgaactgatggtatgggcagtgttaatgaagcggcagaagatggcactgttcttttggcagcatggcgaggaggccatggcaaaagccctggtggcctgtaagctttgcaaagctatggcccatgaggcctcagagaatgatatggtcgatgacatcagtcaagagttgaaccacaactctcgagatttcggtcagttggcagtcgaactactggatcaaagctacaaacaggatgaacagctcgccatgaaactcctcacctatgagcttaaaaattggagtaatgctacatgcctgcagttggccgtggcagctaagcaccgcgatttcatcgctcacacatgcagccagatgctgcttacagatatgtggatgggcaggctgaggatgcgtaagaatagtggacttaaggttatccttgggatattgcttccacctagcatcctgagcctggaatttaaaaataaagacgacatgccctatatgagccaagcccaggaaatccatctgcaagaaaaggaggcggaagaacccgaaaagcccactaaagaaaaagaagaggaagatatggaattgactgctatgctgggacgaaataacggcgagagctctcgcaagaaagatgaagaggaagtacagagcaagcaccgcctcatccccctgggaaggaagatttacgaattttacaacgctcctattgtgaaattctggttttacaccctcgcgtacatcggctaccttatgctgttcaattatattgttttggtgaaaatggagaggtggccctcaactcaggagtggatagtgatatcctacatcttcaccctcggcattgaaaaaatgcgtgagatcctgatgtctgagccaggcaagctattgcagaaggttaaagtgtggttgcaggagtattggaacgtgacagacttgattgctatcctcctgttttctgtgggcatgattctgaggctgcaggatcaaccctttagatctgacggaagggtgatctattgtgtgaacataatctactggtatattcgacttctagacatcttcggcgtgaataagtacctcgggccatacgtgatgatgattgggaaaatgatgatcgatatgatgtactttgtcattattatgttggtagtgttgatgtctttcggagtcgcacgtcaagcaattctttttccgaacgaggagcccagctggaagctggctaagaacattttctatatgccctattggatgatttacggtgaagtctttgctgatcagatcgatccaccttgcggccagaatgagacccgtgaggacgggaaaatcatacagttgcccccttgtaagacgggagcttggatagtgcccgctattatggcatgttacttgctcgtagcaaatatactgctcgttaacttgcttattgctgttttcaataatacgttcttcgaggtgaaatcgatctctaaccaggtctggaaattccagcgatatcagctcattatgacctttcacgagaggcctgtcttgccccctccattgatcatattcagccatatgaccatgattttccagcatctgtgctgccgctggcggaagcatgaatctgaccctgatgagcgggactatggcctaaagttgttcatcactgacgacgagctcaaaaaggtgcacgactttgaagaacagtgcattgaggagtacttcagggaaaaagatgatcggtttaatagttccaacgatgaaagaatacgcgtcacatctgagcgtgtcgagaatatgagtatgagactagaagaggttaacgaacgggaacactccatgaaggcgtcacttcagacagtcgatattagactggcacaacttgaggaccttatcggtcgcatggcaaccgctctggaacgcctaaccggattagagagagctgaatcgaacaaaattaggtccagaacctcttctgactgcacagatgccgcatatatcgtgcgacagtcttcattcaatagccaggaggggaacacgtttaagctccaggaaagcatcgacccagcgggagaggagacaatgtctccaaccagcccgactctgatgcctcgcatgcgcagtcatagcttttacagtgtaaacatgaaggacaaagggggtatagagaaactcgagagtatctttaaggaaagatccctgtcactgcaccgtgccacaagcagtcattcagtggccaaggaacccaaagcccctgctgccccagctaacactctggccatcgtgccagactctagacgcccttcctcctgtatcgatatttacgtgtctgctatggacgaattgcactgtgatatagatcccctggataatagtgtgaatatcctgggactgggcgaaccttccttctcgacccctgtccccagcacagcacctagttcaagcgcatatgcaactctagctcccacagatagacccccttcccggtctattgacttcgaggatattacatccatggacacaagaagttttagtagcgattacacccacttacctgaatgccagaacccatgggactcagaaccccctatgtaccacactatcgagcggtcaaaatcttctcggtacttggcaaccacacctttcctgctggaagaggcaccaatagttaaatctcactctttcatgttctctccctcacgctcctactatgcaaactttggcgtacccgtgaagaccgccgagtacacctcaattactgattgcatcgacacacgctgcgtcaacgctcctcaggcaatagcagaccgggcagcttttcccggaggtctgggagacaaggtcgaagacctcacatgctgtcaccctgagcgcgaggccgagcttagtcacccctcgtccgatagcgaggagaacgaagccaaaggacgacgggcaaccatcgcaatttcctcacaggaaggcgacaattcggagcgaactctctccaataacataactgtccctaaaatcgaacgcgctaacagctactctgcggaagagcccagtgccccttatgcgcatacgcggaagtcattttccattagcgataaactggatcgccagaggaacactgccagcctgcgaaacccctttcagcgcagtaagtcgtctaaacctgaagggaggggagattcgctctccatgcggaggctgtccagaaccagcgcttttcaatccttcgagagcaaacacaacta

SEQ ID NO: 244619 - DNA, 645 bp, synthetic construct
  misc_feature 1..645: note = Description of Artificial Sequence: Synthetic coding sequence
  source 1..645: mol_type = other DNA
atgtacgtaagggtctcattcgacacaaagcccgatctgctcctgcatctgatgactaaagaatggcaactggagctgcccaaactcttaattagtgtacacggcggtctccagaatttcgaacttcagcccaagctcaaacaggtgtttgggaaggggttgatcaaagcggctatgacaacaggagcatggattttcacaggtggcgtgaacacgggtgtaattagacacgtcggggacgcattaaaggatcatgcgagtaaaagccgcggaaagatatgcacgatcgggatcgccccatggggaatcgtggaaaatcaggaggatcttatcggcagagatgtagtgaggccgtaccagacaatgtctaacccaatgagtaaacttaccgtccttaacagcatgcacagccacttcattctcgctgacaacgggaccacaggaaaatacggggctgaggtcaagctgcgccgtcagctggagaaacacatatcactccagaaaattaacacgtcctttcatagctacaaaaccgctcatgttgacctgcaagacaaaagacaggtaaagactgcattagaacaggcggagtggcagcccggtagaggcatgtttgaccatgacaacttgatgcagagcacctag

SEQ ID NO: 244620 - DNA, 3645 bp, synthetic construct
  misc_feature 1..3645: note = Description of Artificial Sequence: Synthetic coding sequence
  source 1..3645: mol_type = other DNA
atggtggtgcccgagaaagagcagtcctggatccccaaaatcttcaaaaagaaaacctgcactacctttattgtagattcaacagatccaggcggtacactatgccaatgcggtcgtccacgtaccgcccaccctgcagtggcgatggaagacgcttttggcgctgcggttgtaacggtgtgggactctgatgcccataccacagaaaagcctacggacgcctacggcgaactggactttacgggcgcaggcaggaaacacagtaattttttgagactcagcgacaggaccgatcccgctgctgtttactccctggtgacacgcacatggggcttcagagctccgaatctggtggtctctgtccttgggggttccggcggacccgtattgcagacctggctccaggacctgcttaggaggggcctggtgagggccgctcagtctaccggggcttggattgtcactgggggtctccacacagggattggcagacacgtgggcgtggcggttagagatcaccaaatggctagtaccgggggtacaaaagtcgtcgccatgggcgtcgcaccgtggggagtggtcaggaaccgagacactttgataaatcctaaggggtcatttcccgctcgctaccgatggcgaggagaccctgaagatggggtccagtttccgctcgactataattactctgcttttttcttggtggacgacggtactcatggctgtctcggaggtgaaaatcgctttcgcttgcgactcgagagctacatctctcaacagaaaacaggagttggcggaacggggatcgacattcccgtgctgctcttactgatcgacggcgatgaaaaaatgctcactaggatagagaacgctacccaggcccagctgccttgcctgctggtggccggaagtggcggagcagcggactgtctggcagagactctggaggataccctggctccgggttccggtggtgctaggcagggggaggccagagatagaatcagacgctttttcccaaagggagacttagaggtgctacaagcacaggttgagagaattatgaccagaaaggaactcctgactgtctactcgagcgaggatggatccgaagagttcgagacaatagtcctgaaagcgttggtgaaggcatgcggaagcagcgaggctagcgcatatctggacgaactgaggttggctgttgcctggaaccgggtggacatcgcacagagtgagttgttcaggggcgatatccagtggcgctcttttcaccttgaggctagcctgatggacgcacttttgaatgatcgccctgaatttgtacgtctgcttatctcacacggcctgtccttgggccacttcctgaccccaatgaggttagcacaactctattctgcagcgccatccaactcactgatcaggaatctattggaccaggcctctcactccgctggtactaaagcccctgcgcttaaggggggagctgcggagctgcggcctcccgacgtgggccatgttctgcgaatgctgttaggtaagatgtgcgcccctcgatacccttctgggggtgcatgggatcctcacccaggccagggcttcggtgaaagcatgtatctgctgtctgacaaggctacctcccccctgagtttggatgctggcttaggacaggccccttggtcagacttacttttgtgggctctcttactgaacagggcccagatggccatgtacttctgggaaatgggctccaacgctgtttctagcgccctcggcgcatgtttgctactacgtgtcatggcgaggctggagcccgatgcggaggaagccgctagaaggaaagaccttgccttcaagttcgaaggaatgggagtggatcttttcggggaatgttatcggtcatccgaagtgcgggctgcacggctactccttagaagatgtcccctctggggcgatgctacttgcctgcagctcgctatgcaggcagacgccagagcttttttcgcccaagacggcgttcaaagtctcctgacccagaagtggtggggggacatggcaagcactacaccaatctgggctctggtgctggccttcttttgccctcctctcatttatacccgactcattacgttcaggaagagcgaggaagaaccgacaagggaggaactggagtttgacatggattcagtgatcaacggcgaaggtccagtcggaactgctgatcccgcagagaaaacacctttaggcgttccacgccaatcaggaaggcccggttgttgcggcggaaggtgtggtggaagacgatgcctgaggagatggtttcacttttggggcgctcccgtaacaatttttatggggaacgttgtctcgtacctgctgtttctgctgctgttttctagggttttgctggtggactttcaacccgctccgcctgggagtctggagctgctcctgtatttctgggcctttaccctgctctgcgaagagctccggcaagggctatctggcggagggggatcattggccagtggaggacctggccctggccatgccagcctgtctcagaggctgagactgtacctggctgattcctggaatcagtgcgacctggtggcgttgacctgcttcttgctgggcgtaggctgtcgcctgacacctggcctgtaccacctggggagaaccgttttatgcatcgacttcatggtgtttacagtgcgcctgcttcatatattcacagtcaacaaacagctcggccctaagatcgtcattgtttccaagatgatgaaagatgtcttcttttttttgtttttcctgggcgtttggctggtcgcctacggcgtagcaactgagggtctgttgcgacctcgcgattccgatttcccaagtatcctcaggagggtgttttatagaccatacttgcagatcttcggtcagattccccaggaagatatggacgtcgctcttatggagcatagtaactgctcctcggagcccggattctgggcccacccaccaggagctcaagcaggaacttgtgtttctcagtatgccaattggttggtggtactacttctcgtgatcttcctgctcgtcgcgaacatactgttagtcaacctgctcatcgccatgttttcttatacatttggcaaggtgcagggcaactctgatctgtattggaaggcacaaagataccgcttgatccgggagtttcactcgcgtccagcccttgcaccccctttcattgtaatttcccacctccgactattgttgcgtcagctctgcaggcgccctaggagcccccagccaagctcccccgcactggagcactttagggtgtatctctctaaggaagctgagcgcaagttgctgacctgggaatcagtgcataaagagaattttttactggcccgtgctcgtgacaaaagagagagcgatagtgagcgcctcaaacgcacctcacagaaagtcgacttagcactaaagcagctgggacacatccgggagtacgagcagcgcctgaaggtcctggagcgcgaggtccagcagtgctcccgcgttttagggtgggtagccgaggcactgtcacggtccgcgctcctccccccaggcggaccacctccgccagatttgccagggtctaaagactag

SEQ ID NO: 244621 - DNA, 2583 bp, synthetic construct
  misc_feature 1..2583: note = Description of Artificial Sequence: Synthetic coding sequence
  source 1..2583: mol_type = other DNA
atgctgacccggattgaaaacgccacccaggctcagttgccttgtcttctagtggcaggatcagggggagccgcagactgccttgctgagacactggaagatacgctcgctccgggtagtggaggcgctagacagggcgaggccagagatagaatcaggcgattctttcccaaaggggacctcgaagttctccaggctcagtcttttcacctcgaagcctcactaatggatgcgctgcttaacgaccggcctgagtttgtgcggctgctaataagccatggtctttcactcggccattttctcacaccaatgagactagctcagttgtactctgccgctccatccaatagtctgatccgcaacctgctcgatcaggcaagccattctgccggtaccaaagcccctgctctgaaaggcggtgccgctgagctgcgtcctcctgatgttggtcatgtcctccgcatgctgctcgggaaaatgtgtgcacctcggtatccatcaggaggcgcttgggatccgcatccagggcaaggctttggcgagtccatgtatctgttaagcgataaggcaactagtcctctaagcctggacgccggtctgggccaggccccatggagcgacttgctgctctgggccctcctgctgaatcgggcacaaatggccatgtatttttgggaaatgggaagcaatgcagtgagctccgctctgggagcatgtcttctgctccgcgtcatggctcgactcgaaccagacgccgaggaggcagccagaagaaaagatttagccttcaagtttgaaggtatgggtgtagacctgtttggagagtgctatcgcagctcagaggtacgcgcagccagactcttactacggaggtgtcccttatggggcgatgccacttgcctgcaactggccatgcaggcagatgctagagcattcttcgctcaagacggagttcagagcctccttacacagaaatggtggggcgacatggccagtacaaccccaatctgggctttagtactcgcttttttctgtccccctctgatatatactaggctgataacatttcgaaagtcggaagaagaacccacaagggaagagctcgagtttgacatggattcggtgatcaacggcgaaggtcccgtcgggacagccgatccagctgagaaaacccctctgggtgtcccacggcaatcaggacgccctggttgttgcgggggacggtgtggcggacgtcggtgtcttaggagatggttccacttctggggcgctccagtgaccatctttatgggcaatgtcgtgagttacttgctttttctgttgttattttcacgcgtcctgttagttgatttccagcctgccccaccaggttctttagagttgcttctatatttctgggcatttacactgctgtgtgaggagctccggcagggcttaagcggaggagggggatcccttgctagcggaggacctggcccaggtcatgcatctttgtctcagcgcctgagactgtacctcgctgactcctggaatcagtgcgatctagtggctctgacctgcttcctgttgggggttgggtgtcgtctaactccgggactctaccacctgggcaggaccgtgctgtgtatagactttatggtctttaccgtcaggctccttcatatttttacggtaaataagcagctcgggcctaaaatagtaatcgtctccaagatgatgaaggatgtttttttcttcctatttttcctgggcgtatggcttgtcgcctacggggtggctaccgaaggactcttgaggccgcgtgattcagatttcccatctatcctccggagggtcttttatcgaccctatctgcagatttttggccagatcccacaggaagacatggacgtggccctgatggagcattcaaattgcagtagtgagcccggtttttgggcccatcctcccggagcacaggcaggcacttgcgtctcccaatacgcgaactggctcgttgtcctgctcctcgtcatcttccttttagtggctaacatactgttagtgaacctcctcatcgctatgttcagctacacattcgggaaagtgcaaggaaattcagatttatactggaaggcccagcggtacagactgatccgtgaattccactcccgacctgcacttgcgccacccttcatcgtcatttcccacttgcgattactgctccgccagttatgcaggagacccaggagcccccagccttcttctcccgctctggagcactttagggtttatctttctaaggaggccgaacggaagctgctgacatgggagtccgtgcataaagagaacttccttttagctcgggcacgagataagagagaatctgatagcgagagactgaagcgcaccagtcaaaaggttgacctagctctgaagcagcttggacacattagagagtatgagcaacgattgaaggtcctggagcgtgaggtccagcagtgctctcgggtccttggctgggtggcggaggcgttatctcggtcagccctacttcccccaggaggcccacctcccccagatctaccaggcagtaaagattag

SEQ ID NO: 244622 - DNA, 3210 bp, synthetic construct
  misc_feature 1..3210: note = Description of Artificial Sequence: Synthetic coding sequence
  source 1..3210: mol_type = other DNA
atggtcgtgccggagaaagagcagtcgtggatccctaagatctttaagaagaagacatgtaccacttttatcgtggatagcactgatcccggtggaaccttatgccagtgtggtaggcctagaacagctcatcccgcagtcgccatggaggatgctttcggagccgctgtggtgaccgtctgggactctgatgcacacactactgagaaacccactgatgcctacggtgagctggacttcacaggagctggtcgcaagcacagcaattttctaagactgagtgaccggactgatcctgccgctgtatattctctcgtcaccagaacctgggggttccgggcaccaaatttggtcgtgagcgttctcggtggcagcgggggacctgttctccagacatggctccaagatttgcttcggagaggcctggttcgtgctgctcagtctaccggagcttggattgttactggcggactgcacacaggaataggcaggcatgtgggtgtagccgtcagggaccaccagatggccagcaccggcggaactaaggttgtcgcaatgggcgtagcgccttggggcgtagtgagaaatagagacacccttataaaccctaagggcagctttccagccagataccgctggaggggggatcccgaggatggggtccaattcccgttagactataactactctgccttctttctggtcgacgacgggacacacggttgtctggggggagaaaaccgattccgattgcgattggaatcatatatctctcagcagaagacaggagtggggggaactggtattgatatccccgtgctgctgttgcttatagatggtgatgaaaagatgctaactagaattgagaacgccacccaggcacaattgccctgcctgctggttgcgggttccggtggcgctgcagactgcttggccgaaacactagaggatacgctggcaccgggatctggtggcgcacgacagggcgaggcccgagatcgtatccgtcgtttttttcctaagggggatctcgaagtacttcaggcgcaggtggaacgcattatgaccaggaaagagctgctgacggtgtacagcagcgaagatggctcggaggaatttgaaactatcgtactcaaagctttagtgaaggcctgcggctcctccgaagcatccgcctatctggatgagttacgactggccgtcgcatggaatagggtggatatagcccaatcagagttatttcgtggagatattcagtggagaagtttccacctagaagccagcctcatggacgccctgctcaacgatcgcccagaatttgttcggcttctgatctcacacgggttaagcctgggccacttcctgactcccatgaggctggcacaactgtacagcgcagctccctctaatagcttgatccgtaacctgcttgatcaagctagccatagcgctggaacaaaggctccggctctgaaagggggtgctgccgagctgagaccacctgacgtgggacacgtgctcagaatgctcctgggaaaaatgtgtgccccacggtaccctagcggaggtgcctgggacccacaccccggtcagggctttggcgaaagcatgtatctgctctccgataaagccacatccccgctgtccctggacgcgggactgggccaggctccttggagtgacctgcttctctgggccctgctcctgaatcgcgcacagatggccatgtatttttgggagatggggtctaatgccgtttcatccgctctgggggcatgtctgcttctccgggtaatggcccgattagaacctgacgcagaggaagccgcaagacgtaaggatttggcgtttaagttcgagggtatgggtgtagacctcttcggagaatgttatcgatcttccgaggtgcgggcagcccgtctcctgttgaggcggtgccccctgtggggagatgcaacctgtctgcaactggcaatgcaggctgatgcaagggcttttttcgcgcaggatggggtgcagtcactgctgacacaaaagtggtggggggacatggcctctactacgcccatttgggcactagtccttgccttcttttgtcccccactaatctatacccgcctcattacgtttcgcaagtctgaagaggagccaacccgggaggagctcgagttcgacatggattctgtgatcaacggcgaggggcctgtggggctgaccccaggcctgtatcatctgggtaggaccgtcctgtgcattgactttatggtgttcacagtcaggttactccatatctttacggtgaacaaacagttgggacccaaaatcgtgatagtctctaaaatgatgaaggatgtattcttttttctgttctttctgggagtttggctggtggcttacggggtggcgaccgaaggccttctgcgcccacgagactcagatttcccatccattctccgcagagttttttacagaccatacctccagatttttggacaaattccacaggaagacatggatgtggccctgatggaacattccaactgctccagtgaacctgggttttgggcccacccccctggggcacaggcgggaacttgtgtgtcacagtacgctaattggctcgttgtacttctgctcgtgatctttttgcttgtggctaacattctgttggtcaacctactcattgctatgttcagttatacttttgggaaagtacagggaaattctgacctttattggaaagcgcagaggtataggctgatccgggagttccacagtagaccagcccttgcacccccatttatcgtgattagtcacctgagattgcttctcagacagctttgtcgacgccctcggagcccacagcctagctcaccagctctcgaacatttccgggtgtatctatcaaaggaggctgagcggaagcttctcacctgggagagtgtgcataaggaaaacttcctgctcgccagagctcgcgataaacgcgagtcagacagcgagcgcctgaagcgcacttctcagaaggtagatctggctcttaaacaactgggccatattagagagtacgagcagcgtctgaaggtcctggaacgagaggtgcaacagtgctcacgggtgcttggatgggtggcagaggctctctctcgtagtgcactcctgcctccgggagggccacccccacctgacctgcccggttctaaggactag

SEQ ID NO: 244623 - DNA, 3498 bp, synthetic construct
  misc_feature 1..3498: note = Description of Artificial Sequence: Synthetic coding sequence
  source 1..3498: mol_type = other DNA
atgcaggacgtccaggggcctcgccctggatcacctggagacgctgaagatagacgagagcttgggctgcaccgcggtgaggtgaacttcggaggttccggcaaaaaacgcggaaagttcgttcgcgtgcctagcggcgtcgctccgagtgttttgttcgatctgcttctcgcagagtggcacctacctgcccctaatctcgtagtctctctggtgggggaagagcagccttttgcgatgaaatcatggcttcgggatgtgcttcgcaaaggtctggtgaaagccgctcagagtaccggggcttggatcctgacctctgccttacgcgtgggcctcgcaagacatgtgggacaggccgtccgcgatcattccctcgccagcacctcgaccaaagtgcgggtggtggccgtgggtatggctagcctggggagagtgctgcacaggagaatcctggaagaggcccaggaagatttccccgtccattaccccgaagatgacggaggctcacaaggaccactttgctcactggactccaatctcagccacttcatcttggtggagccaggccctcccggtaaaggcgacggattgacagaactccgcttacgtttggaaaagcatatcagcgaacagcgcgcaggatacggcggaacgggtagcattgagattccagtgttatgtctcctcgtgaacggggatcccaacacactggagagaatctcccgggctgtggagcaggctgcaccctggctgatcttggtgggcagcggcggaattgccgacgtgctggctgccctagtgaatcagccccacctgctggtgccaaaggtggccgaaaaacagttcaaagagaaattccccagcaagcatttctcctgggaagatattgtgaggtggactaagctgctccagaatatcaccagccaccaacacctgctcactgtgtacgactttgaacaagagggaagcgaagagctggacacagtgatcctaaaggcattggtcaaagcctgtaagagccacagtcaggagccacaggattacctagacgagttgaaattggccgtggcctgggaccgcgtggatattgccaagagtgagatattcaacggggacgttgaatggaaatcctgcgacctagaagaggtgatggtcgacgcgctggtgtcgaacaagcccgagtttgtgagacttttcgtggacaatggcgcagacgtagccgacttcttgacctatgggaggctccaggaactgtaccggtcagtgtctaggaaatctctgctttttgatctactccagagaaagcaagaagaggccaggctcacgctggcaggactcggtactcagcaggctcgcgagcctcctgctgggccaccggctttctcacttcacgaggtgtcaagagttctcaaggatttccttcaagatgcttgcaggggcttctatcaggacggtcggccaggagatcggagaagggctgaaaaaggccctgccaaacgtcccacgggtcagaagtggttgttggacctcaaccagaaatccgagaacccatggagggatttgtttctgtgggccgtgctgcagaaccgacatgagatggctacctacttttgggcaatgggccaggagggcgtggcagccgcattagcagcatgtaaaattctgaaagagatgtctcatctggaaacagaagcagaggctgctcgtgccactagggaggctaaatatgagcgactcgctttggatctgttcagcgagtgttattctaattctgaggcacgggctttcgcgctgctagtccggaggaaccggtgttggtcaaagactacctgcctacatctggcaacggaggcagacgccaaggccttcttcgcacatgacggggtgcaggccttccttacgcgaatttggtggggcgatatggcagccggaactcccattttgagacttctaggcgcatttctctgcccagctttggtgtataccaacctgattacgttctcagaagaagcgccactgcgtactggtcttgaagacctgcaagacctggactccttagacacagagaaaagtccattgtatgggctgcagtcccgagtggaagagctggttgaggcgcctcgggcacagggtgaccgtggtccaagggctgtgttcctcctgacacgttggcgcaagttctggggtgcccctgtcaccgtctttctaggaaatgttgtgatgtattttgcctttctctttctgttcacttacgtgctgctggtagacttcaggcctccccctcaaggaccttctggccctgaggtgaccctctacttctgggtctttaccctcgtgttggaagagatcaggcagggatttttcacagacgaagacacccaccttgtgaagaagtttacactctatgtgggagacaactggaacaagtgcgatatggtcgcaatcttcctcttcattgtgggggtcacctgcagaatgttgccgtctgctttcgaggcgggtcggacagtcttagccatggacttcatggtgttcaccctcagactgatccatatcttcgccatccacaagcagctggggccaaagataattgtggtagaacgaatgatgaaagatgtgttcttctttctgtttttcctctcagtgtggcttgtagcttacggagttactactcaggccctactgcatccacacgatgggagactcgaatggatttttaggagagtgctgtaccgtccatatctccagatcttcggacagatccccttggacgagattgacgaggccagggtgaactgcagcacccatcctctgcttctcgaggactctccttcctgccctagcctgtatgccaactggcttgtcattctgcttctcgtcacatttctcctcgtgaccaacgtgctgcttatgaacctgctcatcgcaatgttcagctacacttttcaggtggtccagggcaacgcagacatgttctggaagtttcaaagatacaaccttattgtggaataccacgagcggcctgccctagctcctccctttatcttactcagccatctgtcacttactttaagaagggtgttcaagaaggaagccgaacacaaacgagagcatctagagagagatctgccagatcctctggatcagaaagtagtgacttgggagacagtgcagaaggagaactttctctctaagatggagaagcggaggcgcgattctgagggcgaagtgttgcgaaagacagcccatcgggtcgattttattgccaagtacttgggaggacttagagagcaagagaaaagaattaaatgtctggagtcacagatcaattattgcagtgtgttggtcagctccgtcgccgatgttcttgctcagggtgggggacccaggtcttctcagcattgtggggaaggaagtcagctggtggctgcagatcacagaggaggactggacgggtgggagcaacccggtgccggacagccgccatcagatacgtag

SEQ ID NO: 244624 - DNA, 2619 bp, synthetic construct
  misc_feature 1..2619: note = Description of Artificial Sequence: Synthetic coding sequence
  source 1..2619: mol_type = other DNA
atgcaagatgtgcagggccctcgccctggctctcctggggacgccgaagaccggcgagagttgggactacacagaggagaagtgaatttcgggggatcagggaaaaagcgaggcaaattcgtccgagtccccagtggagtggctccttccgtgctcttcgacttgctgcttgctgaatggcatctgccggctcccaacctggtcgtgagtcttgttggcgaggagcagccattcgctatgaagtcctggctgagggatgtgcttagaaagggattggtcaaagccgcacagagtacaggcgcttggattctcacgagcgcactgagggtaggcctggcccgacacgtgggccaggccgtgagagaccattcattagcgagtacaagtactaaggtgcgagtcgtggcagtgggaatggccagtctgggccgtgtgttacatagaagaatcttggaggaagctcaggaggactttccagtgcactacccagaagacgacggtggatcccagggcccactgtgttctctggattcaaatttatctcactttatccttgtagagcctggtccgcctggaaagggagatggcctgacggagcttcgactcagactagagaagcatatcagcgagcagcgcgctggctacggaggcacaggtagcatagagatccctgtcctgtgtctgctggtcaacggcgacccaaacaccctagagcggatctctcgcgcagtagagcaggctgctccatggcttattctggtcggttcaggcggaatagccgacgtactggccgcactggtgaatcagccccatctcctcgtaccgaaagtcgcagagaagcagttcaaggagaaattcccgtcaaagcacttttcttgggaggacatcgttcgatggacgaagctgctccagaatattacatcacatcagcacctcctgacggtatacgacttcgagcaggagggatcagaagagctggatacagtgatcctgaaagcattagtcaaagcatgcaagtcccactctcaggaaccacaggactatcttgacgaacttaagttggccgtcgcctgggacagagtcgatatcgccaaatccgaaatctttaatggcgatgtggagtggaagtcatgcgatctagaagaagtcatggtggacgccttagttagcaacaaacccgaatttgttcgcttgtttgtggacaatggggcagacgtggctgattttctcacatatggcagattacaagaactgtacaggtcagttagcaggaagtccttattgtttgatttattgcagagaaagcaggaagaggcacgcctcacactggctggtctcggcacccagcaggctcgggagcctcccgcagggcctcccgcatttagcttgcacgaggtttccagggtgctcaaggacttcctgcaggacgcatgccggggattttatcaggacggaagacctggagacaggaggcgagccgagaagggacctgccaagcgtcccactggccagaagtggctgctcgacctgaatcaaaaatccgagaacccatggagagatctctttttgtgggccgtgctacagaaccgtcatgaaatggctacctatttctgggctatgggacaggagggggtggctgccgctctggcagcttgtaagattctcaaagagatgtctcacctcgagacggaggctgaagccgctagagcaactcgtgaggccaagtacgagaggttggccttggatctgttttcggagtgctattctaacagcgaggcccgtgccttcgcgttgctcgtgaggcggaatagatgctggtcgaaaaccacctgtctgcatcttgcaactgaagctgatgcaaaagcattctttgcccatgacggtgtccaagccttcctgacacggatctggtggggcgatatggcagccggaactcctatcctcagactgttgggagcttttctttgccctgctctagtgtacacaaatctgatcactttctctgaggaggctcctctgaggacaggcctagaagacctacaggacttggacagtctggacactgagaagtcacccctctatggacttcaatccagagttgaggagttggttgaggcccctagggcacaaggagaccggggaccacgggcagtattcttgcttacacgctggaggaagttttggggggcaccagtaacagtgttcctaggaaatgttgttatgtactttgccttcctgttcctctttacctacgtgctcctggtcgactttaggccccctccacaaggacctagcggcccagaagtgaccctttatttttgggtcttcacattggtgctcgaggaaattcggcaggggttctttacagacgaagacacccacctggttaaaaagttcaccttgtacgttggcgacaattggaacaagtgcgacatggtggccatttttcttttcatagtcggggtcacatgcagaatgctgccttccgctttcgaggcgggtaggactgtgctggccatggacttcatggtatttaccttgcgccttatccatatatttgccatccacaaacagctgggtcctaaaattattgtcgtggaacgaatgaaaccagtgtag

SEQ ID NO: 244625 - DNA, 3504 bp, synthetic construct
  misc_feature 1..3504: note = Description of Artificial Sequence: Synthetic coding sequence
  source 1..3504: mol_type = other DNA
atgcaggacgtacagggtccacgtcccggaagtccgggagacgcagaagaccgcagagagttaggactgcacagaggcgaggttaacttcggtggttcaggtaaaaaaagaggaaaatttgtgcgtgtgccttcaggcgttgctccatcggttctattcgatcttctcctcgcagagtggcatttaccggctcccaacctggtcgtgtcattggtgggcgaggagcagcccttcgccatgaagagttggcttagggatgtactgaggaagggactggtgaaagccgctcaatccaccggagcctggatcctgacctccgccctgcgcgtgggcttggctagacacgttggacaagcggtccgtgaccacagcctggcttccacatctactaaagtgcgagtagttgccgtgggtatggctagcttggggagggtactgcatcgccgtatcctcgaggaggcccaggttcatgaagattttcccgtgcactaccccgaagatgatggcggttctcaaggccctctctgttctctggatagcaacctatcacactttatactggtagaaccaggaccgcctgggaaaggcgacggattgactgagctgcgcttgagacttgagaaacatattagtgaacagcgggctggctacggtggaacaggttcaatagagattcccgtgctgtgcctcttggtaaacggtgatcctaatactcttgaacgtatatctcgggcagttgaacaagccgcaccatggctaatcctggtcggtagcggagggatcgcagacgtcctcgctgctcttgtgaatcaaccacaccttttagtgcccaaagtggcagaaaaacagtttaaggaaaagttcccaagcaaacacttctcctgggaggacattgtgcggtggaccaaattgctgcagaatataaccagtcatcagcacctactgactgtgtacgatttcgagcaggaaggctccgaagagctcgataccgtgattctgaaggctctcgtaaaggcctgcaagtcacactcacaggaaccgcaggactacttagatgaactgaaactggctgttgcttgggacagggtggatattgccaagagtgagatattcaacggagacgtggagtggaaaagttgcgacctggaagaggtaatggtggatgcactagtgtctaacaagcctgagtttgtccgattattcgtggataatggcgcagatgtcgctgactttctgacatatggtagattgcaagaactgtaccgttccgtctccaggaagtccctactgttcgacctgcttcagcgaaagcaggaggaggctagattgacgctcgctggtcttgggacgcagcaggcacgggaacccccagccggacctcctgcctttagcttgcacgaagtgtcacgtgtacttaaagacttcctgcaggacgcatgccggggattctatcaggatggaaggccaggcgataggagaagggccgaaaaggggccagcaaagagacccaccggtcagaagtggctactcgacctcaaccagaagtcagaaaatccttggcgcgacctgtttctctgggcggtcttacaaaatagacatgagatggccacctacttttgggcaatggggcaggaaggagtcgccgcagccctggctgcctgtaaaatcttgaaggagatgagtcacctcgagacagaagctgaagcagccagagcgacccgggaagcgaagtacgaacgtcttgctctggatctgttctcagaatgctactcgaacagtgaggcaagagcttttgcattgttggtgcggaggaaccgctgttggtccaagaccacctgcctccacctagccaccgaggccgacgcaaaagctttttttgcccacgatggtgtgcaggcctttcttacaaggatctggtggggcgacatggcagcaggcacacccattcttaggcttctcggggctttcctttgtcccgctctggtgtatactaatctgatcacctttagtgaggaggcacctcttagaaccggcttggaggacctccaggacctcgactccctggacacggaaaaaagcccgctgtatgggttgcaatctcgagttgaagagctcgttgaggctccacgagcccaaggagacagaggcccacgagccgtattcctgctaacaaggtggcggaaattttggggcgcaccagtgaccgtctttcttgggaacgtagtgatgtatttcgcctttctgtttctgttcacttatgttctcctggttgacttccggccacctcctcaggggccaagcggccctgaagtcaccttgtacttctgggtgtttacactggtattggaagagattagacaaggcttttttaccgacgaagatactcacctggtcaaaaagttcacgctttacgtgggcgataactggaacaagtgcgatatggtcgctattttcctgttcattgtgggggtaacatgcagaatgctaccttcagcttttgaagctgggcgaacggtgctagcgatggatttcatggtttttacccttcgccttatccatatcttcgccatacataagcagctggggcctaagatcattgttgttgagcgcatgatgaaagatgtgttttttttcctgttctttctctccgtgtggctggtagcctacggcgtaacgacacaggcgctccttcaccctcatgacgggcgacttgagtggatattccgtcgcgtactctataggccgtatttacaaatttttgggcagatacccctggatgagatcgacgaagcaagggtcaattgctccacacacccccttctcctggaggattcgccctcctgcccatcactttacgcgaactggcttgttattttactccttgtcaccttcttgcttgtgactaatgtcctgctgatgaacctgctcattgcaatgttctcctatacgtttcaagtggtacaaggtaacgctgatatgttctggaagtttcaaaggtacaacctgatagttgaatatcacgaacggccagcccttgccccaccttttatcctccttagccacttatcactgacgctgcgccgtgtgtttaaaaaagaggccgagcataagcgtgagcacctggagcgcgatctgcccgatccactggatcagaaggttgtcacatgggagaccgtccagaaggaaaatttccttagtaagatggaaaagcggaggagagattcagagggagaggtgctgaggaagaccgcgcacagagtggactttatcgccaagtatctggggggactcagggagcaagagaaacggatcaaatgtctggagtcccaaatcaattactgtagtgtgctggtttcttccgtcgcagatgttctggctcagggcggaggtccgcgaagttctcagcactgtggagagggctctcagctggttgcagcagatcaccgaggcggtctggacggctgggaacagcctggtgctggccaacccccatctgatacctag

SEQ ID NO: 244626 - DNA, 3480 bp, synthetic construct
  misc_feature 1..3480: note = Description of Artificial Sequence: Synthetic coding sequence
  source 1..3480: mol_type = other DNA
cctggctctccgggtgacgccgaagatcgaagagagttaggtctgcaccggggtgaggtgaatttcgggggatccggcaaaaaacgcggaaagttcgtgcgagtgccttccggagtcgcccctagcgtactttttgatctactgctcgccgagtggcacttgcccgctccaaacctggtagtatccctggtgggcgaggagcaaccatttgcaatgaaatcttggcttagagacgttctgcgaaagggcctcgttaaagccgctcagtctaccggcgcatggattttgacttcggcattgagagtcggtctggccagacatgtgggtcaagctgtgagagaccacagtttggctagtacgagcacgaaggtgcgggtggtggccgtgggcatggcctccttaggacgggtgcttcaccgcagaattctggaggaagcgcaggtgcatgaggattttcctgtgcactaccctgaggacgacggagggtcccagggccctctgtgttcgctggactccaatctttcccacttcatcttggttgagcctggtcccccagggaagggggacggactgacggaacttcgcctaagactggagaagcacatttcagagcagcgggctggttatggaggtaccggcagtatagaaataccagttttgtgcctgctggttaatggcgaccctaacactctagaacgaataagtcgcgcagtggagcaagcagcaccatggctcatcctggtaggtagtgggggaattgctgatgttctggccgctttggtgaaccaacctcatcttctggtcccgaaggtggctgagaagcaattcaaggaaaaattcccatcaaaacacttctcatgggaagatatcgtgcgatggaccaagttgctgcagaatatcaccagccatcagcatttgcttaccgtctatgactttgaacaggagggctccgaagagctggacactgttatactcaaagcgctagttaaagcttgtaaatctcactcacaggaaccccaggattacttggacgagctgaagctagccgtcgcctgggacagagttgacatcgccaagagtgagatctttaacggcgacgttgaatggaaatcatgcgatcttgaagaggtcatggtggatgccctggtgtcaaacaaaccagagttcgtgcggctctttgtggataatggggcagatgtggcggacttcctaacttatgggagattgcaggagctatataggtcagtgagtcgtaagtctcttctcttcgacttattgcagcgcaagcaagaggaggcgagactgactctggccggattaggtactcaacaggcccgtgagccccctgccggaccccctgccttctccttgcacgaagtgtctcgcgtgctgaaggacttccttcaggatgcctgccggggtttctaccaggacgggaggccaggggataggcggcgtgcagaaaagggcccagctaagcgacccactggtcaaaagtggctgcttgatctcaatcagaagagcgaaaacccatggagggacttattcctctgggctgtgttgcagaataggcacgagatggctacatacttttgggctatgggtcaggagggggtggcggcagcacttgcggcttgcaaaatccttaaggaaatgtcccacctggaaacagaagctgaggctgctcgggctacccgtgaggcgaagtacgagagactggcacttgacttgttttcagagtgctattctaattccgaggcccgagccttcgcactacttgtccgcaggaaccggtgctggtcgaagaccacatgcctgcacctggccacagaggccgacgcaaaagcttttttcgcccacgatggagtgcaggcctttctcaccaggatatggtggggggacatggccgcagggacccccatcttgcgcttactgggcgcatttttatgtccagccctcgtgtacacaaatctaattactttttcagaagaggcacccctccgtaccggccttgaggacctacaggatctggactccctggataccgagaagtcaccgctttatgggctgcagagtcgtgtggaagagctggtcgaggccccacgggctcaaggggacagagggcctagggctgtgttcctcctgactcgctggcgcaaattttggggggcacctgtcaccgtgttcctgggaaacgtagttatgtactttgcattcttgtttctctttacttacgtactcctggtggacttccggcctccaccacagggcccatctgggccagaggtcactctgtatttctgggtgtttacactggttctcgaggagattcggcaggggtttttcactgatgaagacacccacctggtcaagaagtttaccctgtatgtgggagataactggaacaaatgtgatatggttgcgatatttctctttatagtgggggtgacctgtcgtatgttacctagcgctttcgaggcaggcaggaccgtgctggctatggatttcatggtctttacacttcgtctgatacacatttttgcaattcacaagcagctcggtccaaaaattatcgtggtcgagagaatgatgaaagacgtgttttttttcctgtttttcctgtctgtgtggctggtagcctatggggtaactacccaggctctgctgcatcctcacgacggaagactcgaatggatttttcgtagggtcctgtatagaccctacttgcaaatattcgggcagatcccactagacgagatcgacgaggcccgagtcaactgttctacacaccctctccttcttgaggacagcccatcttgccccagcttgtacgccaattggttagtaatactgttactggtcaccttcctactggttacgaacgtccttctaatgaatttgctgattgctatgttctcatacacctttcaggtggtgcagggcaacgccgatatgttctggaaattccagcgctataacttaattgtggaataccacgagcgcccagctcttgctcccccatttatcctactgagccacctgagcttaactctccgccgtgtgtttaagaaagaggccgagcacaaaagagagcatctggagcgggacctcccagatccactggatcagaaagtagtgacttgggagaccgtacagaaggagaatttcctgtcgaagatggagaagagaagaagggattctgagggagaggttttacgcaagacagcgcatcgtgtggatttcatcgcaaagtatttgggcggtctgagggaacaggaaaaacggatcaagtgtctggagtcacagataaactactgtagcgtcctggtttcaagcgtggccgacgttttggctcaagggggagggcctagatcaagccagcactgtggggaaggctcccagctagtggcagctgaccatcgcggagggcttgacggctgggagcagcccggagctggccagcccccaagtgatacttag

SEQ ID NO: 244627 - DNA, 3402 bp, synthetic construct
  misc_feature 1..3402: note = Description of Artificial Sequence: Synthetic coding sequence
  source 1..3402: mol_type = other DNA
atgctgcggcctcaggtgaaagaggagattatatgcatgatccaaaatacctttaacttctctcttaagcaatcaaaacatttgttccaaatccttatggagtgcatggtacatcgggactgcatcactatctttgatgcggattccgaagaacagcaggacctcgacctcgccattctgaccgccctgcttaaagggacaaacctgtctgcatcagaacagctgaacctggcgatggcctgggatcgagtggacatcgccaagaaacacattctcatctacgaacagcattggaaacctgacgccctggagcaggcaatgtctgatgcactggtgatggatcgggtggatttcgtgaagcttttgatcgaatacggcgtcaacctgcacaggttcctgactatccctcggcttgaagagctctataacactaagcaggggccaaccaacactctccttcaccacttagtgcaggatgtaaaacagcacacactgctgtcaggatacaggatcacactcatagacatcggcctggtcgtagaataccttatcggcagagcgtacagaagcaactatacacgtaaacacttccgtgccctgtacaacaatctttaccgcaagtataagcaccagaggcattccagcggaaaccggaatgagagtgcggagagtaccttgcattcacagttcatcaggaccgcacaaccatacaagttcaaggagaagtctatcgtgctgcataagtctcgtaaaaaaagtaaggagcagaacgtgtcagacgatccggaaagtaccggctttctttacccctataatgatttgctggtctgggctgttctcatgaaaagacaaaaaatggccatgtttttctggcagcacggcgaggaagctacggtgaaagcggtgattgcctgcatactgtatcgcgctatggctcacgaggcaaaggagagtcatatggtggatgacgcctctgaagagctgaaaaactacagcaagcagttcgggcagttagccctggatctgctcgaaaaagccttcaaacagaatgaaaggatggcaatgaccctgttaacatacgaacttcggaactggtcaaatagcacctgcctgaaactggctgtgtctgggggactcaggccatttgtgagccacacctgtacgcagatgctactgaccgacatgtggatgggcaggctgaagatgaggaagaatagctggctcaaaataatcatctcaataatacttccccctacaattttgactctggagtttaagagcaaggccgaaatgagtcacgtaccccaatcccaggacttccaattcatgtggtactactctgatcaaaacgcatcgagctcaaaagaaagcgcatccgttaaagagtatgatctggagagaggccacgacgagaaattggacgagaatcagcatttcggactcgaaagcgggcaccagcacctgccttggacccgtaaagtgtacgaattttacagtgctcctattgtgaaattctggttctacaccatggcttacctagcctttctgatgcttttcacctatacggttctcgtagagatgcaacctcagcccagcgttcaagaatggttggtcagcatttacatcttcaccaatgcaatcgaggtggtacgggaaatctgcatctccgagccgggaaagtttactcaaaaggttaaggtttggataagtgaatattggaacctgacggagacagtggccatcgggctgttttctgccggtttcgtgttgcggtggggcgatccccctttccatacagccggtaggctgatctactgcatcgatatcatcttttggttcagtcgactgctggatttctttgctgtcaatcagcatgcaggaccctacgtgactatgattgcaaagatgacagcgaacatgttttacattgtcatcatcatggctatcgttctgctatcatttggcgtggcgaggaaagctattctttcccctaaagagcccccaagttggagtctggctagggatattgtctttgagccctactggatgatctatggagaggtttatgccggagagatcgacgtgtgttcctctcagcccagctgtcccccaggctcatttctcacgccctttctccaagccgtgtacctctttgtgcagtatataattatggtcaatctgctgattgcattcttcaacaatgtgtatcttgatatggaatccatctcaaataacctgtggaaatataaccggtacagatacatcatgacataccacgagaagccttggcttccaccaccactgatcctgctgtcgcacgttgggctgctcctgcgaaggttgtgttgccaccgcgctccccatgatcaggaggagggcgacgtcggcttgaaactttacctgagcaaggaggatcttaaaaagctgcacgacttcgaagagcagtgcgtcgagaaatatttccatgaaaagatggaggacgtgaattgttcttgcgaagaacggataagggttacctcagagcgagtaaccgaaatgtattttcaactaaaagaaatgaatgaaaaagtatccttcatcaaagattccctattaagcctggattcccaggttggtcatctccaagacctttctgcactgacagtggacacactgaaggtactttccgctgttgatactcttcaggaagatgaggctctgctggcgaagagaaagcacagcacctgcaaaaagctgcctcattcctggtcaaatgtgatctgtgccgaggtattaggatcaatggaaattgctggcgaaaaaaagtatcagtactactctatgcccagctctctgctgcgatctctcgctggaggacggcatccacctcgcgtgcagcgaggggctcttctggaaataactaactccaagcgggaggcaaccaatgtgcgcaacgaccaggaaaggcaagaaacccaatcttctatcgtggtcagtggagttagtcctaatcggcaggctcactcaaagtacggacagttcctgctagtgcctagcaacttgaaacgagtaccattctcggccgagactgttctgccactatctcggccatccgtacccgatgtactggccaccgagcaagatattcaaactgaggtgctggtgcatctaaccggacagactcctgtggtctcagattgggctagcgtggatgagcctaaggagaagcatgaaccaattgcccatttgctggatggacaggacaaagccgaacaagtgctcccaactctgtcttgtacaccagaaccaatgaccatgtccagtcctttgagaaggtaccgcccttttgcacgttctcatagctttcggtttcataaggaagagaaactcatgaaaatctgtaagatcaagagtaaagagtag

SEQ ID NO: 244628 - DNA, 912 bp, synthetic construct
  misc_feature 1..912: note = Description of Artificial Sequence: Synthetic coding sequence
  source 1..912: mol_type = other DNA
atgaaggagcagccagtgctggagcgtctgcagtctcagaaaagctggattaagggcgtttttgacaagcgggagtgctcaactattataccatcaagtaagaacccccatagatgcactcccgtgtgtcaggtgtgtcagaacctgattcgatgctattgcgggaggctgatcggagatcacgcaggcattgattatagttggacaatttcagccgctaaagggaaggaaagtgagcagtggtctgtggagaagcataccactaaaagtcctacggacacgtttggaaccatcaatttccaagatggggaacatactcaccatgccaagtacatccggacatcctatgacacaaaactcgatcacctgcttcatctgatgctgaaagagtggaaaatggaattgccgaagctagtaatttccgtgcatggtggcattcagaattttacaatgccatcgaagttcaaagagatcttttctcagggactggtcaaggcggctgaaacaactggagcatggattataacagagggaatcaacaccggagttagtaagcacgttggtgatgcattgaagtcccacagcagtcactccctgagaaagatctggactgtcggaatacccccatggggcgttatagagaaccagagagatctaataggaaaagacgtggtctgcctataccagactctggataaccctttgagtaaactcacaacactgaatagcatgcacagtcactttatcttatcggacgacggtaccgtcgggaaatatggtaacgagatgaagctgcgacgcaacttagagaagtacctctctctgcaaaagatccattgccgcgagtatcatcgaggctcggtaacccagagcgggtgcaggcctgcagaagtatttcatgggctcccttag

SEQ ID NO: 244629 - DNA, 6068 bp, synthetic construct
  misc_feature 1..6068: note = Description of Artificial Sequence: Synthetic coding sequence
  source 1..6068: mol_type = other DNA
atgaaggaacagccggtgcttgaacggcttcaaagccagaagagttggataaaaggggttttcgataaacgcgaatgttccaccataatcccaagctcaaaaaatccgcacaggtgtactccagtctgccaggtgtgccaaaacttgatccggtgctactgcggaaggctgataggagaccatgcagggatcgactattcatggactatctcggccgctaaaggcaaggagtctgagcaatggtcagtggaaaagcacacaaccaaatcacctaccgataccttcggtaccattaatttccaggatggcgagcacacacaccatgccaaatacattcgcactagctacgacaccaaactggatcatcttttacacttgatgctgaaagagtggaagatggagttgccaaaactcgtcataagcgttcacggtggcatacagaattttaccatgccctctaagtttaaggagatcttctcccagggtttggtgaaagctgccgagaccactggcgcatggattatcactgaagggatcaatacaggcgtgtctaagcacgtgggcgatgctctcaagagccatagctcccattctctgcgcaaaatctggacagtgggtattcctccatggggcgtgatagagaaccagagagacttgatcggaaaagacgttgtgtgcctgtaccagactctggacaaccccctcagcaaactgaccaccttaaactcaatgcactctcatttcatactatctgacgacggcactgtggggaagtacgggaacgagatgaagttgcgccgtaacctagagaagtacctttccctccaaaagatccactgcaggagcaggcagggagtgcccgtcgtcgggttggtcgttgagggtgggcctaacgtgatcctgtccgtgtgggagactgtgaaggacaaggacccagtggtggtctgcgaaggtaccggccgagcagcggacctgctggctttcactcataaacaccttgctgatgaggggatgttgcgcccacaggtgaaggaggagatcatctgcatgattcagaacactttcaacttcagtctaaagcagtccaaacacctttttcaaatcttaatggagtgtatggtgcaccgggattgtatcactattttcgatgctgattccgaggagcagcaggacctggacctggcaatcctgactgccctgctgaagggcaccaacctgtccgcctctgagcagctgaatttggctatggcctgggacagagtggacatagccaagaagcacatcctgatctatgagcaacactggaaaccagacgctctggaacaagccatgtcggacgcactagtgatggatcgggtggattttgtcaagcttctgatcgagtatggcgtgaacctgcatcgattccttaccatcccaagactggaggagctgtacaacaccaagcagggcccaacgaatacgctgctgcaccatctagtacaagacgtgaaacagcacaccctcttgagtggatatagaattaccttgattgacatcggtttagtggtggagtatctcattgggagggcttacagaagtaattacacgcgaaagcatttcagagccctgtacaataacctatacagaaagtacaaacaccaaaggcacagctctggaaacaggaatgagtccgcagaatctaccctgcactcacagtttatccggaccgcccagccctataagtttaaagaaaagtccatagtactgcataagagcaggaaaaagtctaaagaacagaacgtgtcagatgaccccgagagcacaggctttctctatccctataacgaccttctcgtgtgggccgtgctaatgaagagacagaaaatggccatgttcttttggcagcatggcgaggaagcgaccgtgaaggccgtgatcgcctgtattctgtatagagcgatggcacatgaggcaaaagaaagtcatatggtggacgacgcatcagaggagctgaagaactattccaagcagtttggacaactagctttggaccttcttgagaaggccttcaaacagaatgaaagaatggcaatgaccctgcttacttatgagttgcgcaattggagcaattcaacgtgccttaagctggccgtctcaggcggactgagacctttcgtcagtcatacttgcacccagatgctgttgacagacatgtggatgggtcgccttaagatgcgaaaaaattcctggttgaagatcatcataagcattattctcccacctacaatcctgactctagaattcaagagtaaagcagaaatgtcccatgtgccccagtcccaggacttccaattcatgtggtattactctgatcaaaatgccagttcgagtaaagagtccgcaagcgtcaaggagtacgacctcgaaaggggccacgatgagaagctggatgagaatcagcatttcggattagagagtggacaccagcatctcccttggacacggaaggtttatgagttttatagcgctccaatcgtgaaattttggttttatactatggcgtatctggccttcttaatgctctttacctacaccgtactggtagagatgcagcctcagccgagcgtccaggaatggctagtgtccatttatatttttactaacgcgatcgaggtggtccgcgaaatttgcatttccgagcccggaaagttcacccaaaaggtcaaggtgtggattagcgagtattggaacctcaccgagactgttgccattgggctcttttctgctggcttcgtactccgatggggggatcctccctttcacaccgcgggaaggctcatctactgtattgacattatattttggttcagtagactgctggacttttttgccgtgaatcaacacgccggaccttatgtgactatgattgcaaaaatgacagcgaacatgttttacatcgtgatcattatggctattgtgttgctgagctttggagtggccagaaaggctattctcagcccaaaggagcctcctagctggtcgctcgccagagacatagtgttcgagccttactggatgatctacggagaggtgtatgcaggcgagattgatgtttgctcatcacagccaagttgtccaccgggtagttttctaacaccctttctgcaggcagtgtatttatttgtgcaatatattattatggtgaacctgctgatcgcgtttttcaacaatgtgtatctggatatggaaagcatctccaataacctgtggaaatacaaccgctaccgatacatcatgacatatcacgagaaaccttggctcccacctccacttatcctgctttcccatgtgggtctccttctccggcgtctttgctgccatcgggctccacacgatcaggaagagggcgatgtcgggctcaagctttatttatctaaggaagaccttaaaaaactgcacgattttgaggagcaatgcgtggaaaaatatttccatgaaaagatggaagatgtcaattgttcttgcgaggagcgtattagggtgacatctgaacgagtaaccgagatgtactttcagctgaaagagatgaacgagaaggtgtcgttcatcaaagattccttgctgagtctggattcacaggtcggtcatctgcaggacctgagcgccctgaccgtggacacgctgaaggttcttagcgcagtggatacccttcaagaagatgaggcactgctggccaagcgtaagcacagcacgtgcaaaaaactgccccattcctggtccaacgtcatctgtgccgaagtcctgggatcaatggagatcgccggagagaagaaatatcaatattacagcatgccgtcgtccctgctcagatcactggctgggggaaggcaccctcccagggtgcagaggggggcattgctagagatcactaatagcaagagggaggccacgaatgtcagaaatgaccaggaacggcaggagacacagagctcaattgtggtaagcggagtctctcctaatcgccaggcccacagcaagtatggacagtttctcctggtgccatcgaacctgaagcgagttcccttctcggccgagactgtgttgcccctctcacgaccctccgtgcctgatgtgctggccaccgagcaagatattcagaccgaggtacttgtgcaccttacaggacagacccctgtcgtctcggactgggctagcgtagacgagccaaaggaaaagcacgaacccatagctcaccttctcgacggtcaggataaggcggagcaggtgctgcccacactgtcttgtactcctgagccaatgaccatgagttcaccgcttagccaggcgaagatcatgcagacaggaggtggctatgtgaattgggctttctcggaaggcgatgagaccggcgtattctcaatcaagaagaaatggcagacctgcctgccatccacttgcgatagcgattcatctaggtcagaacagcaccagaagcaggcacaggacagctctttaagcgacaatagtacgagatctgctcagtcatccgaatgctctgaggtgggcccttggttgcagcctaacacatctttttggataaatccgctgaggcgatacaggccctttgctcggtcacactctttccgcttccacaaagaggagaagctcatgaaaatttgcaaaatcaagaacctctccggcagcagcgagatcggccaaggagcatgggtgaaagcgaaaatgctcaccaaggatcgcaggctctccaagaaaaagaagaatacacaaggtttgcaggtgccaattattaccgtgaacgcatgctcccagagcgaccagctgaaccccgagccaggagagaattctattagtgaggaagagtatagcaagaactggtttaccgtgtcaaaattctctcataccggagtcgagccctatatccatcagaagatgaagaccaaagaaattgggcaatgtgccatacagatctcggattacttgaagcagtcacaggaagacctgtccaagaacagcctctggaattcaagatcaacaaacttgaaccgcaactcactcctgaaatcttccataggggtcgataagatcagcgcatcccttaagtcaccccaggaaccccatcatcactactcagcgatcgaacggaataatttgatgcgcctctcccagaccatcccttttaccccagttcaattgtttgccggtgaagaaatcaccgtataccgtttggaggaaagtagtccactgaacctggacaaaagcatgtcttcatggagccaacggggacgagctgcgatgattcaagtactgtctcgcgaagagatggacgggggtctcagaaaggctatgagggttgtgtctacatggagcgaggacgacattctgaagcccggacaggtgtttatcgtgaagtcattcctgccagaagtggttcgcacgtggcataagatttttcaggaatcaaccgtcctccatttgtgcctgagagagatccaacagcagcgagctgcgcaaaagctcatttacactttcaatcaggtgaaaccccagacaatcccgtacactccacggttcctggaagtgtttttaatttactgtcacagcgcgaaccagtggttaaccatagaaaagtacatgacgggggagttcagaaagtacaataacaataacggagacgagattacccccactaatacccttgaggagcttatgcttgctttttcgcactggacttatgaatacacacggggagaactgctggtgctggatctgcaaggagttggggagaacctgacagacccaagcgtgatcaaaccagaagttaaacagagtagggggatggtgtttggccctgccaaccttggagaagatgccattagaaattttatcgccaaacatcactgcaatagctgttgcaggaagttaaaacttccagatctgaagcggaatgattattcaccagaaaggatcaactccactttcggactggagatcaaaattgagtctgccgaggagcctccggctagggaaaccggcaggaattcgcccgaagacgacatgcagcttta

SEQ ID NO: 244630 - DNA, 6053 bp, synthetic construct
  misc_feature 1..6053: note = Description of Artificial Sequence: Synthetic coding sequence
  source 1..6053: mol_type = other DNA
atgaccgcccctgttacatctcaaaaatcctggatcaagggagtcttcgataagagggaatgttctacgatcatcccatcaagcaaaaatcctcatagatgcacccctgtctgtcaggtgtgccaaaacctcatcaggtgctattgtggcagattaattggcgaccacgcgggtatcgactattcatggacaatctccgcagcaaagggaaaagagtcagagcagtggtcagtcgagaagcatacgacaaaatcaccgactgatactttcggcactatcaacttccaagacggggaacatactcatcacgcaaagtacattcggacttcttatgacaccaagctggatcacctcctgcacctgatgctgaaagagtggaagatggagttgcccaagctggttattagtgtgcacggcggaatccaaaactttacaatgccgagcaagttcaaggaaatctttagccaggggctggtaaaggctgctgagacaactggggcttggatcattacagaagggatcaatacaggggtgtccaaacacgttggcgacgctctgaaatctcattcaagccactcattgcgcaagatttggaccgtcggcattcctccttggggcgtgatagaaaatcaaagggacctgatcggcaaggatgtagtgtgcttatatcagactctggacaatcccctcagcaagttaacgactctaaacagtatgcactcacactttatcctctctgacgatgggaccgtggggaaatacgggaacgagatgaaactgagacggaaccttgagaaatacctttcgctacagaaaattcactgtagaagtcggcagggcgtgcccgtggtaggactagtggtggaaggcggaccaaatgtaattctgtccgtctgggagaccgtgaaagataaagacccggtcgtcgtctgcgaagggaccggcagagccgcagacttgctcgctttcacgcacaaacaccttgccgacgagggcatgctgcgtcctcaggtaaaggaggagattatttgcatgatccagaatacttttaacttttccttgaagcagagcaagcatctgtttcagattctgatggagtgtatggtacatcgcgattgcatcaccattttcgatgccgattcagaggaacagcaggacctggacctcgccattctgaccgctctgttaaagggcacaaacctgagtgcatcagagcaactgaatttagccatggcatgggaccgagtcgacattgcaaagaagcatattctgatttacgaacagcactggaaacctgatgctctggaacaagcaatgagcgatgcgctggtgatggaccgtgtagacttcgtcaaacttctgatcgaatacggagtcaaccttcaccgttttttgacaattcccagattagaagagctgtataataccaaacagggcccaaccaacactctcctacaccacttggtgcaggacgtcaagcaacacactctgctttccggctataggataactctgatcgacataggcttggtggtggaatacctgatcggccgtgcttatcggagtaactacacgcgaaagcactttagggctctatacaataacctgtaccgtaagtacaaacaccagcgccactcttctgggaacaggaatgagtccgccgagtccaccctgcattcacagttcattcgtaccgcacaaccctataagttcaaggagaagtctatcgtgctccacaagtcccgcaaaaaatcgaaggagcagaatgtttccgatgacccagagtctaccggattcctgtacccatataacgacctgttagtgtgggcagttctgatgaaaaggcagaagatggccatgttcttttggcagcatggcgaagaagcaactgtgaaagccgtaattgcgtgtatcctataccgggcaatggcccacgaggctaaggaatctcatatggtggatgatgctagtgaagagctgaaaaactactcaaagcagttcggccagctggccctggatctcttagaaaaggccttcaaacagaacgaacggatggccatgactttgttgacctacgagcttcggaattggtcgaattcaacatgcttgaaattagctgtcagcgggggacttagaccattcgtgagtcacacgtgcacacaaatgctcctcacagatatgtggatgggacgcctcaaaatgcgtaaaaatagctggttgaagatcattatatccataatcctgcctcccaccattctcactctagaattcaagtccaaggctgaaatgtcccatgtcccccagagtcaggacttccagtttatgtggtactattctgaccaaaatgcctcctcttccaaggagagcgcttccgttaaagaatacgaccttgagagaggacatgatgagaaactggatgagaaccaacactttggtctggagagcggacaccagcacttgccctggactcgcaaggtttatgaattctattcagcaccgattgtcaagttttggttctataccatggcatacttagcctttttgatgcttttcacatacaccgtgttggtggaaatgcagccccagccttctgtccaggagtggcttgtgtcaatttacattttcactaacgccatcgaggtcgtgcgcgagatttgcatctctgaaccaggaaaatttactcagaaagtaaaagtttggatcagtgagtattggaatttaaccgagactgttgcaatagggctgttttctgcagggtttgtgctgcgttggggagacccaccgttccataccgctggccgactaatctattgcatcgatattattttttggttctctcggctccttgatttctttgcggtaaatcaacatgccggaccatatgttaccatgattgccaaaatgactgctaacatgttttatattgtgatcataatggccatcgtgctgctgagcttcggggtggccaggaaggcaatactaagcccaaaggagcctccaagctggtccttggctagagatatagtcttcgagccctactggatgatctatggcgaagtgtatgctggggagattgacgtgtgttctagtcaaccctcttgcccacctgggtctttcctgacaccgttcctccaggctgtctatctattcgtccagtacatcatcatggtgaacctactcatcgcattctttaacaacgtctatctggacatggagagtatttccaataatctatggaagtacaaccggtaccgatatatcatgacctaccacgagaaaccgtggctgccccctcctttgattctgttaagtcatgttggactgttgctgagaagattgtgttgtcatagggcgccacacgatcaggaggagggggacgtcggcctcaagctttacctgtctaaggaagacctgaagaagttacatgactttgaggagcagtgcgtcgagaaatacttccatgaaaaaatggaggacgttaattgctcctgtgaggagcgcatccgagtgactagcgaaagggtaaccgagatgtattttcagttgaaagagatgaatgaaaaagtttccttcatcaaggattccttgttgagcctggacagccaagtggggcacttgcaggatctgagtgcactcacggtggacactctcaaagttctgagcgcagtcgacacactccaagaggatgaagccttgctcgccaaacggaagcactcgacatgtaaaaagttgcctcacagttggtccaacgtcatatgtgctgaggttttagggtcaatggaaattgcgggtgaaaagaaatatcaatattactccatgcctagcagcctcctcaggagtctggccggagggcgacaccctccaagagttcagcggggagcgcttcttgagattaccaactcgaaacgagaagctacgaatgtgaggaatgatcaagagaggcaggaaactcaatccagtatcgttgtctctggagtcagccctaaccggcaagcacattctaaatatggccagttcctcctggtaccatccaatctgaaaagggtgccattcagcgccgaaacggtgcttccgctctctaggccttccgtcccagacgtgctcgcaaccgaacaggacatccagactgaagtgttagtgcatctgaccggccagactcctgttgtctccgactgggcatcagttgacgagcctaaggagaagcacgaacctattgctcatctgctcgacggtcaagataaagcagagcaggtgctgcctacgctctcctgtacccccgaacctatgacaatgtcgtccccgttatcgcaggccaagataatgcaaaccggtggtggttatgtgaattgggctttcagcgaaggcgacgaaaccggagtattctccatcaaaaaaaaatggcaaacctgcctgcctagtacttgtgatagtgatagctccagatctgagcagcatcagaagcaggcgcaggattccagcctatctgacaatagtacacggtccgctcagtcgtcggagtgcagtgaagtcggcccatggttgcagcctaacacatccttctggatcaaccctttacgacggtacaggccattcgcccgttcccactcttttcggtttcacaaggaagagaaattgatgaagatttgcaagataaagaacctctcaggctcaagcgaaatcggtcagggagcttgggttaaggccaaaatgctgactaaagaccggaggctgagtaaaaagaagaagaatacccaaggtctgcaggtgcctatcatcacagttaatgcctgttcacaatccgaccaacttaaccccgagccgggtgaaaattctatctcagaggaagaatattccaagaactggtttaccgtgtccaaattcagccacacaggtgtcgagccatacatccatcagaagatgaaaaccaaagagattgggcagtgcgccatccagatttctgactatctcaaacagtcccaagaggacctctcaaagaactctctctggaatagtaggtccacaaatctaaatcgaaactctctgctgaagagcagcatcggcgtggacaagatctctgccagtctgaagagtcctcaggagcctcaccaccactatagcgccattgagagaaataatctgatgcgtctctctcagacgatccctttcacgcccgtccagctgttcgcgggagaggaaatcacagtttatcggcttgaggagtcgagccccctcaatctagataaatcaatgagtagctggtcccagcggggaagagccgctatgattcaggtcctgtctagggaggagatggacggaggactgagaaaggccatgagagtcgtgtcgacgtggagtgaggatgatattttaaagcctggccaagtcttcattgttaagtcatttttgccagaggtggtacgcacatggcacaagatctttcaggaatccaccgtcttgcacctgtgtctccgagagatccaacagcagcgggcagctcagaaattaatttacactttcaatcaggtaaaaccacaaacgattccatatacaccgaggtttctcgaagtcttcctcatatattgtcactcagcgaatcagtggctgaccatcgaaaaatacatgaccggcgagtttaggaagtacaacaataacaatggggacgagatcacacctacgaatactttggaggagctaatgctggctttcagccactggacctacgaatacacgcggggagaacttctggtgctggatctgcagggcgtgggggagaacctaacggacccatctgtgatcaaaccagaggtgaagcagtctcgcggaatggtgtttggaccagccaaccttggcgaggatgccatacgcaatttcattgctaagcatcactgtaactcctgctgcaggaagctgaagctccctgacctgaagagaaacgactattccccagagcgcatcaattctacgtttgggctcgagatcaaaattgagtccgcggaagaaccgccagcccgtgagacaggcaggaatagtcctgaggacgatatgcagctgta

SEQ ID NO: 244631 - DNA, 5843 bp, synthetic construct
  misc_feature 1..5843: note = Description of Artificial Sequence: Synthetic coding sequence
  source 1..5843: mol_type = other DNA
atgaaggaacagcctgtgctcgaacgactccagtcacaaaaaagctggattaaaggggtatttgacaaacgcgaatgtagcacaataataccctcctctaaaaaccctcataggtgcacccctgtctgtcaggtgtgccagaacctgattcggtgttactgcggtcgactgataggcgaccatgcgggtatcgactactcttggacaatatctgcagctaaaggcaaagagtcagagcagtggtcggtcgaaaagcatactactaagtctccaacggatacttttggaaccatcaacttccaggacggcgaacatacgcatcacgctaagtacattcgcactagctatgacacaaagttggaccacttgcttcacctgatgttaaaggagtggaaaatggagctcccaaagctggttatttccgtccacggcggaattcagaacttcacgatgcccagtaagttcaaggaaattttctcacaggggctcgtgaaagccgctgagactacaggcgcttggataatcaccgagggcatcaataccggagtgtccaagcacgttggcgacgctctaaagagccattccagtcattctcttcgcaaaatttggactgtcggaatccccccttggggggtgatcgaaaatcagagagacttaatcggcaaggatgtggtctgcttgtaccaaacattggacaaccctctgagcaagcttacaaccctgaactctatgcatagccactttatcctcagtgatgatgggacggtcggaaaatacggtaacgaaatgaagctcagaagaaacctggagaagtaccttagccttcaaaaaatccactgcagatcacggcaaggcgtccccgtagtgggcctagtggtggagggtggccctaatgtgatcctcagcgtgtgggagactgtgaaagacaaggatccagtcgtggtgtgcgagggtacagggagagccgcagatcttttggccttcacccataagcacctggcagacgaaggaatgttgaggcctcaggttaaggaagaaataatctgtatgattcaaaatacttttaactttagccttaaacaatctaagcatctgttccaaatactgatggaatgcatggttcatagggactgcatcacaatcttcgacgccgactcagaagagcaacaggatttggacttggccatacttaccgcactgcttaagggcacgaatctgagtgccagcgaacagctaaatctagcaatggcgtgggatcgggtggatatcgcaaagaaacacattctgatctatgagcagcactggaaacccgacgccttggagcaagccatgtcagatgcacttgttatggacagagtggatttcgtaaaactcctaatcgaatacggtgtgaacttacacagattccttactatacctaggctggaggaactgtataacacaaaacaaggcccaactaacaccctccttcaccatctggttcaggacgtcaaacagcacactctgttgagtggctaccgtattacattgatcgatattggtttggtggtagagtacctgatcggcagggcataccgctcgaattacacacggaagcactttagagccctctataacaatctctatcgaaaatacaagcatcagcgtcactcgtccggtaatcgcaatgagagcgcagagagcaccctgcatagccagtttattagaacagctcagccttataaattcaaagagaagtcgatagttttgcataagagccgcaagaagtcaaaagagcagaatgtgagcgatgacccagagagcaccggattcttatatccttacaatgacctcctggtgtgggcagtgctgatgaaacgccagaaaatggcgatgttcttttggcaacacggcgaggaggccacggtgaaagccgtgatcgcttgcattctttaccgagctatggctcatgaggcgaaggagagccatatggtggacgacgcctctgaggagctgaagaattattcaaagcagttcggtcagcttgcactggatttactagaaaaggccttcaagcagaacgaaagaatggccatgactctcctcacgtacgaattacgaaattggtcaaacagcacctgcctcaagcttgctgtttcggggggtctgaggccttttgtgtcacatacatgcacccaaatgctcctcactgacatgtggatgggacgcctcaagatgcggaagaactcctggctgaaaattattatttccatcatcctcccacccacgatcctgaccctggaattcaaatcaaaggccgaaatgagccacgtgccacaaagtcaggacttccagttcatgtggtactactccgatcagaacgcctcctcatctaaagagagtgcctccgtgaaggagtatgacctcgagcggggtcacgatgagaagttggatgagaatcagcactttggcctcgagagcggacatcagcacttgccttggacgcgcaaggtatacgagttttactcggccccaatcgtgaagttttggttttataccatggcctatctcgcctttcttatgctctttacatatactgttctcgtggagatgcagccacaaccaagcgtccaggagtggttagtgtccatatatatctttacgaacgccatagaggtcgtgagagagatctgtattagcgaacccggaaagttcacccagaaggtgaaggtctggatctctgaatactggaatctgaccgagacggtggctattggacttttcagtgccggtttcgtcctgaggtggggagatccccctttccacaccgcaggaagattaatctattgcatagacatcattttctggttttccagacttctcgatttttttgccgtcaatcaacatgccggtccctatgtgactatgatcgctaagatgactgctaacatgttttatatcgtgattatcatggccattgttctgctatcctttggcgtcgctaggaaggccattctgtccccaaaagagcctccctcctggtcactggcaagggacattgtgttcgagccctactggatgatatacggtgaggtgtatgccggtgagatagacgtctgcagctcgcaaccctcatgcccacctgggagctttctgacaccctttctgcaagccgtgtatttatttgtgcaatacattattatggtaaacctcctgattgcatttttcaataatgtgtatctggatatggagtctatttccaacaatttatggaaatacaatcgttatcgatacattatgacttatcatgagaaaccatggctgccgccacctctgatactgctcagtcacgttgggcttctgttgcggaggctttgttgtcacagggcccctcacgatcaggaggagggagacgtggggctgaagctttacctcagtaaggaagaccttaagaagttgcacgacttcgaagaacagtgcgtcgagaaatatttccacgaaaaaatggaggacgtgaactgttcttgtgaggaacgaattagagttacctcagagcgcgtcacggaaatgtattttcagcttaaggagatgaacgaaaaagtctcatttatcaaggactccctgctgagcttggactcccaggtgggccacctccaggatttaagtgcactcacagtggacaccctgaaagtgcttagcgcagttgacacattgcaagaggacgaagctttgctggctaagaggaagcacagtacatgtaagaaattgccacactcttggtccaacgtgatctgtgccgaagtcttgggctccatggagatcgctggggagaagaaataccagtactacagcatgccctccagtttgctccggagtctggccggtggacgtcatccaccccgagtgcagaggggggctctcctggaaataacaaattctaagcgcgaagctaccaatgtgcggaacgatcaggagagacaggagacccaatcttccatcgttgtctctggcgtttctcctaaccgacaggcccatagtaagtacggccagttcctcctagtccccagcaatctgaagcgtgtgccattttcagccgagacggttctcccacttagtcggccttcagtgcccgacgtgctggccaccgaacaagacatccaaacagaagtgttagtgcatctaactgggcagactccagtagtgagcgactgggcttccgtggatgaaccaaaggaaaagcacgaaccaatcgcacacctactggatggacaggacaaggcagagcaggtattgcccaccctgtcatgcacccctgagcctatgactatgtcctcccctctgtcccaggccaaaatcatgcaaactggcggaggctatgtgaactgggccttctccgaaggtgacgagactggcgtattctctatcaagaaaaagtggcagacttgcttgccaagcacgtgcgatagcgattcctcccgaagtgaacaacaccaaaaacaggcccaggactcgagtctgtcagataatagcacccggtcagcccagagttcagaatgttctgaggtgggaccttggttacagccgaacacatcattctggattaatcctttgcgccgttaccggcctttcgcaagatctcactcttttagattccataaggaagagaagctcatgaaaatttgtaagatcaagaacctgtctggaagctcagagattggccaaggcgcatgggtgaaggcaaaaatgctaactaaagacaggagactaagcaaaaagaaaaagaatacccagggcctacaggtccctattatcacagttaatgcttgttctcagagcgaccaattaaaccctgagccaggtgagaattcaattagcgaggaagaatactcaaaaaattggttcactgtctcaaaattcagccataccggggtggaaccttatatccaccagaaaatgaagacgaaagagatcggacaatgtgctatccagatatctgattatctcaaacagagtcaagaagatctctccaaaaatagcttatggaatagtcgctccaccaacctcaaccgcaacagcctgcacgtcataaagatgccaatatccagcctcatctctgagatttcagcgagtttaaaaagcccccaggaacctcaccatcactactctgcgatcgagcggaacaacctgatgcgcctgagtcaaacgatcccctttacccctgtccagctgttcgcgggtgaagaaatcaccgtataccgcctcgaggaatcttctcccctcaacctggacaaatctatgtcttcatggtcgcagcggggacgagccgctatgatccaagtgctctctagagaggaaatggatggtggcctgcggaaggcgatgagagtggtctctacctggagtgaggacgatatactcaagccaggccaggtgttcatcgttaaatccttcctccccgaggtcgtgcgaacatggcacaagatattccaggaaagcactgttctccacctctgccttagagaaatacagcagcagcgcgcagctcaaaaactgatctataccttcaatcaggtaaagcctcagaccattccctacacaccacgttttctggaggtattcttgatctactgtcacagcgcaaaccagtggctcaccatcgaaaagtatatgaccggcgagttccgcaagtacaataataataatggggacgagataacccctactaatacattggaggagctgatgctagccttctctcactggacatacgagtataccagaggggagctcctggtgcttgacttgcaggctctgtggttctgggactccatgcttaaagccagattgggaggctggagaatgta

SEQ ID NO: 244632 - DNA, 1707 bp, synthetic construct
  misc_feature 1..1707: note = Description of Artificial Sequence: Synthetic coding sequence
  source 1..1707: mol_type = other DNA
cgggaaagtccacacccagcgctactgcagtcgcagaagagctggatcaaaggcgttttcgacaagcgcgagtgcagcaccatcatcccctctagtaaaaacccgcataggtgtaccccagtatgccaagtgtgtcaaaacttaattcgctgctattgcggcagactgattggtgatcacgccggaatagattacagctggactatcagcgccgcaaaggggaaggagtccgaacagtggtccgtcgagaaacacacgacgaagtctccaaccgacacattcgggaccattaattttcaggatggggagcatacacaccacgcgaagtatattaggacatcgtacgatactaagctggatcatctgttgcacctgatgttaaaagagtggaaaatggagctgcccaagctcgtcataagcgttcacgggggaatacagaatttcacaatgccctctaaattcaaggagatcttttcccagggattggtgaaggctgccgaaaccacaggagcctggataatcaccgaaggcattaacacgggagtctcgaagcatgtgggagacgccctgaagtcccactcttctcactccctgcggaagatttggactgtgggaatccctccatggggagtcatcgagaatcagcgggacctcattggcaaagacgtggtttgtctgtatcagaccctggacaatcccttaagcaaacttaccactctcaatagcatgcattctcactttatcttatccgatgatggtaccgtcggcaaatatggcaacgagatgaagttaaggaggaatctggaaaagtacctgagtctccaaaaaatacactgcccaggcgaggagatcaccgtctaccgcttggaagaatcctctcctctgaatttagacaagtcgatgtcctcatggagtcaacggggtcgggcagcaatgatccaggtgctgagtcgagaggagatggatggtggcctgaggaaggctatgagagtcgtgtccacatggagtgaggatgacatcctgaagcccggtcaggtattcattgtgaagtcgtttttgccagaagtagtccgaacttggcacaagatcttccaagaatccactgtcttacacctgtgtctgcgggagatccagcagcagagagccgctcagaaactcatttatacattcaaccaggtgaagccccagacgataccatatacacccaggttcctggaggtgtttctaatttattgccattcagcaaatcagtggctcaccatcgaaaagtacatgacaggtgaattcaggaaatataacaacaacaatggcgacgagatcacccctactaacaccctggaggagctgatgctggccttctcccactggacttacgaatataccaggggggagttattggtacttgaccttcagggagttggcgaaaatttgactgacccctcagtgataaagcccgaggtgaagcaatctcggggaatggtgttcgggccagccaacttaggggaggatgccatacggaactttattgccaagcaccactgcaatagttgctgtagaaagctgaagctgcctgatcttaagcgcaatgactacagtccagagagaatcaacagcaccttcgggttggaaatcaagattgagtcagctgaagagcctccagcaagagaaactggtcgcaactctcctgaggacgatatgcagctatag

SEQ ID NO: 244633 - DNA, 2580 bp, synthetic construct
  misc_feature 1..2580: note = Description of Artificial Sequence: Synthetic coding sequence
  source 1..2580: mol_type = other DNA
atgaaagaacagccagtattggagcgactgcagtcacagaaaagctggatcaagggggtattcgacaagcgcgagtgttccaccatcatccctagctctaagaatcctcatcggtgcacacccgtctgccaggtgtgtcagaatctgatcagatgttattgcgggagactaataggcgaccacgcaggaatagattattcttggaccatttctgccgctaaggggaaggagtccgagcagtggtcggttgagaagcatacaaccaaatcaccaaccgacaccttcggcacaattaatttccaggatggcgaacatactcaccacgctaagtatatcagaacatcatacgataccaaattggatcacctgctacatctcatgctgaaggaatggaagatggagctgcctaagttggtcatctcagtgcacgggggtattcagaattttacgatgccctccaaattcaaggagatctttagtcaaggcctggtgaaagcagccgaaactaccggagcctggattatcaccgaaggtatcaacacgggggtctctaaacatgtgggtgacgcactgaaatctcactccagccactccctgcgcaaaatttggacggttggtattcctccgtggggagtgattgaaaatcagcgcgacctgattggaaaggatgtggtttgcctttatcaaactctggataatcctctctcaaaactgactacattgaactccatgcacagtcactttattctgtctgatgatggaaccgtcgggaagtacggaaacgaaatgaagctccggaggaatctggagaaatacctcagtctgcaaaagatccattgcagatctagacagggtgtacccgtagtcggtctggtggtcgagggtgggcctaacgtcatcctgagtgtatgggagacagtgaaggataaggatccagtggtagtctgcgagggtacggggagggccgcagacttgttggcatttacccataagcacctggccgacgagggcatgttgcgtccccaggtcaaagaagagatcatttgtatgatccagaatacctttaatttcagcctgaagcagtcgaagcatcttttccagattctcatggagtgtatggtccacagagactgcatcaccatcttcgatgccgactcggaagaacagcaggatctcgaccttgccatcttgacagccctcctgaaaggcacgaacctatcggcgagtgaacagctaaacctcgccatggcatgggaccgagtcgacatagctaagaaacatattctcatttatgagcagcactggaagccggacgctcttgagcaagccatgtctgatgctctggttatggatcgcgtcgattttgtgaagcttctgatcgagtatggcgtaaatctccataggtttttgacaattccacgactggaggaactgtacaatacaaagcaggggcctactaatacattactgcatcacctagtgcaagatgttaaacaagatttgagcaagaacagcctttggaactctcgtagcacaaatctaaaccgcaactctttacatgtgatcaagatgccgattagctcgctgatttcagagatttccgccagccttaagagtccgcaggaaccccaccatcactactccgcgattgaaaggaacaacctgatgcgtctgagtcagaccattccatttactcccgttcagttgttcgccggagaagaaattacggtgtaccgattggaggaaagctcccctctgaacctggataaatcgatgagttcttggagccaaagaggtagagccgctatgatccaggttctgtctagggaggagatggacggaggactcagaaaggcaatgcgtgtagttagtacgtggagcgaagatgatatacttaagcccggacaggtgttcatcgtcaagtccttcttaccggaagtggttaggacctggcataagatttttcaagagagcacagtgctgcacctgtgcttgcgtgagatccagcagcagcgggctgcacagaagttaatatatacctttaatcaagtcaagcctcaaaccatcccttatacgcctagatttctggaagtgttcctcatctattgtcatagcgctaaccagtggctcacaatcgaaaagtacatgacaggcgaatttagaaagtacaataataacaatggtgacgagattacaccaaccaatacactggaggagcttatgctggctttctctcactggacctacgagtacactcgcggagaactcctagttctagacttacagggggtgggcgaaaacctaactgatccctcagttattaaacccgaggtcaaacagtcccgcggaatggtttttgggccagccaacctcggcgaggacgctataagaaatttcatcgccaagcaccactgcaacagttgctgcagaaaactaaaactgcccgatcttaaaaggaatgactactcaccagagcggatcaactccactttcggcctggaaattaagatcgagagcgccgaggagccacctgcccgagaaaccgggagaaacagtcccgaggacgatatgcagctgtag

SEQ ID NO: 244634 - DNA, 2934 bp, synthetic construct
  misc_feature 1..2934: note = Description of Artificial Sequence: Synthetic coding sequence
  source 1..2934: mol_type = other DNA
atgaaagagcagcctgtgctggagagactgcagtctcaaaaatcctggataaaaggagtgttcgataaacgcgaatgctccacgatcatcccttcatctaaaaatccacatcgctgtacacctgtttgccaggtgtgccaaaatctgatccgctgctactgtggcaggctgattggagaccacgccggaattgactattcctggactataagtgccgctaagggaaaggagtctgaacagtggagcgtggaaaaacatacaacaaaaagcccaacagatacctttggcacaatcaacttccaggacggtgagcacactcaccacgctaaatatatccgaacttcatatgatacgaagctggaccatctgttacacttgatgctgaaggagtggaagatggaactaccaaaattggttatctcagtgcacggaggtattcagaacttcacaatgccctccaagttcaaggaaatcttcagccaggggttggtaaaagccgctgaaaccacaggcgcttggataatcaccgaggggatcaatactggagtgtccaagcatgttggggacgctctgaagtcacattcctctcacagcctccgtaagatatggactgtgggaatccccccatggggagtgatcgagaatcaacgcgacttgataggaaaagacgtagtatgcctgtaccaaactttggacaacccactctccaaactgacgaccctgaactctatgcactcacatttcatcctgtccgacgatggcacagttgggaagtatggcaatgagatgaagctacgcagaaacctagagaagtacttgtccctgcagaaaatccactgcaggtctcgccagggtgtgcccgttgtgggcttagtcgttgagggaggacccaatgtcatcttgagtgtctgggagacagttaaggacaaagacccagttgtggtgtgtgagggtacaggtcgggctgccgacctgctggcttttacccacaagcacttagccgacgaaggaatgctcaggccccaggttaaagaggagatcatctgcatgatccagaatactttcaactttagccttaaacaaagtaagcacctatttcagatactcatggaatgcatggtgcatcgggactgtatcacaatcttcgatgcggatagtgaggagcagcaagacctcgatttggccatcttgactgcgctgttaaaagggactaatctgtctgcttctgaacagttgaacttggctatggcctgggatcgcgtggatatcgccaaaaaacacattttaatctatgaacagcactggaaaccagatgcccttgagcaggctatgagcgatgcacttgtaatggatagagtggactttgtcaagctccttatagagtacggggttaatctccaccggtttttaactattcccaggctcgaagaactgtacaacacaaagcaaggccctaccaacacattgctgcaccatctcgtgcaggatgtgaagcagcatacactactttctggatacagaattacactcattgatattggccttgtagtagaatacctaattgggagggcatacagatccaactatacccgcaagcacttccgagccctgtacaataatctatatcgaaagtacaaaataatcacagtgaatgcatgtagccaatccgaccagttgaatccagaacccggtgagaactcaatatccgaggaggaatactccaagaactggttcacagtgtctaagttttcccataccggagtagagccatatatacatcagaagatgaaaacgaaggaaatcgggcaatgcgccattcaaatttctgactacctgaagcagtcccaggaagatctgtcgaagaactctctttggaactcgaggtcaaccaatctgaaccgtaattccctccacgtcatcaaaatgccgatctcatcactgattagcgaaataagcgcctctctaaagtcgccccaggaaccgcatcatcattacagcgccattgagaggaacaacttaatgcgactgtcccagaccatcccttttacacccgtccagcttttcgccggagaggagattacagtttacaggcttgaggaaagtagcccattgaacctcgataagtcaatgtcctcgtggtctcagagagggagggcagccatgattcaggtcctgtcaagggaggagatggatggcggactgagaaaggcaatgcgtgtggtctccacatggtccgaagacgatatactgaagcccggacaggtcttcatcgtcaagtcatttcttccagaggtggtccgcacctggcacaaaattttccaagaatcaacagtcttacatctgtgcctgagggaaatccagcaacaaagggccgctcagaagcttatctataccttcaaccaagtgaaaccccagaccatcccttatacaccgaggttccttgaggtgtttctgatttattgccacagcgccaaccagtggctgaccatcgaaaaatatatgacgggcgaatttaggaagtataacaataataatggcgacgaaataactcccaccaatactctggaggaactcatgctggccttttcgcactggacatacgagtacactagaggggaattactcgtcctcgaccttcagggcgtaggggagaatttgactgatccaagcgttattaaacccgaagtcaagcagtcacggggaatggtgtttggcccagccaacctcggcgaggatgctataagaaacttcattgccaagcaccactgcaattcctgctgtagaaaactcaagctacccgacttgaagcgcaatgattactccccagaacggattaatagcacctttggccttgaaatcaaaatcgaatccgccgaagaaccccctgccagagaaacagggaggaactctcctgaggacgacatgcagctgtag

SEQ ID NO: 244635 - DNA, 3402 bp, synthetic construct
  misc_feature 1..3402: note = Description of Artificial Sequence: Synthetic coding sequence
  source 1..3402: mol_type = other DNA
atgcttcggcctcaggtcaaggaggagataatctgtatgatccaaaacacatttaatttttctctcaaacagtccaaacacctgttccaaatcctcatggaatgcatggtgcacagggattgtatcacaatctttgacgcagactcggaggagcaacaggacctcgacctggccatccttactgccttgctcaagggaacaaacctcagcgcgtccgaacagctgaatcttgccatggcctgggacagggtcgacatcgccaaaaaacacatcttgatatacgagcaacattggaagcctgatgctctggagcaggcgatgtccgacgccctggtaatggaccgggtggacttcgtaaaactgctgatcgaatatggagtcaatctgcacagattcctcacgatccccagactggaggagctgtacaacaccaagcaaggtcccacaaacaccttactccaccatctggtgcaggatgtaaagcaacacaccttgttgagcgggtatcgcataaccctcatagacattgggcttgtggttgagtacctcatcggacgtgcctatcggagtaactacacacgcaagcattttagagccctgtacaataacttgtaccggaagtacaaacatcagagacactcctccggcaacagaaatgaatctgctgaaagcaccctccactctcagtttataaggactgctcagccctataagtttaaagaaaaaagcatagtgctccataaatcccggaagaaaagcaaggagcagaatgtcagcgacgaccctgagagcactggcttcttatacccatataatgatctcctcgtctgggcagtgctgatgaaacggcagaaaatggccatgttcttctggcagcatggggaagaagctactgtcaaggcggtgattgcatgtattctgtatagggcaatggcccacgaagccaaagagtcacatatggtcgacgacgcctcagaggaactcaagaactattcaaaacagtttggtcaattggctctagacctgctagaaaaggccttcaagcagaatgaacggatggcgatgacgctgctcacctatgagcttcgcaattggagcaactccacctgcctgaaattagcagttagcggcggtcttaggcctttcgttagccacacctgtacacagatgctgctaactgacatgtggatgggcaggctcaaaatgagaaaaaacagctggctgaagattatcatcagcatcatccttccacctaccattctcacactcgagttcaagagtaaagctgagatgagccacgtgcctcaaagtcaggattttcagttcatgtggtattactcagatcaaaatgcctcctcttccaaagagagtgcgtcggtcaaggagtacgatctagaaaggggacacgacgagaagcttgatgagaaccaacattttggcttagaatcaggccaccagcatctcccatggacacgcaaagtgtacgaattttacagtgcccctattgttaagttctggttctacaccatggcctatctcgcattcctcatgctctttacctacacagtgctggtcgaaatgcaaccacagccaagtgtgcaagaatggctcgtgagcatttatatctttaccaatgcaatagaggttgtgcgcgaaatatgtatctcggaaccaggtaagtttactcagaaggtgaaggtttggatctctgagtactggaacttgacggagacagtcgcgattggccttttttcagctggctttgtgctgcgatggggagacccaccattccatacagctgggcgactcatatactgtattgatattattttctggttttcacgccttttggacttcttcgcagtcaaccaacacgccggtccatacgtgacgatgatcgcaaagatgaccgcaaatatgttctacattgttataatcatggccatcgtgctcctgagttttggtgtagctagaaaagcgattctgtcgccgaaagaaccaccaagttggagtctggcaagagacattgtattcgagccttactggatgatatacggcgaagtatacgcgggagagatcgatgtatgcagctcccaaccctcatgtccgccaggttccttcctgacaccttttctccaggctgtgtacctattcgtgcaatacatcattatggttaacttacttatcgccttttttaacaatgtatatctcgacatggagtcaattagcaacaatttatggaagtacaaccggtataggtacattatgacctaccacgaaaaaccatggctgccacctccacttatcctgctctctcatgtgggattgttgttgagacggctgtgttgccatcgcgctccacatgaccaagaagagggcgacgtgggcttgaagctctatttaagtaaggaagaccttaagaaattacatgatttcgaggagcagtgcgttgaaaaatatttccacgaaaaaatggaggacgttaactgcagttgcgaagaacgcatccgggtgacgtccgaacgggtcacagagatgtatttccagcttaaggagatgaacgaaaaggtgagcttcatcaaggatagcctgctctctctggacagccaggtaggtcaccttcaggacctcagcgcactgaccgtcgataccctcaaagtcctaagcgccgtcgacacgcttcaggaagacgaagctctgctggctaagcggaagcacagcacttgcaagaagctgccccacagttggtcaaatgttatttgcgccgaggtgctggggtccatggaaatagccggagagaagaagtatcagtattacagtatgcccagctctcttttgaggagcctggctggcggacgacaccctcctcgggtgcagcgaggggctctgttagaaattaccaactccaagcgtgaagctacaaatgtgcgcaatgaccaggagcggcaggagacacagtcgtccattgtggtctccggagtgtcccctaatcggcaggcccacagcaagtatggtcagttcctgctggtaccgtcaaatcttaagcgcgtgcctttcagtgcagagaccgtgctgccactgtccaggccaagcgtccctgacgtattggcaactgaacaggacatccagactgaagtattagttcatttgacaggccagactcccgtcgtgtcagactgggcgtctgtggacgagcctaaagagaagcatgagcccattgctcacttgctcgatgggcaggataaggccgaacaagtcctgccaacattaagctgtactcccgagcccatgactatgagcagcccactgtctagataccggccttttgccaggagccattcctttagattccacaaagaagagaagctcatgaaaatttgcaagattaagtctaaagagtag

SEQ ID NO: 244636 - DNA, 6054 bp, synthetic construct
  misc_feature 1..6054: note = Description of Artificial Sequence: Synthetic coding sequence
  source 1..6054: mol_type = other DNA
atgattattttaagtaagagccagaagagctggataaaaggagtcttcgacaagagagagtgttccacaataataccttcttctaaaaacccgcatcgctgcacccctgtatgtcaagtttgtcaaaacttgatcaggtgttactgcggtagactaattggagatcatgctggaattgactactcttggaccattagcgctgctaagggcaaggaatcagaacagtggagtgtagagaaacacacaactaaatctccgacagacacattcggcacgattaattttcaagatggcgagcatacccaccatgcaaaatacatccgcacatcctacgacacaaagctagatcacttgcttcatctgatgttaaaagagtggaagatggagctgcccaaactagtgatcagcgttcatggagggattcagaatttcacaatgccatctaaatttaaagagatattcagccagggacttgtgaaggccgcagagaccaccggtgcatggattattactgaagggattaatacgggcgtgtccaaacatgtgggggacgccctgaagtcccactccagccacagcctgcgcaagatctggacagtcggcattcctccttggggcgttatcgagaaccagcgcgacctgatcggaaaggatgttgtgtgtctgtaccagaccctggataaccccctgtccaagctgacaaccctcaactccatgcactcacactttatactgtccgacgacggcacggtgggcaagtatggtaacgagatgaaactccgcaggaatctggaaaagtacctgagcctacaaaagatccactgcaggtcacgccaaggagttcccgttgtgggattggtggtggaggggggtcctaatgtcatactgtccgtttgggagacggtgaaggataaggacccagttgtggtgtgcgagggcaccggcagagcggctgacctactggccttcacacataagcacctcgccgacgagggaatgttgcgaccccaggttaaggaggagatcatctgtatgattcagaatactttcaacttcagcctgaaacaatcgaaacatctgttccaaatcctgatggaatgtatggtccatagggactgtatcaccatctttgacgctgactcggaggaacagcaggatctagatctggccatcctgaccgcactccttaaaggcaccaatctgtccgccagtgaacaactgaacctagccatggcctgggacagggtcgacatcgcaaagaagcatattttaatttatgaacaacactggaagcctgacgcactcgagcaggccatgagtgatgccctggtgatggatcgcgttgatttcgttaaactgctgattgagtacggggtgaatctgcatagattcctgaccatacccagacttgaggagctatacaatacaaagcagggaccaactaacacgctcttgcaccacctcgtgcaggacgtgaagcaacacacccttcttagtggatacaggattactctgatagatattggattggtggtggagtatcttattgggagggcctatagaagtaattacacccggaaacacttccgagccctgtataacaatctgtatagaaagtataagcaccagcgtcactcttctggcaacaggaacgaaagtgccgaaagcacactgcatagtcaatttattcggactgcccaaccctataagtttaaagagaaaagtatagtactccacaaatctcgaaagaaatctaaagagcagaatgtgtctgacgatcctgaaagcaccggctttctatacccatataacgatctgctcgtgtgggcggtcctgatgaagaggcagaagatggccatgtttttttggcagcatggcgaagaggccaccgtcaaggccgtgatcgcttgtatcctgtatcgcgctatggctcatgaagcgaaggagtctcacatggtggacgacgcatccgaggaactgaagaactactccaagcaatttggccagctggccctagatttactggagaaggcatttaagcagaacgagcggatggcaatgaccctgttgacctatgagctgcggaactggagcaacagcacttgccttaaactcgcggtctcagggggattacgtcccttcgtcagtcatacatgtacgcagatgctgttgacagacatgtggatggggaggcttaagatgcgaaagaactcctggttgaagattatcatcagtatcatcctgccgccaacgattctcactctggagtttaaatcaaaagcggaaatgagtcatgtcccccagagccaggactttcaatttatgtggtactatagcgaccagaacgcttcctctagcaaagaatctgcaagcgtgaaagaatacgatttggagcgaggtcatgacgaaaagttagacgaaaaccagcacttcgggctcgaaagtggccaccaacatcttccgtggacaagaaaggtatacgagttttactccgcgcctattgttaagttctggttttacacgatggcttacctcgcctttttaatgctgtttacttacacggtgctggtagagatgcagcctcaaccaagcgtccaagaatggctggtctccatttatatattcactaatgctatagaggtggtgagggaaatctgtataagtgaacccggaaagttcacccagaaagtcaaagtttggatcagtgagtattggaatctcacagagacagttgccattgggcttttctccgcgggttttgtgctgagatggggtgatccaccctttcacacagctggccgtcttatctactgcatagatatcatattttggtttagtaggctcttagacttcttcgccgtaaatcagcatgcaggcccatatgtgaccatgattgctaaaatgacagccaatatgttctacatcgttatcattatggccatcgttcttctcagtttcggagtcgccaggaaggccatcctgagtcctaaggagccgccatcttggagtctggcacgcgatattgtgtttgaaccgtactggatgatctacggcgaagtttacgccggagagattgacgtatgtagttcacagccgtcctgtccaccaggatcattcctgacccccttccttcaggcagtttacctgtttgttcaatacattattatggtgaatcttctcatcgcatttttcaacaacgtatatctagacatggaatcaatttccaataatttgtggaagtataatagatatcgctacattatgacttatcacgaaaagccttggcttcccccacctctaatcctcctgtcccacgtgggattgttgttgagaagactgtgctgccatcgcgcacctcacgatcaggaggaaggagatgtgggtctaaagctgtatcttagcaaggaagatctcaagaaactgcacgatttcgaggagcagtgtgtggagaagtacttccacgaaaaaatggaggacgttaattgttcatgtgaagaaagaatccgggtgacctctgaacgcgtgacggaaatgtactttcagctgaaggaaatgaacgagaaggtgagcttcattaaagacagcctacttagcctggatagccaggtcggccatctacaggatctctctgcactcacggtggatactctcaaagtgctgtctgccgtggatacgttacaggaagatgaggccttgctggcgaaacgcaaacattccacctgtaagaagctcccacactcttggtccaatgtgatttgcgccgaagtcctgggttctatggagatagccggtgaaaaaaaataccagtactactctatgccctccagcttactgcgatccctggctggagggaggcatccgcctagagtgcagcgtggagcactgttagagattacaaatagcaagagggaggctaccaatgtgcggaatgatcaggaaagacaagagacacaatcttcaattgtggtctccggggtgagtccaaatcgtcaggctcactctaagtacggacagtttctgcttgttccctcaaacttgaaacgggtgccattctctgcggagaccgtccttcccctcagcaggccctctgtgcctgatgtgctcgccacagagcaggacatccaaaccgaggtgctggttcacttaaccggccagactccggtggtgtctgactgggcctcagtagatgaacccaaagaaaagcatgagcctatcgctcatctgctggatggccaggataaagctgaacaagtgcttcctaccctgtcatgcacccccgagcccatgacaatgtcatcccccctgtcccaggccaagatcatgcagacaggcggaggatacgtgaattgggctttcagtgaaggtgatgagaccggagttttctccattaagaagaagtggcagacatgtctaccatcaacatgcgacagtgattctagccgttcagagcagcatcaaaagcaggcacaggactcaagcttgtcagataacagcactaggtccgctcaatcctcggaatgctcagaggtcggcccatggttgcagcctaatacatcgttctggattaatccactgcgtaggtatcgcccatttgcacgtagccactcattcaggttccacaaggaggagaaactgatgaagatttgcaagatcaagaatctctcaggctcgagcgagatcggccagggggcttgggtgaaggccaaaatgcttacaaaggaccgtaggctcagcaaaaagaaaaagaatacacagggtctacaagtgcctattattacagtgaatgcatgctcacagtccgatcaactgaacccggagccaggtgaaaacagcatctcagaagaggagtacagtaaaaactggtttaccgtcagtaagttctcccacacgggggttgaaccttacatccatcagaagatgaaaaccaaggaaataggccaatgcgcaatccagatctccgattatctaaagcagtctcaggaggacctgtccaagaactccctgtggaactcacgctctacaaaccttaacaggaattcactgctgaagtcctcaattggagtggacaaaatcagtgcctcactgaaatctccccaagagccccaccaccattattcagcaatcgagcggaataatctcatgcggctatctcagacaattcccttcaccccagtccagctgttcgcaggagaagaaataactgtgtaccgcctggaggagagctccccccttaacctggataagagcatgtcctcctggtctcagcggggacgcgctgctatgatccaggtcctgtcgagggaagaaatggatgggggtctgcggaaagcaatgcgggtggtgagcacatggtctgaggacgatatactgaagcctggccaggtttttattgtcaaaagcttcctgcccgaagtggttaggacctggcataagatcttccaggagtccaccgtcctgcacctgtgtctgagggaaatccagcagcagcgggcagcgcaaaagctgatttacaccttcaatcaggtcaagccacaaacgatcccctatacgccaaggttcctcgaggtatttctcatctactgccactcagccaaccagtggctcactattgagaaatacatgaccggagagttccgaaaatataacaataacaacggggatgagattactcccaccaacacactggaggagctcatgcttgctttttcccattggacctatgaatacacaaggggcgagttgctggtgctggacctccagggggttggggaaaaccttactgatcctagcgttatcaaacccgaggtgaaacagagcagaggcatggtcttcggacccgctaaccttggggaggacgctattagaaatttcatcgctaagcaccactgtaatagttgttgccgcaaactgaagttgcctgacttaaaaagaaacgattactctcctgaaagaatcaatagtactttcggattagaaatcaagatcgaaagcgctgaagagccccctgcacgcgaaactggacgaaattccccagaggatgacatgcagctgtat

SEQ ID NO: 244637 - DNA, 6080 bp, synthetic construct
  misc_feature 1..6080: note = Description of Artificial Sequence: Synthetic coding sequence
  source 1..6080: mol_type = other DNA
atgaaggaacagcctgtcctcgaacggttacaatcacaaaaaagctggatcaagggagtgtttgacaagagggaatgttctacaatcattcccagttctaagaaccctcacagatgtacgcccgtgtgtcaggtgtgccagaacttgattcgatgttactgtggcaggttaattggcgatcatgctggcatcgattactcctggacaatctctgccgcaaaaggaaaggagtccgaacaatggtccgtggaaaaacataccaccaaatctccaactgatacctttggaaccatcaacttccaggacggcgagcacacacatcatgccaaatatatcagaacttcctatgacacaaagctggaccatctgctccacctcatgcttaaagagtggaaaatggagctccctaaattagtgatctcagtgcacggaggtattcagaatttcactatgccctctaagtttaaagagattttttctcaaggactggtgaaggccgctgagaccacaggagcatggattataactgagggaattaatacgggagttagcaaacatgtaggtgatgcacttaaatcccactctagccactcactgaggaagatttggactgtggggatccccccatggggcgtgatcgagaaccagcgggatctcatcggtaaggacgtggtgtgtctctatcagacattggacaacccactatccaaactcaccacgttaaattcaatgcacagccacttcattctgtccgatgatgggaccgtgggcaaatacggcaatgaaatgaagctcagacgcaatctcgagaaatacctttctcttcaaaaaatccattgtcgcagccgccagggggtccccgtcgtgggcctcgttgtggaagggggtcccaatgttatactctcggtttgggagacagtgaaggacaaggatcctgtcgtggtttgcgaggggacaggtagggccgcagacctgctcgcctttacgcataagcacttggcagacgagggtatgctccgaccccaggtcaaagaagagataatctgtatgatacagaatacgtttaacttttctttaaagcaatctaagcacctgttccagatacttatggagtgtatggtgcaccgcgactgcataacgatttttgacgctgacagcgaagagcagcaggatctagatcttgctattctgacagctctcctgaaggggacaaatttatctgctagcgaacagctcaacttggccatggcttgggaccgggttgacatcgcaaagaaacatattttgatatatgaacagcactggaaaccggatgctctggagcaggccatgtcagatgcccttgttatggatcgggtggattttgtgaaactgttgattgagtacggagtgaacttgcatcgatttttaacaattcctagacttgaagagttgtataatactaagcagggccctactaacactctgctgcaccatctagttcaggacgtcaaacagcacaccctcctgagtggctacaggataaccctgattgatatagggttagtggtggagtatctgatcgggagggcatacagatccaattacactagaaaacacttcagagccctatacaataacctgtaccgcaagtacaaacaccagcgacatagctctggaaataggaatgagtcagcggaatctaccctacattcgcagttcattcgcactgcccagccctacaagtttaaggaaaagtctatagtgctgcataagtccaggaagaagtccaaggaacagaacgttagtgacgaccccgaaagtacgggctttctttacccttacaatgatctgcttgtgtgggccgtgctcatgaagcggcagaagatggccatgttcttctggcagcacggagaggaagccacagtcaaagctgtgattgcctgtatcctctaccgtgcaatggcccacgaggccaaggaatcacacatggtggatgacgcgtctgaggagcttaagaattacagtaaacaattcggccagcttgctctggaccttctggaaaaggcgttcaaacaaaatgaacgcatggccatgactctgttgacatacgagcttcgtaactggagtaattcaacatgcctgaagctagccgtgtcaggaggcctgaggcccttcgtgtcacacacgtgtacgcaaatgctgctcaccgatatgtggatggggagattgaaaatgagaaagaacagttggcttaaaatcataatatcaattatccttccacctaccattcttactctcgagtttaaaagcaaggcagaaatgtcacacgtgccccaaagccaggatttccagttcatgtggtactattcagatcagaatgccagttcctccaaggaaagtgcttctgtgaaggagtacgacctggagaggggacatgatgagaagcttgatgaaaaccagcattttggcctcgaaagcgggcatcaacaccttccctggacgaggaaagtttacgagttttattcagcacccatcgtcaaattttggttttacaccatggcatacctagcattccttatgctgttcacttataccgtgctggtcgaaatgcagccccagccgagcgtgcaggagtggctggtatccatctatatctttactaacgccattgaagtggtgcgggaaatctgtatatcggagcctgggaaattcacccagaaagtaaaggtgtggataagcgagtactggaaccttaccgagactgtggccatcgggctctttagcgcgggatttgttctgaggtggggtgatcccccattccatacggccggacgtctgatctactgcatagacatcatcttttggttcagtcggctcttagacttcttcgcagttaaccagcacgctggcccttatgtgactatgattgccaagatgactgctaatatgttctacatcgtcatcattatggcaattgtgttgctctcttttggagtggcgaggaaagcaatcctctcgccaaaagaacccccttcctggagcctagcacgtgacatcgtgttcgagccatattggatgatttacggtgaggtgtatgcaggcgagattgacgtatgctcttcacagcctagttgtcctcccggatcattccttacccccttccttcaggccgtttatctgttcgtgcagtacattattatggtcaacctgttaatcgctttctttaacaatgtgtacttggacatggaaagcatttctaacaatctgtggaaatacaaccggtaccgctatattatgacatatcacgaaaagccctggctgcctccgccattgatcctgttgtcacacgtgggcctgctgctgagacgtctctgctgccaccgggctccccatgaccaggaggagggtgacgtcggcttaaaactttatctgagtaaggaagaccttaaaaaacttcatgattttgaggagcaatgcgtagaaaagtattttcatgaaaagatggaagacgtgaactgctcttgtgaagaacgaattcgtgtaaccagcgaacgtgtaaccgaaatgtattttcagctgaaggaaatgaacgaaaaggttagcttcatcaaggattccctcttatctcttgacagccaagttgggcatctccaagatctatccgctctcaccgttgatacgctgaaggtgctgagcgccgttgatacactccaggaggacgaggccttactggcgaaacgaaagcattccacttgcaaaaagctcccccactcttggtcaaatgttatatgcgccgaagtactaggctcaatggaaattgctggcgagaagaaataccagtactattcgatgccttcatctctattgagaagcttggccggtggcaggcacccacccagggtccagaggggggctctgctggagattactaattcaaagagagaagctacaaacgtgcgcaacgaccaggaaagacaggagacacagagttccattgtcgtctctggtgtctctcccaaccggcaggctcattccaaatacggacagtttcttttggtcccttccaatttgaagagagttccattcagcgcagaaactgttctgccattgtcccgccctagtgtgcccgatgtcctggccactgaacaggacatccagaccgaggttttggtgcatttgaccgggcaaactcctgtcgtgagtgactgggcaagcgttgatgaacccaaggagaaacacgaaccaattgcccatcttctggacggccaggacaaagccgaacaagttcttccaaccctgtcctgcacacctgaacctatgacaatgagcagtccactatcacaggccaagatcatgcagaccggtggtggatacgtcaattgggcatttagcgagggagacgagactggagtgttctcaatcaagaaaaagtggcagacgtgcctgcctagtacgtgcgattctgacagctccagatccgaacagcaccagaagcaggcccaggattcgtccttgtccgacaactccacaagaagcgcccagtcaagtgagtgcagcgaagtcggcccatggcttcagcctaatacaagtttctggataaacccactgcgtcggtacaggccttttgctcggtcccacagcttcagatttcataaggaggaaaagcttatgaagatctgcaaaatcaagaacctgagcggaagctccgaaatcggccagggggcttgggtgaaggctaaaatgcttaccaaggaccggagactgagcaaaaagaagaaaaatacacaagggcttcaggtccctattattacggtgaacgcttgcagccaatccgatcaactcaatcctgagccgggtgagaattctatttctgaggaggaatattccaaaaattggtttaccgtgtccaagttttctcataccggtgtggagccatatatccaccaaaaaatgaagaccaaggagataggacaatgtgccattcagatttccgattacctgaagcagtcgcaggaggatctgtctaaaaactccttgtggaactcaaggtccacaaacctcaaccggaattctttacacgttattaagatgcctatttccagccttatcagcgagattagcgcgtccctgaagtccccacaggagccccatcatcattacagcgctattgaaaggaacaacctgatgcggttatcccagacaatccccttcacgccagtacagctgttcgccggagaggagatcactgtgtacagactcgaggagtctagtccccttaatctagataaatccatgagctcatggtcccagagaggtcgcgctgccatgattcaggtgttatccagagaggagatggacggtggactgcggaaagccatgagggtagtgtcaacgtggagcgaggacgacatcttaaaacctgggcaagttttcatcgttaagtcattcctgccagaggttgttcgtacctggcacaaaattttccaggagagcacagtcttacacctctgtcttagagaaatccagcagcaaagagcagctcagaagctgatctacactttcaaccaggtgaaaccccagaccattccctacactcctcgatttctggaggtatttcttatctactgccactcggctaaccaatggcttactattgaaaagtacatgactggcgagttccgcaaatataataacaacaatggtgacgagattactcctaccaataccctggaggagctgatgttggcatttagccactggacatatgaatatacccggggagaactgctggtcctggatctccagggagtgggcgagaatttgacagatccctctgtcatcaagcctgaggtcaaacaaagccgcggaatggtattcggccctgccaatcttggcgaagatgcgattagaaactttatcgcaaagcaccattgcaacagctgttgccggaaactgaagcttccagacttgaaacgtaatgattatagccccgaacgcattaattctacgttcggtctggaaataaaaatcgagagcgccgaggaacccccagcacgagagacgggccgaaactctcccgaagatgatatgcagctata

SEQ ID NO: 244638 - DNA, 5598 bp, synthetic construct
  misc_feature 1..5598: note = Description of Artificial Sequence: Synthetic coding sequence
  source 1..5598: mol_type = other DNA
atgtctcagaaatcctggatcgagtcaacacttactaaaagggaatgcgtgtatattattccttcttccaaagatccacaccgctgtctacccggatgccagatctgtcaacagctagtgcggtgtttttgcgggagactggtgaagcagcacgcatgctttacagctagtctggccatgaaatacagcgacgtgaagctcggcgaccatttcaaccaagcaatcgaagaatggagtgtcgagaagcacactgaacagagcccaactgacgcctatggggtaatcaatttccagggcggttctcattcttacagagcaaaatatgtccgcttatcctatgacactaagccagaggtgatattgcagctgctactcaaagaatggcagatggagctgccaaagctggtcatttcagtacacggcggaatgcagaaatttgagctgcatcccagaattaaacagctcttgggaaagggactaattaaagcagctgttacgacaggcgcatggatattgactggaggagtgaacactggtgttgcaaagcatgttggtgatgcactgaaggaacacgctagtcggtccagccgaaaaatctgcaccatagggatcgccccatggggagttattgagaatcgcaatgacctcgtgggtcgggacgtagttgcgccttaccaaaccctactaaatccgctgtccaagcttaacgttctgaacaacttgcacagccacttcatcctagtggacgacggtactgtcggaaaatatggggctgaagtaaggctgcggcgtgaactggaaaagacaataaaccagcaacgcatacacgcgagaataggccagggtgtgccagtggttgccctcatcttcgaagggggaccaaatgtgatcctgaccgtgctggagtacctgcaggagtcaccgccagtcccggtggtcgtgtgtgaaggtaccggaagagccgcagatttgctggcctatatccacaaacagactgaggagggagggaatttaccggatgcagctgagcctgatatcatttccactatcaaaaaaaccttcaatttcggacagaatgaggctctgcacctgtttcagacactcatggaatgtatgaaaaggaaggaattgataactgttttccacataggatctgacgaacaccaggacattgatgtggccattctcactgccctcttaaaaggaacgaacgctagcgcttttgatcagcttattctaacgctggcttgggatagagttgatatcgccaagaatcacgtcttcgtgtatggccagcagtggctcgtgggttccctggaacaggccatgcttgacgccttggtgatggaccgagttgccttcgtgaaactgctgatagaaaatggagtgagcatgcacaaattcttgactatacctcggctcgaagaactatacaatacaaaacagggacctaccaaccctatgctgttccacctcgtaagggatgtgaaacaggggaacctcccacccggatacaaaattacactgatcgacattggactcgtgatcgagtacctcatggggggaacctataggtgtacgtacaccaggaaacgattccggcttatctacaattccctaggcggtaataatagaagatcagggaggaataccagtagttctacaccacagctcagaaagagccacgagtctttcggcaatagggccgacaagaaggagaagatgagacacaatcacttcattaagacagctcaaccgtataggccaaaaatcgatacagtcatggaagaaggtaagaaaaaaaggactaaggacgaaatcgtggacatcgatgacccagagacaaaaaggttcccctaccccctcaatgagttattaatttgggcatgtctaatgaagcgacaagtgatggcccgtttcctttggcagcatggcgaagagagcatggctaaggccttagttgcttgtaagatctatagaagcatggcttacgaggctaaacagtcagacttggtcgacgacacctcagaggagctcaagcagtactcgaacgactttggacagctggctgtggaactgctcgagcagtcatttcgccaggacgagacgatggccatgaagctgctcacttacgagctgaagaattggtccaactctacctgcctgaagctcgcagtcagctcccgattacgtccatttgtggctcacacgtgtactcagatgttattgagcgatatgtggatgggccgtctaaacatgaggaagaatagctggtataaggtcatcctgtccatccttgttcctcccgctattttgttgttggagtacaagacgaaggccgaaatgagtcacatcccacagtcgcaagatgcccaccagatgacgatggacgattctgaaaacaatttccagaatatcactgaagagatacctatggaggtctttaaggaggttagaatcttggactcaaatgaaggaaagaacgaaatggaaatccagatgaagagtaaaaaactgccaattaccaggaaattctacgcgttttatcatgcacctattgttaaattttggtttaataccctcgcgtacctggggttcctgatgctgtacacctttgttgtgctggtgcagatggagcagttgccgtccgtgcaggagtggatcgtcatagcttacattttcacgtacgcaatagagaaggtccgcgaaatctttatgtccgaagctgggaaggtgaaccagaaaattaaggtatggttctctgactactttaatatatctgataccatcgccattatttcctttttcatcggcttcgggcttcggttcggggcaaagtggaacttcgcaaatgcctacgacaatcatgtattcgtagcaggtcgactgatttattgcttgaatattattttctggtacgtcagactcctcgacttcctggctgtgaaccagcaagcaggaccatacgttatgatgattggcaagatggtggcaaatatgttctacattgtggtgattatggccttagtcctactctcatttggcgtgccgaggaaagctattttatacccccacgaagccccaagttggacactcgcaaaagacattgtcttccatccatactggatgatattcggagaagtctatgcctacgagatcgacgtgtgcgccaatgatagcgtaatcccccagatctgcggcccaggaacctggctgacacccttcttgcaggcggtatacctcttcgtccagtatattatcatggtgaacctactgattgcgttctttaacaacgtttatctacaagtgaaggccatctcaaatatagtatggaaataccagaggtaccacttcatcatggcctatcacgaaaagcctgtcctgcctcccccactcattatcttgtcccatatcgtctcactgttctgctgcatctgtaagaggcgaaagaaagacaaaacgtccgacggaccaaaactgttcctgacagaagaggaccagaaaaaactgcacgactttgaggagcagtgcgtcgaaatgtattttaacgagaaggatgacaaatttcactcagggtccgaagaaaggataagagtgaccttcgagcgagttgagcagatgtgtatccaaatcaaggaagtgggcgatagggtgaattatattaaacgttccctccaaagcctggactcccaaataggacatttgcaggacctgtctgccctgacagtggacacactgaaaaccctgacagcccagaaagcctctgaagcttctaaggtgcacaatgagataacccgagagctcagcatctcaaaacacctggctcaaaacctgattgacgatggacctgtaaggccctctgtgtggaaaaagcacggagttgtgaatacgttgagttcttcactgccacagggtgaccttgaaagcaacaacccctttcactgtaatattctgatgaaggatgataaggatcctcagtgcaacatcttcggccaggacctcccggctgtgccacagaggaaagagtttaattttccagaagctggatcaagctccggggctctgtttcctagtgcagtatctcctccggagctgcgccaacgcctgcatggcgtagaactcctaaaaatcttcaacaagaatcagaagctgggttccagcagtactagcattccacacctgtcgtcaccccctacaaagttctttgtgagcacccccagccagccctcatgcaaaagccacctggaaacagggacaaaggaccaagaaaccgtatgttctaaagccactgagggagataataccgagttcggtgcgttcgttggccatagggactcaatggatctccagcgcttcaaagagacgagcaataagatcaagatcctatcaaataataatacctccgagaacaccttaaagcgcgtgtcctctctcgccggattcaccgactgtcacaggacttctattcctgtgcacagtaagcaggcagaaaagattagccgaaggccttccacggaagatacacatgaggtggacagtaaggcagccctgatcccagattggttacaggataggccctctaatcgggagatgccatcggaggagggcaccctgaacggactaaccagcccgttcaagcccgctatggatacgaattactattattctgctgtagagcgcaataacttgatgcggctgagccagagcattccattcaccccagtaccaccacgcggagagcccgtgaccgtttacaggctggaagaaagctcacctaacatcctcaacaattcaatgtctagttggtcccagctggggctttgcgcaaaaatcgaatttctgagcaaggaggagatgggtgggggactgcgtcgggctgtgaaggtgcaatgcacttggtcagagcacgacattctgaaatccggtcacctgtacatcatcaaaagcttcctgccagaagtagtgaacacctggtcatccatctataaggaagatactgtcctacatttgtgcttgagggaaatccagcagcagcgcgctgcacaaaaacttacattcgcgtttaatcaaatgaagcctaagagcatcccgtatagcccacgcttcctggaagtgttccttctgtattgtcattcggccggtcaatggtttgcggtcgaggaatgtatgacaggcgaatttcgcaagtacaataataacaacggcgacgagataatccccactaatacccttgaagaaatcatgctcgcgttcagtcactggacctacgagtatacccggggagaattgctggtgctagacttacagggtgttggggagaatctgacagatccatcagttatcaaggcggaggaaaaaaggagctgtgacatggtgttcggacctgctaatcttggcgaggatgctattaaaaattttcgcgcaaagcaccattgtaactcatgctgccgcaagttaaagctacctgatctcaagcgcaatgattacactccagacaagattattttccctcaggacgaaccatcagatttaaacctgcagccaggcaacagcacgaaagaatccgaaagcaccaattccgtcagattgatgctctag

SEQ ID NO: 244639 - DNA, 3315 bp, synthetic construct
  misc_feature 1..3315: note = Description of Artificial Sequence: Synthetic coding sequence
  source 1..3315: mol_type = other DNA
atgagcttcagggctgccaggctgtccatgaggaatcgtaggaatgacaccctcgacagcactcggactctgtattcaagtgcttcacgatctacggatctcagctattcagaaagtgatctggtgaatttcattcaggccaattttaaaaagcgagaatgcgttttttttaccaaggattcgaaggcaacggagaatgtgtgcaaatgcggctatgcgcagtctcagcacatggagggcacccaaatcaaccaaagcgagaagtggaactataagaaacacacgaaagagttcccgaccgatgcttttggagatattcagtttgaaaccttgggcaagaaaggcaagtatatccggctgtcctgcgacaccgacgccgagatcctctacgagttgctgactcagcactggcatcttaaaactccaaatctggtgatttccgtcaccggtggtgctaaaaacttcgccctgaaaccgaggatgcggaagatcttcagccgattgatatacattgcccagtccaaaggagcgtggattctcactgggggtacgcactacgggttaatgaagtacattggggaagtggtccgtgataataccatcagtaggagctccgaagagaacatcgtggccatcggaattgctgcctgggggatggtctcaaaccgagatacattgattcgcaactgcgatgccgaggggtactttctggcccagtaccttatggatgattttacacgcgacccactgtacatcctggataacaaccacacccatctgctgctggtggacaatggttgccacgggcacccaaccgtcgaggcaaagctgagaaaccagttggagaagtacatctctgagagaactattcaagatagtaattatggtggaaagattcctatcgtatgcttcgcacagggaggaggaaaagagaccctgaaagcaatcaatacttctatcaaaaacaaaattccttgtgtggtggtcgaaggatcaggccagattgccgatgtgatcgcttcgctcgttgaagtggaggacgccttgacgagtagcgcagttaaggagaaattggtgcggttcctgcccaggaccgtgtctcggctgcccgaagaagaaacagaaagctggatcaagtggctgaaggagattctcgagtgtagccatttacttaccgtgatcaagatggaggaggcaggtgatgaaatagtgtctaatgcgatctcttacgcactgtataaggctttctccacttcggagcaggacaaggataattggaacggccagctgaaacttctgctggagtggaaccagctggatttggccaatgatgaaatatttacgaacgataggcgctgggagtctgcggaccttcaagaagtaatgttcactgcccttataaaggaccgaccaaaatttgtgcgcttgtttctggagaacggattaaatctccgaaaattccttacacacgacgttctgacagaactgtttagtaatcatttttccaccctcgtttacagaaacctccaaatcgccaagaatagttacaacgatgccctccttacatttgtctggaagctggtcgccaactttagacgtggctttagaaaggaggatcggaatggacgcgacgagatggacatagagcttcacgatgtgagtcctattactcggcaccccttgcaggcactgttcatatgggcaatactgcagaataagaaagagttgtcaaaggtgatctgggaacagacaaggggctgtactttggccgcattaggagcttctaagctcttgaagacacttgcgaaggtgaagaatgatatcaatgcagctggagaatccgaggaactggctaacgaatatgagactcgagccgttgagctttttactgagtgttacagctcagacgaagacctggcagaacagctgctggtctacagctgtgaggcctgggggggttcgaattgcctcgagctggccgtggaggctactgaccaacattttattgcacagcctggggtacagaactttctgagcaaacagtggtatggagaaatctcccgcgacacaaagaattggaagataattctctgtcttttcatcattcctctggtgggatgcggcttcgtctctttccggaaaaagccagtggacaaacacaagaaacttctctggtactacgtggcattcttcacaagtcccttcgtggtattctcctggaacgtggtgttttacatagcattcctgttgcttttcgcttatgtgttactaatggacttccacagtgtgccacaccccccagaactggtattgtattctctggtatttgtgttgttttgcgacgaggtgaggcagtggtacgttaatggggtcaattacttcacagatctgtggaacgtcatggataccctcgggctgttttattttatcgcgggaatcgtgttccgcctccactcatctaacaagtcctctttgtactctggcagagtgattttttgcctcgattacatcatattcacccttcgactcatacatattttcacagtatcccggaatttgggccctaaaataattatgttgcagcggatgctgattgacgttttcttttttctcttccttttcgctgtttggatggtagcgttcggcgttgcacggcagggcatcttgcgtcagaacgagcagaggtggaggtggatttttcgaagcgtaatatacgagccctacctggccatgtttgggcaggtcccctctgatgtcgatgggacaacctatgactttgcccactgtactttcactggcaatgaatccaaacctctgtgtgttgaactcgatgagcacaacttacctcggtttcccgagtggattaccatcccactcgtatgcatctatatgctaagtacaaacatcctactggtcaatctgcttgtggccatgttcggctacactgtggggacggtacaggaaaataacgaccaggtgtggaaatttcagaggtatttcctggttcaagagtactgttcaagacttaatattccattcccatttattgtattcgcctatttctacatggtggttaaaaagtgctttaaatgttgctgcaaggagaagaacatggagtcaagcgtgtgctgtttcaaaaacgaggacaacgaaaccctcgcctgggagggcgttatgaaggagaattacctggttaagatcaatacgaaagcgaatgatacctcagaggagatgcgccatcggttccgccagctggatactaagctgaacgatctcaagggactgctcaaagagatcgccaacaaaatcaaatag

SEQ ID NO: 244640 - DNA, 579 bp, synthetic construct
  misc_feature 1..579: note = Description of Artificial Sequence: Synthetic coding sequence
  source 1..579: mol_type = other DNA
atgaaatcttttttgcccgtgcacactatcgtccttattcgcgaaaatgtctgcaagtgcggatatgcccagagtcaacacatggaaggaacccagatcaatcaatcagagaaatggaactataagaagcataccaaagagttcccaactgacgccttcggcgatattcagttcgaaactctgggcaagaaagggaagtatatacggctgagttgcgatacagatgctgagatcctgtacgagctgctgacccaacactggcacctgaaaacacctaatctggtcatctctgtcaccggtggcgctaagaatttcgctcttaaaccaagaatgagaaagatattctctaggttgatttatatagcgcagtcaaagggcgcttggatcctcacagggggtacccactatggcttaatgaaatatatcggcgaagtcgtgagggacaatacaatctctaggtcttccgaggaaaacattgtcgccattggaattgcggcatggggtatggtcagtaaccgtgatacgctcattaggaactgtgacgccgaggtgcccgtggggcaggaggaagtatgttag

SEQ ID NO: 244641 - DNA, 498 bp, synthetic construct
  misc_feature 1..498: note = Description of Artificial Sequence: Synthetic coding sequence
  source 1..498: mol_type = other DNA
atggagggaacacagattaatcagtcggagaagtggaactataagaagcacactaaggaattccccacagacgcatttggtgacatacagtttgaaacactaggcaagaaagggaaatatatcaggctgtcctgcgacaccgatgctgagatcctttatgaattactcacgcagcactggcatctcaagaccccaaatctcgtaatatcagtgaccggcggagcgaaaaatttcgctctgaagcctcggatgaggaaaatctttagccgtcttatttatattgcacagagcaagggcgcatggattctgactggcggaacccactacgggcttatgaagtacatcggggaagtggtgcgcgataacaccatttcaagatcctctgaagagaatatcgtggccatcggcatcgctgcctggggaatggtgagtaatcgggacaccctgattcgcaattgtgatgcagaagtgccggttggtcaggaagaggtctgttag

SEQ ID NO: 244642 - DNA, 2049 bp, synthetic construct
  misc_feature 1..2049: note = Description of Artificial Sequence: Synthetic coding sequence
  source 1..2049: mol_type = other DNA
atgcaggcgatcaatacatccatcaagaacaagattccatgcgttgtagttgagggctccggacaaatcgccgatgtgatcgcctcactagtagaggtagaggacgctctgacctccagcgcagtgaaggagaagctcgtgagattcctgcctcgcaccgtctccagattgccagaggaagagaccgagtcctggattaagtggctcaaagagatcttagaatgtagccatttactcaccgtgatcaaaatggaagaggcgggagatgagatcgtgagcaacgcaatatcgtatgcgctgtataaagccttctctacatcagagcaggataaggacaactggaacggacagttgaagttgcttttggagtggaaccagctagacttagcaaatgatgagattttcacaaacgatcggaggtgggagagcgccgaccttcaggaggtcatgttcaccgccctaatcaaggaccggcctaaatttgttcgtctgttcctggagaatggcctaaatctccgcaaatttcttacacacgacgtgcttacagaattgttcagtaatcacttcagcacccttgtgtaccggaacttgcaaatcgctaagaatagctataatgacgcgctcctcacctttgtctggaagctggtggccaattttaggcgagggttcagaaaggaagatcgcaatgggagagacgagatggacatcgaactgcacgatgtgtctccaatcacacggcacccgcttcaagctctgtttatttgggcaattttgcaaaacaagaaagagctttctaaggtgatttgggagcaaacacggggttgcacattagctgcactcggagcaagtaagctcctaaagacccttgcgaaggtaaaaaacgacattaacgcagcaggagaatcagaggagctcgccaatgagtacgagacgagagctgtcgaactgtttactgaatgttatagtagcgatgaggatctcgcagaacagttgttggtttattcctgcgaggcatggggtggctccaactgccttgagctggcggttgaagccacggaccagcactttatcgctcagccgggagtacagtggtacgtcaatggcgtgaactattttactgatctctggaatgtgatggacacattaggacttttctattttatcgccggtattgtatttcgcctccatagctctaataagtcatcactctatagtggcagggtaattttttgcctcgattacattattttcaccctgagattgatacacatttttacagttagccgaaacttgggcccaaagattattatgctgcagcgcatgctgatagacgtgtttttctttttgtttctcttcgccgtgtggatggtggcctttggcgtcgcacggcagggtattttgagacaaaacgagcaaagatggaggtggatctttagaagcgtgatctatgagccctaccttgccatgttcggccaggtcccaagcgatgtggatggtactacctacgatttcgcacactgtacttttactggaaatgaaagcaaacctttgtgtgtggagctcgacgaacataacctgccccgtttccccgagtggattacaatacctctggtctgtatttatatgctctccacaaacatactattggtgaatctcctggtcgctatgtttggatacaccgtgggaaccgttcaggagaacaatgatcaggtgtggaaattccagaggtacttcctggtgcaggaatattgctcacgacttaacattccttttccattcattgtctttgcttatttttacatggttgtgaaaaaatgttttaagtgttgttgcaaggaaaagaatatggagtctagtgtgtgttgttttaagaacgaagataacgagacactcgcctgggaaggagttatgaaagagaactatcttgtgaagattaatacaaaagctaacgatactagcgaggagatgaggcaccgctttaggcagctcgacacaaagctgaacgatctgaaggggctgttgaaggagatcgccaataagattaagtag

SEQ ID NO: 244643 - DNA, 2514 bp, synthetic construct
  misc_feature 1..2514: note = Description of Artificial Sequence: Synthetic coding sequence
  source 1..2514: mol_type = other DNA
atggagacactgactccaggacaccttcagccatcaccctctagtcccagacctcgagccgcaccaggctccctaggcagggttacacgtaggcgtctgagtaggtggatagctcttactaggaaagtgtcctggacccctgctaggcctagtcagagcgccctgctctctccatccagaggccaggaaactgctcccccagtgccgggatgttgtccccgaacactgtcacctccagcccctaggcgcccatcaggttcaatgatcgccggagtgtccctgaaaccactgctccgcattactgctcgtatttggcgagcctgctgtagctcatgtcgcagggctaggtccacctcacagactacttcatcaaaagtggcgcctgcacttggttcggggagggccccagcacttgcctgcccggatccaccgctttgcctaagcgaccctgaaactgggaagacttgtctgttgaaagctatgctcaacttacatgacggacagaatactactatcccgctcttgttggaaattgccaggcagactgactccctcaaggaacttgtgaacgcctcgtatactgacagttactacaagggtcagactgccctccatattgctattgaacggagaaacatggccttggttactctgttggtcgagaacggtgctgatgtccaggccgctgctcatggcgatttctttaaaaaaactaaaggtcgtccaggcttctacttcggggagctgccactcagtctggctgcctgcacgaaccagctcggaatcgtcaaattcctcctccagaactcctggcagacagccgacatcagtgcgagggactcagtgggaaataccgtcttgcacgcactcgtggaggtcgctgacaatactgcagacaacaccaaattcgtcacctcaatgtacaatgagatcctcatgttaggtgccaaactacatccgactctaaagctggaagaactcacaaataagaagggcatgaccccattggccctagccgctgggaccggaaaaataggcgtcttggcctatatactgcaacgagaaatccaggagcctgaatgtagacacctctctcgcaagttcaccgagtgggcttatgggcctgtgcatagctccctgtacgacctatcgtgcatagatacgtgtgaaaaaaattcggtactggaggtgatcgcctactcttcttctgagacccccaatcgacatgacatgctgctagtggaacccctaaatagactcctccaggacaagtgggatagatttgtgaagcgtatcttttatttcaacttccttgtgtattgcctctatatgatcatattcactatggcggcatactatagaccagtggatgggctgccacctttcaaaatggaaaagactggtgactatttccgggtgactggtgagattctgtctgttctcggaggcgtgtatttcttttttagagggatccagtattttcttcagagacggcctagcatgaagactctgttcgttgactcatatagcgagatgcttttttttctgcagtctctctttatgctggccaccgtggtgctctacttctcccacctgaaagaatacgtggctagtatggttttctctttagctctgggctggacaaacatgttatattacaccaggggcttccagcagatggggatctatgcagtcatgatcgagaaaatgatcctaagggacctttgccggtttatgttcgtttatatcgtgttcctctttggcttcagcacagctgtggtgaccctcatcgaagacgggaagaacgactcactgcctagcgaaagcacttctcaccgatggcgtggccctgcttgtcggcctccggacagctcttacaactctctgtactccacctgcctagagctgttcaaatttaccattggcatgggcgatctggaatttactgaaaattatgatttcaaagcggttttcatcatcctgctcctcgcgtatgtaatcctaacgtatatactgctgttgaatatgttgattgccttaatgggtgagacagtgaataagatcgcccaggagagtaaaaatatctggaagttacagcgcgcaattacgatccttgacactgagaaatcctttctcaagtgcatgcgcaaggcttttcgcagcggtaagttactgcaggtcggttatactccagatggtaaggatgattacagatggtgcttcagagtcgatgaggtaaattggaccacctggaacaccaacgtggggatcattaatgaagacccaggcaactgcgagggcgttaaaagaacattgtctttttctttgcggagcagccgggtcagcgggcgacactggaaaaatttcgctcttgttccactgttgagagaggcttcagctcgggaccgccagagtgcgcagcccgaggaggtgtacttgcgccagttcagtggaagcctgaagccagaagatgcggaggtgtttaaaagcccagcagcgtccggcgaaaagtag

SEQ ID NO: 244644 - DNA, 2340 bp, synthetic construct
  misc_feature 1..2340: note = Description of Artificial Sequence: Synthetic coding sequence
  source 1..2340: mol_type = other DNA
atgaagaaatggtcctcaaccgacctgggcgctgccgctgaccccttgcagaaagacacttgccctgacccattggatggggacccgaactccaggccacccccagcaaaaccccagcttagcaccgccaaaagccgcactagactgttcggaaagggcgacagcgaagaggcgtttcctgtggactgtcctcacgaagaaggggagctcgatagctgtccaactatcaccgtgagccccgtgataacaatccagaggcctggcgatggacccaccggcgcacgcctcctgagtcaggactctgtcgccgctagtacagaaaaaaccttgaggctctacgataggcgttcaatctttgaagctgtggcccagaacaattgtcaggatctagaaagtttgctgctgtttctccagaaatccaagaagcatctgaccgacaacgagtttaaggatcctgagaccggaaagacatgtctcctgaaagctatgcttaatcttcatgatggtcagaataccacaatccccctgcttcttgaaattgccaggcagaccgattccctcaaagagctggtcaacgcctcctatactgatagctattataagggacagaccgccctgcatattgccatcgaacgccgtaatatggccctggtcactttactcgtggaaaacggagctgacgtccaggctgcagcacacggagatttcttcaagaagacgaaaggaagacctggattctatttcggcgagttgcctctgtctttagctgcctgcactaaccagctgggtattgtgaagttccttctgcagaactcttggcaaactgccgacatctccgcaagggattctgtaggaaatacggtccttcacgcactggtcgaagtcgctgacaatacagccgacaacaccaagtttgtgacctcaatgtacaatgaaatcttaatgctcggtgctaaattacacccaacccttaagttagaggaacttacgaacaaaaaggggatgacccccttagcactggctgctggtacgggaaagatcgggaatcggcacgacatgctcctggtggagccgctgaataggctcctgcaggacaagtgggaccgttttgtcaaacgcatattttattttaatttcctggtctactgtctttacatgatcatctttacaatggcggcatactatcgccctgtggatggcctgcccccttttaaaatggaaaagaccggagactactttagagttactggcgagattctctccgtgctcgggggagtgtatttttttttcagggggatccagtatttcctgcagcggaggccatcgatgaaaaccttgtttgtagacagctattccgaaatgctcttttttcttcagtcccttttcatgctcgccacagtcgtgctctactttagtcatcttaaggagtacgtggcctccatggtttttagcctggctctgggatggacgaatatgctgtattatacccgcggatttcagcagatgggtatatacgccgtgatgatcgaaaagatgatactccgcgatctgtgcaggttcatgttcgtgtacatagtgtttttatttggcttctccacagctgtggtaaccctcattgaggatggcaagaacgatagtctcccaagcgaatcaacatctcataggtggagggggcctgcatgtcggcctcccgatagcagctataacagtctgtatagtacatgcctagagcttttcaaattcaccatcgggatgggggatctggaatttacggagaattatgacttcaaggctgtgttcattatactgctcctggcctatgtcatcttgacatatatactgcttttgaatatgcttattgcgctgatgggagagacggtcaacaagattgcacaggaaagcaaaaacatctggaaattacagcgcgctataacgatcctggacactgaaaaatccttcttgaagtgtatgaggaaggccttccgatctggcaaactactgcaggtcgggtacacccccgacggaaaggatgactacaggtggtgcttccgtgtggacgaagtgaactggaccacttggaacactaatgtggggattataaatgaagaccctggtaactgtgaaggcgtcaagagaaccctttcgtttagtctacgttcctccagggtgtcgggtagacactggaaaaattttgcattagtacccctcctccgggaggcttccgccagagatcgtcagagcgcacaaccggaggaagtgtatctgaggcaatttagcggctctttaaaacctgaggacgcagaggttttcaagagcccagcggcatcaggcgaaaagtag

SEQ ID NO: 244645 - DNA, 2520 bp, synthetic construct
  misc_feature 1..2520: note = Description of Artificial Sequence: Synthetic coding sequence
  source 1..2520: mol_type = other DNA
atgaaaaagtggagttccactgatctaggcgcagcggcagatcctctccagaaggacacttgcccagacccgctcgacggagatccaaacagcaggcctcctcccgctaaacctcagctgtccacggccaagtccaggaccaggctattcgggaagggcgacagcgaagaagccttcccagtggattgcccccatgaggaaggggaattagattcgtgtcccacaattacggttagtcctgtcattaccattcagaggcctggtgatggccctacaggagcaagattgctcagccaggattccgtcgcagcgagtacggagaaaaccctgcgattgtatgatcgcaggtccatctttgaggccgtcgctcagaataattgtcaggacctggaatccctcctccttttcctgcagaaaagtaagaagcacctcacagacaatgagtttaaggatccagagaccggcaagacttgcctgcttaaagcaatgctcaaccttcatgatggtcagaatactacgatcccattgctgctggagatcgccaggcagactgattccctcaaggaactcgtgaatgctagttatactgactcttattataaaggccagacagccctccatatagcgattgaacgtcgtaacatggcattagtgactttactcgtggagaatggcgcagatgttcaggccgcagcacacggagatttcttcaaaaagacaaaaggacggcctggattttattttggtgagcttccactctcattagcagcttgcaccaaccagctgggcatcgtcaagttcttattacagaatagttggcagaccgctgacatttccgcgcgagacagcgtggggaacacagttctccacgcccttgtagaagtggctgacaatacagccgacaacacgaaattcgttacctccatgtacaacgagatcctcatgctgggagctaagctccatcccaccctgaaactggaagaactgactaataagaagggcatgaccccgctcgcactggcagctggaacaggcaagatcggtgtgctggcctacatccttcagagagagattcaggagcccgagtgtcggcacttaagcaggaaattcactgagtgggcatatggtccagtccactcctctctttacgatttgagttgtatcgacacatgcgaaaaaaattcagtactggaggtgatcgcatacagctcctccgaaacccctaataggcatgacatgctgttggtagaaccacttaatagactgctccaagataagtgggataggttcgtgaagcggattttctactttaacttcctggtttactgtctctatatgatcatctttacaatggccgcttactatcgccctgtggatgggctgccacccttcaagatggaaaaaaccggcgattacttccgcgtcacaggggaaatcctgtcagtgctcgggggtgtgtacttctttttcaggggaattcaatatttcctccagcgcagaccttcgatgaagaccctgtttgtggactcctattcagaaatgctcttcttcctgcagtccttgtttatgctggcaactgtagtgctgtatttttcgcacctcaaagagtatgtcgccagcatggtctttagcctcgccttgggatggaccaacatgttgtattacacccgaggatttcaacagatgggaatttacgccgtaatgattgagaagatgattctcagggacttatgtcgctttatgttcgtgtacatcgtctttctgtttgggtttagcacagccgtagtaacgctgattgaagacggcaaaaatgacagtctccccagtgagagcacatcacatagatggagaggaccggcatgccgtccaccagatagctcttataatagcttgtacagtacatgcttagagctttttaagttcacaatcggcatgggtgacctggagtttacagaaaactacgacttcaaagctgtgtttataatcttgttattagcatacgtgatcctcacttatatactcctcctcaatatgctcattgctttgatgggagaaacagtgaataagatcgcccaagaatccaagaacatatggaaattgcagagggcgatcacaatcctggataccgaaaaatctttcctgaaatgcatgaggaaggcttttaggtccgggaagctcctccaggttgggtacacccctgatggcaaggacgactacagatggtgcttcagggtggacgaggtcaattggacgacttggaataccaatgtcggaattattaacgaggatccaggtaattgcgagggagtaaagcgcactctttcattctccctccgttcgtctcgcgtgagtggacgtcactggaagaacttcgcccttgtcccacttctgagggaagctagcgccagagacagacaatccgctcagccagaggaggtgtatttacgtcagttttcaggcagtctgaaacctgaagatgccgaagtgttcaagtcccctgctgcctccggggaaaagtag

SEQ ID NO: 244646 - DNA, 2520 bp, synthetic construct
  misc_feature 1..2520: note = Description of Artificial Sequence: Synthetic coding sequence
  source 1..2520: mol_type = other DNA
atgaagaagtggagttccacagatttaggggcagccgcagatcctcttcagaaggacacctgccccgaccctctggatggcgatccaaactctcgacctcctccggcaaagcctcagctttcaacagcgaagtctcgaacccgtctgttcggcaagggagattcagaggaggctttcccggtcgactgcccgcacgaggaaggagagttagatagttgcccaacgatcacagtgtcccctgtcatcacaattcagaggccaggggacgggcctactggcgcacgcttgcttagccaggactctgtggcggctagcacagagaaaacactcaggctgtacgatcgacgatccatcttcgaagccgtcgctcagaacaactgtcaggacctagaatctctactgctgtttctgcagaaatccaagaagcaccttacagacaacgaattcaaagacccagagaccggaaagacctgtctgctgaaagctatgctgaacctccacgatgggcagaacacaacgatacccttgctgctggaaatcgcacgacaaacagactcgctgaaggaactggtgaacgctagctacacagactcatactacaaggggcagaccgccctgcatatcgcaattgaaagacgaaatatggccttagtcaccttactggttgaaaatggcgctgatgtccaggccgcagctcacggcgatttctttaagaagaccaaaggaagaccgggtttctattttggtgagctccctttaagccttgcggcatgtactaaccagttaggcattgtgaaatttctgctgcagaactcctggcagacggctgacatttctgccagagatagcgtggggaatactgttctccatgccctcgtggaggtggcagacaacaccgccgataatactaagtttgtgacatcaatgtataatgagattctgatgctgggcgctaagctgcacccgaccttgaaacttgaagaattaactaataagaagggcatgacgcccttagctctagccgctgggaccgggaagattggtgtccttgcctacatcctgcagagagagatccaagagccagaatgtcgtcatctatcgaggaaatttaccgaatgggcctacggccctgtccactctagcctgtacgacttatcatgcattgatacctgtgaaaagaattcagtgctcgaggttatcgcctattcctcttcagagacccccaataggcacgacatgctgcttgtcgaaccgctgaatcgactgctgcaggataaatgggataggtttgtaaagagaatcttctatttcaactttcttgtatactgcctgtatatgatcattttcacaatggccgcttattaccgcccagtcgatgggctgcccccattcaagatggagaaaacgggcgattactttagggtaacaggtgagatcctcagcgtcctgggtggtgtgtatttcttcttccgcggaatccaatatttcctgcagaggcgaccttcaatgaagaccctcttcgtcgatagttactcagaaatgctgttcttcctgcagagcctgtttatgctggccacggtggtgctatatttctcccacttgaaggagtatgttgcctcaatggtcttcagccttgccctcggatggaccaatatgctgtattacactagagggttccagcagatgggtatctacgctgtaatgatagaaaagatgatcctccgagatctctgccgcttcatgttcgtctatatcgtgttcctttttggcttctcgactgctgtggtaacgctcatagaggacggcaaaaatgactctctgccatccgagtctactagtcacagatggcgcggaccagcctgtagaccacctgacagctcctataattccctgtattctacctgtctggagctttttaaattcaccatcggaatgggagatcttgagttcaccgagaattatgattttaaagccgtattcatcatcctgctgctggcttatgttattctcacttatatcctgctgttaaatatgctcattgccctgatgggggagacagtgaacaagatcgctcaggagagcaagaacatctggaaacttcagagggccattacaattctcgacactgagaagtccttcctgaagtgcatgagaaaggcttttagaagcggaaaactcttacaggtgggctatacccctgacggcaaggatgattatcgatggtgtttccgagttgatgaggtgaattggacaacttggaataccaatgtggggatcatcaacgaagaccctgggaattgtgagggcgttaagcgcacactcagcttcagcctccgatcttctcgggtgtctggcaggcattggaagaactttgccctggtgcctcttctccgcgaggcctccgccagggacagacagtccgcacagcccgaagaagtctacttgcggcagttcagcggatctctgaaaccagaggatgccgaggttttcaagtcacctgcagcttctggcgagaaatag

SEQ ID NO: 244647 - DNA, 2553 bp, synthetic construct
  misc_feature 1..2553: note = Description of Artificial Sequence: Synthetic coding sequence
  source 1..2553: mol_type = other DNA
atgaagaagtggtcttcgaccgacctgggggctgccgcagaccctttacagaaggatacgtgcccagacccattggatggcgatccaaacagtagacctccccctgccaagccccagctgtcgacggccaaatcccggactcggctcttcggcaagggcgactccgaagaagccttccccgtggactgccctcacgaggaaggggagttggactcttgtccgactatcaccgtgtccccggtgatcacgatccaacgacctggtgacgggccaacaggcgctcgtcttcttagccaagattccgtggccgctagcacggaaaagacgttaagactatatgatagacgaagcatcttcgaggcagtcgcgcagaacaactgtcaggatctggaatctcttctgctcttcctgcagaaaagcaaaaaacatctgacagataatgaattcaaggacccggaaacaggtaagacctgcctgctaaaagccatgctcaatcttcacgatggccagaatacaaccatacctttgcttctggagatcgctaggcagactgactctctaaaggagctcgtaaatgcctcatataccgattcttattacaaggggcagaccgcattacacattgcgattgagcgcaggaacatggccttggtcaccctactcgtggagaatggcgctgatgtgcaagccgctgcacacggagatttttttaagaagacaaaaggccgtccaggtttttattttggcgagctacctttgagcctcgccgcttgcacgaatcagctcgggatcgtgaaatttttgctgcaaaattcctggcagaccgccgatatcagcgcacgcgattccgtgggcaatactgtcctgcatgccctggtggaagtggcggacaatactgccgataacaccaaatttgtgacttcaatgtataacgagatcttaatgttgggtgccaagctgcatccgaccctgaaactcgaggaattaaccaataaaaaaggtatgacacccttagccctggcggcaggcaccggaaagataggtgttattgaaaacggtccacctctcagttttatggttctggcctatatcctacagcgagaaatccaggagcccgagtgcaggcatctttccagaaagtttaccgaatgggcttacgggcctgtccattcctccctgtacgacctgtcttgtatcgacacctgcgagaaaaattctgtgctggaggtgatcgcatactcaagctcggaaacacctaacagacatgatatgctgctggttgagccactaaaccggttgttgcaggacaagtgggaccgctttgtaaaaagaattttttatttcaactttctggtgtattgtctctacatgatcatctttaccatggcggcatactaccggccagtggacggcctgccgccttttaaaatggagaaaaccggcgactacttccgcgtaacaggcgagattcttagcgtcctgggcggagtgtactttttcttccgcggtatccagtatttcctgcagcggcgtccctctatgaagaccctgtttgtggacagctacagcgaaatgctcttttttcttcagagcctgttcatgctggcaacagtggtactctattttagtcaccttaaggaatacgttgcgagcatggttttctcgttagccctagggtggacaaatatgttgtattacaccagggggttccagcagatgggtatttacgccgttatgattgagaagatgatcctgagggacctctgtcgcttcatgttcgtgtacattgtgtttctgttcggtttttctacggctgtcgtcacacttattgaagacggcaagaatgacagtttgccttccgagagcaccagtcacagatggcgcggacctgcgtgtaggcctcctgattctagttataactccttatacagcacttgccttgaactgttcaaattcaccatcggaatgggcgatttagaattcacagagaactatgattttaaggctgtgtttatcatactcctgctggcctatgtgatactgacctatatcctcctgctcaacatgctcatcgcattaatgggggagaccgttaacaagatagcgcaggaatctaaaaacatatggaagctccagcgcgctatcaccatcttagacacggaaaagtcctttctgaagtgtatgcggaaagctttcaggagtggcaaactgttgcaggtgggctatacacccgatggaaaggatgactacagatggtgtttccgggtggacgaggtgaactggacaacatggaatacaaacgttggcatcatcaatgaggatcctggtaactgcgagggcgtcaaacgcaccctctccttttcccttcggagttccagggtgtctggtagacactggaaaaattttgccctcgtgcctctccttcgcgaagcttcggcgagggacaggcaaagcgcgcagccagaggaagtgtacctgagacaattctcaggatccctcaagccagaagatgccgaagtgtttaagtcgcctgcagcatcaggggaaaagtag

SEQ ID NO: 244648 - DNA, 2295 bp, synthetic construct
  misc_feature 1..2295: note = Description of Artificial Sequence: Synthetic coding sequence
  source 1..2295: mol_type = other DNA
atgacatctcccagctcctccccagtgttcaggctggagactctggatgggggacaggaggatgggagcgaggccgaccgcggtaagctcgatttcggcagtggcctgcctccaatggagagtcagtttcagggagaagatcgcaagtttgctccgcagataagagttaatctcaattaccgcaaaggtaccggggcttcacagccagacccaaatcggttcgatagggatcggttgtttaacgcggtgtccagaggggttccagaggacttggctggtttacctgaatacctgagtaaaacaagcaagtaccttactgattcagaatatacggaggggtctacaggtaagacctgtctgatgaaagcagtgcttaatctgaaagacggagtgaacgcctgcattttacccctgcttcagattgatagagacagtggaaacccacagcccttggtcaatgcccaatgtaccgatgattactacagaggtcactccgccctccacatcgccatcgaaaaaaggagcttgcaatgcgttaaacttctcgtggagaatggcgcaaatgttcacgcaagggcatgtggcaggtttttccagaaaggtcaaggcacctgtttctacttcggagaattgccactcagcctggctgcctgcacgaaacaatgggacgtagtgagttacctcctggagaatccacatcagcccgcaagcttacaggccacggacagtcaggggaataccgtccttcatgcgctcgtgatgatatcggataattccgcagagaacatcgccctggtcacaagcatgtacgatgggctcctgcaggccggagctaggctgtgccccaccgtccagctggaagacatacgcaacctgcaggatttaacaccactgaagctagcagctaaagaaggaaagatcgagatattccgccacattcttcagcgggagttttctggcctgtcacacctgtcaaggaaattcactgagtggtgttacggacctgtccgcgtctcactctacgacctggcctctgtggattcctgcgaagaaaattcagtgctcgagatcatcgcctttcattgcaaatctccccatcgccatcgtatggtcgtcctagaacctctgaataagctacttcaagcaaagtgggatctgctgattcccaaattctttttaaatttcttatgcaaccttatctatatgttcatattcactgctgtcgcctatcatcagccaactctaaaaaagcaagctgcaccccaccttaaagccgaggtgggcaacagcatgctgctcacggggcatatcctgatcctgctgggtgggatttacttgctggtgggtcagctgtggtacttctggcgacgccacgtgttcatttggatctcattcatagactcctactttgaaatattatttctgttccaggcactcttgacagtagtttcccaggtgctctgcttcctggccattgagtggtacctgcctctgctggtaagtgcccttgtattaggctggttgaacctcttgtactacaccagaggattccaacatacagggatatatagtgtgatgatccaaaaagtcatcctgcgagacctcctgagatttttgcttatctatcttgtattcttgttcggcttcgctgtggctctggtcagtctgagccaagaggcgtggaggccagaggctcctacaggtcctaacgccactgagtctgtacagccgatggagggacaagaagatgaaggcaatggcgctcagtatcgcggaatattggaggcatctctggaactgttcaagttcactataggaatgggtgagcttgccttccaggagcagctgcacttccgaggaatggttctcttactccttctcgcttatgtgctgctcacgtatatactgctgctcaatatgctcatcgccctcatgagcgagacagttaacagcgtcgctactgacagctggtctatatggaagctccaaaaggctatcagcgtcctcgaaatggaaaacgggtattggtggtgccggaaaaagcaaagggccggtgtgatgttgactgtgggtacaaagcccgatggaagtccagatgagcggtggtgcttcagggtagaagaagtgaactgggcgagctgggaacagactctgccaactctgtgcgaggatcccagtggtgccggagtccctagaactcttgaaaatcccgtcctcgccagtcctccgaaagaggatgaagatggcgcttcagaagagaactacgtgccagtgcagctgcttcagtccaattag

SEQ ID NO: 244649 - DNA, 801 bp, synthetic construct
  misc_feature 1..801: note = Description of Artificial Sequence: Synthetic coding sequence
  source 1..801: mol_type = other DNA
tgagattttagcctcggagtgccctcttggtggtgcctaatctgcttcaacattgggccttccgtcgggccatcgcagccagaccccaacagattcgaccgcgacaggctatttaacgccgtctccaggggggtccccgaagacttagctggattgcctgagtacctgtctaagacttccaaatatcttacggattctgaatatacggagggtagcacaggcaaaacctgtctgatgaaggcggttctgaatctgaaggacggggtcaacgcctgcatcttgccactgctgcagattgaccgcgattctggtaatccccagcccctggtcaatgcccagtgtaccgatgattattataggggtcactctgccctccacattgcaatagaaaagcgttccttgcagtgcgttaagttactggttgaaaacggcgcaaatgtccacgccagagcctgtggacgatttttccagaaagggcagggcacttgtttctatttcggcgagttgccactttcactcgccgcttgtacaaagcagtgggatgtggtcagttacctgctggaaaaccctcatcaacccgcatctctgcaggctacggacagccagggtaatactgtgttgcacgcgcttgtcatgatcagtgacaacagcgcagaaaatatcgcactcgtcaccagcatgtacgatggactcctgcaggcaggagcaagactctgccctaccgtgcagcttgaggatattagaaacttacaggatctgacaccgctcaagcttgccgcaaaagaggggaagattgagtag

SEQ ID NO: 244650 - DNA, 2373 bp, synthetic construct
  misc_feature 1..2373: note = Description of Artificial Sequence: Synthetic coding sequence
  source 1..2373: mol_type = other DNA
atgaaagctcaccccaaagaaatggtacccttgatggggaagcgtgttgcagcaccatccggcaacccagcaatcctgccagagaaaaggccagccgagattacaccgaccaagaaatccgcccacttcttcctggagatcgaaggatttgagcccaaccctacagtggctaaaaccagcccccctgttttttccaagcccatggattctaacatccgacagtgtatttcaggcaattgtgatgatatggattctccgcaatcacctcaagacgatgtcaccgagacgcctagtaacccgaatagcccctcagctcagctcgccaaggaggagcagcgccgaaagaaacggcgactgaagaagcggattttcgccgctgtttctgaaggctgtgtcgaagaattggtggaattactcgttgaattgcaagagctgtgcagaaggcggcacgatgaggacgtgccggacttcttgatgcataaattaactgcaagcgacacagggaaaacatgtttgatgaaggcccttcttaacattaatcctaataccaaggagattgtgcgcatcttgttggcctttgctgaagagaatgatatactcggcaggtttatcaacgcagaatatacagaggaggcgtatgaaggccagactgcccttaacattgccattgagcggaggcagggcgacatcgctgctctgctcatcgccgcaggagctgacgtgaatgctcacgctaagggcgcattttttaacccgaagtaccaacacgagggtttctactttggcgagacccccctggctctggctgcttgtaccaatcaacctgaaatcgtgcagctgctcatggaacatgagcaaactgatattaccagtagggactcacgaggcaacaacatcctgcatgcgctggtgacagtcgctgaggacttcaagacgcagaacgattttgtgaagcgtatgtatgatatgatccttctacggtccggcaactgggagctggagaccacccgtaacaatgatggcctcacccccctgcagctggctgccaagatgggaaaagcggagattctgaagtacatactgtctagagaaatcaaggagaagcgcctacgcagcctgtcccgcaaatttacggactgggcctatgggccagtgtccagctccctatatgatttgacgaacgttgataccacaactgataattctgtgctagagatcaccgtgtacaacactaacatcgacaatcggcacgagatgctgacactggagcctttgcatacattgctgcacatgaaatggaagaaatttgccaaacacatgttcttcttgtccttctgcttttattttttttataatataacgctgactttagtgtcctactaccgacctagggaggaggaggccatacctcatcctctcgctttaacgcataaaatgggttggttacagctgctcgggagaatgtttgtgcttatctgggcgatgtgcatttccgtgaaagaagggatcgcgatcttcctcttgcgacccagcgacctccaatctatcttaagcgacgcctggttccacttcgttttcttcatccaggccgtccttgttattctgtcagtcttcctatacctttttgcatacaaagagtatctagcttgcctcgtcttggcaatggccctgggttgggcaaacatgttgtattacaccagaggattccagtctatgggtatgtacagtgtcatgatccagaaggtcatactgcatgacgtgcttaaatttctgttcgtgtacatagtcttcctcctcggtttcggggtggccctggcaagcttgattgagaagtgccctaaagataataaagattgcagctcctacggctctttttcggacgcagtgctcgagctttttaaactgaccatcggcctaggagacctcaacatccagcagaatagcaagtaccctattctgttcctgttcttgttaataacatatgtgatcctcaccttcgtcctgttgctgaatatgctgattgccctcatgggagaaacggtcgagaatgtgagcaaagagtctgagagaatctggaggctgcagcgagccaggacaatcctcgagttcgaaaagatgctgcctgagtggctgcggagtcgcttcagaatgggtgagctgtgcaaggttgccgaggatgatttccggctctgtcttaggatcaacgaggtcaagtggactgaatggaaaacacatgtttctttcctgaacgaggaccctggccctgtgcgcagaaccgatttcaacaagatccaggatagtagcaggaacaattcaaagaccacactcaatgcctttgaggaggtagaagaatttccagagacctctgtctag

SEQ ID NO: 244651 - DNA, 2376 bp, synthetic construct
  misc_feature 1..2376: note = Description of Artificial Sequence: Synthetic coding sequence
  source 1..2376: mol_type = other DNA
atgaaggcgcaccccaaagagatggttcccctgatggggaagcgggtggccgctcctagtgggaatccagcaatcctcccagaaaagagaccagcagagatcacaccaactaagaaatccgctcacttcttcctggagattgagggatttgaacccaacccaaccgttgctaaaacctctccccctgtattcagtaaacctatggattccaacatccgccaatgcatcagtggtaactgcgatgatatggatagtccgcaaagccctcaggatgatgtgacagagacacctagtaacccaaattctcccagtgcccagctggcaaaagaggagcaacgccgaaaaaagaggagactgaaaaaacggatattcgccgctgtttctgagggttgcgtggaagaactggtcgaactgctggtggaactccaggagctgtgtcggcgacgtcatgatgaagatgtccccgacttcttgatgcacaagctcaccgcatcagacaccggaaaaacatgtcttatgaaggcactgttgaatatcaatcccaataccaaggagatagtgagaatccttctcgcatttgccgaggagaacgacatacttggcaggttcattaacgcggagtacaccgaagaggcttatgaaggtcagaccgcactgaatatagctattgaaagaagacagggcgatatcgcagccctcctgatcgctgccggtgccgacgtgaatgcgcacgccaagggggctttcttcaacccaaaataccagcatgagggcttctattttggagaaacccctttagcgctggctgcttgtactaatcaacctgaaatagtgcagctgttgatggagcacgaacagaccgacatcactagccgcgactcccggggtaacaacatcttgcacgctcttgttacggttgcagaagacttcaaaacacaaaacgacttcgtaaagaggatgtacgatatgattcttctgcgcagtggcaactgggaattagagactacacgaaacaacgatggtctaacacccttgcagctcgctgcaaagatggggaaagccgaaatcctgaagtacatcttgtccagggaaatcaaggaaaaacgtttgcgcagcctgtctcgaaagttcacagactgggcttacggcccagtgagctcaagcctctatgacctaactaatgtggatacgacaaccgataactccgtccttgagatcacggtttacaacacaaacatcgataaccgtcacgaaatgctgaccctggagcccttgcataccttgttgcacatgaagtggaagaaattcgcaaagcacatgttttttctgagtttctgtttttacttcttctacaacataacactgactctagtcagctattaccgcccacgtgaagaggaggctatcccccatcctcttgccctcacccacaagatgggctggttgcagctcttggggagaatgtttgtcctgatttgggcaatgtgcatctctgtcaaggaagggattgcgattttcctgctccgaccttccgacttgcagagcattctgtcggatgcctggtttcatttcgtcttctttatccaagctgtactggtcattcttagtgtgttcctgtatctcttcgcctataaagagtacttagcatgcctggtgttagccatggcgctgggatgggcgaacatgctttactacacacgcggtttccagtctatggggatgtatagcgtcatgatccagaaagttatcttgcatgacgtgttaaagttcttgttcgtttacatcgtctttctcttgggattcggggtggcgctggcatcactgatcgagaaatgtcccaaagataacaaagattgctcaagctatggcagtttctcggacgcagtgttggaacttttcaaactcactattggactgggagaccttaatatacagcagaactcaaagtatcctatcctatttttatttttactgattacatacgtcattctgacttttgtgttgctgctgaacatgctgatagctttaatgggagagacagtggaaaatgtgtccaaggagagcgaaaggatttggagactgcaaagagcgaggactatccttgaattcgaaaagatgctgcctgagtggctgcgttctcgatttcgcatgggggaactgtgcaaagttgccgaggatgactttcggctgtgtcttcgaatcaatgaggtcaaatggactgaatggaagacacatgtgtcctttcttaatgaagacccgggacctgtgcgcagaactgcagacttcaataaaattcaggattcaagccgcaataactccaaaacaacgctgaacgccttcgaagaggtggaggaatttccagaaacatcagtctag

SEQ ID NO: 244652 - DNA, 2328 bp, synthetic construct
  misc_feature 1..2328: note = Description of Artificial Sequence: Synthetic coding sequence
  source 1..2328: mol_type = other DNA
atgtcccaccatacctggcctagccctgcgttgaatcttgactttgctacatacctgctccgggacttaggagcacactttttcctggagatcgagggatttgagccaaatcctacagtggcaaagacttctccccctgtgttcagtaagccgatggattccaatatccggcagtgtatcagcgggaattgtgacgacatggatagtcctcagtcaccccaggatgacgtgaccgaaaccccctcgaacccaaattccccttccgctcagctggcaaaagaggagcagaggcgtaagaaacgcaggctgaagaaacgcatttttgcagctgttagtgaaggttgcgtggaagaactggtcgaactgctcgtcgagcttcaggaactctgtaggcggcgacacgatgaagacgtgccagactttcttatgcacaaactaacggcctctgatacagggaagacgtgcctgatgaaagcattgctcaacattaatccaaacactaaagagattgtccggatcctgctggccttcgcggaagaaaacgatattcttggacggttcatcaacgccgagtacacagaggaagcctacgaaggacaaaccgctctgaatattgctatagagcgacgccagggggatattgctgctctgctcattgcagccggagccgacgtcaacgcccacgccaagggggcatttttcaatcctaagtatcaacacgagggattctattttggggaaactccccttgcgcttgcggcatgtacaaaccaacccgagatcgtacagcttctcatggaacacgagcagactgacatcacaagccgcgactccagaggcaacaacatcctgcacgctctggtcacagtcgctgaagattttaagacccaaaacgactttgtaaagagaatgtacgatatgatcctgctgagatctggcaattgggagctagagaccacccgaaataacgatggactcactccacttcaattggcagccaaaatgggaaaggccgagattctgaaatacatcctgagtagagagatcaaagagaaaaggctcagaagcttgtctaggaagttcacagattgggcttacgggcctgtttcctcctcgctttacgatcttaccaatgtcgatacaacaactgataactctgtgttggagatcacggtgtataacactaacatagacaatcgacacgagatgttgacactggaaccactgcataccttattgcacatgaagtggaagaagttcgctaagcacatgttttttctcagcttttgtttctactttttctacaacatcaccctgaccctggtgtcctactatcgccctcgggaggaggaagctatcccacatcccttggcactaactcacaagatggggtggctacagttgctcggccgtatgtttgtgctgatatgggctatgtgcatctccgtgaaagaaggcatcgctatttttctcctgaggccctcagacctgcagagcatcctaagtgacgcctggtttcacttcgtattctttattcaggcggtcctcgtgattctgagcgttttcttatatctgttcgcatacaaggaatatcttgcctgcctggtgctggcaatggcgctgggttgggcaaacatgctgtactacacaagggggttccagtctatgggcatgtattctgtcatgatccagaaagttattctgcacgacgtgctcaagttcctgtttgtttacattgtgtttctcttaggattcggtgtcgcactggcctctctgatcgagaagtgccccaaagataacaaagactgctccagttatggctccttttccgatgccgtcttagagctgtttaagctgacaatcggtctgggagaccttaatattcaacagaattctaagtacccgattctgtttctgttcttactaatcacttacgttatactaacattcgtgcttcttcttaatatgttgatagctctcatgggagaaaccgtggaaaatgtgagcaaggagagtgagcggatctggcgtttacagcgcgcaaggaccatcctcgaattcgaaaagatgctgcccgaatggctgagatccagattcaggatgggagaactctgcaaagtcgccgaggacgactttcgcctctgcctccggattaatgaagttaagtggactgaatggaaaacacatgtgagtttcctgaatgaagatcccggtccagtaagacgtaccgctgattttaataagatccaggactctagcaggaataactccaagaccaccttgaatgctttcgaggaggtcgaagagtttcccgagacctctgtgtag

SEQ ID NO: 244653 - DNA, 2616 bp, synthetic construct
  misc_feature 1..2616: note = Description of Artificial Sequence: Synthetic coding sequence
  source 1..2616: mol_type = other DNA
atggcagactcatcagagggaccgcgagcgggtcccggtgaagtggcggagctgccgggagatgagagcggaacccccggtggagaagctttccccctttcaagcctggcaaacctatttgaaggtgaggatgggtctctgtccccttctcccgctgacgccagcagaccggcaggacctggcgatggtagacctaatctgaggatgaaattccagggcgcattccgtaagggagttccgaatcctatcgaccttctggaatcaactctttacgagtcttccgtggtaccaggccctaagaaagcacctatggattctctatttgattacgggacctaccgccatcactcatcagataataaacgctggaggaagaaaataatcgagaagcagccacagtcaccaaaggcgccagcaccacagcctccccctatcctgaaggtcttcaataggccaatcctgttcgacatcgttagcaggggcagcacagcggatcttgacggtctacttcctttcttgctgactcacaagaaaagactaaccgacgaagagttccgagaaccaagcaccggcaagacatgcttacccaaagcactcttaaatctgtcaaatggcaggaacgataccattccagtgctgttagacatcgcggagagaactggcaatatgcgtgaatttataaactcaccgttccgtgatatatactatagaggacagacggccctacatatcgcgatcgagagaaggtgtaagcactacgtcgagctactggtggcacagggggcagatgtgcacgcacaggctagaggacgattcttccagcccaaagacgagggcggatatttttactttggcgaacttcctttatcactagccgcatgcactaaccaaccacatatcgtgaactatttaaccgaaaatcctcacaaaaaagctgatatgcggaggcaggactccagaggtaataccgtgctgcacgcgctcgttgcaattgccgacaacacgagagagaataccaagtttgtgaccaagatgtacgatctccttttgctgaagtgtgcaagactgtttccggattcaaaccttgaggctgttctgaataatgacgggctgagtcctctgatgatggctgccaagacaggcaagattgggatctttcaacacatcatccggagggaggttactgatgaagatacccgacatcttagccgaaaattcaaggattgggcgtacggacccgtgtattctagcctgtacgatctgtcctccctcgacacttgcggcgaagaggctagtgtcctggaaatcctggtctataacagtaagatagagaaccgccatgagatgctcgcagtagagccaattaatgagctactgcgagataaatggaggaaattcggagccgttagcttctatattaacgttgtcagctatctgtgcgcaatggtgatttttaccctcacagcatactatcagcccctggagggcaccccaccatatccctaccgcacaaccgttgattacttgcgcttagctggagaggtcattacactctttaccggcgttctgttttttttcactaacatcaaagatctcttcatgaaaaagtgccctggcgtgaactcgctcttcatcgatgggagttttcagcttctttattttatctattctgtgttggttattgtcagtgccgctctctatctggccggaattgaggcttatttagcagtgatggtattcgcactggtgctcggctggatgaatgcgctttactttacgcgtgggttgaagcttactggaacttattccatcatgatccaaaagatccttttcaaggatcttttccggtttcttctggtttatcttctgtttatgatcggctatgcttctgcattggtttcgttgcttaatccatgcgccaatatgaaggtgtgcaacgaagaccagacgaactgcactgttcccacttatccatcgtgtcgcgattcagaaacgttctcaacttttcttcttgatctcttcaaactaacaattggcatgggggacctggagatgctgagttccacaaagtacccagtggtctttattatactgctggtgacttacataatactgacctttgtactcctgctgaatatgctcattgcattgatgggggagactgtggggcaagtgtcaaaagagtcaaaacacatatggaagctacaatgggccactacgatcttagatatcgagcggagctttccagtttttttacggaaggcatttaggagcggtgagatggtaacagtagggaagtcaagcgatggaaccccagatagaaggtggtgctttagagtagatgaagtaaattggtcccattggaatcagaacctgggtattattaacgaggacccagggaagaacgagacctatcagtactatggattctcccacactgtgggacggctgcgtcgtgacagatggtcttctgtggtaccaagggttgtcgagctgaataagaatagcaatcccgacgaggtcgtggtgccgctcgattcaatggggaacccacgctgcgacgggcaccagcagggctatccaagaaagtggcgcaccgatgacgccccactgtag

SEQ ID NO: 244654 - DNA, 2436 bp, synthetic construct
  misc_feature 1..2436: note = Description of Artificial Sequence: Synthetic coding sequence
  source 1..2436: mol_type = other DNA
atggcggattctagcgagggccctagggccggtccaggggaggtcgccgagctgccgggtgatgagtctggcacacctgggggtgaagcattcccactctcctctctcgccaatcttttcgaaggcgaggatgggagcctgagtccctcgcctgccgacgcatcaaggcccgcaggccctggcgatggacgccctaatctgcgaatgaagtttcagggggcattccgtaagggcgtgccgaacccgatagatcttcttgagtccacgttatacgaatcgtcggtcgtgccagggcctaaaaaggcaccaatggatagtctgttcgattacggtacatacaggcaccattcatcagacaataagagatggcgtaagaagattatcgaaaagcaacctcaatctccgaaggccccagcaccccagcctcccccaattctgaaagttttcaaccgaccgatcctgtttgacattgtgtcacgaggaagtacggcggacctggatggactgctaccatttttgttaacccacaagaagaggctgacagatgaagaatttagggagccaagcactggaaaaacatgcctgcccaaagccctactgaatctgagcaacggtcggaacgacacgattcctgtcttactggacattgctgagagaactggaaacatgcgcgagtttattaactctccctttagagacatctactataggggacagacagcactccatatcgcgatcgagagacgttgtaaacactatgtcgaactgctggttgcccagggggctgacgtgcacgcgcaggccaggggacggttctttcaaccgaaagacgagggaggctacttctattttggcgagctgccgctcagcctagcggcttgtacaaatcagccacatatcgtgaactacctgaccgaaaacccccacaaaaaagccgacatgcggaggcaggactccagaggcaacacagtactacacgcccttgtggctatagctgacaatacccgggagaacactaaattcgtgaccaaaatgtacgatctcctgctactcaagtgcgctagactttttccagattctaacctcgaggcggtgctcaacaacgacggcttgtctccacttatgatggctgctaaaacaggcaaaataggtaacagacatgaaatgctcgcagtggagccaattaatgagctgctccgcgacaagtggagaaagtttggggctgtgagtttttacataaatgtggtcagttacttgtgcgccatggtgatcttcactcttacagcatactaccagccactcgaagggacccctccatatccgtatagaacaacagtggactacctcaggctggcaggggaggtcatcacactctttactggtgtgctttttttttttacaaacattaaagacctctttatgaaaaaatgtcctggagtgaactctctattcattgacggaagttttcagctgctgtatttcatttactctgtgctcgttatcgtgagcgctgcactatatctggcagggatcgaggcataccttgcagtcatggtgtttgccttggtccttggctggatgaatgcactgtactttacccgtggactgaagctcacaggtacctattcgatcatgattcagaagattctttttaaagatctctttagatttctgctggtgtacctgctgttcatgatcggctacgcctcagcgctggtgagtttactgaacccatgtgccaatatgaaagtctgtaacgaggatcagaccaactgcactgtgccaacatacccctcttgcagggattccgaaacattctccactttcttgctcgaccttttcaagttgactattggcatgggcgacttggagatgttatcatcgaccaagtacccggttgtgttcataattctgttggtgacatatatcattctgacatttgtgcttttgctcaacatgcttatagcactgatgggcgaaaccgtgggccaggtttccaaggagagtaaacatatctggaaactacaatgggccactacgatactggacatcgaacggtcatttcctgttttcctccggaaagccttccgcagtggggagatggtgaccgtgggcaaaagtagcgatggcacacccgatagaagatggtgctttcgcgtggacgaagtgaattggtctcactggaaccagaatctagggataattaacgaggatccaggcaagaatgaaacatatcagtattatgggttttcccacacagttggccgtctgagaagagatcgctggagctctgtggtgcctcgcgtggtggagctgaataaaaatagtaaccctgacgaggtggttgtaccactggactcaatgggaaaccctaggtgtgacggtcatcagcaggggtatcctcgtaagtggcgcaccgacgacgctcccctgtag

SEQ ID NO: 244655 - DNA, 2475 bp, synthetic construct
  misc_feature 1..2475: note = Description of Artificial Sequence: Synthetic coding sequence
  source 1..2475: mol_type = other DNA
atggccgacagttcggagggacctagagccggacccggtgaagtagctgagctgcccggtgacgaatctgggacccctgggggagaagccttccctctgtctagtttagctaacctgttcgagggagaggatggctcccttagtccaagccccgcagacgcttcccggccagccggtccaggagatggcaggcctaaccttcgcatgaagtttcagggagcctttcggaagggagtgcccaaccccatcgatttactggagagcacattatatgagtcctcagtggtgcccggaccgaaaaaagccccaatggattccctgttcgattatggcacataccggcatcacagctccgacaacaagcgctggaggaaaaagattatcgaaaagcagcctcagtctcctaaggcccctgctcctcagccacccccaattttgaaagtgtttaaccgtcccatcctatttgatatcgtcagtagggggagcactgccgatttagacggactgctgcccttcctcttgacacacaagaagcgcctgacggatgaggaatttcgcgaacccagtacgggaaaaacctgccttcccaaggccttattaaacctgtctaatggaaggaacgacactatcccggtgttattggatatcgccgaacgtaccggcaacatgcgagagtttatcaattcccctttcagggacatctactaccggggagaactgccactgtcactggcagcctgcaccaaccagccacacattgtgaactatcttaccgagaatccccataagaaagccgacatgcgaagacaagattcaagaggaaacacagtgctgcatgccctcgttgcgatcgccgacaatactagagagaataccaaatttgtgactaaaatgtatgacctgctgctgctaaaatgtgcacgcctgttccctgattccaacttggaggctgtacttaataatgacggtttatctcccctcatgatggccgctaaaacaggaaaaatcggcattttccaacatatcatccgtcgagaagtgaccgatgaggacacccgccatttgtctcgcaagtttaaagactgggcttacggccctgtgtattccagcctgtatgatttatcttctctcgatacctgtggtgaggaggctagtgtgctggaaatcctggtctacaattcaaaaatcgaaaaccgccacgagatgctggccgtggaacctataaatgagctgcttagggataagtggcgcaaattcggcgctgtatcattctatatcaacgtggtgagctatctgtgcgctatggtcatcttcactttgactgcttactatcagccgctcgaaggtacacctccatacccataccgtacaactgtggactatttgagactggcgggagaagtcatcacactatttacaggggtacttttctttttcactaatatcaaagatctgtttatgaaaaaatgccctggagtgaactctctgttcattgatgggagcttccagctgctgtattttatctacagcgttctagtcatagtgagcgccgctctatacttagcaggcattgaggcgtacttggctgtgatggtctttgcactggtcctcggctggatgaatgccttatactttacccgaggcctcaagctcacaggaacctacagcatcatgattcagaagatcctattcaaggatttgtttaggtttctgctcgtgtacctccttttcatgatcggttacgcctctgcgctggtgtcgctgctgaatccttgtgccaacatgaaagtctgcaatgaggatcagactaactgcactgttcctacatatcctagctgccgagatagcgagaccttcagtacgttcctacttgacctgttcaaactcacgattgggatgggggatcttgagatgctgtctagtacgaagtatcctgtggtgtttataatattactcgtgacctatattatccttacgttcgtgcttctgctgaacatgctgatcgcactcatgggcgagacagtgggccaggtctccaaagagagcaaacacatctggaaactccaatgggctaccacgatactggatatagaaaggagttttcctgtattcttacggaaagcctttcggtctggagaaatggttacagtggggaaatcttctgatggcacccccgatagacggtggtgttttcgcgtggatgaggtcaattggtcgcattggaatcagaatttggggatcatcaatgaggatccgggaaagaatgaaacgtaccagtactacggcttcagccataccgtcggtaggctgcgcagagatcggtggagcagcgtcgtcccgagagtggttgagctcaataagaactccaaccccgacgaagtggtggttccactcgattctatgggcaaccccaggtgtgatggtcaccaacaggggtatcccaggaagtggcggaccgacgatgcacccctttag

SEQ ID NO: 244656 - DNA, 2616 bp, synthetic construct
  misc_feature 1..2616: note = Description of Artificial Sequence: Synthetic coding sequence
  source 1..2616: mol_type = other DNA
atggctgacagctcagagggccctcgagccggaccaggcgaggtcgccgagttacctggcgacgagtcaggtacacccggaggtgaagcatttcctttgtcaagtctcgcaaacctgtttgagggtgaagacgggtccctgagcccaagccccgcagatgccagtcgtccagccggtcccggtgatggacgtcctaacttacgtatgaagttccagggggcattccgtaagggcgtccctaatccaatcgacctgttggaaagcaccctgtatgagtcatcggtggtgcccggaccaaaaaaggctcccatggacagtctttttgactacggcacctaccggcaccattcctctgataacaagaggtggagaaagaagattatcgagaagcagccccagagtcccaaagcacctgctccccagcctccacctatactcaaggtttttaaccgcccaatcctcttcgatatcgtgtcacggggttccactgctgatctggacggcttgctacctttccttctgacccacaaaaagcggctgaccgatgaggaatttagggaaccatccactggaaaaacatgcctccctaaggccttgttaaatctctctaatggccgtaacgatacgatccctgtgctgctggacattgcagagcgaacaggcaacatgcgggaatttatcaacagcccttttcgcgacatatactaccgaggccagactgccctgcatatcgcaattgaacgcaggtgtaagcattacgtagaattgttggtagcccaaggtgccgacgtgcacgcccaagccagaggaagattctttcagccaaaggatgagggtggatacttttatttcggtgaattgcctctgtccttagctgcttgtaccaaccaaccacatatcgtcaactatctgaccgaaaacccacacaaaaaagccgatatgagacgtcaggacagcagaggtaatacagtgctgcatgctttagtggccatcgcggataatactcgggagaacaccaaattcgtgactaaaatgtatgatcttctgctccttaagtgtgctagactcttccccgactctaacctggaggccgtgctgaacaatgacggattgagtcctctgatgatggcagctaagacaggcaaaattggaatttttcagcatataatcaggcgagaagtgaccgatgaggatacacggcacctgtcccgcaagtttaaagattgggcgtatgggcctgtgtactcatctctatatgatctcagctcccttgacacgtgtggggaggaggcgtctgtgttggagattttagtctacaactccaaaattgaaaaccgtcatgagatgttggccgttgagcccataaacgaactgctgcgcgataaatggcgcaagttcggcgctgtgtctttctacattaatgttgtgtcgtacctttgcgctatggtgattttcaccttaaccgcctactatcagcccttagagggaacccccccttacccgtacagaaccaccgttgattacctgaggttggcgggagaggtaatcacgctcttcacaggcgtgctgttctttttcaccaatattaaggacctgttcatgaagaagtgtcccggagtgaatagcctttttatcgacgggagcttccagctcctgtactttatctactcagtcctggtgatcgtgtccgccgcattatacctcgccggtatcgaggcatatttagccgtgatggttttcgccctggtgctcggatggatgaacgcgctgtacttcactaggggtctcaagctcactggaacctatagcattatgattcagaaaatccttttcaaagatttattccgattccttctggtgtatctcttgtttatgatcggctacgcgagtgctctcgtaagcctgcttaacccctgcgcaaacatgaaagtttgcaatgaggaccagaccaactgcaccgtgccaacttacccaagctgtcgagacagtgaaacattctccacgttcttgctggatcttttcaagctcaccatcgggatgggagacctggagatgctctcgtccaccaagtaccccgtcgttttcattattctcctggtgacctacattatcctgacattcgttctcttactaaacatgttaattgcgctgatgggggagaccgtcggccaagtgtctaaggaatccaaacatatttggaaactccaatgggccaccacgatccttgatatcgaaagatctttccctgtgtttctgcgcaaggctttcagatctggggaaatggtgaccgtgggaaagagctctgatggaactcctgaccgtaggtggtgttttagggttgatgaagtcaactggtcccactggaaccagaatctcggcatcattaacgaggatcctgggaaaaacgaaacataccagtactacgggtttagccacaccgttggacgcctaagaagagacaggtggtcatctgttgtgccccgtgttgttgaattgaataagaattctaatcccgacgaagttgttgtgcctcttgacagtatggggaatccccgatgtgacggtcatcagcagggctatccacgcaaatggcggactgatgatgctccactctag

SEQ ID NO: 244657 - DNA, 2514 bp, synthetic construct
  misc_feature 1..2514: note = Description of Artificial Sequence: Synthetic coding sequence
  source 1..2514: mol_type = other DNA
atggccgacagtagcgaaggccctagagcagggcctggggaggtcgccgagttacccggagacgaatccggaacaccaggcgatggaagacccaatctgcgcatgaagtttcagggcgcatttcggaaaggagtccctaatcctatcgatctcctggagtctactctgtatgaatctagtgtcgtgccagggccaaaaaaagcccctatggattccctcttcgattatggcacctatcggcaccactcttctgataacaaaaggtggagaaagaagatcattgagaaacaacctcagagccctaaggccccagcaccacaaccccctccaatcctgaaagtctttaatcgccctatcttgtttgacattgtcagcagaggtagcaccgcagacctcgatggcctgcttcccttcctgctgacgcacaagaagcgactaactgatgaggaatttagagagccttcaacgggcaagacctgcctcccaaaggctttgcttaatttgagtaacggaagaaacgataccattcccgtactattagacatcgccgaacgtactggaaatatgagggagttcatcaattcgcctttccgggatatctactatcgcggtcaaacagccctgcacattgcaatcgaaaggagatgtaagcactatgtggaactcctggtagctcaaggcgctgatgtacacgcacaagctcggggacgtttctttcagcctaaggacgaagggggatatttttatttcggggaattgcctctttcattggcggcatgcacaaatcagccacacatagtcaattatctcacagaaaatcctcacaaaaaagccgatatgcgacggcaggacagtcggggtaacactgtgctgcacgcactggtggccattgccgacaatacaagggagaacacgaagttcgtgacgaaaatgtacgatcttctgctgctgaaatgcgcacgactgttccccgattcaaatctggaggcagtcttgaacaatgacgggctttcacccctgatgatggccgctaagaccggtaagatcggaatcttccagcatatcatccgcagggaagtgaccgacgaggataccaggcatctctccaggaagtttaaggattgggcttacggtcccgtttatagcagtctctatgatctttcaagtttggatacatgtggcgaggaagcctccgtgttggagattctagtgtacaatagcaagatagaaaatcgccatgagatgctcgctgttgaacctatcaatgaactattgagagacaagtggcgtaaattcggcgctgtttccttctacattaacgtggtcagttacttgtgcgccatggtgatttttacacttaccgcttactatcagcctctggaagggactccgccttatccttaccggactaccgtggactatcttcgccttgctggcgaggtaatcaccctgtttacaggcgtgcttttcttcttcactaatataaaagatttgtttatgaaaaagtgccctggtgtaaacagcctgttcatcgacggcagcttccagctgctatacttcatctacagcgtactggttatcgtgtcagctgccctctacttggctggtatcgaggcctatcttgccgtgatggtctttgcccttgtgttgggatggatgaatgcactctattttactcggggactgaagctgacggggacgtatagcataatgattcagaaaatcttgttcaaggacctcttccgctttcttctggtgtacctcttgtttatgatcggctatgcatctgcccttgtcagtctgctgaatccctgtgccaatatgaaggtatgcaatgaggaccaaacgaattgtacagtcccgacttatccatcatgtagagatagcgaaacattttcaacatttcttctggacctcttcaagttaaccattggaatgggcgacctcgaaatgctttccagtactaaatacccagtggtgtttatcattcttttggtgacatacatcatcctcaccttcgtgctgttactcaatatgctcatagccctaatgggggaaaccgtcggccaagtttccaaagagtcgaaacatatctggaagctgcagtgggcaacaactatcctggacatagaaaggagctttccggtgttcctacggaaagcttttaggtcaggggagatggtgaccgtggggaagagctctgatggcaccccagaccgccgttggtgtttccgggttgacgaagttaactggagccactggaaccagaatctcggaatcatcaatgaagatcctgggaagaacgagacttaccagtactatggctttagccacaccgtgggacgtcttagaagggaccgttggtcatctgtagtgcctcgggtggtggagctgaacaagaacagcaatcctgatgaagtagtggtgcccttggacagtatgggaaaccctcggtgtgacggccaccagcaggggtatcctcggaagtggcgcacagatgacgcaccactgtag

SEQ ID NO: 244658 - DNA, 2436 bp, synthetic construct
  misc_feature 1..2436: note = Description of Artificial Sequence: Synthetic coding sequence
  source 1..2436: mol_type = other DNA
atggcagattcctccgagggccctcgagccggtcctggcgaagtcgctgaactccccggagacgagtctggaacacccggaggcgaggcctttcccctcagtagccttgccaacctgtttgagggcgaagatggatcactctcacccagccccgctgatgcgtctaggccagcagggcctggtgatggcaggcctaatctgcgaatgaagttccagggggctttccgaaaaggagttccgaacccaatagacttactggaatccactctctacgaatcgtccgttgtccccggtcctaagaaggcgcctatggacagtctgttcgactacggcacgtatcggcaccactcttccgacaacaagagatggcggaagaaaattatcgagaaacagccgcagtctcccaaggcgccagctcctcagccccctcccatcctcaaggtgttcaatagaccaatcctgttcgacatcgttagccggggatcgacagccgacctcgacggactattgccattcttacttactcacaaaaagcgcttaactgacgaagagtttagggagccaagtacagggaagacctgtctgcccaaggccctgctcaacctaagtaacggcagaaacgataccatccctgtcttacttgatattgcagaaaggacgggcaatatgcgggagttcatcaactcgccattccgtgatatatattacagaggtcagaccgcactacacattgcaatagaacgtagatgcaaacactacgtagaattgctggtagctcagggagcggacgttcatgcacaagccagaggtcggttcttccaacctaaagatgaggggggttatttttattttggtgaactgccccttagtctggccgcatgcactaatcagccccacatagtgaattacttgactgaaaatccccacaaaaaagccgatatgcgaagacaagatagccggggaaatacagtcctgcacgctctggtggccatagccgacaacacacgcgagaataccaaatttgtgaccaaaatgtatgatctgctactcctgaagtgcgccaggctgttcccggactcaaatttggaggccgtgctgaataacgatgggttgtctccactgatgatggccgcaaagacaggcaaaatcggcaaccgacacgaaatgctcgccgtcgagcccatcaatgaactcctaagagataaatggcgcaagttcggcgcagtctctttttatataaatgtggtttcatatttgtgtgctatggtcatcttcaccctcaccgcgtattatcagccactggaggggacccccccatacccctacagaaccactgtagactatctcagactggctggtgaggtgatcaccttgttcaccggtgttttgtttttctttacaaacatcaaggacttgttcatgaagaaatgtcccggtgtcaatagtctctttattgacgggagctttcagctgctttacttcatctattccgtgctggtgattgtgtccgcagccctctacctcgcagggattgaggcttacctggctgtgatggtgttcgccctggtcttgggttggatgaacgccctgtatttcacccggggattgaaacttaccggaacctactccatcatgatccagaagattttattcaaagacctgttcagatttttgttggtgtacttgctgttcatgatcggatacgcaagcgcccttgtgtcactgctgaacccatgcgctaacatgaaggtatgcaatgaagatcagactaactgcaccgtgcccacctaccctagctgccgcgattcagagacgttcagtacttttcttcttgatctgtttaagctgactatcggaatgggagacctggaaatgctcagctcaacaaagtacccagttgtctttataatcctacttgtgacttacatcattctcacctttgtacttttactcaatatgttaatcgcgctcatgggtgaaactgtcggccaggtgtccaaagagagcaagcacatctggaaactccagtgggccaccaccatactggacatcgagagatccttccccgtattcctgcgtaaagccttccgcagcggggagatggtgaccgttggcaagtcctccgacggtacccccgatcggcgttggtgtttccgggtcgacgaggtcaactggagtcattggaaccagaacctcgggataatcaatgaggaccctggcaagaacgagacgtatcaatactacgggttctcccacacagtaggccgtctgaggagagatcgatggagctcggtcgtccccagggtggtcgagttaaataaaaattcaaatccagacgaggtggtggtacccctcgacagtatgggcaatccacggtgcgatggtcatcagcagggctatcccagaaaatggaggaccgacgatgcacccctttag

SEQ ID NO: 244659 - DNA, 2475 bp, synthetic construct
  misc_feature 1..2475: note = Description of Artificial Sequence: Synthetic coding sequence
  source 1..2475: mol_type = other DNA
atggcagattcttccgagggcccaagagcgggacctggggaagtggctgagctacccggtgacgagtcaggaaccccgggtggtgaagccttccccctgtcatctctagccaacctatttgagggcgaggatgggtccctgtcccctagccccgcagacgcctcccgaccggcaggccctggtgatggacgaccaaatctgcggatgaaattccaaggagccttccgtaagggtgtgccgaaccctatcgacctgctggaatcgaccctctatgagtcttcagtggtccctggcccaaaaaaagctcctatggactctctcttcgactatgggacatatcgccaccactcctctgacaataaaagatggcggaaaaagatcatcgagaaacagccacagtcgcctaaggcccctgcgccacagccaccacccatactgaaagtcttcaataggccaattttgtttgatattgtgagtcgcggatctaccgcagacttagacggactactcccattcctccttacacataagaaacggctaacggacgaggagttcagagaaccctcaaccgggaagacctgtttgccgaaggccctactcaacctaagtaacgggaggaatgatacaatccctgtcctgctggacatcgcagagaggacggggaacatgagagagtttatcaactcgccgttcagggacatttattacaggggagagctgcccctttcattagctgcttgtacaaaccagccacacattgtgaactacttgacagaaaatccacacaaaaaggcggacatgcgaagacaggacagccgcggaaacaccgtgctgcatgctttggttgccatcgccgacaacaccagagaaaatacgaaattcgtgactaagatgtacgatttactccttctcaaatgcgctcgcttgttcccggacagtaacctggaagccgtcctgaataatgatggcctcagcccacttatgatggctgcaaaaacaggtaaaattggtatctttcaacatatcatcagaagggaagtgaccgatgaagacactcgccacctatcaaggaaattcaaggactgggcctacggaccagtgtattcatcattgtacgatctcagttcactggacacctgcggcgaggaagcttcagtgcttgaaatcctggtctacaactccaagatagagaacagacacgagatgcttgctgttgagccaattaatgaactcttgagagacaaatggaggaagttcggtgccgtgtcattctacattaatgtggtctcgtatttgtgtgctatggtaatcttcacacttaccgcctattaccagccactggaagggacacctccttatccttatcggactacagtcgactacctgcgactcgcaggggaggttatcacccttttcaccggggtgctcttcttcttcaccaatatcaaggacctgtttatgaagaagtgcccaggggtgaattccctcttcatagacggctcatttcagctgctatatttcatttactccgtgcttgtcattgtttccgcggctctgtacctggctggaatagaggcctatctcgctgtaatggttttcgcactcgtcctgggttggatgaatgccctatacttcacgcgagggttgaaactcaccggaacttattcaatcatgatccaaaagatcttgttcaaagatctcttccgatttttgctcgtgtatttgcttttcatgatcggatacgctagcgcccttgtgagtctgctgaatccatgtgctaacatgaaagtatgtaacgaagaccagacgaactgcacagtcccgacttatccctcctgcagggactctgagactttcagtaccttcctactggacctttttaaactgacaattgggatgggtgacctggagatgctcagcagcacaaagtacccagttgtgttcatcatactgctggtcacttatatcatactgacctttgtcctcctgctgaacatgctcattgctctgatgggggaaacagtggggcaggtgtctaaggagtcaaaacacatttggaaactgcagtgggccacaaccattctcgacatcgaacggtccttcccagtcttcctgcggaaggcttttcgcagtggcgaaatggtgacggtcgggaagagtagtgacggcacaccagatcgtagatggtgctttcgggtcgacgaagtgaattggagccattggaaccagaatctgggaatcatcaacgaggatcccggaaaaaatgaaacttaccaatattatgggttttcccataccgtagggagacttcggcgagataggtggtcgtctgtggtgcctcgggtcgttgaactgaataaaaactcaaacccagacgaggtcgtcgtgccactcgatagcatgggcaatcctcgatgtgatggtcaccagcaggggtaccctcggaagtggcggaccgacgacgctccgctctag

SEQ ID NO: 244660 - DNA, 2295 bp, synthetic construct
  misc_feature 1..2295: note = Description of Artificial Sequence: Synthetic coding sequence
  source 1..2295: mol_type = other DNA
atggccgattccagcgagggaccgagagcgggaccgggagaggtggcagagctgccaggtgacgagtctggcaccccaggcggtgaggctttccccttgtcctcactggcaaatctttttgagggcgaggacgggtctctttcccccagccctgccgacgcctctcgcccagctggacctggtgacggtagacccaacctgcggatgaagttccaaggcgcttttaggaaaggtgtgcctaatcctatcgacttacttgaaagcactctttatgagagttcagtggtgccaggaccaaagaaggctcctatggattcccttttcgattacggcacatatagacaccattcctccgataataaaagatggcgcaagaaaatcatcgagaaacagccccagagcccaaaggcccctgcaccgcagcctcccccaatcctcaaagtatttaatagacctattctctttgacatcgtctcccgagggtccacggcagacctggacggcctgctcccatttctgctgacacacaagaaacggctgacagacgaggagttccgtgagccctcaactggtaagacttgtctccccaaggcgctgctgaatctgtctaacggccgtaatgatacaatcccggttctgctggatatagccgaacgaacgggcaatatgcgagagtttattaattctccttttcgagacatttactacaggggcgaactccccctatccctcgcagcctgtacaaatcagccccacatcgtcaactatcttacagagaatccgcataaaaaggcagacatgcgacggcaagattctagagggaacacggtcctacatgcgctcgtggccattgcagataatacacgggaaaacacaaagtttgtgactaagatgtatgatctgctcctgctcaaatgtgctcgactatttccagatagtaatctcgaggctgtcctcaacaatgatggactatcacctctgatgatggccgctaagacgggtaaaattgggaatcgtcacgagatgctggccgtcgaacctatcaacgagctcctcagggataagtggcgcaagtttggggcagtctccttttatatcaatgttgtttcctacttgtgcgccatggtgatttttacactgactgcttattatcagcctctggagggcacccctccctacccatataggacgacagtcgattacctgagactggccggtgaggtgatcacacttttcactggagtgctatttttctttactaatatcaaggacctcttcatgaagaagtgtccgggagtgaactctcttttcatcgatggcagcttccaattattgtactttatctactccgtgctggtgattgttagtgccgctctttacctggcagggatcgaggcctatttagcagtgatggtcttcgctctggtgcttggctggatgaatgccctatattttactagaggcttaaagctaacgggcacctattccatcatgatacagaaaattttgtttaaagacctctttcgctttctgttagtttaccttctgtttatgataggatacgcctccgctctggtaagcttgctcaatccttgcgccaacatgaaggtgtgtaatgaagaccagaccaattgtacagttcctacctaccccagctgccgggactccgaaacattttccacattcctgttagatctgttcaaacttactatcgggatgggagatcttgagatgttatctagcactaaatatccagtcgtgtttattattttattagtcacttacattattttaacctttgttctactcctaaacatgcttattgcactgatgggggaaacagtggggcaagtttccaaggaaagcaagcacatctggaaactccaatgggccaccacaatcctggatattgagaggagcttccctgttttcttacgaaaggcatttaggagcggggagatggtgactgtcgggaaaagttctgatgggacgccagaccgtcggtggtgtttccgggttgacgaagttaattggtcccattggaatcagaacttgggcatcattaatgaagatcccggaaagaatgagacctatcagtactatggcttctcacacaccgtcggccgtctccgcagggatagatggtccagtgtggtccccagagtcgtggagctcaataagaattccaacccagatgaggttgttgtgccgctagatagcatgggaaacccacgatgcgatggacaccaacaggggtatcctcgcaagtggagaactgatgatgcccctctctag

SEQ ID NO: 244661 - DNA, 2190 bp, synthetic construct
  misc_feature 1..2190: note = Description of Artificial Sequence: Synthetic coding sequence
  source 1..2190: mol_type = other DNA
atgggaggattcctgcccaaggccgagggccctggaagccagctccagaaactgctgccttcatttcttgttcgggaacaggactgggaccagcacctcgacaagctccacatgctgcagcagaagcggattctggagtcacctctgcttagagctagcaaggaaaacgacttgtcggtcttacgccagctgctgctagattgcacgtgcgacgtgcgccaacgtggggctctcggagagactgcactccatatcgccgcactttacgacaacctagaggccgctcttgtactgatggaagcagcccctgaactggtgtttgaacctactacatgcgaagcatttgccggacaaacagctctacatatcgctgtcgtcaaccagaacgtgaatctggttcgcgcactgctgacaagaagggcctcggtgagtgcccgagcaacgggaacggccttccgcagatcccctagaaatctcatctattttggggagcacccactgtcctttgctgcctgcgtaaattcggaggagatagtcagattgttgatcgaacatggtgcggacattcgggctcaagactcactagggaataccgtcttacacatattgattcttcagccaaataaaacttttgcatgccagatgtacaacctgctgctctcttatgatgggcacggagaccacctccagccgcttgatttagtgccaaaccatcagggcttaacccctttcaaattggcaggggtcgagggtaataccgtcatgtttcaacacctaatgcagaaaagaagacatatacagtggacttatggcccactaacctcaatcttatatgacttaacagagatcgactcatggggagaggagctgtcctttctcgagttggtcgtctcaagcgacaagcgggaggcgagacaaatcttagagcagacccccgtaaaggaactggtgagtttcaagtggaataaatacggacggccttacttttgtatactggcggcactttacttgctgtacatgatttgcttcactacatgctgcgtttacaggcccctgaaatttcgtggcggtaaccgtacacattcacgcgatatcaccattttacagcagaagcttcttcaagaggcctacgagaccagggaggatattatccgtctggtgggagagctagtctctattgttggtgctgttataattctcctgctagagatccccgatatttttagagttggcgcatccaggtacttcggcaagactatactgggcggaccctttcatgtcatcattataacctatgcctccttggtcttggtaacgatggtgatgcggcttacgaataccaacggagaggttgtaccaatgtccttcgcacttgtgctgggatggtgctccgtgatgtactttacccgagggttccagatgttaggcccatttaccattatgattcagaaaatgatattcggagatctgatgcggttttgttggctgatggccgtggtaatcctagggtttgcctctgctttctatatcatttttcagactgaggaccccacttctctgggccagttctatgattatccaatggcactgtttaccacatttgagctttttctgactgtgatcgatgctcccgctaattacgatgtggatttaccttttatgttcagtatcgtaaatttcgcctttgccataatcgctaccctgctgatgttaaatttgttcattgcaatgatgggggacacacattggagggtcgcacaggagcgggatgaactatggagagctcaggtagttgccacaaccgtgatgcttgagaggaagctccctcgttgtctgtggccaaggagcggtatctgtggatgtgaattcgggctgggcgacaggtggtttctgcgcgtggagaaccacaatgatcaaaatccactgcgtgtcctgaggtacgtggaagtcttcaaaaacagcgacaaagaagatgaccaggagcacccttctgaaaaacagcctagtggagccgagagcgggacactggccagggcgagcctggccctaccgacaagttccttgagccgcaccgctagccagagcagctctcaccgtgggtgggagattttgcgtcagaatacgttgggccatctgaacctcggactgaatctcagtgagggagacggtgaagaggtttaccatttctag

SEQ ID NO: 244662 - DNA, 1146 bp, synthetic construct
  misc_feature 1..1146: note = Description of Artificial Sequence: Synthetic coding sequence
  source 1..1146: mol_type = other DNA
atgggagggttcctcccaaaggccgaggggcctgggtctcaactgcagaagctgctaccatccttcctggtacgagagcaggattgggatcagcatctggacaagctccacatgcttcagcaaaaacgaatattggaatcacctctcctgagagcatccaaggagaatgacctatcggtgctgcgccagctgctgcttgactgcacatgtgatgtgcgccagcgcggtgctctgggtgagacagccctgcacattgctgccttgtatgataacctcgaagccgcactggtgttgatggaagctgcgcctgagttagtcttcgagccaacgacatgtgaggccttcgctggacaaacggcgctgcacattgcggttgtgaaccagaatgtgaacctcgtgcgggcattactgaccaggcgggcaagcgtgtccgccagggcaaccggaacagctttccgtcgctcaccaagaaatctaatatacttcggggagcaccccctgtcctttgcagcctgcgtgaactcagaggagattgtgagacttctcatcgaacatggcgcagacatcagagcccaggattcactgggtaataccgttttgcacatccttatcctgcagcctaataaaaccttcgcttgccagatgtataatctgctcttgagttatgacggccatggcgaccatttgcaacccctggacctcgtccccaaccaccaggggcttaccccgttcaagctggcaggcgtggaaggcaataccgtcatgtttcagcatctgatgcagaaaaggaggcatatccagtggacctacggtcccctgactagcattctgtatgacctcaccgaaatcgattcttggggggaagaattgtccttcctcgagctagtggtgagttctgataagagagaggctaggcaaatcttggagcagacaccggttaaagagctggtgagtttcaaatggaacaaatacggcaggccctacttctgcattcttgcggcattatacctcttgtacatgatctgctttaccacttgctgcgtttacaggccattaaaattccgcggaggaaatcgcactcactctcgtgacatcaccatcttacaacagaagttgctccaggttattctgcttcgcagagggtag

SEQ ID NO: 244663 - DNA, 1674 bp, synthetic construct
  misc_feature 1..1674: note = Description of Artificial Sequence: Synthetic coding sequence
  source 1..1674: mol_type = other DNA
atggggctatctctaccaaaggaaaagggtctgattttatgtttatggagcaagttttgcaggtggtttcaggactctctgggaaacaccgtccttcatatacttatcttacaacccaacaagactttcgcctgtcaaatgtataaccttctgctaagttacgaccggcacggagatcaccttcagcccctcgatctggtgccgaatcaccaaggtctaacaccgtttaaactggctggggtcgagggaaatacagtgatgtttcagcacttgatgcaaaagaggaaacatactcagtggacatatgggccactgacatcgacgctttatgacctcacagagatagacagttccggcgacgagcagagcttgctggaactaataataacaactaaaaagcgggaggccaggcagatcctcgatcagacccccgttaaggaattggtttcactcaagtggaagagatatggacgcccatatttttgcatgctgggggctatctatctgctctatattatttgctttaccatgtgctgcatctatcgacccctgaagccccgaaccaacaacaggacttcgcccagagataatacgctccttcagcagaagctccttcaggaggcttacatgacccctaaggacgacatcaggctggtcggagagctggtgactgtcattggggcaattatcatcctgcttgtggaagttcccgacattttccgcatgggggttacacgcttctttggccaaacaatactaggtggaccatttcatgtgctaatcatcacttatgctttcatggtgctcgtgacaatggtgatgaggctcattagcgcaagtggggaggtagtgcctatgagctttgccctcgtattgggctggtgcaacgtgatgtatttcgctagagggtttcaaatgctcgggcctttcacaattatgattcaaaagatgatattcggggatctgatgcggttctgctggctcatggctgtagttatactgggatttgcctccgcattctacatcatatttcaaactgaggacccagaagagctcggccacttctatgattatcctatggcgctgttctccacatttgagctctttctgaccattatagatggcccagctaactataacgttgatttaccctttatgtatagtataacatacgcggcattcgctatcatagcgactttgctcatgctaaatctgctgattgccatgatgggagatactcactggcgggtagcgcacgaaagagacgaactttggcgagctcagatcgttgccacaaccgtaatgttagaacgaaagttaccaagatgtctgtggccccgaagcggcatttgcggtcgagagtatggacttggagaccgatggttcctgcgggtggaagataggcaggatttaaaccgccagcgaattcagcgatatgcccaagcatttcacactcgaggcagcgaggacctcgacaaagattcagtagagaagttggagctagggtgtcccttctccccacatcttagcttgcccatgcccagcgtgagcagatcaacctctaggtcatccgcaaactgggagcggcttcgccagggcacgcttcggagagacttgcgcggaatcattaaccggggactggaagacggtgagtcttgggaatatcagatttag

SEQ ID NO: 244664 - DNA, 2178 bp, synthetic construct
  misc_feature 1..2178: note = Description of Artificial Sequence: Synthetic coding sequence
  source 1..2178: mol_type = other DNA
atgggcctgagcttgcctaaggaaaagggcctgattctctgcctctggagtaagttttgtcggtggtttcagcgacgcgagagctgggctcaaagtagggacgaacagaacctgcttcagcagaagcgtatttgggagagtcctctgttgctcgcagccaaagataatgatgtgcaggcacttaacaaactgttgaagtacgaggactgtaaggttcaccaacggggagccatgggagaaaccgcccttcatattgccgctctatacgataacctggaagctgcgatggtcctgatggaagctgctccagaactggtttttgaacccatgacatctgagttgtatgagggacagacagccttgcatatagccgttgtgaaccagaatatgaacttggtccgtgcgctgctcgcacgccgtgccagcgtgtctgcaagggccacaggcacagcctttcgtaggtctccctgcaatctcatttatttcggagagcacccactctcgttcgccgcatgcgttaacagcgaggaaattgtgcgacttctaattgaacacggggcagatataagggcacaggatagcttgggcaataccgttctgcatatccttatactgcagcctaataagacatttgcatgtcagatgtacaacttgctgctttcctacgaccgccatggagatcatttacagccactggacctggtgcccaatcaccaaggtctgaccccgtttaaattggccggtgtcgaaggaaatacagttatgtttcagcatctcatgcagaaaagaaagcacacacaatggacatacggcccactgaccagtactctctatgatctgactgaaattgactcatcgggcgatgaacagtccctgctggaactgatcatcaccacaaagaaaagggaggctagacagatccttgatcagacacccgtcaaggaattggtctccttgaaatggaagcggtacggccgaccatacttttgcatgcttggggctatatatttactctacatcatttgtttcaccatgtgctgtatctaccgaccgttgaagccacgtaccaacaaccgaacatctcccagggacaataccctgctgcagcagaagctcctgcaggaagcttatatgacaccaaaagacgatataaggctggtgggcgaactcgtgacagttattggggctatcataatcctgctggtcgaggtccccgacattttccgaatgggagtcacacggttctttggacaaacaattctgggcggtcctttccacgttttaataattacgtacgctttcatggtactggttacaatggttatgcggctgattagcgccagcggggaggtggtacccatgagtttcgccctggtcctcggctggtgtaacgtaatgtacttcgcgagggggttccagatgctgggcccttttaccataatgatccagaagatgatatttggcgatcttatgcggttctgctggctgatggcagttgttattcttgggtttgcttctgctttttacattatcttccagactgaggacccggaagagctgggacacttctatgattatccaatggcactgttttccaccttcgagctgttcttgaccatcatcgatggacccgctaattataacgtggatttgccatttatgtactccatcacctacgccgcatttgctataatcgccactttgctcatgcttaatctgctgattgccatgatgggagatacccactggcgcgtggcccacgagcgcgatgaactgtggagagcccagatagtggccacaactgtgatgctggaacggaagttgcctcgctgtctgtggccacgctcggggatctgcggcagggagtacggtctgggagatagatggttcttgagggttgaggacagacaggatctgaaccgtcaaagaattcaaaggtacgcacaggcctttcatactagagggagcgaagacctagataaggactccgtggagaaattggagctgggctgcccattctccccccatctcagccttcccatgccaagcgtgtctaggtctaccagccgatccagtgccaactgggaacgactgcgacaggggacactacggagagacctgcgtggtattatcaacaggggtttggaagacggagagagttgggagtaccagatctag

SEQ ID NO: 244665 - DNA, 168 bp, synthetic construct
  misc_feature 1..168: note = Description of Artificial Sequence: Synthetic coding sequence
  source 1..168: mol_type = other DNA
atgagtactagtcgcaaattgaagagccatggcatgcgcaggagtaagagccggtcgccccacaagggcgtgaagcggggtggctccaaaaggaagtatcgcaaagggaacctaaagtcaagaaaacgaggggatgatgcaaaccgaaattataggagtcacttgtag

SEQ ID NO: 244666 - DNA, 417 bp, synthetic construct
  misc_feature 1..417: note = Description of Artificial Sequence: Synthetic coding sequence
  source 1..417: mol_type = other DNA
atggatacccaaacccactcccttccgattacccacacacagctgcactccaatagccaaccccagagtcggacttgtacccgccactgccagaccttctcacagagctgtagacagtctcaccgcggatctaggtctcagagctcatcccaatcgcctgccagccacaggaaccctactggagcccacagttcctcgggacaccagtctcagtcacccaacactagcccccctccgaagagacacaaaaaaaccatgaactcccaccattcacccatgcgtccgacaattctgcattgtcgctgcccgaagaatcgcaagaaccttgagggcaagctgaagaagaagaagatggcaaagcgaattcaacaagtctataagaccaaaaccaggtcatccgggtggaagagcaattag

SEQ ID NO: 244667 - DNA, 1731 bp, synthetic construct
  misc_feature 1..1731: note = Description of Artificial Sequence: Synthetic coding sequence
  source 1..1731: mol_type = other DNA
atggccgtgctttttttccatactatgcgatacaagtctcaggatcccaggaatccacacaatgatagattcgtactgagcaagggccacgctgctcctattctgtatgctgtttgggccgaagccggttttctggcagaagcagaacttctgaacctaaggaagatctctagcgatctggatggacatccggtcccaaagcaggcgtttactgatgtggctacagggtcactggggcaagggttaggcgctgcctgtggcatggcatatacaggaaaatacttcgataaggcctcctatcgggtgtactgtcttctgggagacggagagcttagcgagggcagcgtgtgggaggctatggcctttgcctcaatatataaactagacaacctagttgccatcctggatatcaataggctgggacaaagtgatcccgctccacttcagcaccagatggatatctaccaaaagcgctgcgaggcctttgggtggcatgccattatagtggacgggcattccgtggaagaattgtgcaaggcctttggccaggcgaagcaccagccaacggccataatcgcaaagacttttaagggtcggggtattaccggggttgaggacaaggagtcttggcatggaaaacctctccccaaaaacatggccgaacagataatccaagaaatctacagtcagattcaatctaagaagaaaatcctggccacgccaccccaggaggacgcccctagtgtggatatcgccaatattagaatgcccagtctacctagttacaaggttggtgacaaaatcgctacccgcaaagcctatggccaggctctcgccaagttaggacacgctagcgaccggataatcgcactggacggggacacaaagaattcaacctttagcgagatatttaagaaggagcatccggaccgattcatcgagtgttatattgccgagcagaacatggtctctatagcagtggggtgcgccactaggaaccggactgtgcccttttgcagtactttcgctgcgttcttcacacgggcattcgaccagatcaggatggctgccatctcagagtcaaacatcaacctttgtggtagccactgtggggtcagcatcggtgaggatggcccttctcaaatggctctggaagatctggcaatgttcaggagcgtacccacaagtacagtcttctatccctcagatggtgtagctaccgaaaaagctgtggagcttgcggcaaatactaaggggatctgtttcatcagaacatcccgtccagaaaacgccataatctacaataacaatgaagacttccaggtgggccaggcaaaagtggtcctgaaaagtaaggacgaccaagtcactgtgattggagccggagtaaccttgcatgaagcactggccgctgccgagttattaaaaaaagaaaagattaatatcagggttctggacccattcacgattaaacctctagatcgcaaactaattctggactcggctagggcgaccaagggcagaattctgacggtcgaagaccactattatgaaggcggtattggagaggctgtttctagcgccgttgttggcgaaccaggtatcactgttacacatctggctgtgaatcgggtcccaagatctggaaagcctgctgaacttctcaaaatgtttggtattgatcgggatgcaattgcacaggcagtgcgcggactgattaccaaagcctag

SEQ ID NO: 244668 - DNA, 1374 bp, synthetic construct
  misc_feature 1..1374: note = Description of Artificial Sequence: Synthetic coding sequence
  source 1..1374: mol_type = other DNA
atggcttttgcaagcatctacaaactcgataatcttgttgccatcttggatatcaacagactcggtcaaagcgaccctgctcccctgcaacaccagatggacatttaccagaaaaggtgtgaagcattcgggtggcacgccatcatcgtggacggacattcggtcgaagagctttgtaaggccttcggacaagccaagcaccaacctaccgccatcattgcaaagacctttaagggcaggggaataactggggtggaagacaaggaatcctggcatgggaaacctttgcccaagaacatggcggagcagatcatccaagagatttactctcagatccagtccaaaaaaaaaatcctggcgacaccaccacaggaggacgcccctagcgttgatatcgccaacatacggatgcctagcctcccctcatataaggtaggagacaagatcgcaactaggaaggcctacgggcaggcgctggcaaaactaggccatgcatccgatagaatcatcgccttggatggcgacacaaagaacagcacttttagcgagatatttaagaaggaacacccagataggttcattgagtgttacattgctgaacagaatatggtatccatagcagtcggctgcgccacaagaaaccgaactgtcccattctgctccactttcgccgctttcttcacacgggcttttgatcagattcgaatggcagctatttccgaatccaacatcaacctttgtggttcccactgtggagtttccatcggcgaggacggaccatcccagatggcgctcgaagacctagccatgttcaggtcagttcccacctcaacagtgttttaccctagcgacggcgtcgccacagagaaggccgtggagttggccgcaaacacaaaaggaatatgcttcattagaacttctaggccggagaacgccattatttataataataatgaggactttcaggtcgggcaggcgaaagttgtgctgaagtctaaagatgatcaagtgactgtgatcggtgccggagttaccctccacgaagctttagcggctgctgagctgctaaagaaggagaagatcaatatacgggtcctggatccgttcaccattaagcctttagatagaaaattgattctcgacagcgcgcgagctacgaagggcaggatccttaccgttgaggaccactattacgaagggggaatcggagaggcggtgtcctctgctgtggttggcgagccaggcatcacggttacacaccttgcagttaatcgggtcccaagatccggaaaaccagccgaattactcaagatgtttggaattgaccgggacgccatcgcacaggctgtgaggggcctgatcaccaaggcgtag

SEQ ID NO: 244669 - DNA, 1872 bp, synthetic construct
  misc_feature 1..1872: note = Description of Artificial Sequence: Synthetic coding sequence
  source 1..1872: mol_type = other DNA
atggagtcatatcataaacccgaccagcagaagctccaagcactcaaggatacagccaatagactgcgtattagcagcatccaggctaccaccgcggctggcagcggtcatccgacatcatgctgttctgctgccgagatcatggccgtactattttttcatactatgcgttacaaatctcaggatcctagaaatccccacaacgatagatttgtgctgagtaaggggcacgctgcccctatcttgtacgctgtctgggccgaggcagggttcctcgctgaggcagagctactgaacctcaggaaaatctcttctgatctggacggccaccccgtccccaagcaggcctttacggacgtggcaaccgggagcctaggccaaggactgggggctgcatgtggcatggcctacaccggcaagtattttgacaaggctagctacagggtgtactgcctgttgggtgacggtgagctgtcagagggaagcgtgtgggaggccatggcttttgcgagtatttataagctggataacctggtcgccatccttgacatcaatagactggggcaaagcgaccctgctccgctccaacaccagatggacatctatcaaaagagatgtgaggccttcgggtggcatgctattatcgtggatggacattccgtggaagaactatgcaaggcttttggtcaggcgaaacaccaaccgacggctatcattgcaaaaaccttcaagggtagagggataacaggcgtggaggacaaagaatcatggcacggcaaacccttgcctaagaatatggccgaacagattattcaggagatttacagccagatacagtccaaaaaaaagatcttggccacccccccacaggaggatgccccatcggtggatatagcaaacatcaggatgccctccctcccgtcatataaggtgggcgacaaaattgccacccgtaaggcatatggtcaggctctggccaagttaggccatgcctcagataggatcatcgccctagatggagacaccaagaattcaacgttcagtgaaatttttaaaaaagaacatccagacaggttcattgaatgttatattgcagaacagaacatggtgtctatcgccgttgggtgcgccaccaggaaccggacagtccctttctgtagcacatttgcggctttcttcacacgagcattcgaccagatcaggatggccgctatttcagagtctaatataaacttgtgtgggagtcactgtggagtgtcaattggggaagatggcccttctcaaatggccctcgaagacctcgctatgtttcgctccgtccctacatccactgtgttttatcccagtgacggcgtggccactgaaaaggccgtggaactcgcagctaacacgaagggcatctgcttcattaggactagcagacctgagaatgccattatatataataataacgaggatttccaagtgggccaggccaaggttgtccttaagtctaaggacgaccaggtcaccgtgatcggagcaggagtgactctgcatgaggcccttgctgccgcagaattgctcaaaaaagaaaagattaatattcgcgttcttgatccctttaccatcaaacctctggatcgcaagttgatcctggacagtgccagggccaccaaggggcgtatcttgaccgtcgaggaccactactacgaaggcggtatcggggaagctgtaagctctgccgtggtgggagaaccaggaatcactgtcacccatttggccgtgaatcgagtgcctcgaagtggaaagccagccgagctccttaagatgtttggtatagacagggatgcaatcgcacaggctgtccgcggtctgattacaaaagcatag

SEQ ID NO: 244670 - DNA, 1872 bp, synthetic construct
  misc_feature 1..1872: note = Description of Artificial Sequence: Synthetic coding sequence
  source 1..1872: mol_type = other DNA
atggaaagctaccataaacccgatcaacagaagttgcaggcactgaaggacacagccaatcgattacgcatttcgtcaattcaagccaccacggctgcaggaagcggacaccctacatcgtgctgtagcgctgccgagatcatggcggtgctctttttccacacaatgaggtacaagtctcaggaccccaggaatccccacaacgaccgcttcgtgctctcaaagggccacgccgctcccattctttacgctgtgtgggctgaggcaggtttcctggcagaggcagagctgcttaacctccggaagattagcagcgacctcgacggacacccagttccaaaacaggcttttactgacgtggccactggcagtctgggtcagggccttggggcagcctgcggcatggcttataccggcaagtacttcgataaggcatcgtatcgggtctactgtttactgggggacggcgagctcagtgagggctccgtgtgggaagcaatggcttttgcctcaatctacaagttggacaacctggttgcaattcttgatatcaatagactgggccagagcgacccagcccctctccagcatcagatggacatctatcaaaagcggtgtgaggccttcggctggcatgccatcatcgtagatggtcacagcgtggaagaactttgcaaagcgttcggccaagctaagcatcaacctaccgccatcatcgccaagacgttcaaaggccgtggaatcaccggcgtcgaggacaaggaaagttggcacgggaaacctctgccaaaaaacatggccgaacagatcatccaggaaatctactcccagatccagtcaaaaaagaaaattctcgcgaccccccctcaggaagatgccccaagcgtagatatagccaacatacgcatgcccagtctgccatcttataaggtcggcgacaagatcgcaacaagaaaggcttatgggcaagcactggcaaagcttgggcacgcctccgaccggataattgctttagatggagacacgaaaaattctactttctccgagattttcaaaaaggagcaccctgatcgttttattgagtgttacatagcggagcagaatatggtcagtatcgcagtcgggtgtgccacccgaaatcggacagtacctttttgctccaccttcgccgctttcttcacccgagctttcgatcaaattcgaatggccgctattagcgagtccaatattaacctgtgtggcagccactgcggtgttagcatcggagaggatggcccttcccagatggcactagaggatcttgctatgttccgatcagtgcccacctcaaccgttttttacccgagcgacggggttgctaccgaaaaggcagtcgaactcgccgctaacactaagggtatttgttttattcggacttcccgacccgaaaatgcgataatatacaataacaatgaagactttcaggttggacaggcaaaggtcgtgcttaagtcaaaggatgaccaggtgaccgtcatcggcgcaggcgtgaccctgcatgaggccctcgcagcggctgagttactaaaaaaggagaaaattaacatccgcgtccttgaccctttcaccattaaacctctcgacagaaagctgattcttgattctgcacgtgctaccaagggccgaatccttacggtggaggaccattattatgagggcggtataggtgaagctgtttcctccgccgttgtgggagagcctgggatcacagtgacccacctggctgtgaacagagtgcccagaagcggcaaacctgccgagctgttaaaaatgttcggcatagatcgggatgcgatcgctcaagctgtaaggggcctgattactaaagcatag

SEQ ID NO: 244671 - DNA, 1896 bp, synthetic construct
  misc_feature 1..1896: note = Description of Artificial Sequence: Synthetic coding sequence
  source 1..1896: mol_type = other DNA
atggaaagctaccataagcccgaccagcaaaaactgcaagctctgaaagatacagctaataggctgagaatctcctccatacaggctaccacagctgctggaagtggccatcccacctcttgctgtagcgctgcagagatcatggctgtgttattcttccacacaatgaggtacaaaagccaggaccccagaaatccacacaacgatcgcttcgtcctctctaaagggcacgcagctcctatcctctatgccgtgtgggccgaggctggcttcctcgccgaagccgaattgctgaatttaaggaaaatcagctctgatctggatgggcatcctgtgccgaaacaggccttcactgatgtggctaccggcagtctgggccagggtctgggcgctgcctgtggaatggcttacactgggaagtattttgacaaggcttctctcccctcttcatgggattacagctacagggtttactgtcttctgggcgacggcgagctgtccgaggggtctgtttgggaagccatggcctttgcttcaatatacaagctggacaatttggtggccatcctggacataaatagactggggcagtctgaccctgctccactccaacatcagatggatatataccagaagcgctgcgaagcatttggatggcacgccattatcgtggatggccactccgtggaggaactgtgcaaggcgttcggtcaggccaaacatcaacccacggccattattgccaagacattcaaagggaggggaatcacaggggttgaggataaggagagttggcacggaaagccattacctaagaacatggctgagcaaattattcaggagatttactcgcagatccagagtaaaaaaaaaatactggccacgcctcctcaggaggacgcccctagcgtggatattgcaaacatccggatgccgtccctgccctcttacaaggtgggcgataaaatcgcaacccgaaaggcatatggccaagccctggccaagctcggccacgctagtgatcgcattatcgccttggacggtgacacaaaaaactcaaccttctccgaaattttcaaaaaagaacaccctgacagatttattgagtgttacatcgcagagcagaatatggtctctatcgccgtcggttgcgctacgcgcaaccggacagtcccattttgcagcacatttgcagctttttttacaagggctttcgaccaaattcgcatggccgctattagtgagtctaatatcaatttgtgtggcagccactgtggcgtctcaatcggagaagacggcccaagccagatggctcttgaggacctggctatgttcaggtctgtacctacttcaacggtcttctacccaagtgatggggtcgccactgaaaaggcggtggagctggcagcaaacactaagggtatctgtttcataaggacttcaagaccagagaacgcgatcatctataataacaacgaagatttccaggttggccaggcaaaggttgtcctcaagagtaaggacgaccaggtaacagtgattggggcaggagttaccttgcacgaggctctggccgcagcagagctcttaaagaaggagaaaatcaatatcagggtgttggacccattcaccattaaacctctggatcggaagctcatacttgacagcgccagggcaacgaaaggcagaattctgaccgtggaggaccactactacgaaggaggaataggggaggctgtgtccagtgccgtcgttggtgaacctgggattacagtgacacacttggccgtaaaccgagtgcccaggagcggcaagcctgccgaactactgaagatgtttggaatcgatcgtgatgctattgcccaggctgtgcggggtctgattactaaggcttag

SEQ ID NO: 244672 - DNA, 1182 bp, synthetic construct
  misc_feature 1..1182: note = Description of Artificial Sequence: Synthetic coding sequence
  source 1..1182: mol_type = other DNA
atggcccttaaggtggcaactgttgccggaagcgcggctaaggcagtgctggggcctgcccttttatgccggccttgggaggttctgggtgcccatgaagtccctagcagaaacatttttagcgaacagaccattcctccctcggccaagtacgggggacggcacactgtcacgatgattcctggcgatgggatcggtcctgagctgatgctgcatgtgaagtccgttttcagacatgcatgcgttcccgtggacttcgaggaggtccatgtctccagtaacgctgacgaagaagatattcggaatgctatcatggccatccgcaggaacagggttgccctgaaaggcaatattgagacaaaccacaatcttcccccttcacataaaagccgcaataacattcttaggacatcactggacctctatgcaaacgtgatccactgcaagagcctccccggagtagtcacccgccataaggatatcgatatcttaatagtccgagagaatacagaaggggaatatagctctctggagcacgaaagcgtggccggtgtcgtggagtcactaaaaattatcaccaaagctaagagcctgcgcatagcagaatatgcgtttaagctagcccaggaatcggggaggaaaaaggtcacagcagtacataaggccaacataatgaaacttggggatggtctgtttctacagtgttgcagggaagtggccgcacggtatccccagatcactttcgaaaacatgattgtggataacactactatgcagcttgtcagccgtccccaacagtttgatgtgatggtcatgcccaatctatatgggaacattgtcaacaatgtgtgcgcgggactcgtcggaggtcctgggttggtagctggggctaactatggacacgtgtatgcagtcttcgagactgcaacaaggaacacaggcaaaagcattgccaacaagaacatcgcaaatcctaccgcgactttgctggcgtcctgcatgatgctggatcatctcaagttacactcctatgcgacaagtatcaggaaagcagtcctggcctccatggataacgaaaatatgcacacccctgacatcggcggacaaggcacgacatcagaagccatccaggacgtaattcggcatatcagagtaataaatgggagagctgtggaagcttag

SEQ ID NO: 244673 - DNA, 1791 bp, synthetic construct
  misc_feature 1..1791: note = Description of Artificial Sequence: Synthetic coding sequence
  source 1..1791: mol_type = other DNA
atggcggatgccgaagccagagctgagtttcctgaggaggcaaggccagaccggggaactctccaggttcttcaggatatggcgagtcgcctgcgaattcacagtattcgagccacatgttccacttcatctggccacccaacctcctgctcctccagcagcgaaatcatgagtgtcctcttcttttatatcatgaggtataaacagtctgatcccgagaaccctgataacgaccggtttgtccttgcaaaacggctctcctttgtggatgtagctactggatggcttggtcagggactaggagtggcatgcggtatggcctacacagggaaatattttgacagagcatcttacagagtcttctgcctgatgtcagatggtgagagcagcgagggatctgtgtgggaggccatggctttcgcatcctactattcactcgataaccttgtggccatattcgatgtaaataggttaggccacagcggcgctctgcccgcagaacattgtatcaatatctatcaaagaagatgcgaggcctttggctggaatacatatgtggtagatggcagagacgtcgaagccttgtgccaggtcttctggcaagcgtcacaggtcaaacacaaaccaactgcagtcgtggccaaaaccttcaaggggagaggcactccttcaatcgaggacgcagagagctggcacgcaaagcctatgccacgcgagcgtgcagacgccatcataaaattgattgagagccagatacagacctcccggaatcttgatccacagcctcccatagaagacagcccagaagttaacataacggacgtcaggatgacttcgcctccggattatagagtgggcgacaaaattgccactcgaaaggcttgcggactagccctagcgaaattgggttacgcaaataatagggtggttgtcctggatggcgacaccagatacagtacctttagcgaaattttcaataaggagtacccagagcggttcatcgagtgtttcatggcagaacagaatatggtaagcgtcgctctcggttgtgcgtctcggggaaggacaatagcgttcgcctccacctttgcagcatttttaacacgggcattcgatcatattcgtattgggggacttgccgaatcaaacatcaatattatcggatctcactgcggtgtgtcagtaggcgatgacggagcctcccagatggccctcgaggatatagctatgtttaggacgataccaaagtgtaccatcttctatcccaccgatgccgtgagcacagagcatgcagtggccctcgccgctaatgcaaaaggtatgtgctttatccgcactacccggccagaaaccatggttatttatacaccccaggaaaggttcgagattgggcaggccaaagtcctccgccattgcgtcagcgacaaggtgaccgtgatcggagccggtattacagtgtacgaagctctcgccgcagccgacgaattgtctaagcaggatatcttcattagagtcatcgatctgtttaccatcaagccactcgatgtggcgacaatcgtttcaagcgccaaggccacagaaggtcgtatcatcactgtggaggatcattacccacaagggggaattggtgaagccgtctgcgctgcggtaagcatggaccccgatatccaagtgcactccctggccgttagcggagttccacaaagtggaaagtccgaggagctgcttgacatgtacggaatatctgcgaggcacattatcgtggcggttaagtgtatgctcttgaactag

SEQ ID NO: 244674 - DNA, 1674 bp, synthetic construct
  misc_feature 1..1674: note = Description of Artificial Sequence: Synthetic coding sequence
  source 1..1674: mol_type = other DNA
atgtccgttttatttttttatataatgcggtacaagcagtctgaccctgagaatcccgacaacgacaggttcgtgctggcaaaaaggttatccttcgtagacgtggccacaggctggctggggcaaggcctgggcgtagcttgtggcatggcatatacgggcaagtattttgatcgagcctcgtatagagtgttctgcctgatgtccgacggtgaaagcagcgaaggctccgtatgggaagccatggctttcgccagctactattcattggacaacctggtcgcaatctttgacgttaatcgcctaggccattctggcgctctgccagccgagcattgtatcaacatttaccagcggagatgtgaagccttcggctggaatacatacgtggttgatggtagggatgttgaagctttgtgccaggtgttttggcaggcttcacaggtaaaacataagccgacagccgtcgtggctaagaccttcaagggtaggggcacaccctctatcgaagatgctgagtcatggcacgctaaaccgatgccacgggagcgggctgatgcaatcatcaagctcattgagagccaaattcagaccagcagaaatctggatcctcaaccacccattgaagacagccccgaggtcaacatcactgatgtgaggatgacttctccacctgactacagggtcggcgataaaatcgcaacccggaaagcatgtgggttggctctggctaagttgggatacgccaataaccgggtggttgtgctcgatggggatacccgctactctaccttctctgaaatcttcaataaagaatatccggagaggttcatcgagtgctttatggccgagcagaacatggtgtccgtagcactggggtgtgcttccagaggaagaactattgcctttgcatcaactttcgctgcctttctgacaagggcattcgaccacattagaattggaggacttgcggaaagcaatatcaatataattggtagccactgtggcgtaagcgtcggggacgacggtgccagccaaatggctctggaggatatcgccatgtttcgcacaattccaaaatgcactatcttttatcctacagatgccgtgagcaccgagcacgctgtcgccctggcagcaaatgcaaagggaatgtgcttcattaggactacaaggccagaaactatggtcatctacaccccccaggagagatttgaaattggacaggctaaaggggtcagcatgttacaggactcctggagctctgttataagttatcagaaagtattgcgacattgcgtgagcgacaaagtcactgttattggggctggtatcactgtatatgaagctctagccgctgcagacgaacttagcaagcaggacattttcatcagggttatcgatctgttcacaatcaaacctttggatgttgccaccatcgtgtcttcagcgaaagccaccgaaggccgtatcatcacggtggaggatcactacccacaggggggtattggcgaagctgtctgcgccgctgtttcgatggatccggacattcaggtccactcactcgctgtaagcggtgtgccccagtccggcaagtcggaggagctgctggatatgtatggcatctccgctcggcacattattgttgcggtcaaatgcatgctcctgaattag

SEQ ID NO: 244675 - DNA, 1623 bp, synthetic construct
  misc_feature 1..1623: note = Description of Artificial Sequence: Synthetic coding sequence
  source 1..1623: mol_type = other DNA
atgtccgtacttttcttttacatcatgcgctataagcagtctgatccagagaatccggataatgatagattcgtgctggccaaacggctgtcttttgtggatgtagccaccggatggctgggacagggactcggggtggcatgtggtatggcctacacaggtaaatactttgaccgtgctagttatcgtgtattttgtttaatgtccgacggagagtcatcagaagggtccgtctgggaggctatggcattcgcatcatattatagccttgataacctggttgctatttttgatgtgaacaggcttggtcattcaggcgctcttcccgcagagcactgcatcaacatctatcaacggagatgcgaggcctttgggtggaacacatacgtcgtggatggtcgggacgtggaggcactttgtcaagttttttggcaggcttcccaggttaagcataaacccactgccgttgtcgccaaaacttttaagggccgaggaacacctagtatcgaagacgccgagtcgtggcatgccaagcccatgcccagggaacgagctgacgctattataaaactcattgagtctcagatccaaaccagtaggaacctcgacccacaacccccaattgaggattcccctgaggtcaacattacagatgtgagaatgacatcccccccagactatagggtgggcgacaagattgcaacacgcaaggcttgtggcctcgctttggccaaattgggttacgctaataaccgcgtggtcgttctggatggcgacacccggtactctaccttttctgaaatctttaacaaagaatatcctgaaaggttcatcgaatgctttatggccgagcagaatatggtgtcggtggcattggggtgcgcgtccagggggaggactattgcgttcgcatccaccttcgccgctttcttgactagggccttcgaccatatccgcattggcggactcgccgagtcaaacatcaacatcatcggatcccattgtggcgtgagcgtaggggacgacggagcctctcaaatggccctggaggacatcgccatgttcagaactattcctaaatgcactatcttctaccccaccgatgctgtctccaccgagcatgctgtggcgctggcagcaaacgctaaaggcatgtgcttcattcgaactacccgccctgaaacaatggtcatctacacgccgcaagaacgtttcgagataggccaggcaaaggtcctgaggcattgtgtgagtgacaaagtaactgtgatcggggctgggataaccgtttacgaggcccttgccgctgctgatgaactgtcaaagcaagacattttcatcagggtgatcgacctgtttactataaagcctcttgacgtggcaacaattgtgtcttcagccaaggctaccgagggacgcatcatcactgtcgaagaccattacccccagggcggtataggcgaagccgtgtgtgctgcagtttctatggatccagacattcaggttcacagcttagctgtaagtggggttccgcagagtgggaaatctgaggagcttctggacatgtacgggattagcgcaagacatatcattgttgcagtgaaatgcatgctgcttaattag

SEQ ID NO: 244676 - DNA, 894 bp, synthetic construct
  misc_feature 1..894: note = Description of Artificial Sequence: Synthetic coding sequence
  source 1..894: mol_type = other DNA
atgtcagcttgggctgccgcatctctctcaagggctgctgccagatgtctgttagctcggggtcccggagtgcgggctgcccctccaagggacccccgaccaagccatcctgagccaaggggttgcggagccgctccaggccgaaccctccacttcacggccgcagtccctgctggccataacaaatggagcaaagtgagacacattaaggggcctaaagatgtggaacggtctagaatctttagcaagctctgtctcaacatcagactcgcggtgaaggaagggggaccgaaccctgaacataactccaacctagccaatatcctcgaggtgtgcagaagtaagcacatgcctaaaagtactatcgagacagctctgaagatggaaaaaagcaaagatacatatctgctgtacgagggtcgcggaccgggtgggtctagcctgctaatcgaggcactcagtaatagcagccataagtgccaagcagacatccgacacattctcaacaagaacggtggagttatggcagtgggagctcgtcactcctttgacaaaaagggagtgattgtagtcgaggtcgaggacagggaaaagaaggcagtcaacctcgaaagagcactggagatggccattgaagctggcgctgaggacgtgaaagagaccgaagacgaggaggagcggaacgtgttcaaatttatatgtgatgcatctagcctccaccaggtgagaaaaaaattagacagcctgggactgtgcagtgtgtcatgcgcgttagaatttatcccaaactctaaggtacaattggccgagcccgacctcgagcaggcagctcacctgattcaggctctttctaatcatgaggatgttattcatgtctatgataacatcgaatag

SEQ ID NO: 244677 - DNA, 687 bp, synthetic construct
  misc_feature 1..687: note = Description of Artificial Sequence: Synthetic coding sequence
  source 1..687: mol_type = other DNA
atgtcagtgtccgagatctttgtcgagctccagggttttttggccgctgagcaggacatcagggaagaaatcaggaaagtcgttcagagcctagaacagaccgccagagaaatcctaactctcctgcaaggggtgcatcaaggcgcagggttccaggatatcccgaagagatgcctgaaggccagggaacatttcgggaccgtcaaaacccacttgacatccctcaaaacgaagtttccagcagagcagtactatagattccacgagcattggagattcgtgctccagagacttgtttttctcgccgcttttgtagtttatctagagaccgaaactttggtcactcgggaggccgtgacggagatcctgggtatagagcccgatagagagaaggggttccatctcgacgtcgaggactatttatctggagtgctgatcctggcttctgaactcagcaggctgtcggttaattctgtgactgctggggactattctagacccctgcacattagtacattcatcaacgagctggattctggattcagattactcaacctaaaaaacgatagcctccgaaagcggtatgatggcctgaagtatgacgtgaaaaaagtggaagaggtggtatacgacctgtccatccgcggattcaacaaggagacagctgcagcttgtgtcgagaagtag

SEQ ID NO: 244678 - DNA, 585 bp, synthetic construct
  misc_feature 1..585: note = Description of Artificial Sequence: Synthetic coding sequence
  source 1..585: mol_type = other DNA
atgagtgtctcagaaatctttgttgagctccaaggttttctggcggctgagcaagacatccccaaaagatgtctcaaagcccgtgaacacttcggcacggtgaagacgcacctgactagcctgaagaccaaatttccagccgaacagtattatcgtttccacgagcactggcgatttgtgttgcagcggctggtctttttagcagccttcgtggtgtacctagaaacagaaaccctagtgacccgggaagccgtcaccgagattctcggcattgaaccggaccgagagaaaggcttccacctggacgtcgaggattacctctcaggcgtgctgatattggcttccgagttgtcacgactttcggtgaacagcgtgacggcaggagattacagtcgaccgttacacattagcaccttcataaatgaactcgattccggatttcgtttgctgaatctcaaaaacgattccctgagaaagcggtatgacggcttgaagtacgatgtcaagaaagttgaagaggtggtttacgacctctctatcaggggcttcaataaagagactgctgccgcttgtgtagaaaaatag

SEQ ID NO: 244679 - DNA, 447 bp, synthetic construct
  misc_feature 1..447: note = Description of Artificial Sequence: Synthetic coding sequence
  source 1..447: mol_type = other DNA
atgagtgtgtccgagatctttgtcgagcttcagggcttcttggccgctgagcaggacatccgtgaagagattcgtaaggttgttcagtcactcgaacagacagctcgcgagattctgacgttgctgcagggcgtccaccagggcgctggcttccaggacatcccaaagcgatgcctcaaagcccgtgagcactttgggaccgtcaaaacccacctcacatcactaaaaacaaaattccccgctgagcagtattatcgattccatgagcactggcggttcgtgctgcagcgcttggtctttcttgctgcttttgtggtttatctagaaacagaaacgttggttactcgggaggcggtgaccgaaattcttggcatagaggccgtgtgccaacagcgggactgttggagactacttccaaccccaccccacctccacctgcaccagtag

SEQ ID NO: 244680 - DNA, 873 bp, synthetic construct
  misc_feature 1..873: note = Description of Artificial Sequence: Synthetic coding sequence
  source 1..873: mol_type = other DNA
atgagtaataaggagggatcagggggatttagaaaaagaaagcacgacaactttccacacaatcagcggcgagagggaaaagacgtcaattcctcttccccagttatgctagcgttcaagtcctttcagcaggagcttgacgccagacatgacaaatacgagcggttagtcaagctaagtcgagacattactgttgaaagcaagaggactattttcctccttcacaggattacctctgctccggatatggaggatatcttgaccgagagcgagatcaagttggacggcgtgcgccaaaaaattttccaggtggcacaggagttgtccggtgaggacatgcaccagtttcatcgggcaattacgacagggctgcaggagtacgtcgaagctgttagctttcagcatttcataaaaacgaggagcctcatctctatggacgagatcaataagcagcttatctttactaccgaggacaatgggaaagagaacaagaccccttcctccgacgcccaagacaagcagttcggtacgtggaggttgagggtgactcctgtcgattacctgctgggggtagccgatcttactggtgaactcatgaggatgtgtatcaacagcgtcggaaacggagatatcgacacccctttcgaggttagtcaatttctccgtcaggtctatgatggtttcagcttcatcggcaacactggaccctatgaagtttcaaagaaactgtacacactaaaacagagtcttgctaaggttgaaaatgcatgttatgccttaaaagtgagagggagcgagataccgaagcacatgttagctgacgtttttagtgttaaaaccgagatgattgatcaggaggagggtatctcctag

SEQ ID NO: 244681 - DNA, 492 bp, synthetic construct
  misc_feature 1..492: note = Description of Artificial Sequence: Synthetic coding sequence
  source 1..492: mol_type = other DNA
atgtcaaataaagaaggaagcggcggatttcgaaaaaggaagcatgataattttcctcacaatcagcgtcgcgagggcaaggacgtgaacagctcttccccagtcatgctggcttttaaatcattccagcaggaattggacgccagacatgacaagtacgagaggcttgtgaaactttcgcgcgatatcactgtggaatccaagagaaccatttttctcttgcaccggattacaagctcacagtatctggaccacagcgccccagatatggaggatatccttacagagagcgagataaagctggacggggtacgacagaagatttttcaggtagctcaagagctctccggagaagacatgcatcaatttcacagggcaatcaccactggcctgcaggaatacgtggaggccgtgtcattccagcattttataaagactaggagcctcatttcaatggacgagattaacaagcaattgattttcactacctag

SEQ ID NO: 244682 - DNA, 273 bp, synthetic construct
  misc_feature 1..273: note = Description of Artificial Sequence: Synthetic coding sequence
  source 1..273: mol_type = other DNA
atggacccattgcgagctcaacaactcgcagctgagctcgaggtagaaatgatggccgacatgtataataggatgacctcagcctgccaccgcaaatgtgtgccacctcattacaaggaggccgaactttctaagggggaatccgtttgcctagacagatgtgtgagtaagtatctcgacattcatgagaggatgggaaagaagctgaccgagctgtctatgcaggatgaggaactcatgaaaagggtgcagcagtcctcaggccctgcgtag

SEQ ID NO: 244683 - DNA, 273 bp, synthetic construct
  misc_feature 1..273: note = Description of Artificial Sequence: Synthetic coding sequence
  source 1..273: mol_type = other DNA
atggatccactgcgcgcacagcagcttgctgctgagcttgaagtcgagatgatggccgatatgtacaaccggatgacttctgcctgccaccggaagtgtgtacccccacattacaaagaagccgagttgagcaaaggggaaagtgtctgccttgaccggtgcgtaagtaaatacctggacatccacgagcgcatgggcaagaaactgacagaactgtccatgcaagatgaggagctcatgaaacgggtgcaacagtcatccggccctgcctag

SEQ ID NO: 244684 - DNA, 273 bp, synthetic construct
  misc_feature 1..273: note = Description of Artificial Sequence: Synthetic coding sequence
  source 1..273: mol_type = other DNA
atggaccccctgcgtgcgcagcaacttgccgcagaactcgaggtggagatgatggccgatatgtacaatcgtatgaccagtgcgtgtcaccggaagtgcgtacccccacactacaaagaagccgagctctctaagggggaatcagtttgtctggaccgctgcgtgtccaaatacctggatatccacgagcgcatgggtaagaaactcacggagttgtctatgcaggatgaagaactgatgaaacgagtgcagcaaagctccggacccgcatag

SEQ ID NO: 244685 - DNA, 927 bp, synthetic construct
  misc_feature 1..927: note = Description of Artificial Sequence: Synthetic coding sequence
  source 1..927: mol_type = other DNA
atgaagcactatgaggtggaaattttagacgctaaaacaagggagaagctatgcttcctggataaggtcgaacctcatgcgacaatcgcagagattaagaatctgttcaccaaaacccatccccagtggtaccctgcacgccagtcgttgaggctggaccctaaaggcaagtccctcaaagatgaagacgtgctccagaaactgcccgtcggaactaccgccaccttgtacttccgagacctaggcgcacaaatctcttgggtcaccgttttccttacggaatacgctggcccactgtttatctacctcttattttatttccgggtgcctttcatctacggccataagtatgattttactagctcccgacacacagtcgttcacttggcttgcatctgtcactccttccactacattaaacgcttactggagactctctttgtgcatagattctcccacggcactatgcctctgagaaacatcttcaagaactgtacttattactgggggttcgcagcatggatggcatactatatcaatcaccccttgtatactccaccaacatacggcgctcagcaggtgaaattggcccttgccatctttgtgatttgtcagttgggaaatttctctattcatatggcgctgagggacctgaggccggctggcagcaaaacccgaaagattccttaccctaccaaaaaccccttcacttggctgttcttattggtttcatgcccaaactatacctatgaggttgggtcatggatcggcttcgcaataatgactcagtgtctgccggtggcactgttcagtttggtaggctttacccaaatgactatttgggccaaaggtaagcataggtcctacctcaaggagttccgcgactacccaccactgaggatgccaatcattcccttcctgctgtag

SEQ ID NO: 244686 - DNA, 516 bp, synthetic construct
  misc_feature 1..516: note = Description of Artificial Sequence: Synthetic coding sequence
  source 1..516: mol_type = other DNA
atggaagagtatgccagagaaccttgtccatggcgtattgtcgatgattgtggcggagctttcacaatggggactattggaggaggtatttttcaggcaataaagggatttagaaatagcccagtgggtgtgaatcacagactcagaggcagcctcacagcaatcaaaaccagagctcctcagctggggggatcattcgcggtgtggggaggattgttctcaatgatcgattgcagcatggttcaagtgcgtggtaaagaggacccgtggaattcaatcacctcgggagccctgacaggagccattcttgctgccaggaacggccctgtagcgatggtcggctcagctgctatgggcggaattctgctcgccttaattgaaggggctggaatccttctgacaaggtttgccagtgcccagtttccgaacggccctcagtttgctgaggacccctcacagctcccgagcacacagttgccttcctccccttttggggattaccgccagtaccagtag

SEQ ID NO: 244687 - DNA, 519 bp, synthetic construct
  misc_feature 1..519: note = Description of Artificial Sequence: Synthetic coding sequence
  source 1..519: mol_type = other DNA
atggaggagtacgctcgcgaaccatgcccatggaggatcgtggacgactgtggcggagccttcaccatgggggtcatcgggggaggagtgtttcaggccatcaaaggctttcggaatgcgcctgtcggcattagacatagacttaggggaagcgctaacgctgttaggatacgcgctccacagataggcggtagctttgccgtctggggcggactgttctctacgatcgactgcggattggtccgcctgaggggaaaggaggacccctggaacagcatcacctccggcgcattgaccggcgcagtcctggctgctcgttctggaccgcttgctatggtgggctcagctatgatggggggtatcttactcgctctgattgagggcgtgggcatactgctgacccgctacacagcccagcagttccgaaacgcacccccattcctggaagatccaagccaactccctcccaaggatggcacgcctgctccaggatacccttcatatcagcagtaccattag

SEQ ID NO: 244688 - DNA, 669 bp, synthetic construct
  misc_feature 1..669: note = Description of Artificial Sequence: Synthetic coding sequence
  source 1..669: mol_type = other DNA
atggaggagtacgcaagggagccctgtccctggaggatcgtcgacgattgcggcggtgcttttaccatgggagttattggtgggggagtattccaagcaatcaaagggttccgcaacgcaccagtgtgtagattgctgagcgaggcacctttgtttatctactcatgctcccgctctgtcagtccaaccgtcaacgtttcctctgagagagctgaaagccgacccaccttgttcatggctgtttccctccatatggcttggtgtctcgctcacattgggataaggcaccgccttagggggagcgctaatgccgtgcgcattcgagctccacagatcggaggctcattcgccgtgtgggggggactgttttctaccattgactgcgggctggtgcggcttcgaggaaaagaggatccatggaattccatcacaagcggtgccctgacaggggctgtgcttgctgctaggagtggtcccctcgctatggtgggcagtgcaatgatggggggtatcctgctggccttaatcgaaggggtcggtatcctcctcacacggtataccgctcaacagttccgaaacgctcctcctttcttggaggatccctcccagctgccaccaaaggacgggaccccagcgcctggataccccagctaccagcagtaccattag

SEQ ID NO: 244689 - DNA, 585 bp, synthetic construct
  misc_feature 1..585: note = Description of Artificial Sequence: Synthetic coding sequence
  source 1..585: mol_type = other DNA
atggcagcagccgctccaaacgctggtgggagcgccccagagactgcgggaagcgcagaggccccacttcaatatagtttattgctgcagtatttggtgggtgataaaaggcagcccaggttgctggagccgggttctttgggaggaatcccaagtccggcaaagtccgaggaacaaaaaatgatcgaaaaggctatggagtcatgcgcttttaaggcggcactcgcttgtgtaggcggtttcgtcctgggtggcgcattcggggtattcaccgccggaatcgacactaatgttggttttgatccaaaggatccctaccggaccccaaccgcgaaggaagtactcaaagatatggggcaacgaggcatgagctatgccaaaaattttgccatcgtcggtgcgatgttctcttgtaccgagtgtcttatcgaatcctacaggggaaccagtgactggaagaacagtgtgatttctggttgcattactggaggcgctatcggtttccgggctggactgaaagctggtgctattgggtgcgggggtttcgccgctttctcagccgctattgactattacctgagatag

SEQ ID NO: 244690 - DNA, 630 bp, synthetic construct
  misc_feature 1..630: note = Description of Artificial Sequence: Synthetic coding sequence
  source 1..630: mol_type = other DNA
atggagggcggaggaggatcaggaaacaaaacgactggaggactggcagggtttttcggagcaggtggcgctggctactcccatgccgacctggcgggagtcccactgaccggaatgaatccgctctccccttacctgaatgtggacccgagatacctagtccaagatacagacgagttcatcctgccaactggagcaaataagacgagaggacgtttcgaactggctttcttcacgattgggggatgttgtatgacaggcgctgcattcggcgctatgaatgggttgaggctgggactgaaggagacacagaacatggcttggtcgaaaccaagaaacgtgcagattctgaatatggtgacccgtcagggggcactgtgggccaacacacttgggtctctggccttgctctactcggcgttcggagtgattatagagaagactagaggcgcagaggatgatctcaacactgttgccgcaggaacaatgaccggcatgctgtacaagtgcacaggcggtttgcgcggaatcgcgagaggaggccttactgggctgactctgacttctctgtacgctctctacaacaactgggagcatatgaagggatcactactgcaacagagcctgtag

SEQ ID NO: 244691 - DNA, 486 bp, synthetic construct
  misc_feature 1..486: note = Description of Artificial Sequence: Synthetic coding sequence
  source 1..486: mol_type = other DNA
atggaaggcggagggggatctgggaacaagactaccggagggctggctggcttctttggcgctggcggagctgggtattcccatgctgacttggcaggcgttccgctgacagggatgaatcctctgtccccttatttaaacgtagatcccaggtacctagtacaagatactgacgagttcattctccccacaggcgcaaacaaaacacgagggagatttgaactggcgttctttaccatcggcggatgctgcatgaccgcgctgttgtacagcgcttttggcgttattatcgaaaaaacaagaggcgctgaggacgaccttaataccgtggcggctggcaccatgaccggcatgctgtataagtgtactgggggactcagaggtatcgccagaggaggtcttacgggattgacactcacatcactatatgccctgtataacaattgggaacacatgaagggctctctcctgcagcagagcctgtag

SEQ ID NO: 244692 - DNA, 519 bp, synthetic construct
  misc_feature 1..519: note = Description of Artificial Sequence: Synthetic coding sequence
  source 1..519: mol_type = other DNA
atggaaggtgggggaggctccggtaataaaactacgggcggtctcgccggatttttcggagctggtggggcagggtatagccatgcagatttagcaggcgtgcctctaactgggatgaatcccctgagcccgtacctgaatgtcgacccgcgttacttagtccaggacactgacgaattcatcttacctacaggggctaataaaactcggggacggtttgaattggccttctttaccataggcggttgctgtatgaccggagccctgtgggccaataccctgggcagcctggccctgctctacagcgcctttggtgtgattatcgagaaaacccgcggtgccgaggacgatcttaatactgttgccgctgggacgatgaccggcatgctttataagtgcacaggaggcttgagaggcatagctaggggtggacttactggactgactttgacctccctgtatgcattatacaacaattgggaacacatgaaaggctcccttctgcagcagagtctctag

SEQ ID NO: 244693 - DNA, 381 bp, synthetic construct
  misc_feature 1..381: note = Description of Artificial Sequence: Synthetic coding sequence
  source 1..381: mol_type = other DNA
atgactggcgctgcattcggcgcaatgaatggcctgaggcttggccttaaggaaacccaaaacatggcttggagcaagcctaggaacgtgcagattctaaatatggtgaccaggcaaggggctctgtgggccaatacattaggtagcctggcactcctttactcagcgttcggagtcatcattgagaaaacgagaggtgcagaggacgatctgaatactgttgcagctgggaccatgacaggcatgctctacaagtgtactgcgtcagcaagccaaagcgcacgaatagctgatgggctgatatttacagagttctgctcagtcgcccgattacaggggtccgggactattcttgcacattataacttacacctgccatag

SEQ ID NO: 244694 - DNA, 324 bp, synthetic construct
  misc_feature 1..324: note = Description of Artificial Sequence: Synthetic coding sequence
  source 1..324: mol_type = other DNA
tagggcggatccgggaacaaaactaccggcggactcgcagggttctttggggctggcggagccggatactctcacgctgacctggcgggagtgcctccccttctgtacagcgccttcggcgtaatcatcgagaaaaccaggggtgctgaagacgatctaaacactgtcgccgctgggaccatgacagggatgctttacaaatgcaccggcggtctgaggggcatcgctagaggaggcttgacgggtctcacactgacttctctctacgccttatataataattgggagcatatgaagggtagcctgttgcagcaaagcctgtag

SEQ ID NO: 244695 - DNA, 1359 bp, synthetic construct
  misc_feature 1..1359: note = Description of Artificial Sequence: Synthetic coding sequence
  source 1..1359: mol_type = other DNA
atggccgcagctgccctaaggtccggatggtgtcggtgtcctcggcgttgcctcggatccgggatccagttcttgagctcccataacctgccacacgggtccacctatcaaatgagacgaccagggggagagctgccgttgtctaaaagctactcctccgggaaccggaagggttttctctctggcctgcttgataatgtcaaacaggagctcgccaagaataaagagatgaaagagtctatcaaaaaattccgcgatgaggcccgtagattggaagagtctgatgtccttcaggaggccagaaggaagtacaagacaatcgaatccgaaaccgtgcggactagcgaggtgctgcgaaaaaaactgggcgaactgacaggcaccgttaaagagtcccttcatgaggttagcaagagcgaccttggccgaaagattaaagagggggttgaggaggcagccaaaacggcaaagcagagtgccgaatctgtgtccaaaggtggagaaaaactagggaggactgccgcatttcgggcattgtcccagggagtcgagtcagttaagaaggagatcgatgactccgtcttaggccaaacaggcccatacaggaggccccagagactgcgcaagaggaccgagttcgcaggggataagttcaaagaggaaaaggttttcgaacctaatgaagaggcattgggggtggtcctgcacaaggactccaagtggtaccaacaatggaaagacttcaaggagaataatgtggtgttcaataggttctttgagatgaaaatgaagtacgacgagtcagacaatgctttcatccgagcttctagggcactgaccgacaaagtgaccgaccttctcggtggccttttttccaagacggaaatgtccgaagtccttactgaaattctcagagtagatcccgctttcgacaaggacagattcttgaaacagtgcgagaatgatataatcccaaacgtcttggaggccatgatatccggtgaactagacatcctgaaggattggtgctatgaggctacatattctcagctagcccatcctatccaacaagccaaagccctaggccttcagtttcactcacggattctcgatatcgacaatgtggatctggctatggggaaaatgatggagcagggtccagttctcattatcacctttcaagcgcagctggttatggtggtgagaaatcctaaaggcgaagtggtagaaggtgatcctgacaaggtgcttcgcatgctgtacgtgtgggccctgtgtcgcgaccaggacgaactcaatccgtatgctgcctggaggctgctcgatatttctgcctccagcacagagcagatcctgtag

SEQ ID NO: 244696 - DNA, 294 bp, synthetic construct
  misc_feature 1..294: note = Description of Artificial Sequence: Synthetic coding sequence
  source 1..294: mol_type = other DNA
atggactcttcctcatcaagttctgcagcaggtctgggtgctgtagatcctcagctgcagcattttattgaagtggaaacacaaaaacaacggttccagcagttggttcaccaaatgacagagctgtgctgggagaaatgtatggataaaccaggacccaaactggactccagggcagaagcctgtttcgtgaactgcgtcgaacggttcattgatactagccagttcatcttgaaccgcctcgaacagacacaaaagtccaaacccgtgttttcagaatctctgagcgactag

SEQ ID NO: 244697 - DNA, 270 bp, synthetic construct
  misc_feature 1..270: note = Description of Artificial Sequence: Synthetic coding sequence
  source 1..270: mol_type = other DNA
atggctgctcagatcccagagtcggatcagatcaagcagtttaaggagtttctgggcacttacaacaaactgaccgaaacatgtttcctcgactgcgtcaaggactttaccactcgtgaagtgaaaccggaggaaaccacctgctcggaacactgtttacagaagtatttaaagatgacccagcgtatctccatgcgattccaggagtaccacattcagcagaacgaggctctggctgctaaagccggactcctgggacaacctaggtag

SEQ ID NO: 244698 - DNA, 270 bp, synthetic construct
  misc_feature 1..270: note = Description of Artificial Sequence: Synthetic coding sequence
  source 1..270: mol_type = other DNA
atggcagctcagattcccgagtctgaccagatcaagcagttcaaagaatttctcgggacatacaataaacttacagaaacttgcttcctggactgtgtcaaggatttcacgacacgagaggtgaaacctgaagaaactacttgttcagaacattgcctgcagaagtacctgaagatgacacaacgtattagcatgcggttccaggagtatcatatccaacagaacgaggccctcgccgctaaggctggactattaggtcagcccagatag

SEQ ID NO: 244699 - DNA, 135 bp, synthetic construct
  misc_feature 1..135: note = Description of Artificial Sequence: Synthetic coding sequence
  source 1..135: mol_type = other DNA
atggcggctcagatccctgagagcgaccagattaagcaatttaaggaatttctgggaacctataataagcttactgaaacatgctttttggactgtgtgaaagatttcactacgcgtgaggtgaagccagaatag

SEQ ID NO: 244700 - DNA, 270 bp, synthetic construct
  misc_feature 1..270: note = Description of Artificial Sequence: Synthetic coding sequence
  source 1..270: mol_type = other DNA
atggcagcccagatcccagaatcggatcagattaaacaatttaaagagttcctgggcacctacaacaaattgaccgaaacttgcttcctggattgcgtcaaagattttactacaagggaagttaagcccgaagagactacgtgcagcgagcactgtcttcagaagtacctgaagatgactcagcgtatctccatgcgatttcaggagtatcacattcaacagaatgaagcactcgcagccaaggccggactgctgggtcagccccgatag

SEQ ID NO: 244701 - DNA, 270 bp, synthetic construct
  misc_feature 1..270: note = Description of Artificial Sequence: Synthetic coding sequence
  source 1..270: mol_type = other DNA
atggccgctcaaatccccgagtctgatcagatcaagcagttcaaagagtttctggggacctataacaaactgaccgagacatgtttcttggattgcgtaaaagatttcaccaccagggaagtcaaacctgaggagacgacatgctctgaacactgcctgcaaaagtacctgaagatgactcagcggatttctatgcgcttccaggagtaccatattcagcagaatgaggccctggccgcaaaagccggactccttggccaaccgaggtag

SEQ ID NO: 244702 - DNA, 381 bp, synthetic construct
  misc_feature 1..381: note = Description of Artificial Sequence: Synthetic coding sequence
  source 1..381: mol_type = other DNA
atgcctttctttggaaatactttctcgcctaagaagacaccacccagaaaatccgcctctctcagcaacctacattctctggatcgctcaaccagggaggttgagctcgggctggaatatgggtccccaactatgaatttggctggtcagagcctgaaattcgagaacgggcaatggatcgccgagaccggcgtgtccggaggggtcgatcggcgagaggtgcagaggctcagacgcaggaaccagcagctggaggaagagaataaccttctccgcctgaaagtggacatacttctggacatgctttcggagagcactgccgaaagccacctaatggagaaagaactggacgaattacgaatctccagaaagaggaaatag

SEQ ID NO: 244703 - DNA, 1086 bp, synthetic construct
  misc_feature 1..1086: note = Description of Artificial Sequence: Synthetic coding sequence
  source 1..1086: mol_type = other DNA
atggggaatgtgctggccgcatcctcacctcctgctggtcccccaccacctccagcaccggcactcgtcggactgccccctccgccaccgtctcctcccggatttaccctgccccctctgggaggttctctcggcgctggtacttctacatctagatcaagcgagcgaacccccggagccgcaacagcatcagcttcaggcgctgccgaggatggggcatgtggctgtctccccaatcccggtacatttgaagagtgccatcgcaaatgcaaagagctatttccaattcaaatggagggcgtgaagcttactgtaaacaaagggctgtcaaaccactttcaagtgaatcacactgttgctctttccaccatcggggagagcaactaccattttggagtcacatatgttggaaccaagcaactatcccccacggaggcgttccccgtgttggtcggagatatggacaactccgggtctctgaacgcgcaagttatacatcagctgggcccaggtctacggtcaaagatggccatccaaactcaacagagtaagtttgtaaattggcaggttgacggagagtacagaggatcggattttactgctgctgttaccctggggaacccagatgtgctagtgggaagcggcattctggttgcgcattacttacagagtattaccccctgcctagctctgggaggagagctggtctatcatagacgccctggtgaggaaggtactgttatgagcttagccggaaaatataccctgaacaactggttggctaccgtcaccttggggcaggcaggcatgcacgcaacctattatcacaaggcgtcagatcaactgcaggtcggtgtcgagtttgaagcctctactcggatgcaagacacttcggtcagtttcgggtaccagctggatctacccaaagccaatctgctgttcaaggggtccgtggactcgaattggattgtgggtgccacactagaaaaaaaactcccgccactgccgctgactcttgcccttggggcatttctaaatcaccgaaaaaataagttccagtgcgggttcgggctcactattggatag

SEQ ID NO: 244704 - DNA, 1086 bp, synthetic construct
  misc_feature 1..1086: note = Description of Artificial Sequence: Synthetic coding sequence
  source 1..1086: mol_type = other DNA
atgggcaatgtactggctgccagttcccctcctgccggtccacccccaccccctgccccagcccttgtgggattaccccctccacccccttcccctcccggtttcacactgccccctctggggggttcactgggagctggcaccagcacatccagaagttcagagaggacacccggagccgcaacggccagcgcctctggggcagctgaggacggagcttgcggctgtttgccaaatcctggcacgttcgaggagtgccacagaaaatgcaaggaactcttcccaatccagatggaaggcgtgaagctgactgtgaataaaggcctttctaaccacttccaggtgaatcataccgtcgctttgtccaccattggtgaaagtaactatcattttggagtaacgtatgtcggaactaaacagctgtcacccaccgaggcttttccggtgttggtgggcgatatggacaattctggcagcctcaacgcccaggtcatccatcagctcggacctggactgcgctccaaaatggctatccagacccagcagagtaagttcgtcaactggcaggtcgatggcgagtaccgcggaagcgatttcacggccgctgtgacattgggcaatccggatgtcctggtgggctctggaatcctcgtggctcattatctgcagtctataactccctgtttggcattggggggtgaactagtctatcaccgcagaccgggtgaggaaggtacagtgatgtcacttgccggaaagtatacactgaataattggctagcgactgttacactgggccaggctggaatgcacgcaacatactaccacaaagcctctgatcagttgcaagttggggttgagttcgaggcctcgacgaggatgcaggatacatctgtgagcttcgggtaccagcttgatctgcctaaagctaacctgctgtttaagggctcggtggacagcaattggattgtcggcgctaccctcgagaagaagctgcctccgttgccgttgaccttggcgctaggagcttttctgaaccaccgtaagaacaagttccaatgcggtttcggcctgaccatcggatag

SEQ ID NO: 244705 - DNA, 1086 bp, synthetic construct
  misc_feature 1..1086: note = Description of Artificial Sequence: Synthetic coding sequence
  source 1..1086: mol_type = other DNA
atgggaaacgtgctggccgcttccagcccccctgcagggccaccaccgcctcctgcgcctgccctagtgggcctccctcccccaccgcctagcccgcctggctttaccctccccccactgggcggatcccttggggcagggactagcacaagccgatcttccgagcggacacctggcgctgccaccgcttcagcttcaggggcagctgaggatggagcctgcggctgcctccctaatcccggtacgtttgaggagtgccataggaagtgcaaggaactgttccccattcagatggagggggtgaaactcaccgtgaataagggcctgtctaatcattttcaggtcaaccatactgttgccttgtccaccattggcgaatctaattatcacttcggggtcacctacgtaggcactaagcaactctcccccactgaggcgttcccggttttggtaggggatatggataatagtgggtcgctgaacgctcaggttattcaccagctaggacctgggcttagatccaagatggccattcaaacccaacagtctaaatttgtaaattggcaggtggatggagaatatagggggtcagactttaccgccgcagtgaccctcggcaatcccgatgttctggtagggtccggcatcctagtggctcactatttgcagtccatcacaccatgcctagcattgggcggtgagctggtctaccatcggaggcctggcgaggaagggacggtgatgtcactcgcaggaaagtataccctaaataattggctcgccacagtcaccctcggccaggcaggaatgcacgccacatattatcataaagcctctgatcagctgcaggtgggggtggagtttgaggcctccacacgcatgcaggacactagtgtaagtttcggctaccagctggatctccctaaggcgaacctgctcttcaagggcagtgtggattctaactggattgtgggagcaactttggaaaaaaagctgccccctctccctctgactttagccctgggtgcctttctgaaccatcgcaagaataagtttcaatgtggcttcggtctcactatcggctag

SEQ ID NO: 244706 - DNA, 453 bp, synthetic construct
  misc_feature 1..453: note = Description of Artificial Sequence: Synthetic coding sequence
  source 1..453: mol_type = other DNA
atgccttcatccggctctgtgtcaaggtcccggcagcgcggacggtctatggcaagcaggggcttcgatgggtccagacggggttcactccggcgtgccggagctagagaaccacccagtgaggttatcgaggccgcagcacaggcctccggtagctgttggtcctccccgtttttctctgcttctacgccgagtgcggctgccactggtgtgccaggaccgaccgatatggccgctgtgctccagcaggtgctagagaggacggaactgaacaagctgcctaaatccgtgcaaaataagctggagaagtttttggctgatcagcaaagcgagatcgacggactgaaaggcaggcacgaaaaattcaaagtagagtcagaacagcaatactttgaaatcgagaaacgactttcccactcacaagagcgcctcgtcaatgagaccagagaatag

SEQ ID NO: 244707 - DNA, 7091 bp, synthetic construct
  misc_feature 1..7091: note = Description of Artificial Sequence: Synthetic coding sequence
  source 1..7091: mol_type = other DNA
atggcagcggtgctgcaacaggtactggagcggacagaactgaataagctccctaagtctgttcagaacaagctagagaagttcttggcagaccagcagtccgaaattgatggtcttaaagggagacacgagaaatttaaagtggaatcagagcagcaatacttcgaaatcgagaaacgactgtcccacagtcaggaacgcctggtaaacgaaacgcgtgagtgccagagcctgcgactggagctcgaaaagcttaacaaccagctaaaagccctcaccgaaaagaacaaggaactcgaaattgcgcaggatagaaatatagcaatccagtctcagttcacgaggacgaaggaggaattagaggccgaaaagagagacttaattcgcactaacgagagactgtcccaagagctagagtatctcactgaggacgtcaaacgcttaaatgagaaactcaaggagtcgaacacaactaagggggaactgcagctgaaactggatgagctgcaagcgtccgatgtcagtgtgaaatatcgcgagaagaggctcgagcaggaaaaagagctgctgcactctcaaaatacttggctcaataccgagctaaagactaagacggacgagctacttgccctgggacgggagaaaggaaacgaaatcctggaactcaagtgtaacctggaaaataagaaagaggaagtctccagactcgaggagcagatgaacggcctgaaaacgtccaacgaacatctccaaaagcacgtggaggatttactgaccaagttgaaagaggctaaggaacagcaggcctctatggaagagaagttccataacgagctgaacgcacacattaagctctcgaatctgtacaaaagcgcagccgatgacagcgaggccaaatccaatgagttaacaagggcagtggaggaactccacaaactgcttaaagaagctggtgaagcaaacaaggcaatacaggatcatctcctggaggtggaacagagtaaagaccaaatggaaaaagaaatgcttgaaaagattggaagattagagaaagaacttgagaatgccaacgacctgttgtcagccaccaagcgcaagggcgctatcttgtcagaggaagaattggccgcaatgagccctaccgctgccgcagtggccaagatcgtaaagcctggtatgaaacttacggaattatacaacgcatacgttgagacccaagaccagctcctgctcgagaagctggaaaataagcgcataaacaaatacttggacgagattgtaaaggaggtggaggctaaggctcccatcctgaaacgccagcgggaagaatacgagcgtgcacagaaagccgtggctagcctgtctgtaaaactggagcaggcaatgaaggagatacagagactgcaggaagataccgataaggctaataagcagagctccgtcttggaaagggacaatcgacggatggagatacaggtgaaagatctgtctcagcagatccgtgtactactgatggaactggaggaagccagaggtaaccacgttatccgcgacgaagaggttagttctgccgatattagttccagttccgaggtgatctcacaacatctggtttcttatcgtaatattgaggagctgcagcagcagaatcagaggctgctggttgccctgcgcgaattgggagagacccgcgaaagagaggagcaggaaacaacttcgagcaaaatcactgaactgcagttaaagctggagtcagcactgacagagctcgaacagttgaggaaatctagacagcaccagatgcagctggtcgacagtatcgtccgccaacgggacatgtatcgcatcctgctcagccagacaaccggtgtggccatccctctccacgccagttcgctggatgatgtctcactggcaagcacaccaaaacgcccatcaacatctcaaaccgtgagcactcctgctccagtgcctgtgatagaaagcactgaggccatcgaagctaaagccgcacttaaacagctacaggaaatctttgaaaattataagaaagagaaagctgagaacgagaagatccagaacgagcaactcgagaagctacaagaacaggtgaccgacctgcgatctcagaacaccaagatcagcacacagctagactttgctagcaagcgctacgagatgttgcaggataatgtagaaggttacaggagggaaattacatccctgcatgagcgaaatcaaaagctgaccgctacaacacagaagcaggagcagatcattaatactatgactcaagatctgcggggagccaatgagaagctggcggttgctgaagttagagctgagaacctgaagaaagaaaaggaaatgcttaagctgtcggaagtgagactgtcccaacaacgggaatcactgctagcagaacaacgcggtcagaacctgctcctaaccaatctccagaccatccaaggcatccttgagaggtcagaaaccgaaaccaagcagcggctgagcagccagattgagaagctcgaacatgagatttcacatctgaagaagaaactcgagaacgaggtggagcagcgccacacactcacaaggaatctggatgtccagctgttggacacaaagaggcagctggacaccgagaccaacctgcacctgaatactaaagagctgctaaagaacgcccagaaggaaatagctacactaaaacaacacctgtctaatatggaagtgcaggtggcatcccagagttcgcaaagaaccggaaagggacagcccagcaacaaggaagatgtcgatgacttagtgtctcagttacgccagacggaggaacaggtgaacgacctgaaagagcgcctgaagacctccacgtccaatgttgaacagtatcaagccatggttacctctctggaagagtccctgaataaggagaaacaggtgacggaggaagtgcgcaagaacattgaagtgaggcttaaagagtccgctgagtttcagacccagctggaaaagaagttaatggaggtcgaaaaggaaaagcaggagctgcaggacgataaacgcagggcaattgagtctatggagcagcaattatcagaactgaaaaagaccttatcctccgtgcagaacgaggttcaggaagccctgcaaagagcaagcaccgcgctgtctaacgaacagcaggctcgaagagactgtcaagagcaggcaaaaattgccgtggaagcgcagaacaagtacgaacgcgagcttatgctgcatgccgcagatgtggaggccctacaagcagcgaaagagcaggtctcaaaaatggcctctgtccgacaacacctggaagaaaccacccagaaagccgagagtcaacttctggaatgtaaggcctcctgggaagagagggagcgaatgctgaaggatgaggtctccaagtgcgtttgccgttgcgaggacctggagaaacagaaccggcttttgcacgaccagatagagaagctgtcggacaaggtggttgctagcgtgaaagagggggtgcagggcccactgaatgtcagtttaagcgaggagggcaagtcccaggaacagatactcgagatactgcggttcattcgtagagaaaaagagattgccgaaacccgctttgaagtggcacaggtcgagagcctgaggtaccggcaacgcgttgagttgctagagagggagcttcaagagctgcaggattcccttaatgcagaaagagagaaggtgcaggtcaccgcaaaaacaatggctcagcatgaggagcttatgaaaaagaccgagactatgaacgtggtaatggagactaacaaaatgttgcgggaggagaaggaacggctcgagcaggatctgcagcaaatgcaggcaaaagtgcggaagctggagctggatatcctccccctgcaggaggcaaacgccgagttgagcgagaagagtggcatgttacaagccgagaaaaagttattggaagaggacgtgaaacgttggaaggcaaggaaccaacacctcgtgtctcagcagaaggatcctgacaccgaagagtacaggaaactcctgtccgaaaaggaggtgcatacaaagaggatccagcagctgacagaagagatcgggagactcaaggcggagattgccaggagtaatgcctcactgacaaataatcagaatctaattcagtctttgaaggaggacctgaacaaagtccgcaccgaaaaggaaactatacaaaaggacctggacgccaaaattatcgatattcaggagaaagtaaagacaatcactcaagtgaaaaagattgggagaagatacaaaacccaatatgaggaactcaaagcacagcaggataaggtcatggaaaccagcgcgcagtcttctggagaccatcaagagcaacacgtgagtgtccaggagatgcaagagttaaaggaaaccctgaaccaagctgagacaaagagcaaatcattggagtcccaagttgaaaacctccaaaagaccctttctgaaaaagagacagaggccaggaatctacaggagcagaccgtgcagctgcagtccgaactcagcagactgcggcaagaccttcaggatagaaccacacaagaagaacagctgagacagcagattacagagaaagaagagaagactagaaaagctatagtggccgcaaaatccaaaatcgcccatctcgccggagtcaaggatcagttgactaaggaaaacgaagagctcaagcaacggaatggagccctggatcaacagaaggatgaactggacgtccgaattacagcactcaagtcccaatatgaagggaggataagcagattggagagagagttgcgtgaacaccaggagcgtcatctggaacaacgagatgaaccacaggaaccatctaacaaagtgcctgagcaacagagacagataaccctcaagacaaccccagccagtggtgaaaggggtatcgcttctacatccgaccccccaacggcaaacattaaacctacccccgttgtctccacccctagcaaggtgactgccgcagcaatggcaggaaacaagtccaccccgcgtgcttctatccggcctatggttacacctgcaacggtcaccaaccccaccaccaccccgacggcaacagtaatgcctactacgcaggtggaaagccaggaggcaatgcagtcggaggggcctgtggagcatgtgcccgtctttggatcaaccagcggatcagtgcggtccacatccccaaatgtgcagccatccatcagtcaaccaattctcaccgtgcagcagcagacccaggcaactgcatttgtgcaacccactcagcagtctcacccacaaatcgagcctgccaaccaagaactgagcagcaacatcgtggaagtggtgcagagcagccctgtggagcggccttctacctcgaccgctgtctttgggacagtatcagctacccctagctcctctctacccaagcgcacaagagaggaggaggaggactccacaatagaagcatctgatcaggtttcggatgacacagttgaaatgcccctgccaaagaaattgaaatctgttactcccgtaggaacagaggaggaagtcatggcagaggagtcaaccgacggagaagtagagactcaagtctacaaccaggacagccaggactctattggtgagggggtaacccagggcgactacacgcccatggaggactccgaggaaacctctcagagcctccaaattgatctgggtccccttcagagcgatcagcagaccactacctcctctcaggacgggcagggcaaaggggatgacgttatcgtgatagactcagacgatgaagaggaagatgacgacgagaacgatggagaacacgaagattacgaagaggacgaagaggacgatgacgacgatgaggacgatacagggatgggggacgagggagaagatagcaacgaagggacaggaagcgccgatggtaatgatggctatgaagctgatgacgctgagggtggcgatggtactgaccctggcacagagacagaggagtccatgggaggcggagagggcaatcatcgggctgccgacagtcagaatagcggtgaggggaatactggggctgctgagagtagcttttcccaggaggtatcccgtgaacagcagccaagcagcgccagcgagaggcaggccccacgcgctccccagagtcccaggcggcctccccacccgctcccacctagactcaccattcacgctccgccacaagaacttgggcctccagttcagagaatccaaatgacaagaagacagagtgtgggacgcggtctgcagttgacccccggaatcggtggaatgcaacagcactttttcgacgatgaggaccggaccgtgccaagcacccctaccttagttgtgccgcatagaaccgacggcttcgccgaggccatccacagcccacaggtcgctggcgtccctagatttcggttcgggcctcccgaggacatgccacagacctcatcctctcactctgacctgggccagctagcatcgcagggcggattagggatgtatgagactcccctcttcttggcccatgaagaggagtcgggtggacggagtgtacccacaactcccctgcaggtcgcggcaccggtcactgtttttactgagtccaccacctccgacgcctcagagcatgccagtcagtctgtgcccatggtcactacgagcaccgggaccctgtccactaccaatgagaccgccacaggcgatgacggtgatgaggtgttcgtcgaggccgagtctgagggaattagctccgaggctgggctggaaatcgacagtcagcaagaagaagagcctgttcaggccagtgatgaaagtgatcttcctagcacctctcaggacccaccgagttcatcatcggtcgatacgtcctcttcccagccaaagccattccgcagggtgcgacttcagactactctgagacagggtgtgcgtggccgtcagttcaatagacaacgcggagtttcacacgcaatgggtggtaggggcggaatcaataggggaaatatcaatta

SEQ ID NO: 244708 - DNA, 453 bp, synthetic construct
  misc_feature 1..453: note = Description of Artificial Sequence: Synthetic coding sequence
  source 1..453: mol_type = other DNA
atgccttccagcggaagcgtttctaggagtagacagaggggccgatcaatggcgtcccgcggattcgacgggagccgccgagggagcttgcggcgagccggtgccagggaacccccaagcgaggttattgaggccgcagcccaagctagcgggagttgctggagtagcccttttttcagtgctagcaccccgtcagccgcagcaacaggcgttcctggcccaaccgatatggctgccgtcctgcagcaggtgttagagcgcactgagctcaacaagttgccaaaatctgttcagaataaactggagaagttcctggccgaccagcagagtgaaatcgacggcctgaaaggaagacacgagaagtttaaagttgagtcggagcagcaatatttcgaaatcgaaaaacggctctcccactctcaggaacggcttgtcaacgaaacccgagagtag

SEQ ID NO: 244709 - DNA, 510 bp, synthetic construct
  misc_feature 1..510: note = Description of Artificial Sequence: Synthetic coding sequence
  source 1..510: mol_type = other DNA
atggctcctccatgggtgcccgcaatgggtttcactctcgccccatcgctgggctgtttcgttggatcccgcttcgtccacggcgaggggctgagatggtacgccggacttcagaagcccagctggcatcccccacattgggtgctggggccagtgtggggtactctgtacagcgctatgggctatggtagttatctggtgtggaaggaactgggcggatttactgagaaagccgtggttcccctcgggctctacactgggcaactcgctctgaactgggcctggcctccaatttttttcggcgcaagacagatggggtgggctctcgtggatttgctgctggtttcaggcgctgccgcagccacaactgtagcgtggtaccaggtaagccctcttgcagcaagactgttgtacccctatctcgcctggctggcctttacaacgaccctcaactactgtgtctggagggacaaccatggctggcgtggaggcaggaggctcccagagtag

SEQ ID NO: 244710 - DNA, 510 bp, synthetic construct
  misc_feature 1..510: note = Description of Artificial Sequence: Synthetic coding sequence
  source 1..510: mol_type = other DNA
atggctccaccatgggtgcctgccatgggcttcactctcgccccatctctcgggtgcttcgtcgggtctaggttcgtacacggcgaaggcctccgctggtatgccggactgcagaaaccaagctggcacccaccacattgggtgctggggcctgtatggggcacgctgtattccgcaatgggctacggaagttatcttgtgtggaaggaactgggcggattcacagagaaagccgtggtgcccctgggcttatacaccggtcagctagcccttaactgggcttggcctcccatcttctttggcgctcggcagatgggctgggccctggtggatctgctgctcgtgtcaggggcagccgcagcaacaacggtggcatggtaccaagtctctcctctggccgcacggctcctttacccctatctggcatggctggcctttacaaccaccttgaactactgtgtatggcgcgacaaccatggatggaggggagggagaaggctaccagagtag

SEQ ID NO: 244711 - DNA, 309 bp, synthetic construct
  misc_feature 1..309: note = Description of Artificial Sequence: Synthetic coding sequence
  source 1..309: mol_type = other DNA
atggccccacatctgctttggtgtccaaccaacggcttgggccttggtgggtcaccagccggacagtggggtggtgggtcacactatagagggctggtgccaggcgaaccagccggacggcctccagccctccctctgcctgggctggccggtctacacgaccatacacagctcttgcgcatggccggacagccatggctagcatggggcacagccgcagccagggtgagcgcccgaccaaccagagattgttcatgtacctccaggtgccaccacgcctgtgatgtggtggctgtaaccctgtcgtag

SEQ ID NO: 244712 - DNA, 324 bp, synthetic construct
  misc_feature 1..324: note = Description of Artificial Sequence: Synthetic coding sequence
  source 1..324: mol_type = other DNA
atggcccctccatgggtccctgccatgggttttacactggccccaagcttgggatgctttgtgggtagtcgctttgtgcatggtgaggggctccgctggtacgcgggactacagaagccttcctggcaccctccacattgggttctgggccctgtatggggcactctatacagcgctatgggctatggatcatacctcgtttggaaggaattgggaggattcacagagaaggccgtggtgccattgggtctctataccggccagctggcactgaactgggcttggcccccaatattttttggcgctaggcagatggggtggtag

SEQ ID NO: 244713 - DNA, 609 bp, synthetic construct
  misc_feature 1..609: note = Description of Artificial Sequence: Synthetic coding sequence
  source 1..609: mol_type = other DNA
atgtgttatggtaagtgcgcccgatgcatcggccattcactggttggactcgctcttttatgcatcgccgctaatatacttctttattttcctaacggtgagacgaaatatgctagcgaaaatcacctgagcagattcgtgtggttcttttctggaatcgttggtgggggtttacttatgctgctgccggcatttgtgtttattggattggagcaggacgattgttgtggctgctgtggccatgaaaactgcggcaagcgctgcgctatgctgagttctgtactcgctgctctgatcgggatcgcgggtagcggctattgtgtgatagtcgcggcattgggccttgctgaaggccctctttgcctcgattcgttggggcagtggaattatacatttgcctctacggagggacagtacctgctagacactagtacttggagtgagtgtacagaacccaaacacatcgttgagtggaatgtttcgctcttttccattttgctcgctttaggagggatcgagttcatcctctgcctgatacaggtcattaatggggtgctgggtggaatttgcggcttctgctgctctcatcagcagcagtacgattgttag

SEQ ID NO: 244714 - DNA, 699 bp, synthetic construct
  misc_feature 1..699: note = Description of Artificial Sequence: Synthetic coding sequence
  source 1..699: mol_type = other DNA
atgtgttatggaaaatgtgcacggtgcataggacacagcctggtcggactggctctcctctgcatagccgctaatatcttactatactttcccaatggggaaactaagtatgcttctgagaaccacctttccagatttgtgtggttcttctctggcatcgtgggtgggggactccttatgctattacctgcttttgtgtttatcggattggagcaggacgattgttgcggatgctgtgggcacgaaaattgcggtaagcgatgtgctatgctgtctagtgttctggccgctttgatcgggatcgccggtagcgggtattgcgttatcgtcgccgctctgggactggcggagggcccactttgcctggattctctcggacaatggaactacacattcgccagtactgaaggtcaatacctgctggacacatctacttggtccgagtgtacggagcccaagcacatagtagagtggaacgtgtccctgttttctatcctccttgcgttaggaggaatagaattcatcctgtgcctgatccaggtcataaatggtgtgctagggggaatatgcggattctgctgcagccaccagcagcagatgactgctaaacgcacaaaccccggacagtcccacaacctccccttgttccattgcaacctctacatctcattggttttcatttgtaaaaccctgtattag

SEQ ID NO: 244715 - DNA, 609 bp, synthetic construct
  misc_feature 1..609: note = Description of Artificial Sequence: Synthetic coding sequence
  source 1..609: mol_type = other DNA
atgtgtaccggagggtgcgcacgctgtctgggcggaactctaatccctctcgcgttctttgggtttcttgctaatatcctgctgtttttcccagggggaaaggtcattgatgacaatgaccacctgagtcaggagatttggttcttcgggggtatactgggttcaggcgtcctcatgatatttcctgctcttgtcttcctgggtcttaaaaacaatgactgttgtgggtgctgtgggaacgaaggttgtggcaagagattcgccatgttcacaagtacgatctttgcagtggtaggcttcctcggcgctgggtactcctttattatatccgccatttccatcaacaagggtccgaagtgcctcatggctaactcgacatggggctacccttttcatgacggggattatctcaatgatgaagccctctggaacaagtgccgtgagccattaaatgtggtcccctggaacctgacgctcttctccatccttctggttgttgggggtatccaaatggttctgtgtgctattcaagttgtaaacggcctactgggaacactgtgtggggactgtcaatgttgcggctgttgtggaggcgacgggccagtatag

SEQ ID NO: 244716 - DNA, 594 bp, synthetic construct
  misc_feature 1..594: note = Description of Artificial Sequence: Synthetic coding sequence
  source 1..594: mol_type = other DNA
atgtgtactggtaaatgcgctcggtgtgtgggcttgagcctcatcacactttgcctggtgtgtatcgtggctaatgcccttttgttagtccccaacggcgaaacatcatggactaataccaaccacctctcgttgcaggtgtggctgatgggcggtttcattggagggggactgatggttttatgtcccggaattgcagctgtacgagcaggcggaaagggctgttgtggtgccggatgctgtggtaatagatgccggatgcttcgctctgtattcagttctgcattcggagtcttaggtgctatttactgcctcagtgtgtccggtgccggactcaggaacggaccccgttgcctgatgaatggtgagtggggctatcattttgaagataccgccggtgcttatctgctaaaccgaaccctgtgggatcgatgtgaagccccaccacgggtcgtcccgtggaatgtgacactgtttagcctgctggtggccgcaagttgcttggagatcgttctgtgtgggatccaactggtaaatgccacaattggggtcttctgcggcgactgcagaaaaaagcaggatacgcctcattag

SEQ ID NO: 244717 - DNA, 438 bp, synthetic construct
  misc_feature 1..438: note = Description of Artificial Sequence: Synthetic coding sequence
  source 1..438: mol_type = other DNA
atgtcagccagcgcggcaacaggcgttttcgtgctgtctctcagcgctataccagtgacgtatgtgtttaaccatcttgccgctcagcacgattcatggacaattgttggagtagctgcccttatcctgttcctcgtggcactcttggccagagttctggtgaagagaaagcctccgagggatcctctgttctacgtgtatgcggtcttcggctttacaagcgttgttaaccttatcatcggcctagaacaggatggcataatcgacggatttatgacccattacctgcgggaaggagagccttacttaaatacagcttacgggcatatgatttgttattgggatggctcggcgcactacctgatgtatctcgtgatggttgcagcaatcgcttgggagtgctggcatatctgtagcatccttttcctaaccctctag

SEQ ID NO: 244718 - DNA, 1113 bp, synthetic construct
  misc_feature 1..1113: note = Description of Artificial Sequence: Synthetic coding sequence
  source 1..1113: mol_type = other DNA
atgagtgcttcagctgccaccggagtgtttgtgctgtcactatcggcaattcctgtcacttatgtttttaaccaccttgcagctcagcacgacagttggactatagtgggcgttgcagctctgattttgttcctggtggccctgcttgccagagtgctggttaaaagaaaacctcccagggatccgctgttttacgtgtatgctgtctttggtttcacctctgttgtgaacctgatcatcgggctcgagcaggatggcattatcgatgggtttatgacgcactatctgagagagggcgaaccatacctgaatacggcctacgggcatatgatctgctactgggacggctcagcacattacctgatgtacttggtgatggtcgctgccattgcgtgggaggagacctaccgcactattggcttgtattgggtcggctctattatcatgtcggttgttgtgtttgtgccaggcaatatcgtggggaaatatggtacaaggatctgtcccgctttttttttaagtatcccctatacgtgcctgccggtgtgggccggttttaggatttacaaccagccgtccgagaattataattacccatctaaggttattcaggaggcacaggccaaagacctgcttagacgaccgttcgaccttatgctggttgtgtgcctgctgctagcgacagggttttgtttgttccgaggactgatcgctctggactgcccctcagagctctgtagattgtacactcagtttcaggagccctacctgaaggatcccgctgcatatccaaaaatccaaatgcttgcatatatgttctattcggtgccatacttcgtcacagccctgtacggattggtggtgcctggctgttcctggatgccagatatcaccctcattcatgcagggggactggcacaggcccagttcagccatataggcgcttcgttgcacgctcggactgcctatgtttacagggtccctgaagaggcaaagatcttgttcctggcccttaatattgcctatggtgtcctgccccagctcctcgcgtaccggtgtatctacaaacccgaattcttcatcaaaactaaagccgaggaaaaagtggaatag

SEQ ID NO: 244719 - DNA, 1020 bp, synthetic construct
  misc_feature 1..1020: note = Description of Artificial Sequence: Synthetic coding sequence
  source 1..1020: mol_type = other DNA
atgtccgcgtccgcagctaccggggtctttgtccttagtctctctgcaatccctgtgacatacgtgtttaatcatctggcggcacagcacgattcgtggactatagtaggagtggccgctctgatcctttttctggtggccttactggcgcgtgtgttggtgaaacgaaaaccacccagggatccattattctacgtgtatgccgtttttggatttaccagtgttgtcaacctcatcatcgggctcgagcaggacggtattatcgacggattcatgactcactatttaagagagggggaaccatatctgaatacagcctatggccatatgatctgctattgggatggaagtgcccactacttgatgtacctagtgatggttgcagccatagcatgggaggagacctatagaacaattggcctctactgggtaggttctattattatgtctgtggtcgtgtttgtaccaggaaacatcgttggaaagtacggtacaaggatctgccccgcattcttcttgtctatcccatacacttgcctccctgtgtgggcgggatttaggatttacaaccagccgtccgagaactacaactatccatccaaggttattcaggaggcacaggccaaagatttattgaggcgcccttttgacttaatgctggttgtttgcctgctgttggcaactggcttctgccttttccgtggactgatgctggcttatatgttctactctgtaccatatttcgtaaccgccctttatggtttggtagtccccggatgctcttggatgcctgacatcaccctcattcacgctggcggattggctcaagctcagttctcccacatcggagccagcttgcacgccagaacggcttacgtatatagggtgccagaggaggctaagattctgttcctggccttgaacatcgcttacggagtgcttccacagctgctggcttacagatgtatctataaaccggaattctttattaagacaaaagctgaagaaaaggtcgaatag

SEQ ID NO: 244720 - DNA, 1122 bp, synthetic construct
  misc_feature 1..1122: note = Description of Artificial Sequence: Synthetic coding sequence
  source 1..1122: mol_type = other DNA
atgagtgcttcagcagccactggggtgtttgtcctgagcctgagcgccattcccgtcacctacgtgttcaatcatttggccgcacagcatgactcatggaccattgtgggggtggccgcactcatcctcttcttggtagccctactggccagggttctcgttaagcgaaagcctccgagggacccactgttctacgtctatgccgtctttggtttcacgagcgtcgtgaatctgataatcggcctggagcaggacggtataattgacggctttatgactcactaccttagagagggggagccttatctgaataccgcgtatggacacatgatctgctattgggatgggtctgcccattacttgatgtatctagtgatggtggctgctattgcatgggactgttacagagaaacatatcgcactatcggtctgtattgggtcggtagtatcataatgtccgttgtcgtattcgttccgggtaacatcataggcaagtacggcactcggatttgcccagccttcttcctgtcgatcccctatacatgcttgcccgtgtgggccggtttccggatatataaccagcccagtgagaactacaactacccttctaaagtgatccaggaggcccaggcgaaagacctcttaaggagacctttcgatctgatgttggtagtgtgtcttctcctggctactgggttctgcctcttcagagggctgatcgcactcgattgcccatcagaactgtgcaggctatacactcagttccaggagccttatctgaaggatcctgccgcatacccgaagattcagatgctggcgtacatgttctatagcgtaccatatttcgtgaccgcactctatgggctagtggtgcccggttgctcctggatgccggacataaccctgatccatgctgggggtcttgcccaggcacagttctcccatattggcgcatcactgcatgctcgcacagcctacgtgtaccgggtgcctgaggaggcaaaaatcctgtttttggcgctgaatatcgcctacggcgtcttaccccagttgcttgcctacagatgtatatacaaaccagagttttttatcaaaacgaaggctgaagagaaagtagagtag

SEQ ID NO: 244721 - DNA, 567 bp, synthetic construct
  misc_feature 1..567: note = Description of Artificial Sequence: Synthetic coding sequence
  source 1..567: mol_type = other DNA
atgtcagcttcagctgccacaggagtatttgtgctcagtctgagcgccatcccagttacctatgtgtttaaccatctcgccgcacagcacgactcctggactattgtgggtgtcgctgccttgattcttttcctggtcgccctattggctcgagtactagtgaagcgaaagccaccacgcgacccgttattttacgtatatgccgtgttcggattcacctccgtggtgaacctaataatcgggctagaacaagatggtattatcgacgggtttatgacacattatctcagggagggcgagccctatttgaataccgcctatggacacatgatttgttactgggacggcagtgcccactacctcatgtacctggtgatggtggctgcgatagcctgggaggagacgtatcggactataggactgtattgggtgggttctatcatcatgagtgtggttgttttcgtccccggtaatatcgtggacgctgggatctatgttctcttttgttccttactgtgcgactgcaccgtttggcttagcggctcttggatgttcctggacgcttag

SEQ ID NO: 244722 - DNA, 1020 bp, synthetic construct
  misc_feature 1..1020: note = Description of Artificial Sequence: Synthetic coding sequence
  source 1..1020: mol_type = other DNA
atgtcagcctcagctgcaaccggagtgtttgtgctcagcctgagtgcaatccctgtgacatacgtgttcaaccacctcgctgcccagcacgactcttggactattgttggagtagcggctctaatcctattcttggtggccctcctggctcgtgtcctggtgaagcggaagccaccaagagacccactcttttatgtgtatgccgtctttgggtttaccagcgtcgttaatctcatcattggactcgagcaggatggaattatcgatggatttatgactcactatctgcgagaaggtgaaccatatcttaacacagcttatggccacatgatctgttattgggatggatctgcacattatctaatgtatttagtgatggtagccgctattgcatgggaagaaacctatcgaaccatcgggctctactgggttggatcaatcattatgagcgtcgtcgtgtttgtgcctggcaacatcgtgggcaagtacggcactagaatctgtcctgcttttttcctatccattccttatacctgcttaccggtctgggccggattcagaatctacaatcagccaagtgagaactacaactatcctagcaaagtaatacaggaggcccaggctaaggatctgttaagacgcccatttgacctgatgctcgtcgtgtgtctgctgttggccaccggcttttgcctgtttcgcggactcatgctagcctatatgttttattccgttccctatttcgttacagcactctatgggctggtggtgccgggatgttcctggatgccagatataactttgatccatgcagggggtctcgcacaagcccagtttagtcatattggtgcctctcttcacgctaggaccgcatatgtttatcgtgtgccagaagaagccaaaattctgtttttagccctgaacattgcttatggcgtgctgcctcagctcctagcctatcggtgtatctataaacccgagttcttcattaagaccaaggccgaagaaaaggtcgaatag

SEQ ID NO: 244723 - DNA, 1056 bp, synthetic construct
  misc_feature 1..1056: note = Description of Artificial Sequence: Synthetic coding sequence
  source 1..1056: mol_type = other DNA
atggatatcccccctctggccggaaagatcgcagctctcagcctgtccgccctgcctgtttcttacgctctaaatcacgtttctgcgctctctcatcccctgtgggtggccctaatgagtgctcttattctgggccttctgttcgttgccgtttactctctttcccatggagaggtatcttacgacccgctgtacgctgtattcgcagtgtttgcgttcacaagcgtagtggaccttatcatcgctctgcaggaggattcctacgtggttggcttcatggagttctataccaaagagggcgagccttacctcagaaccgcacatggagtctttatttgttactgggatggcacagtgcactatttattgtatctggccatggcaggcgctatttgtaggcgcaaacggtaccggaactttggcctgtattggctgggctctttcgctatgtcgatactcgtgttcttaaccggtaatatcttgggtaaatattcgagcgagatcaggcctgcttttttcctcaccattccctaccttctggtaccctgctgggccggtatgaaggtgttcagccagccccgtgccctcacacggtgcaccgcaaatatggttcaagaggaacagcgcaagggcctcctccagcggccagcagatttagcactggttatctacttgattctagcgggattttttacactgttccgagggctcgttgtgcttgattgtcctaccgacgcctgttttgtttacatctatcagtacgagccatacctgagggaccctgtggcttatcccaaagtgcagatgttgatgtacatgttctacgtgctgcctttttgtggccttgcggcttacgcactgacgtttcccggttgctcttggctgccagattgggctttggtgtttgccggaggcatcggccaagcacagtttagtcacatgggcgcttcaatgcacctccgaacaccatttacttatcgatgtcttcaatggcctgcattcttccatcagcccccaccttccgacccactcgcgctccataagaagcagcattag

SEQ ID NO: 244724 - DNA, 1134 bp, synthetic construct
  misc_feature 1..1134: note = Description of Artificial Sequence: Synthetic coding sequence
  source 1..1134: mol_type = other DNA
atggacattcccccactcgctgggaagatcgcggctctcagcttgtccgcactgcctgtgtcctacgcactgaatcacgtctcagccctgagccacccactgtgggtggccttgatgtccgcactgatcctgggcttgttgttcgttgcagtgtattctttaagccatggagaggtgtcttacgatcccctatatgccgtgttcgcagtctttgccttcacaagcgtagttgacctcatcatagctctccaagaggacagttacgttgtcggttttatggagttttatacgaaggaaggggaaccctacttgcggaccgcacacggtgtgtttatatgttactgggatgggacagtacactatctgttgtatctggccatggccggagccatctgtagaagaaagaggtaccgaaatttcggcctgtactggctaggaagctttgcaatgtctattctggtattcctgaccggaaacatcctcggaaaatactcttccgaaatacgtccagccttttttttaaccatcccctatctgttagtgccatgttgggcaggcatgaaagtctttagtcagccgagggccctgacgcgatgcacagctaacatggttcaggaggagcaacggaagggcctcctgcagagacccgctgacctggcacttgtcatctacctcatcctggccggttttttcaccctgtttcggggactggtagtgttggactgcccaacagacgcatgctttgtgtatatctaccagtacgaaccatacctgagagaccctgtggcctacccaaaagttcagatgttgatgtacatgttctatgtgcttcccttctgcggcctagccgcatatgccctgacctttcccggttgtagctggctgccagactgggcgctcgtgttcgccggtggaatcggacaggcacagttctctcacatgggcgcatccatgcaccttcggacccctttcacctatcgagttccggaagatacttgggggtgtttcttcgtgtgcaatctgctgtatgcccttgggccacacctattggcatatcgatgcctccagtggccggcattcttccaccagcctccaccctctgacccgctggctctccacaaaaaacagcactag

SEQ ID NO: 244725 - DNA, 642 bp, synthetic construct
  misc_feature 1..642: note = Description of Artificial Sequence: Synthetic coding sequence
  source 1..642: mol_type = other DNA
atggacatacctccactggcgggtaaaatagcggcattatctttgtcagcactgcctgtttcgtatgcccttaatcacgtgtctgctctgtcacacccactctgggttgccctcatgtctgctctgatcctcggtctgttgttcgttgctgtgtactccttaagtcatggagaggttagctacgacccgctctacgcagtgttcgccgtctttgcatttacatctgtagtggatctaattattgcgctgcaggaagactcttacgtcgttggctttatggagttctataccaaggaagtgttgggcggacgcccagggagccctctgccacattgcccatctgagtcccccacttgcccacacagagagagtcacacatgtgcacagagaacagaaagcagcagtgcaaccgggatggcactgttcacaacatcttccacttggccctggcccgctccaagcgccgaaggcgcaggaggtcgcgagcgggtggctcctgaccccggtagagaggtggcatctagtgatggtgttcccggacaaggtggagctcgttccgtgtgcagacgaaaccaagatgctagcctgggcctccagcccggagttgcacgaaggcggttccagggtaccagccaggtgtag

SEQ ID NO: 244726 - DNA, 1257 bp, synthetic construct
  misc_feature 1..1257: note = Description of Artificial Sequence: Synthetic coding sequence
  source 1..1257: mol_type = other DNA
atggctcccactcaggggcctcgtgcacctctagaattcggaggtcctcttggggctgcagcactcctcctgctgctcccagcaaccatgttccaccttctcctcgcagcccgttcaggcccagccaggttattaggcccacccgcatcactccctgggctggaggtcctctggtctcccagagccctcctcctgtggttagcctggttgggtctgcaggccgcattgtacctgctgccagccagaaaagtggccgaagggcaagagctgaaagataaatccagactaagatatcccattaacggcttccaggcgctggtgttaacagctctgctggttggcctgggcatgtcagctggcctccctttgggagcccttcccgaaatgcttctgccgcttgcgtttgtggctacacttactgcgttcatattctccctgttcctatacatgaaggcacaggtggcaccagtgtctgccctggccccaggaggcaactcaggaaaccccatttatgactttttcctgggcagggaactaaacccacgtatttgtttctttgattttaaatacttctgtgagcttaggccaggcctgatcggatgggtgctgataaatctggcactcttgatgaaagaagccgagctgcgaggaagccccagcctggcaatgtggcttgtgaatggatttcagctgctgtacgtcggagacgctctgtggcacgaggaggccgttctgactacaatggacattacacatgatggattcggattcatgctcgcattcggagatatggcctgggtcccttttacctacagcctgcaagcacagtttctactccatcaccctcagccccttggtctcccaatggctagtgtcatctgtctgataaacgccacgggctactatatcttcagaggagctaattcccagaagaacactttcagaaaaaacccgagcgatccccgagtggcaggcctggagacaatctcaaccgcgactggtcgaaagctcttggtgtcaggatggtgggggatggttcggcacccgaattacttgggtgacctgatcatggcgctggcttggtccctgccctgtggcgtatcccaccttctgccctatttctacctgctctatttcacagcgctccttgtgcaccgggaagcgcgtgatgagagacagtgcctccagaaatatgggcttgcttggcaagagtattgtcgtcgcgttccgtacagaatcatgccatatatttattag

SEQ ID NO: 244727 - DNA, 1176 bp, synthetic construct
  misc_feature 1..1176: note = Description of Artificial Sequence: Synthetic coding sequence
  source 1..1176: mol_type = other DNA
atggcacccacgcagggtcccagagcccctctggaattcgggggtcctctcggggctgctgccttactgctgctcctcccagcaacaatgttccatcttctactagccgcaaggtccggacccgctcgactgctcggaccaccagcctctttacctggcttggaagtgctgtggtcccctagggccctgctgttgtggctggcctggctcggactccaggccgctttatacctgctccctgccagaaaggtggcagaagggcaggagctgaaagacaagagtagactaagataccctattaatgggttccaggcccttgtactgacagctctgcttgtggggttaggaatgagcgcgggattgccgcttggggcactcccagaaatgttgctgccactggcattcgttgctaccctgaccgcatttatcttttcactttttctgtacatgaaagctcaggtagctcctgtgagcgctctggctcccggaggaaacagcggcaatcctatttacgacttcttcctgggaagggagctgaaccccagaatttgcttcttcgacttcaaatacttttgtgaactgagaccaggactgattggctgggtgctcataaatctggcgctgttgatgaaagaagcagaattgcggggttctcctagtcttgccatgtggctcgtcaacgggtttcagttgctctatgtcggtgatgcgctttggcacgaggaagcagtattaactaccatggatatcactcacgatgggtttgggtttatgctcgcttttggagatatggcatgggtcccattcacatactccctgcaggcgcagttcttgctgcaccatccacagcccttgggactccccatggcatccgtgatctgcctgatcaacgggctggagactatctcaaccgccacaggcaggaaacttctcgtctctggctggtggggaatggttcgtcatcctaattacctaggcgacttgataatggctttggcatggagcctgccttgtggagtgagtcacctgctgccttacttttacctgctatattttactgccctgcttgtgcacagagaagcccgagacgaacgacagtgcctgcagaaatacggcctggcctggcaggagtattgtaggcgcgtcccttacaggataatgccctacatttactag

SEQ ID NO: 244728 - DNA, 909 bp, synthetic construct
  misc_feature 1..909: note = Description of Artificial Sequence: Synthetic coding sequence
  source 1..909: mol_type = other DNA
atgtctgcagggctgcccctcggcgctcttcccgagatgttgctccctctggccttcgtcgctacattgacagcattcatattcagtctgtttctctacatgaaagctcaggtcgcccctgtttcggctctcgcgcctggcggaaacagcgggaatccaatctacgatttctttctgggaagagagcttaaccccagaatctgtttctttgatttcaagtacttttgcgagttgcgcccaggactaatcggatgggtgctcattaatctggccttgctcatgaaggaggccgagttgaggggatctccctctcttgcgatgtggttagtcaacggctttcaattgctctatgtgggggatgctttatggcatgaagaggccgttcttaccaccatggatatcactcacgacggttttggattcatgctggcctttggggacatggcttgggtgcccttcacatactcgctgcaagctcagttcctcctccaccaccctcagcccttgggcctcccgatggcaagcgtgatttgtctgatcaacgccacagggtactatattttcaggggcgctaattctcagaagaacactttccgcaaaaacccatccgacccccgagtcgctggcctggagacaatctcaactgccactggacggaaacttctcgttagtggatggtgggggatggtaagacaccccaactacctgggcgatctgatcatggcactggcctggtcgttaccttgtggcgtgtcccacttactgccctatttttacctactgtattttacggcccttctagtgcaccgcgaggccagggacgaaagacaatgtctgcagaagtatggactggcttggcaggaatattgtaggcgcgttccctacaggatcatgccatatatctattag

SEQ ID NO: 244729 - DNA, 1713 bp, synthetic construct
  misc_feature 1..1713: note = Description of Artificial Sequence: Synthetic coding sequence
  source 1..1713: mol_type = other DNA
atgggctttctgcagctgctcgtggttgcagtgctggccagtgaacatcgggtggccggagccgcagaggtcttcggcaacagcagtgaaggacttatcgagttttccgtgggcaaattcagatattttgagctgaacagaccattcccagaagaggccatcctgcatgatatctcttccaatgtaacattcctgatcttccagatccacagtcagtaccagaacactacggtgagcttctcacccacattgctgagtaattcttccgagacaggtaccgcgtccggcctggtgttcattttgagacccgagcagtccacttgtacatggtacctgggaacttccggcattcaaccagtgcagaacatggcaatcctcctctcttacagcgagcgcgatcccgtgcccggtgggtgcaatctggagtttgacctagacatcgaccccaacatatatctcgaatacaactttttcgaaaccactattaaatttgcccctgccaatctaggctacgctaggggtgttgacccacccccttgcgacgccggaactgatcaggactcacggtggagactacagtatgacgtataccaatacttcctgccggaaaacgatctgaccgaagaaatgcttctcaagcatcttcagcgaatggtgagcgtgcctcaggttaaagctagcgccttgaaggtcgtgaccctaacagccaatgacaagaccagtgtttctttttcatccctcccaggccagggcgtgatatataacgtcatagtgtgggatccctttctgaacacgtcggccgcatatatccctgctcacacgtatgcctgctcctttgaggctggagaggggagttgtgcaagcctgggcagggtcagctccaaagtgttttttacactctttgctttactgggattctttatttgcttctttgggcatcgattctggaagacggagttgttttttataggctttatcataatgggattctttttctatatcttaatcactagactcacacccattaagtatgacgtcaatctaatcctgaccgcggtgactgggagcgtgggtgggatgttcttagtggccgtgtggtggaggttcggtatactttctatttgcatgctgtgtgtgggactggtcctcggctttctgatatcatcagtgaccttcttcacccccctgggaaatctgaaaatttttcacgacgacggggtgttttgggtgaccttcagctgcatcgccatcctaatacccgtggtgttcatgggctgtctgagaattctcaatattttgacctgtggtgttattggtagttatagtgtggtcctggctatcgattcttattggtccacaagcctgtcttatattacactgaacgtcctgaagcgcgctcttaacaaagacttccatcgcgcttttacaaacgtcccttttcagacaaacgatttcataatactagccgtttgggggatgctggctgtttctggtatcactttacaaatccggagggagcgaggccgacccttttttcctccacacccttacaaactgtggaagcaggagagagagcggagagtgacaaatatactagaccctagctaccatatcccacctctccgagagcggctttatggccgtctgacccagatcaagggtctattccagaaagaacaaccagccggagaacgaactccccttttactgtag

SEQ ID NO: 244730 - DNA, 351 bp, synthetic construct
  misc_feature 1..351: note = Description of Artificial Sequence: Synthetic coding sequence
  source 1..351: mol_type = other DNA
atggggttcctgcagctgctcgtggtggcagtgcttgcctccgagcaccgcgttgctggtgctgccgaggttttcggaaattcttccgaggtgtacctggtagtgggattgattgaatttagcgtaggcaagttcagatacttcgaactgaatagacccttccccgaagaagccatcctgcacgacattagttcaaatgtgacttttcttattttccagatacactcccagtaccaaaacaccaccgttagcttttcgcccaccctcctcagtaattccagtgagactggaacagccagcgggctggtatttatcttgagacctgagcagagcacctgtacttggtattag

SEQ ID NO: 244731 - DNA, 1413 bp, synthetic construct
  misc_feature 1..1413: note = Description of Artificial Sequence: Synthetic coding sequence
  source 1..1413: mol_type = other DNA
atgggtatctggacctccggtaccgacatctttctaagcctatgggaaatatatgtgtcgccccgtagccccggttggatggacttcatccagcatctcggggtgtgctgtctggtggccctcatctcggtcgggttgctctctgtggctgcctgctggttcctgccttctataatagcagctgctgccagctggattataacctgcgttttgctttgctgcagcaagcacgccaggtgtttcattctgttggtgttcctgtcatgcgggttgagggagggtcgaaacgcattaattgccgctggaacggggatagttatactcggtcatgtggagaacatcttccacaacttcaaaggcttgcttgacggcatgacgtgcaatctccgggctaaatctttctctattcacttccctttactgaaaaagtacatcgaggccatccagtggatctatgggcttgctaccccgctgagcgtcttcgacgacctcgtttcttggaaccagacacttgccgtgagcctgttcagcccatctcacgtgctggaggctcaactgaacgatagtaaaggcgaggttctaagcgtgttgtaccagatggccaccaccaccgaagtgcttagctcacttggccagaaactgctagcatttgcagggttgagtctcgtactgcttgggacaggcttgttcatgaaacgttttttgggtccctgcggctggaaatacgagaacatctatattacccgccagtttgtgcaatttgatgaacgcgaacgacatcagcagcgcccatgcgtgcttccactcaacaaggaggagcgtcgtaagtatgttatcattcctaccttctggcccactccaaaggagcgtaagaatctgggactcttttttctgcctattctgatacacttatgcatctgggtgctttttgcagcggtcgactatctgttgtatcgcctgattttcagtgttagcaagcagttccagtctctgccgggattcgaggttcacctaaaactgcatggtgaaaagcagggtactcaggatattattcacgacagttcattcaatataagtgtcttcgaaccgaactgtatcccaaagccaaaattcctgctgagtgaaacttgggtccccctttccgtgattctactgatcctggtgatgctggggctgctttcttcaattctgatgcaactgaagatcctggtttccgccagtttctaccccagcgttgagcggaagcgaatccaatacctgcacgccaaactgttgaaaaaacgcagtaagcagcctctaggggaagtaaagcgacgcttgagcctctacctgactaaaatccatttttggctacctgtgctgaaaatgatcaggaagaagcagatggatatggccagcgccgacaagtcctag

SEQ ID NO: 244732 - DNA, 567 bp, synthetic construct
  misc_feature 1..567: note = Description of Artificial Sequence: Synthetic coding sequence
  source 1..567: mol_type = other DNA
atgagtacaatgtttgccgacactctgcttatagtcttcattagcgtatgtactgctttgttggcggagggcataacttgggtgctggtttacagaactgataaatacaaacgtctgaaagccgaagtcgagaagcagagtaagaagttagagaaaaagaaggaaaccatcaccgagagtgccggtcgccaacaaaaaaaaaaaattgagaggcaggaggaaaaactcaagaacaataacagggatctgagtatggtgaggatgaaaagtatgttcgctatcggcttttgcttcaccgccttgatggggatgttcaactccatcttcgacggcagggtggtcgctaagctcccttttacgccccttagttatatccaggggctgtctcaccggaacctgctaggggacgacaccaccgactgttcatttatcttcctgtacattctgtgtacaatgagcatccgccaaaacatccagaagattcttggcctggccccaagccgggcagccaccaaacaggccggaggcttcctgggtcccccaccgccttcaggcaagtttagctag

SEQ ID NO: 244733 - DNA, 510 bp, synthetic construct
  misc_feature 1..510: note = Description of Artificial Sequence: Synthetic coding sequence
  source 1..510: mol_type = other DNA
atgagcactatgttcgccgacactttgctgattgtgtttatcagcgtatgtactgccttgctggctgaaggaatcacttgggtactggtctatcgcacggataagtacaagcggctcaaagcggaggtcgaaaaacagtctaagaagttggaaaagaaaaaggagactattaccgaatccgctgggcgtcagcaaaaggtgcgcatgaagtctatgttcgccatcggcttttgcttcaccgcccttatgggtatgttcaacagcatctttgacgggagggtcgttgcgaagctccccttcactccactttcctacatccagggactgtcgcacaggaatctgctgggggacgatactactgactgtagtttcatctttctgtatatcctatgtactatgtcaattcgccagaatattcaaaaaattctaggtcttgcaccctctagagccgctaccaagcaggctggcggattcttagggcctccacctccaagcgggaaattctcatag

SEQ ID NO: 244734 - DNA, 603 bp, synthetic construct
  misc_feature 1..603: note = Description of Artificial Sequence: Synthetic coding sequence
  source 1..603: mol_type = other DNA
atgatgcattacgtagactactctatgatgtaccacttgattcgcggtcagagtgtcatcaaactctacataatttacaatatgctcgaggtggccgacagactattcagttctttcggccaggacatcctggatgcgctgtactggactgccacagaacccaaagaacgaaaacgtgctcacataggatttgtggaaattaaaggctcagtcttcaaaaagttcgagaagaataacctgttccagatgagcaactctgatatcaaagagaggttcaccaattacgtgctactgctcatagtctgcttgaggaatatggagcagtttagctggaaccctgatcacttgtgggttttgtttcccgatgtgtgcatggttatcgcatccgaaattgctgtagacattgttaagcatgcctttatcactaaattcaacgacataacagccgacgtgtactccgagtacagagccagtctggcatttgacctggtttcatcacgtcagaaaaatgcctacaccgattactcagacagcgttgccaggagaatgggatttatcccactgcccctggcagttctggtcgatatcccagagagtacatag

SEQ ID NO: 244735 - DNA, 1371 bp, synthetic construct
  misc_feature 1..1371: note = Description of Artificial Sequence: Synthetic coding sequence
  source 1..1371: mol_type = other DNA
atggtgttcggtatctttctttgcctggacgccttcctctatgtgttcacactgctgcccctccgtgtgtttctggccctgtttcgcctactcactcttccttgctatgggctgagagacagacggctcctacagccagcccaagtttgcgatatcttgaagggagtgattctcgtgatatgctatttcatgatgcattacgtcgactatagcatgatgtaccacctcatccgaggtcagagcgttattaaactctatataatatataacatgttggaggtcgctgatcggctgttctcttctttcggccaggacatcctggatgcgctttactggactgccaccgagcctaaagagcgaaaacgagcacatattggagtaattccccattttttcatggccgtgctgtacgtgtttctgcacgcgatcctgataatggtacaggctacgactctgaatgtcgcgtttaactcccacaacaagtcactcctgacaatcatgatgtcaaacaacttcgtagaaatcaaaggaagcgtctttaaaaagtttgagaagaacaacctgttccagatgagcaactctgatattaaggagagatttaccaattatgtgctgctgttaatagtctgtctgcggaacatggagcaattctcctggaatcctgatcatctgtgggttcttttcccggacgtttgcatggtgatcgcctctgagatagctgtggatatcgtgaaacatgcttttataactaaatttaacgacataacagcagatgtttattcagagtatcgggcttctctggcctttgacctagttagctcaaggcagaaaaacgcgtacacggactactccgattcagtggcacgccgaatggggtttattccactgccacttgcagtgttactgatccgggtggtcacgtctagtattaaggttcagggaattctgtcttacgcctgtgtgatcctcttttattttgggttgatttctttgaaggtgctgaacagcatcgtgttgctgggcaagtcatgccagtatgtgaaagaggccaagatggaagaaaagctgtcaaatccacccgcaacctgtacgcccggtaaacccagcagcaaatcccagaacaagtgcaagccgagtcaagggctgagcaccgaggaaaatttatcggcctcaatcacaaaacaaccaattcatcagaaagagaatattattcccttactggttaccagtaactctgaccagtttctgaccactcccgacggggacgagaaggacattacccaggacaactctgagctcaagcatcggtccagcaagaaggaccttttagaaattgaccgctttactatttgtgggaacagaatagattag

SEQ ID NO: 244736 - DNA, 1704 bp, synthetic construct
  misc_feature 1..1704: note = Description of Artificial Sequence: Synthetic coding sequence
  source 1..1704: mol_type = other DNA
atggcaggagtgggggacgcggcagcccctggcgaaggcggaggaggcggagtggatggccctcagcgtgatggacgaggagaggccgagcagcccggtggttctgggggtcagggcccacctccagctccacagcttaccgagacccttggcttctacgagtctgacagacgcagagaacggcgacgaggaagaacagagctaagcctgctgcggtttctgtctgccgagctcactcggggatatttcctggaacacaatgaggctaaatacactgaacgacgggaacgagtgtatacatgccttcgcattcctagagagcttgaaaagctcatggtttttggtatcttcctttgtctcgacgctttcctctacgtgttcactctcctcccactgcgcgtgttccttgctcttttccgactactgactctgccatgctacgggctcagagaccgccgactgctgcagcccgctcaggtgtgcgacatcctaaaaggtgtaatccttgtgatctgctacttcatgatgcactacgtcgattattccatgatgtaccacctaatccgagggcaatctgtaatcaaactgtatataatttacaatatgctggaggttgcggatagactcttttcatcatttgggcaggatatactcgacgctctctactggaccgcaacagaaccgaaagaacggaaaagggctcacatcggggtcattccacattttttcatggcggtcctctacgttttcctccacgcaatcttgatcatggtacaggccaccactctcaatgtggcatttaactctcacaataagtccctccttaccatcatgatgagtaacaattttgtcgaaattaaggggagcgtgtttaaaaagttcgaaaaaaataacctgttccagatgtccaactcagacattaaggagcggtttaccaactatgtcctcctgttaatagtgtgccttagaaacatggagcagttctcttggaatccggaccatttgtgggtcctgtttcccgatgtgtgcatggttatcgcctccgagatagccgtggatatcgttaaacatgccttcatcaccaaatttaacgatatcactgccgacgtgtattccgagtatcgcgcatcactcgctttcgacctggtttcttcaaggcagaagaacgcctacactgactactcggactctgtggcccgacggatgggcttcattccgctgcccctggccgtgctgttaatccgggtcgtaacctcctctatcaaggttcagggaattttgagctacgcatgcgtgatcctattctactttggcctcatctcattaaaggtactgaacagcatcgtgttattggggaagagttgccagtacgtaaaggaggcaaagatggaggagaaattatcaaacccacccgctacctgcacacctggtaagccaagtagtaaaagtcagaacaagtgtaagccatcacagggtctcagcactgaggaaaatctgtctgcaagtatcacaaaacagcccattcaccagaaggagaacattatccccctgttggttacatctaactccgatcaatttcttaccacacctgatggagacgagaaggacattactcaggataacagtgagttgaagcaccgcagctccaagaaagatcttctggagatagaccggtttactatctgcggcaaccggatagactag

SEQ ID NO: 244737 - DNA, 1689 bp, synthetic construct
  misc_feature 1..1689: note = Description of Artificial Sequence: Synthetic coding sequence
  source 1..1689: mol_type = other DNA
atggcaggggtgggcgatgcagctgcacccggagaaggcggtggaggcggtgtggacggccctcagcgggacggcaggggagaggcagagcagccaggaggatcaggtggccaagggcctcctcctgcccctcaactgactgaaaccctgggcttctacgaaagcgaccgcagacgggagcgcagaaggggacgcacagagctgagtctactgagatttctctctgccgaattgacccgcggatattttctggagcacaacgaggctaagtatacagaaagacgagagagagtgtacacctgtctccgaatacccagagagttggaaaagcttatggttttcggtatttttttatgtttagacgctttcttatatgttttcacgctcttaccattgagggtgttcttagccctctttcggctactgaccctcccttgctacggactccgggaccgacgattgctccagccagcccaggtgtgtgatatccttaagggtgtgatcctggtcatctgttacttcatgatgcactacgttgattacagcatgatgtatcatcttatcagagggcagtcggttatcaagttgtatatcatctataacatgctcgaggtggcagacaggctgttcagctcattcggacaggacatcctggatgcgctctactggaccgctactgaaccaaaggagagaaagagagcgcacataggcgtcattcctcacttctttatggctgttctatacgtatttctgcacgctatcctgatcatggtccaggcaacaacactgaatgtggcttttaattcccataataaatccctgctgaccataatgatgtctaacaactttgtggagatcaaaggcagtgttttcaaaaagttcgaaaaaaacaatttattccagatgagcaatagcgacatcaaggagagattcaccaattatgtactgctactgattgtctgcctgcgaaatatggagcagttttcttggaaccccgatcacctgtgggtgctgttcccagacgtgtgtatggtgatcgcgagcgaaattgctgtcgacattgttaaacacgcatttatcacaaagttcaatgatataaccgctgacgtgtattccgagtatagagcatccctcgcctttgacctcgtgtcatcccgccaaaaaaatgcctacacggactacagtgactccgtggccagaagaatgggctttatccccctgcctcttgccgtcctgctgattcgagtcgttacgagctctatcaaagtccaagggattctgtcttacgcgtgcgtgatactgttctatttcggcctgatttcactgaaagttctgaacagcattgttttactaggcaaaagttgtcagtacgtcaaagaggccaaaatggaagagaaactctcaaatccaccagccacatgcacaccaggaaaaccatcgtcaaagagtcagaacaagtgcaaacctagtcaaggtctttctaccgaagagaacctgagcgcatccatcacaaagcagcccattcaccagaaggagaatatcatccctcttctggttacatctaactctgatcagtttctaacaacccccgatggcgatgagaaggacatcactcaagacaactccgagttaaagcaccgcagttccaaatccgttctgctgtgccagtcgggccttcccgaatgctag

SEQ ID NO: 244738 - DNA, 2283 bp, synthetic construct
  misc_feature 1..2283: note = Description of Artificial Sequence: Synthetic coding sequence
  source 1..2283: mol_type = other DNA
atgtcacccaagaaggtgcagatcaaggtcgaagaaaaagaggatgagaccgaggaatctagctcagaggaggaagaggaggtggaggataagcttcccaggcgagagtcattgaggcctaagcgaaagaggacccgagacgtgatcaacgaagacgaccctgagcccgagcccgaagatgaggagacgagaaaggctagggaaaaagaacggagaaggagactcaagcggggagcagaggaagaggagatcgacgaggaggagctcgagagactgaaagccgaattggacgaaaaacggcagatcattgctacagtaaaatgcaagccatggaagatggaaaaaaaaatagaggttctgaaagaggccaagaaatttgtgtctgagaacgagggagcccttggaaaaggaaagggcaaaagatggtttgcctttaagatgatgatggcaaagaagtgggccaagttcctgagggatttcgaaaatttcaaagcggcatgtgtaccctgggagaataagatcaaagcaattgagagtcaatttggcagtagtgtggctagttatttcctcttcctgcgttggatgtacggtgtcaacatggtgttgttcattcttaccttcagcctcatcatgctacccgaatatctgtggggcctgccatacggttccctgcccaggaagacggtcccgcgagccgaggaagcttccgccgctaacttcggcgtactgtatgattttaatgggttagctcagtacagcgtgctgttttacggttattacgacaataagaggaccattgggtggatgaatttccggttgccacttagctattttctggtgggcatcatgtgcatcggctacagctttttggtggtgctcaaggctatgacgaaaaacataggcgacgacggcggaggggatgacaacacctttaatttctcatggaaggtctttactagctgggactacctcattggtaaccccgaaactgccgataacaaattcaattccattacaatgaattttaaggaggcaattaccgaggagaaggctgcccaggtcgaagaaaacgtgcaccttatcagattcctgcggttcctggcaaattttttcgttttcctgacccttggaggatccggctacctgatcttctgggctgttaagcggagccaagagttcgcacagcaggaccctgataccctgggatggtgggagaagaacgagatgaacatggtgatgtctctcttggggatgttttgcccgaccctgtttgacttgtttgcagaacttgaagactaccatcctctgatcgctctgaaatggctgctgggtaggatatttgcccttttgttggggaatctgtatgttttcatccttgccttaatggatgagataaacaataaaattgaagaggagaaacttgtgaaagcgaatattaccctatgggaagccaatatgatcaaagcatacaacgcttcctttagcgagaactcaactggccctccctttttcgtccaccctgccgacgtgccccgaggcccatgctgggaaactatggtgggtcaggagtttgtgaggctgaccgtgagtgacgttctaactacctatgtaacaattttaattggtgatttccttagggcttgctttgtgcgattttgcaactactgttggtgctgggacctggagtatggctacccctcttacaccgaatttgatatttcaggaaatgtactggctctgatttttaatcagggcatgatatggatggggagtttttttgccccaagtctcccagggataaatattctgcggttgcataccagtatgtatttccaatgctgggccgtgatgtgttgcaatgtgcctgaagcacgagtcttcaaggctagcagaagcaataatttctacctgggtatgctcctgctcatcctcttcctgagtaccatgccggttttgtatatgatagtaagcctgccaccatcatttgattgtggcccattctctgggaaaaacagaatgtttgaggtgattggggagacactggagcatgacttcccctcatggatggctaaaattctgagacaactctccaaccctggactggttatcgccgtcattctggttatggtgctggcaatttattacttgaacgccactgccaagggccagaaggcagcgaacctcgacctgaaaaagaaaatgaagatgcaggccctggaaaacaaaatgagaaataaaaagatggccgcagcacgggctgccgctgctgccggacgtcagtag

SEQ ID NO: 244739 - DNA, 2283 bp, synthetic construct
  misc_feature 1..2283: note = Description of Artificial Sequence: Synthetic coding sequence
  source 1..2283: mol_type = other DNA
atgtccccgaagaaggttcagattaaggttgaggagaaagaggatgaaactgaagaatcctcatccgaggaggaggaagaggtggaggacaaacttcccagacgggagtccctcagacccaagcggaagcggaccagggacgtcattaatgaggatgacccggagcctgaaccggaagatgaagagacccgcaaggcgagagagaaggagcgtagacgcagactaaaaaggggagccgaggaggaagaaatcgatgaggaggaactggagcggctgaaggccgaactcgatgaaaaaaggcagattattgccaccgtaaagtgtaagccctggaagatggaaaaaaagattgaagttctgaaggaggccaaaaagttcgtgtccgagaacgaaggagctctcgggaaagggaagggcaagcgatggtttgcgttcaagatgatgatggccaaaaaatgggctaaattccttcgggacttcgaaaacttcaaggccgcttgtgtgccatgggaaaacaaaattaaagccattgagagccagttcggttctagtgtggctagttatttccttttcctcaggtggatgtatggggtgaatatggtgctctttattctgacattttctctgatcatgctgccggagtacctgtggggactgccttatgggagccttccccgaaagaccgttccaagggctgaggaggctagtgccgctaactttggcgtgctgtatgatttcaacgggttggctcagtactccgttctcttttacggttattacgacaataaaaggacaatcggctggatgaacttccgtctgcctctgagttattttctggtcggaataatgtgcattgggtactcgttcctcgtggtgctcaaagcgatgactaaaaacatcggagatgacggaggaggtgatgacaataccttcaatttttcatggaaagtgttcacttcatgggactatctcataggaaaccccgagaccgctgataataagtttaatagcatcactatgaattttaaagaagccattactgaggaaaaagccgcacaagtcgaggagaatgtgcaccttattaggtttctgagattcctcgcaaacttctttgtgttcctgactctgggtggcagcggatacctcatattttgggccgtgaaacgctctcaagagtttgcacagcaggatcctgacacccttggttggtgggagaagaatgagatgaatatggtgatgtcactgctggggatgttttgccctacactgtttgatctgtttgccgagctcgaagactaccacccccttattgccctgaagtggttactagggaggatttttgccctgctcctgggaaatctgtatgtgttcatcctggcgcttatggatgagataaataataaaattgaagaagaaaaactcgtcaaggcaaacatcacattatgggaagcaaatatgatcaaagcctacaacgccagcttttctgagaattctaccggcccaccgttttttgtccaccccgctgacgtgcccagaggaccttgctgggagacaatggtcggacaggagtttgttcggctaacagtctcggatgtcctgaccacatatgtgacgattttaataggcgacttcctgagagcctgtttcgttagattctgcaactattgctggtgttgggaccttgaatacgggtatccttcctacaccgagttcgatataagtggtaatgtgttggccctgattttcaatcaaggtatgatctggatgggatctttctttgctcccagtttacctggtatcaatatcctgagactgcatacgagcatgtacttccagtgctgggccgtcatgtgttgtaacgtgcccgaggccagagtgttcaaggcctctcggtccaacaacttttatctggggatgctactactgatcctgtttttgtctacgatgcccgtcttgtacatgatcgttagcctcccacccagtttcgactgtggcccattctctggcaaaaaccgaatgttcgaagtgattggcgaaacattggagcacgacttcccgtcctggatggcaaagatcctcaggcagctgtcaaaccctgggctcgtgatagccgtgattctcgttatggttctggcaatttattacctcaatgccactgccaagggtcagaaggcagccaatctggacctgaagaaaaagatgaagatgcaagcgctagaaaacaagatgcgaaacaagaaaatggctgctgcccgtgcggctgccgctgctggacgtcaatag

SEQ ID NO: 244740 - DNA, 2223 bp, synthetic construct
  misc_feature 1..2223: note = Description of Artificial Sequence: Synthetic coding sequence
  source 1..2223: mol_type = other DNA
gtagaatggagcggcgagtgcctgagatcttgtaggcgcgaagtgcagatcaaggtggaggagaaagaagacgaaacagaggaaagtagttcagaggaggaggaggaggtggaagacaagctgcctagacgggaatcgttaaggccaaaacggaaaaggactcgggacgtgattaacgaagacgatcccgagccagaacctgaagacgaggagacaagaaaggccagggagaaggaaagacgacgtcgattgaaacgcggagcagaagcgaagaagttcgtgagcgagaacgagggagctctcgggaagggcaaaggcaaacgttggtttgcttttaaaatgatgatggctaaaaaatgggccaaatttttaagggactttgagaattttaaagccgcatgcgtgccttgggagaataagattaaagcgattgagagccagttcggctcctctgtggcgagctactttttattcctgcggtggatgtacggcgttaacatggtgctgtttatcctcacttttagcctgatcatgctgccggagtatctctggggtctgccctacggttcccttcctagaaaaaccgttccgcgagcagaggaagcatccgcagccaactttggggtgctgtacgactttaacgggctggcacagtatagtgtgctattctatggctattatgacaataaacggacgatcggttggatgaacttccgtcttcccctgtcttatttcttagtcggaatcatgtgtatcggatactccttcctggtggttctgaaagcaatgactaaaaatataggcgacgacggcggtggggacgacaacacatttaatttctcatggaaggtatttacctcctgggattatctgatcggaaatccggaaaccgcagataataaatttaacagtatcactatgaattttaaggaggccatcactgaggagaaggctgcccaagtagaagagaacgtgcacttaattcgatttttgaggtttctggctaatttcttcgtgttccttacactgggcggaagcggctacctcatcttctgggccgtaaagagaagtcaggaatttgcgcagcaggatcctgataccctagggtggtgggagaaaaatgaaatgaatatggtgatgtccctgctcggaatgttttgcccaaccctgttcgacctgttcgctgagctagaagactaccaccctcttatcgcacttaagtggctcctgggaaggatcttcgcgctcttactgggtaacttatatgtgttcatcttagcgcttatggatgaaataaacaataaaatagaggaggagaagttagtcaaagctaatattacattgtgggaggctaatatgattaaggcttacaacgcctccttctccgagaacagcaccgggccacctttcttcgtgcacccagcagatgtgcccaggggcccatgctgggaaactatggtaggacaggagtttgtccgcttaaccgtgagcgatgtgcttaccacctacgtgactatcttaatcggcgactttctccgcgcttgttttgtgagattctgtaactattgctggtgttgggatctggagtatgggtacccatcctatacggagttcgacatctcagggaacgtgctcgccctgatttttaaccagggcatgatctggatggggagtttttttgcaccctcattaccaggaatcaacatcctccgactgcatacatctatgtactttcagtgttgggccgttatgtgctgcaatgtgcctgaggctcgggttttcaaggcttcccggagtaataatttttacctcgggatgctcttgctgatcttgttcctatccacaatgcctgtcctgtatatgatcgtgagcctgcctcctagtttcgattgtggcccatttagcggcaaaaacaggatgtttgaagtcattggcgagacattggagcatgatttcccctcatggatggccaaaattcttcgccagctctccaatcctggcctggtcatagcggtaattttggtgatggtcctggctatctactacctcaacgccacagccaaagggcagaaagccgcaaatctagacttaaaaaagaagatgaaaatgctgcaactgctcgttgcctccaataaatatccagagagtccagaaaaggtccattttgccctgctcttcaagagtaatgcaatttgcgagaggcccgagaacaagcactgttag

SEQ ID NO: 244741 - DNA, 2283 bp, synthetic construct
  misc_feature 1..2283: note = Description of Artificial Sequence: Synthetic coding sequence
  source 1..2283: mol_type = other DNA
atgtctcctaaaaaagtgcagatcaaggtcgaagagaaggaggatgagaccgaggaaagctcttctgaagaagaagaggaggtcgaagacaagctgcccaggcgggagtccctgcgtccaaagaggaagcgcacaagggacgtaatcaacgaagatgatcctgaaccagaaccagaggatgaggagactcgaaaggccagagagaaggaacgtaggcgacggcttaaacgaggtgctgaggaggaagaaatcgacgaggaagaacttgagaggctgaaagccgagctggatgaaaagcgccagatcatcgctactgttaagtgtaagccctggaagatggagaaaaaaattgaggtgctcaaagaagcgaagaaatttgtcagcgagaacgagggcgcactgggcaagggcaaaggtaaaagatggtttgcgttcaagatgatgatggcgaagaagtgggctaagttcctgcgtgatttcgaaaattttaaggccgcatgcgtgccttgggagaacaagatcaaggccatagaatcacagtttggctctagcgttgcctcttattttctttttctgaggtggatgtatggtgtgaacatggtgctcttcatactcacattctcgctgatcatgctacccgaatatctatggggcttaccgtacgggtctctcccacgcaaaactgtgccgagagcagaggaggcatcggcagccaatttcggcgtgctttacgacttcaatggccttgcccagtatagcgtcctcttttatggctactacgacaacaagagaaccatcgggtggatgaatttcaggctgcccctgagttatttcctggtgggcatcatgtgcatagggtacagcttcctggtagtacttaaagcaatgactaaaaacattggggatgatgggggaggtgatgataataccttcaactttagctggaaggtttttacaagctgggactatcttattggtaaccccgaaacggccgacaataaattcaatagcatcacaatgaacttcaaggaggctattacggaggaaaaggctgcccaggttgaagaaaacgtgcatctgatccgtttcttgcgatttttagccaacttttttgtctttctgactttaggcggtagcgggtacctcatcttttgggccgtgaagagaagtcaagagttcgcccagcaggatcccgatactctgggctggtgggagaaaaatgagatgaacatggtcatgtctctcttggggatgttttgcccaaccttgttcgatttgtttgccgagcttgaggactaccaccccttaatcgccctgaagtggctccttggacggatctttgctctactgctcggcaacctgtacgtgtttattctggccttgatggacgaaatcaacaacaaaatcgaagaggagaaattagtgaaggctaatattacactgtgggaggcaaacatgattaaggcctataatgcaagtttctctgaaaactccacaggccctccattctttgtgcaccccgctgacgtccccagaggcccttgctgggaaactatggtcggccaggagtttgtccgcctaaccgtgtccgatgtactaacaacatatgtcacaatcctcataggggacttcctgcgggcatgcttcgttcgtttttgtaattactgttggtgctgggatttggagtatggatatccgagttacacagagtttgacatctcagggaacgtattggccctgatattcaaccaaggcatgatttggatgggctcctttttcgcaccctccctgcccggtatcaacatactgaggcttcacacatcaatgtatttccagtgctgggcagtgatgtgctgcaacgttccagaggcacgagtcttcaaagcctcccgtagtaataacttttaccttggaatgttactcctgattcttttcttgtccacgatgcctgtgctgtatatgatagtgtctctgcctccctctttcgactgcgggccattctctgggaaaaaccgtatgttcgaagtcataggtgagaccctggagcatgactttcccagctggatggcaaagattctgagacagttgtccaatcctggattggtgatcgccgtgattctggttatggtgcttgcgatatattatctgaacgctactgcgaaggggcaaaaggcagctaatcttgatctcaagaagaaaatgaaaatgcaggctctggagaataagatgcggaataagaagatggctgcagctcgagccgctgccgctgccggacgccagtag

SEQ ID NO: 244742 - DNA, 2184 bp, synthetic construct
  misc_feature 1..2184: note = Description of Artificial Sequence: Synthetic coding sequence
  source 1..2184: mol_type = other DNA
gtggaatggagtggggagtgcttgcgttcctgtaggcgtgaggtgcagattaaagtagaagaaaaagaagatgaaaccgaagagtcctcgtcagaagaggaagaagaggtggaagacaagctacctcgtcgcgaaagcctgaggcctaagcgaaagaggacccgggatgtgatcaacgaggatgatcccgagccagaacctgaagacgaggaaaccaggaaggcccgagaaaaagagaggagacgcaggcttaagcgcggagccgaggcaaaaaagttcgtgtctgaaaacgaaggagctctggggaaggggaaaggtaagcgctggtttgccttcaaaatgatgatggctaaaaagtgggcaaagttcctgagagattttgagaactttaaggctgcctgcgtgccctgggaaaacaagattaaagcaattgagtcccagttcggatcgtccgtcgcctcatattttctttttctccggtggatgtatggggtaaacatggttctgtttatcctcacattctcattaatcatgctgccggaatacctctggggactcccctatggcagcctcccaagaaaaaccgtacctagagcagaggaggcctcagcggcaaactttggggtgctgtatgatttcaacggtctcgctcagtacagcgtcctcttttatggttactacgacaataagaggaccatcggttggatgaacttccgactgcccttgagctattttttggtgggcattatgtgtattggctattcatttctcgttgtcctgaaagccatgacaaaaaacatcggcgacgatggcggaggggatgataacacctttaacttttcatggaaggtctttacctcttgggattacctcattggcaaccccgaaactgccgataataagtttaattccattacaatgaacttcaaggaggcaattaccgaagagaaagccgcacaagtggaagagaacgttcacctgatacggtttctgcgatttcttgccaactttttcgtgttcttgactctgggcggtagtggctatcttatcttttgggctgtgaagaggtcacaggagtttgcacaacaggatccagacacccttggctggtgggaaaaaaatgaaatgaacatggttatgtcattgttggggatgttctgcccaactctcttcgatctttttgcagagttggaagactaccaccctctcatcgctctgaagtggctactggggagaatctttgccttgctactgggcaatctgtatgttttcatacttgctttaatggacgagattaataacaaaattgaagaagagaaactcgtaaaagctaacataaccttgtgggaagccaacatgatcaaagcctataatgcttcattcagcgaaaattcaacgggacctccattctttgtgcatccagccgacgttcccaggggcccttgctgggagaccatggtcggacaagaatttgtaaggctgaccgtaagcgatgtattgactacatatgtgacgatcctaataggagactttctgagagcctgttttgtgagattttgcaattactgctggtgttgggatctagagtacggttacccctcatacactgaattcgacatatccggaaacgtcctcgctttaatctttaatcagggtatgatctggatgggatcctttttcgccccttccctccccggaatcaacatcctcagactgcacacctcaatgtattttcagtgctgggcagtcatgtgttgcaatgttcccgaggctcgcgtgttcaaggcaagtcgtagtaacaacttctatttggggatgctgctgctgatcctgttcctgtctactatgcctgtgctttatatgatcgtgagtctcccccctagttttgattgcggtccattctctgggaagaacaggatgttcgaggtcattggggagaccctggaacatgactttcctagctggatggccaagattctgcgtcagcttagcaaccccggactggtgatcgccgtcatcctggtaatggtgctggccatctactacctgaatgctactgccaagggacagaaggcagctaatcttgacctgaagaagaagatgaagatgcaggcacttgagaataagatgaggaataaaaaaatggcagccgctagagccgcagctgccgcaggcaggcagtag

SEQ ID NO: 244743 - DNA, 1665 bp, synthetic construct
  misc_feature 1..1665: note = Description of Artificial Sequence: Synthetic coding sequence
  source 1..1665: mol_type = other DNA
gtggagtggagtggcgagtgcctgaggagctgccgtagggaagtacagatcaaggtggaagagaaagaggacgagacagaggagtcaagttctgaagaggaggaggaggtagaagacaaactgccgaggcgggaatccctgaggcctaaacggaaacggacccgcgacgtcattaacgaggatgatccagaacctgaacctgaagatgaagagactaggaaggcaagagagaaagagcgtcgaagaagactcaagcgaggtgctgaggccaaaaagtttgtgtcagagaatgaaggtgccctgggcaaggggaagggtaaacgctggtttgccttcaagatgatgatggcaaagaagtgggccaagttcctccgggacttcgagaacttcaaagcagcctgtgtaccttgggagaacaaaataaaggcaattgaaagtcagtttggaagtagtgtagcttcatactttctatttctgagatggatgtacggcgtcaacatggtactgtttatcctgacctttagtctcattatgctgcccgaatacttatggggcctcccgtatgggagccttccccgtaaaactgttcccagggccgaggaggctagcgctgccaattttggtgttctctatgatttcaacggcctagcacaatatagcgtcttgttttatggatactacgataacaagagaacaatcggttggatgaattttcggctgcctctgagttatttcctggttggtatcatgtgcatcgggtatagcttcctagtagtgctcaaggcgatgaccaaaaacattggcgatgacggcggtggcgatgacaacaccttcaacttctcgtggaaggtcttcacatcctgggactacctcattggcaacccagagactgcggataataaattcaatagcatcactatgaatttcaaggaagccatcacagaagagaaagccgctcaagtcgaagagaatgttcacctgattagattcctgcgtttcctggccaatttctttgtgttcctgaccttgggaggatcaggctaccttatcttctgggctgtcaagaggtcgcaggagtttgcgcagcaggaccccgacactctcggttggtgggaaaagaatgagatgaatatggtgatgtccctcctaggaatgttttgccccaccctgtttgatctgttcgcagaactcgaggattatcaccctttgatagctctgaagtggttgttgggtagaatctttgctctgcttctggggaacctctatgtgttcatactggcgttgatggatgaaatcaataacaaaatagaggaggagaaattagtcaaagccaacattaccctgtgggaagcaaacatgattaaagcctataatgcgagcttctccgaaaatagtactggaccaccatttttcgttcatcctgctgatgttcctcgcggaccatgctgggagaccatggtgggtcaagagttcgtcaggctcactgtgtcagacgttctgacaacctatgttacgattctgattggggactttctccgcgcttgcttcgtgcggttctgcaactattgctggtgttgggacctagagtatggatacccaagttataccgagtttgacattagcgggaatgttctcgcgctgatcttcaaccagggaatgatctag

SEQ ID NO: 244744 - DNA, 2265 bp, synthetic construct
  misc_feature 1..2265: note = Description of Artificial Sequence: Synthetic coding sequence
  source 1..2265: mol_type = other DNA
cagatcaaggttgaggaaaaagaggacgagaccgaggaatcatcatccgaggaagaagaagaggttgaggataagctcccgagacgggagtcacttagacctaagcggaaacgtacgagagatgttatcaatgaagacgaccctgagccagagcctgaggacgaggaaacccggaaagcccgagaaaaagagagacgtagacgcctgaaacgcggagcggaggaagaagaaatcgatgaggaagagctggagagactgaaggcagagctcgatgaaaaaagacagattattgcgaccgtgaagtgcaagccctggaaaatggagaaaaagattgaggtactgaaagaggccaagaaattcgttagtgagaatgaaggggctctggggaaaggcaaaggaaagcgctggtttgccttcaaaatgatgatggccaagaagtgggctaagtttctgcgagatttcgagaactttaaggctgcctgcgtcccctgggagaacaagattaaagcgatagaatctcaatttggctcctccgtggcttcttatttcctttttctgaggtggatgtacggggtaaacatggtgttatttatactgacattttccctaatcatgctgcctgaatatctgtggggactgccatacggaagccttcccaggaaaacagtccctcgtgccgaggaggctagtgcagcaaacttcggagttctgtacgacttcaacggcctcgctcagtatagcgtcctcttctatggatattacgataataagagaactatcggctggatgaacttccggctaccgctgtcatacttcctagtcggaattatgtgtatcggatacagtttcctggtggttctgaaagctatgacaaaaaacatcggcgatgacgggggtggggatgataatacattcaacttctcctggaaggttttcacgtcctgggactacttgatcggaaacccggaaacagccgacaacaaattcaattcaatcaccatgaattttaaagaagccatcaccgaagaaaaagctgcgcaggtcgaggaaaacgtgcaccttattaggtttctcaggttccttgcaaacttcttcgtgttcttgacgctcggcggatcaggctacctcatattttgggccgtcaaaaggtcccaggaatttgctcaacaggaccccgatactctcggatggtgggaaaagaatgagatgaatatggttatgtcattactaggcatgttttgccctactttattcgacctgttcgctgaactcgaggactaccacccgctgatcgccctgaagtggcttctgggcagaatattcgccctgctgctcggcaacctgtacgtgtttattcttgctctgatggacgagatcaacaacaagatcgaggaagaaaaacttgttaaagccaacatcaccttgtgggaagccaatatgatcaaggcttacaacgcctcattctctgaaaattcaaccggtcccccattttttgtgcaccccgcagacgtgcctcggggaccttgttgggaaacaatggtgggtcaggagttcgtgagactgaccgtcagtgatgtgctcaccacttacgtaactattctgatcggagacttcttgagagcctgtttcgtgcgtttttgcaattactgttggtgctgggacttagagtacggctaccccagctacacagaattcgacatctctggcaatgtactggcgctgatctttaaccagggaatgatatggatggggtctttcttcgcgccttctctgcctggaattaacatcctgcgcctgcacacttctatgtactttcagtgctgggctgtcatgtgctgcaacgtgcccgaagcacgagtattcaaggcatctcggagcaacaatttctatctggggatgctcctcctgattctgttcttatctactatgcctgtgctgtatatgatcgtctccctccctccctcttttgattgtggcccattctctggaaagaaccgaatgttcgaagtgattggagaaacactggaacacgactttcccagctggatggccaagatcttaaggcagctgtctaaccccggtctggtgatcgccgtgatattagtcatggtcctggcaatttattatctgaacgcaacagcgaagggacagaaggccgctaacctggatcttaagaagaagatgaaaatgcaggcacttgaaaacaaaatgcgcaacaaaaaaatggccgctgcaagagccgatggagccgctggccgtgcctag

SEQ ID NO: 244745 - DNA, 2721 bp, synthetic construct
  misc_feature 1..2721: note = Description of Artificial Sequence: Synthetic coding sequence
  source 1..2721: mol_type = other DNA
atgagccatcaggtgaaagggctaaaggaggaagcgagaggcggagtcaaagggagggttaagtcaggatcccctcacaccggcgacagactggggagacgatcctcaagcaaacgggcactcaaggctgaagggacccctggcaggaggggcgcacaaagaagtcaaaaggaaagagctggcggatctccatcacctggaagtccacggagaaaacagacggggaggcgacgacatcgggaggaactcggagaacaggagcgcggtgaggccgagcggacctgtgaggggagaagaaaaagggatgagagggccagttttcaggaacggaccgccgcaccgaaaagggagaaggagatccccaggagagaggagaaatccaagaggcaaaaaaagcctcggagttcatcactggcttcttctgcctcaggtggcgagagcttatctgaagaagagctggcccagatcttggagcaagtcgaggaaaagaaaaagctgattgccaccatgcgctctaagccatggcccatggcgaagaagttaaccgaactgagggaggcacaggagtttgttgaaaaatatgaaggcgcactgggtaaaggtaagggtaaacagttatatgcttacaagatgctgatggccaagaagtgggtcaaattcaagcgggattttgacaatttcaaaacccaatgcattccttgggagatgaagattaaggacattgaatcgcactttggcagctccgtggcgagctacttcattttcttgcgctggatgtatggagtgaacttggtactgttcggtttgatctttggcctggtgatcattcctgaggtcctgatgggtatgccatatggctccatccccagaaaaaccgtgcccagggcggaagaggagaaggcaatggactttagcgtcttatgggatttcgaaggctatattaagtactcggcgctgttttatgggtattataacaatcagagaacgattgggtggctgcggtatcgactgccaatggcatatttcatggtgggcgtgtcagtgttcgggtactcactgattatagtcatcagatccatggcgtcaaatacacaagggtctaccggggaaggagagagcgataacttcacgttctctttcaaaatgttcacctcgtgggactacctgatcgggaattcagagactgccgataataaatacgccagcattacaacaagctttaaagagtcgatcgtggatgaacaggagtcgaataaagaggagaatatacaccttacaaggtttttgcgtgtattagctaacttcctgatcatctgctgcctctgtggaagtggctatttaatctactttgtggtaaagcgctctcagcagttctcaaaaatgcagaacgtgagctggtatgaacggaatgaggttgagatcgtcatgtcactgctgggtatgttctgtccccctctgttcgagactatcgcagccctcgagaactatcatccaaggacaggattgaagtggcagttggggagaatcttcgccctttttcttggtaacctgtatacgttcctgctcgccctgatggatgatgttcatctgaagctggcaaatgaggagaccataaagaacattactcactggaccctgttcaattactacaattcgtccgggtggaatgagtccgtgcctcggcctccactccatcccgctgacgttcctcgtggatcctgctgggaaacagctgttgggattgagttcatgcgtctcaccgtatctgatatgttggttacctatattaccatcttactgggggatttcctgcgcgcatgtttcgtgagatttatgaactactgttggtgttgggaccttgaagcagggttccctagctacgcagagtttgacatttcaggaaatgtgttaggcctaatcttcaaccagggcatgatttggatggggtccttttatgcccctgggttggtcgggataaatgtgcttcgactgctgacatctatgtattttcagtgctgggccgtgatgtccagtaatgtacctcacgagcgagtcttcaaagccagtcgttctaataatttctacatgggcttgctgctgctggtgttgtttctcagcctgctgcctgtagcgtacacaatcatgagcctgccgccttcttttgattgcgggccattctcaggcaagaacagaatgtatgacgttctccaggagacgatagaaaacgacttccctacgttccttggaaagatttttgccttcctcgcgaatccagggcttatcatcccagccattctcctgatgttcctggccatttattatctgaactcggtgtccaaatctctgagccgggcaaatgcacagctacggaaaaaaattcaggtgttgcgggaggtcgagaagtcacataagtctgtcaagggtaaggcaactgccagggattcagaggatacccctaaatcctcttctaaaaatgcgactcagctgcagcttacaaaggaggagactacgccacccagtgcctcgcagagccaggcaatggataagaaggctcagggtccgggaacaagtaattctgcctccagaactaccctgccagccagcggccatttacctataagtagacccccagggatcggcccagattccggacacgcaccatcccagacacatccgtggcgaagcgcaagtggcaaaagtgcccagcgcccacctcactag

SEQ ID NO: 244746 - DNA, 1365 bp, synthetic construct
  misc_feature 1..1365: note = Description of Artificial Sequence: Synthetic coding sequence
  source 1..1365: mol_type = other DNA
atggctcagcctctggcgtttatcctggatgtccccgagaccccgggtgatcagggacaaggacccagcccctacgacgaaagtgaagtgcacgactctttccagcagctgattcaggaacagagccagtgcactgctcaggaggggctcgagctgcaacagagagaaagggaggtgaccgggagtagccagcagacgctttggagaccagagggcacccagtccaccgctactttgagaattctcgcctccatgccttctaggacgatcggcaggtccagaggggctataataagccaatattacaatcggaccgtccaactcaggtgcagatcttcacgacctcttcttggcaatttcgtccgatctgcatggccctcacttaggttatacgatctggaacttgatcctactgccctggaggaagaggaaaagcagagtttgctcgtcaaagaactacagagcctagctgtagcccagagagatcatatgctgagaggaatgcctctatccctcgccgaaaaaagatccttgcgcgaaaaatctcggacaccgagagggaagtggcgtggacaacccggttccggtggggtgtgttcatgctgcggaaggctcagatatgcgtgtgtcttagcccttcactccctggggctcgctctgctgtccgcgttgcaggccctcatgccctggcgctacgccctaaagcgcataggcggacagtttggcagctcggttctgtcatatttcctctttctgaagaccctgctggccttcaacgcattactgctgctgctgctagtagcatttattatgggccctcaggtggcattccctccagctctgccgggtcccgctcccgtctgcacagggctggagctcctaacaggtgcagggtgcttcacccacaccgtgatgtattatggacattactccaatgctaccctcaatcaaccttgcggtagccccctggacggctcccaatgcacaccccgtgtaggaggcctgccttacaacatgcctctggcatatcttagcactgtaggggtttccttctttatcacctgcatcacattagtttacagcatggcacattctttcggcgagtcctatagggtggggtctacctctggtatccacgctatcacagtgttctgctcatgggactacaaggttacacagaagcgcgctagtcgtttacaacaagataatatcaggacgcggttgaaaggcgaggataaaatttttctcatcaataagctgcactcgatctacgaacgaaaggagagggaagaaaggtccagagtcgggaccacagaggaagcagcagccccacccgcactcctgaccgacgagcaagacgcttag

SEQ ID NO: 244747 - DNA, 2418 bp, synthetic construct
  misc_feature 1..2418: note = Description of Artificial Sequence: Synthetic coding sequence
  source 1..2418: mol_type = other DNA
atggcccaacctctggcctttatactggatgtaccagaaacccccggagaccaagggcaaggacccagtccatacgacgaatcggaggtccatgacagctttcaacagttgattcaggagcagtctcaatgcacagcacaggagggactggagcttcagcaacgtgagcgggaagtgactggttcttcacagcagaccctttggagaccagagggaacccagtccacggcaacccttcgtatcttggcctccatgccgtcacgcaccattggaaggtccaggggagcaatcataagccagtattacaataggaccgttcaactgagatgccgctccagtcggcctttgttggggaattttgtcagaagcgcttggccttccctgcgactgtatgatctggagctcgacccgaccgcactcgaagaggaggaaaaacaaagtctcttggtgaaggaactgcagtcacttgctgtcgcccagcgcgatcatatgctgagaggtatgcccctttcactggctgaaaaacgaagcctgcgcgaaaagtcacgaactcctcggggaaaatggcgtggacagcccggttccggcggagtgtgttcttgctgtgggcgattaaggtacgcttgcgtgctggccttacactctctgggcttggcgctgctttcagcgctacaggccctgatgccgtggcgctacgctctcaaaaggatagggggacagtttggatcgtctgtcctgagttatttcttgtttctgaagaccttgctagcatttaatgccttattattgttgcttctggtggcctttatcatgggaccccaggtcgccttcccccctgcattgcctgggcctgcgcctgtctgtaccgggctggagctcctgaccggagccggatgcttcactcataccgtgatgtactatggacactattccaatgccacgcttaatcagccatgcggcagtcccttggatgggtctcagtgcactcctagagtcggcggacttccatacaatatgcctctggcgtacctttccactgttggagtctcttttttcatcacttgtatcactcttgtgtatagcatggctcattcattcggtgagtcgtatagggtcggtagcacaagcggtatccacgcaattacggtgttctgctcctgggactacaaggtgacccagaaacgggcaagtcgcctgcagcaggacaacatccgaacgcgcctgaaggaactcctcgccgaatggcagttgagacactcccccagaagtgtctgcggtcggctgagacaggccgctgttctgggccttgtttggttactatgcttaggaactgcattgggctgtgcggtcgcagtccacgtcttctccgaattcatgatccaaagccctgaagctgccggtcaagaggctgttttgctcgtgctgccacttgtggttggcttgctgaatctaggcgctccttatctttgtcgggtgctggccgcactcgagccccacgactcccctgtcttagaggtttatgttgcaatttgccgaaatctgatcctgaagcttgctatcttaggtactctttgctatcactggttgggacggagggttggcgtattgcagggtcagtgttgggaagatttcgtcggccaggagctgtacagattcttggtaatggatttcgttctaatgttattagacacactcttcggcgaactggtgtggcgcatcatctctgaaaagaagctgaagcgaaggcggaagcctgagtttgatatcgctagaaatgtcttggagttaatctacggacaaacattgacctggctgggggttttgttttcccctctcttacctgcagtgcaaatcattaagctcctgctagtcttctatgtcaaaaagacaagcctgcttgctaactgccaggcccctcgcagaccgtggctggcgagccacatgagtactgtctttctcacattactatgcttccccgcattcctgggcgctgcagtcttcttatgctatgctgtctggcaagtaaagccatcatctacctgcggaccttttcggacgctcgataccatgtacgaggcaggacgcgtttgggttagacacctggaggcagctgggcctcgagtgtcctggctcccctgggtccacaggtatctgatggagaatacttttttcgtgttccttgtgagcgcccttctcctggctgttatctaccttaatatccaagtggtgagaggacaaaggaaggtcatctgtctgctgaaggaacaaatttcaaacgagggcgaagataagatcttcttgatcaacaaactgcacagcatatacgagaggaaagagagggaggagaggtccagagtgggaaccactgaggaagccgctgcaccacccgcactcttaactgacgaacaggacgcttag

SEQ ID NO: 244748 - DNA, 1155 bp, synthetic construct
  misc_feature 1..1155: note = Description of Artificial Sequence: Synthetic coding sequence
  source 1..1155: mol_type = other DNA
atggctcatagttttggggagtcctatcgagtcggtagtactagtgggattcatgcgataactgtgttctgcagttgggattacaaggtgacacagaaaagggccagccgccttcagcaagataacattcggacccggcttaaggagctcttagccgagtggcaactgcgtcactctcctcgctcagtgtgtggcaggctccgacaggccgctgtgcttggactcgtttggctcctgtgtctgggtaccgcattgggttgcgccgtcgccgtacacgtgttcagcgagtttatgattcagtctcccgaggccgctggacaggaggcagtgcttctggtgctccctctggtagttggactcctgaacctgggggctccttacctctgccgggtattggctgccctagaaccccacgactctcctgtcttagaagtttatgtcgctatctgtagaatcatttctgagaagaagttaaaaagacgccgtaagccagaatttgatatcgccaggaacgtgctggagctgatctacggacagaccctgacctggctcggggttttgttctctccacttttacccgctgtgcagattattaaactgctcctcgtgttctatgtaaagaaaaccagcctcttagccaactgccaggctcctaggcgcccttggcttgcaagccatatgtccacagtgttcttaacactgctatgtttcccagcattcttaggtgccgcagtctttctctgttacgccgtttggcaggtgaaacccagcagtacatgcggcccattcaggaccttggataccatgtacgaggctggcagagtgtgggtgcgacatctcgaggcagcgggacctcgcgtttcctggctcccatgggtacaccgctatcttatggagaataccttctttgtttttctggtgtctgccctgctcttagccgtcatttatctcaatattcaggttgtccgcggtcagcgaaaggtaatctgccttctcaaagaacagatttccaacgaaggagaagacaagattttcttaatcaacaagctccacagcatctacgagcggaaagagcgcgaagagcggtcacgggtgggcaccaccgaggaagctgctgcccctcctgccctcttaaccgacgaacaagatgcgtag

SEQ ID NO: 244749 - DNA, 417 bp, synthetic construct
  misc_feature 1..417: note = Description of Artificial Sequence: Synthetic coding sequence
  source 1..417: mol_type = other DNA
cagtgctgggaagatttcgttgggcaggaactgtacaggttcttggtgatggactttgtgctgatgctgctcgatacactatttggagaactggaaaaccgttttcagagcgacgtgttttcgtcaagaatctgggcatggtggaggaagcccgagttcgatatcgcaagaaatgtgctcgaactgatttacgggcaaacactgacttggcttggtgtgcttttttccccactgctgcctgccgtccagattataaagttactcttggtattttacgttaagaagacgagtctgctcgccaactgtcaggcgcctcggcgtccctggctggcaagccatatgtctaccgtgttcctgacgctgctgtgcttcccagcctttttgggtgctgctgtgttcctgtgctacgcagtgtag

SEQ ID NO: 244750 - DNA, 2418 bp, synthetic construct
  misc_feature 1..2418: note = Description of Artificial Sequence: Synthetic coding sequence
  source 1..2418: mol_type = other DNA
atggcccagccactcgccttcattctcgacgttcctgagacgcccggtgatcaggggcaggggccatccccttacgacgaatctgaagtccacgactcatttcaacagctgattcaggagcagtcacagtgcaccgcacaggaagggcttgaacttcagcagcgagagcgagaggtcactgggagctcccaacagacgctctggaggccagaaggcacccaaagcactgcgacactgcgtatcctcgcatcaatgccatcaagaactatagggagaagccggggagccattatcagccagtactataaccggacagtgcaactcagatgtcgttccagtcgaccactccttggaaactttgtgcgttctgcgtggccatctctccggctgtacgatctggagttagatcctaccgcactggaagaggaggaaaaacagagcttactcgtgaaggagttgcagtccctggcagtcgcacaacgggaccatatgttgcggggaatgccactgtcacttgccgaaaagaggtccttgcgagagaagtcacggacgccaagaggcaaatggagagggcagccaggttccgggggagtctgctcatgctgcggcaggctcagatatgcttgcgtattggccctgcattccttggggttagcactgctcagtgctctccaggctctaatgccctggagatatgcccttaagaggatcggcggtcagtttggatcgtctgtgctctcctatttcttgtttttgaaaacactgttggcatttaacgcactgctgcttctcctcttggtggcctttattatgggtccccaggttgcttttcccccagctttgccaggccctgcccctgtctgtaccggactggagctgctaacaggtgcagggtgtttcacacataccgtgatgtactacgggcactactcaaacgctacccttaaccagccctgcgggtctcctctcgacggttcgcagtgcacccccagagtggggggattgccctacaacatgcctctagcttatctctcaacagtgggagtctctttctttatcacctgtattactttggtctactccatggcacactcatttggagagtcgtaccgagtgggcagcaccagtggtatccacgccattaccgtgttctgcagctgggactacaaggtgacccagaagcgcgcatcccgactgcagcaggacaatatccgcacccgcctaaaggagctcctggccgaatggcagctgcggcactcaccccgatctgtctgtggcaggcttcggcaagctgcagtgctgggtctggtttggctactgtgcctgggtacagctctggggtgtgccgtagccgtgcatgtgtttagcgagtttatgatccagagtccggaagcagctggtcaggaggcagtgctgctcgttctgcctctggtggtgggcttgctgaacctgggtgcgccatacctgtgtcgtgtgctcgctgccctcgaacctcacgactcaccagtcctggaggtgtacgtcgcaatttgccgaaatctgatactgaaactggcaatcctcggaactctttgttatcattggctcggtcgaagggttggagtgcttcagggacagtgctgggaggatttcgttgggcaggagctctatcgtttcctggtcatggactttgtgctgatgttgttggacaccctattcggggagcttgtgtggcggataatctccgaaaaaaagttaaagagaaggcgcaagccagagtttgacatcgcgcgtaatgtgttggaactgatctacggccagacattgacgtggctgggagtattgttctcaccattgctcccggctgtgcagattatcaaactgctgctggtgttctatgttaagaagacaagtctcttagctaactgccaagcaccgcgacgaccttggttggcctcccatatgtctactgtgttcctgacacttttatgctttcccgcattccttggcgcagctgtgtttctgtgttacgccgtttggcaagtgaagccaagcagcacttgcggacctttcaggactctcgatacgatgtatgaagccggaagggtgtgggtgagacatctcgaggctgccggaccacgcgttagctggcttccatgggtgcaccgatacttaatggaaaacaccttcttcgtgttcttggtgagcgcactgcttttggcagtgatttatctgaacatacaggttgttcggggtcagagaaaggttatttgccttctcaaggagcagatatccaacgaaggtgaagacaagatcttcctaatcaataagttacattctatttatgaaagaaaagaacgcgaggagcgctccagggtgggcaccacagaggaggcagccgctcctcctgccctcctgacagatgagcaggacgcctag

SEQ ID NO: 244751 - DNA, 1098 bp, synthetic construct
  misc_feature 1..1098: note = Description of Artificial Sequence: Synthetic coding sequence
  source 1..1098: mol_type = other DNA
atgaatatcatggactttaatgttaaaaagctggctgccgatgctggcactttcctgagtagagccgtgcagttcacagaggagaagctcggccaagctgaaaaaactgaactcgatgcacacttggagaatctgctgtcaaaggctgaatgtaccaaaatatggaccgagaagatcatgaaacagaccgaggtccttctgcagcccaatcccaacgctaggatcgaagaattcgtgtatgaaaagctggaccgcaaggccccttcccgtataaacaatcccgagctgctcggtcagtatatgatcgatgcaggaaccgaattcgggcctgggaccgcttatggcaacgccctgattaagtgtggcgaaacacagaagcggattggcaccgccgatagggaactgatccagacctccgcattgaatttcctgaccccccttcgaaactttatcgagggggattataaaactatcgccaaagagaggaagcttctgcagaataaaagactagaccttgacgcggcaaagacccgcttgaaaaaagcgaaagctgccgagactcgaaactccagcgagcaggaactgagaattactcagtcggaattcgatcggcaagcagaaatcactcgactcctgctagagggcatatcctcaactcacgcccatcacttgcgctgtttgaacgacttcgtggaggctcagatgacctattacgctcagtgctatcagtacatgttagaccttcaaaagcaattaggctcgttcccctcgaactatctgtcaaataacaaccagacctcagttactccggtcccctctgtcctgccaaatgctatcggctctagtgctatggcctctacaagcggcttggttatcactagtccctcaaatctgagcgacctgaaagagtgtagcgggagccgcaaggctcgggtgttatacgactacgacgccgcaaactctaccgagctgagcctgctggcagacgaagtgattactgtgtttagtgtcgtgggcatggactcagattggctgatgggagaacggggaaatcagaaagggaaggtgcccatcacgtacctcgagctgctgaattag

SEQ ID NO: 244752 - DNA, 636 bp, synthetic construct
  misc_feature 1..636: note = Description of Artificial Sequence: Synthetic coding sequence
  source 1..636: mol_type = other DNA
atggcgggagtgggagctggacccctgcgtgcaatgggcaggcaagccctgttactgctggccctgtgcgccaccggggcacaagggctatattttcacattggagaaacggaaaaacggtgctttatcgaagaaattccagacgaaactatggtcatcggaaactatagaacccagggcatgcacgtagaagtcaaggaccctgatggcaaggtcgtgctgagccggcagtatggaagtgagggacgattcacattcaccagtcacacacctggagaccaccagatctgtctgcactccaactcaacacgcatggctctattcgctggcggaaagttgagagttcacctagacatacaagttggcgagcatgctaataactatccagagatcgcagcaaaggacaagttaacagagcttcagttgcgtgcgcgacaattgctggaccaagttgaacagatccagaaggaacaagactaccagcggtatcgcgaggaacgatttcgcctaacatctgaatcaactaaccagagagtgctctggtggtcaattgcccagaccgtaatactgattctaaccggaatttggcaaatgcgccacctgaaatcattctttgaggccaaaaaactggtgtag

SEQ ID NO: 244753 - DNA, 684 bp, synthetic construct
  misc_feature 1..684: note = Description of Artificial Sequence: Synthetic coding sequence
  source 1..684: mol_type = other DNA
atggcgggagtgggagctggcccattacgggctatgggtcgccaagctctactgctgctagccctgtgcgcaaccggggcacaaggactgtacttccacatcggagagaccgaaaagagatgttttattgaggaaattccagatgaaacgatggtgataggaaattatcgtacccagatgtgggataagcagaaagaggtgttcctcccatctacacccggtttgggaatgcacgttgaagtcaaggatccggacggcaaagtggttttgagtcggcagtacgggtcagagggtcgatttacattcacaagtcacacaccaggggatcatcagatctgcctgcattcaaattcaactcgcatggccctctttgccggtggaaagcttagagtgcatctcgatatccaggttggcgagcacgctaataactatccagagatagcagctaaagacaaactgacggagctccagcttagagctcgacaactgctggaccaggtcgaacagatacagaaggagcaggattaccagcgctaccgggaggagcgttttcggctcacgtcagagtccacaaatcagcgagtgctttggtggtccatcgcccagaccgtcatcctgatcctgactgggatttggcagatgagacatcttaagtcgttctttgaagccaagaaattggtttag

SEQ ID NO: 244754 - DNA, 660 bp, synthetic construct
  misc_feature 1..660: note = Description of Artificial Sequence: Synthetic coding sequence
  source 1..660: mol_type = other DNA
atgtctggattaagtggtcctcctgctcgaaggggcccattccccctcgcactgctgttactgtttctgctcggccctcgactcgtgcttgccatttcatttcacctgccgataaacagcagaaaatgcctgcgggaagaaatccataaggatctgctggttacaggcgcttatgagatatccgaccaatcaggtggggcaggcggattgcgctcccatctgaagataacagactcagcgggacacatactatacagtaaggaggatgctacaaaaggcaagttcgctttcactaccgaagactatgacatgttcgaagtatgttttgagtctaagggcacaggcagaattccggaccagctggtgatattggatatgaagcacggtgtcgaggccaaaaactacgaagagattgcaaaagttgagaaattgaagccactggaagttgaactcagaagactcgaggatctatcagaaagcatcgtaaatgatttcgcttatatgaaaaaaagggaggaagaaatgcgggacacgaatgagtctacaaatacaagagtcctatatttcagcatcttctctatgttttgcttaattggcctcgcgacttggcaggtattttatctgcggagattcttcaaagctaaaaaactcatcgaatag

SEQ ID NO: 244755 - DNA, 471 bp, synthetic construct
  misc_feature 1..471: note = Description of Artificial Sequence: Synthetic coding sequence
  source 1..471: mol_type = other DNA
atggcgggttggccgggagccggaccactgtgcgtgctgggtggggctgctttaggcgtgtgccttgcaggggtcgctggccagttggttgagccttcaacagcgcctccgaagccaaaacccccacctttgaccaaggaaactgtggtgttttgggacatgagattgtggcatgtggtgggcatattctcactttttgtgctttccatcataatcacgctatgttgtgtattcaactgtagggtacctaggacacggaaggagatcgaagccagatatctccaaagaaaagctgccaaaatgtacactgacaagctcgagaccgttcccccactcaatgaactaacagaagtgccgggagaagataaaaagaaaaaaaaaaagaaaaagaaggactccgtcgataccgtcgctatcaaagtcgaggaggacgaaaaaaacgaagctaagaagaaaaagggggagaaatag

SEQ ID NO: 244756 - DNA, 1602 bp, synthetic construct
  misc_feature 1..1602: note = Description of Artificial Sequence: Synthetic coding sequence
  source 1..1602: mol_type = other DNA
atgaacgagtcccccgatcccactgacttggccggagtcatcatcgagcttggccctaatgattccccgcagacgtctgaatttaaaggggcaactgaagaggcccctgcgaaagaatctgtgcttgctcggttgtccaaattcgaagtcgaggacgccgagaatgtggccagctatgatagcaagatcaaaaaaatcgtacattctatcgttagctcttttgcttttggactgttcggagtctttctggtgctgctggatgtcactctcattctggcagacctcatattcaccgattcaaaactgtatatccccctagagtaccggagcatcagtcttgctattgcgctgttttttctcatggatgttctcttgagggtgttcgttgagcgcagacaacaatatttctccgatctgtttaatattctcgatactgccatcatcgtcattttactcctggtggacgtggtgtacattttcttcgacatcaaattattgcgcaatatcccacgatggacccatctcttgaggctgctgagattgatcatcctgttacgcatatttcatctcttccaccagaaaaggcaacttgaaaagctgataaggcgccgtgtctctgaaaataagaggcgatatacacgagacggctttgatttagacttaacatacgtgactgaacgtataattgccatgtcattcccctcctccggcaggcaaagtttctaccggaacccaatcaaagaggtggtcaggttcctggataaaaaacatcgcaaccactacagagtttacaacctctgtagcgagagggcctatgacccgaagcacttccataatagagttgtgcgaatcatgatagacgaccacaatgtaccgaccctacaccagatggtggtgttcactaaggaagtcaacgagtggatggcacaggatctcgaaaatatagtagcgattcactgtaaagggggaacggataggacagggactatggtttgtgcatttcttattgcatccgagatctgtagcaccgccaaggaatccctctattatttcggagagagaagaacggataagacccactccgagaaattccagggtgttaaaacccctagtcagaagcggtacgtggcatattttgcgcaggttaagcacctttacaattggaatctgcctccaaggcggatccttttcataaaacatttcatcatatattcaatccctcgatatgttcgcgatctgaaaatccagatcgagatggagaagaaggtcgtgttcagcacaatttccctcggcaagtgctctgtgctggataacatcaccaccgacaagattcttatcgacgtgtttgacggtctgccactgtatgacgacgtaaaggtgcagtttttttatagtaacctaccaacatattatgataactgctccttctatttctggctccatacttctttcatagaaaataatcgcttgtaccttccaaagaacgagctcgacaatttgcacaagcagaaggctcgcagaatctacccttccgatttcgctgttgagattctttttggcgagaagatgactagcagcgacgtggtggcaggcagcgactag

SEQ ID NO: 244757 - DNA, 1542 bp, synthetic construct
  misc_feature 1..1542: note = Description of Artificial Sequence: Synthetic coding sequence
  source 1..1542: mol_type = other DNA
atgaacgagagcccagacccgactgacctggccggtgtcataattgagctcggtcccaacgatagccctcagactagtgaatttaagggggctaccgaggaagcccctgctaaggagtcctccaagattaaaaaaatcgttcacagtatcgtgtcctcatttgcttttgggctctttggagtgtttctcgttctattggatgtaacgttaatcctagcagacctcatcttcactgattccaaactttatatacctctcgagtatcggagcatcagccttgcgatcgcactgtttttcctcatggacgtcttactccgagtgttcgttgaaagacggcagcagtactttagcgatctcttcaatatcttggatacagctataattgttattcttctcttagtggacgtggtgtatatcttctttgatatcaagctgcttagaaacatcccacgctggacacatctgctgagacttctacgactcatcattttgctccgcatttttcacctgttccaccaaaagaggcagctggaaaagttaatccgcaggcgcgtctcagaaaataaacgccgttacacacgcgacggcttcgacctggacctgacgtatgtcaccgagaggataatcgccatgtccttcccatcttccggaagacagtcattctatcgtaatccgatcaaggaggtcgttcggttcttggataaaaaacaccgtaatcactatagggtctataacctgtgttccgaacgagcctacgaccctaagcacttccataacagagttgttagaataatgatagacgaccacaatgtgcccacattgcaccagatggtagtgttcacgaaagaggtcaacgagtggatggcccaagacctcgaaaatatagtggccatccattgcaagggaggaacagaccgcactggaaccatggtatgtgccttcctgatcgcctccgaaatttgctctacagcaaaggagtcactgtactattttggcgagcgacggaccgataagactcatagtgaaaagtttcaaggagttaagacccccagccaaaagcggtacgtcgcatacttcgcacaggtgaaacacctgtataattggaatttgccccctaggaggattctgtttatcaaacattttatcatttacagtattcctagatatgtccgggacctgaagatccagattgagatggaaaaaaaggtggtgttttctacaataagcctaggcaagtgcagtgtgctggacaacatcacgactgacaagatcctaattgatgtttttgacggcctgccgttgtatgatgacgtgaaagtccagttcttctactccaatctgccaacatattatgacaattgttctttttacttctggttgcatacctcttttatagaaaacaaccgactctacctcccaaagaatgaactggacaacctccacaaacagaaagcgaggaggatttacccctccgatttcgcggtggagattctttttggagaaaagatgacttctagcgacgtggttgctgggtcagactag

SEQ ID NO: 244758 - DNA, 1656 bp, synthetic construct
  misc_feature 1..1656: note = Description of Artificial Sequence: Synthetic coding sequence
  source 1..1656: mol_type = other DNA
atgaacgagagtccagaccccactgatctcgctggagtcatcattgaactgggacctaatgatagtccgcagacatctgagtttaaaggcgctacggaggaggcccctgcaaaagaatcccctcatactagcgaatttaaaggtgccgctagggtgtcacccatttcagagagcgtgcttgcacgcctgtctaagtttgaggtagaagacgctgagaatgtggcgtcttatgactccaaaatcaagaagatcgtgcactctatcgtgtcatccttcgcctttggccttttcggggtcttcctcgtgctccttgatgtcactcttatactggcggatctgattttcacagacagcaagctgtatattccacttgagtacaggagcatctctttagcaattgctctgttctttctaatggatgtacttttaagggttttcgtagagcgtagacagcagtatttctcagacttattcaatattctggacacagccattattgtgatcctcctccttgtagacgtagtctacatcttttttgatatcaaactactgcgaaatattccacggtggacacacctgctgcgtctcctacgcctgataatactccttcggattttccacctgttccatcagaaacgccaattagaaaaactcattcgcagaagggtgagtgagaacaagcgcagatatacaagggacggattcgacctggatctgacctatgtgactgaaaggattattgccatgagtttcccaagcagtggacgccagagcttttacaggaacccgataaaagaagtcgtgcgctttctggataagaagcaccgcaatcactaccgggtgtacaacttatgttctgaaagagcgtatgaccctaagcacttccacaaccgagttgtacgaattatgattgatgatcacaacgttcccacattacaccagatggtggtctttacaaaggaggtaaacgagtggatggctcaggacctggagaatatcgtggccatccattgtaaggggggtaccgatagaactggcactatggtgtgcgcttttctgatcgccagcgaaatctgcagcaccgctaaggagtcactatactacttcggtgagaggcgcactgataagactcatagcgagaagtttcagggtgttaaaacgccgtcccagaagcggtatgtggcgtacttcgcccaggtcaagcatctttacaattggaatctcccacctagaagaatactgtttattaagcatttcatcatatactcgattccacggtatgtacgggacttgaaaatccaaatagagatggaaaaaaaggtcgtgttctccaccatttctctggggaaatgctcagtgctcgataatattacaaccgataaaatcctgattgacgtgtttgacggccttccactgtacgacgacgtaaaagtccagtttttttattccaacctgcccacttactatgataactgttctttctatttttggctccatacgtcattcattgaaaacaacagactgtacctgcccaagaacgaactggataatctgcataagcagaaagccagacggatttacccttctgactttgccgttgaaattctctttggagagaaaatgaccagttcggatgtcgtggcaggctcagattag

SEQ ID NO: 244759 - DNA, 1692 bp, synthetic construct
  misc_feature 1..1692: note = Description of Artificial Sequence: Synthetic coding sequence
  source 1..1692: mol_type = other DNA
atggagcgagactcacacggaaatgcctcaccggcacgcaccccatcggcaggcgctagcccggctcaggcaagtccggcagggactcccccaggcagggcatctcctgcccaagcctctcctgctcaggcctctcctgctggaactccgcctggacgcgctagccctgctcaagccagcccagccggtacgcctcccggacgggctagcccgggacgggcttcgcccgctcaagcctccccggctcaggccagcccagcccgtgcatccccagcgctcgctagccttagccggtcttccagcgggagatcctcttccgcgagatctgcaagcgtgaccaccagtccgacacgcgtgtacttagtgagagctacaccagtgggcgcagtccctatccgcagctcccccgctcggtcagccccagcgacccgggcaactcgagaatcacccggaacctctttgcccaagttcacctggagggaggggcagaagcagctcccgctgatcggatgcgtgcttttgctgattgccctagtcgtgagtctcatcattctctttcaattctggcagggccacactggtataaggtataaagagcaacgcgaaagttgtcctaagcacgcggtaaggtgcgatggggtggtggactgtaagcttaaatcagacgagctggggtgtgtgcggttcgactgggataaatcccttctcaagatttatagtggaagcagccaccagtggttgcccatttgttcctcaaattggaatgacagctatagcgagaagacctgtcaacaactcggcttcgagagcgcgcaccggacaactgaagttgcacaccgtgacttcgccaacagttttagcattctgagatacaattctacaatccaggaatctctgcaccgctcagagtgtcctagtcagcgctacatatcactgcaatgtagtcactgtggcctgcgggcaatgacgggaagaatagtgggtggggcattagcttccgacagcaagtggccttggcaagtatccctgcatttcggtaccacccacatttgtggcggaacactgatcgacgctcaatgggtgctcaccgcggcacactgtttcttcgtcacaagggaaaaggtgctggaaggctggaaagtgtatgcaggaacgagtaatctccatcaactcccggaggctgcttccatcgctgagatcatcatcaactccaactacacggatgaggaggacgactacgacattgcccttatgaggctgagcaaacccctgaccctaagcgctcacattcatccagcctgtctgccaatgcatggacagactttcagcctgaatgagacatgctggatcacgggtttcggtaaaacgcgggagactgatgacaagacttcgccattcttgagagaggtccaggtgaacctaatcgactttaagaaatgtaatgattacctggtgtacgactcttacctcacaccaagaatgatgtgtgcaggcgacctcaggggaggcagggattcttgccagggggattctgggggtccgcttgtgtgtgagcagaacaacagatggtatctagccggagtaacatcttgggggacgggatgtgggcagagaaataaacctggggtgtatacaaaagtgacagaggtgctgccctggatatactccaagatggagagctctgctgggtag

SEQ ID NO: 244760 - DNA, 1194 bp, synthetic construct
  misc_feature 1..1194: note = Description of Artificial Sequence: Synthetic coding sequence
  source 1..1194: mol_type = other DNA
atggatcccgacagtgatcagcctttgaacagtctggtgaaggtgattctggacaagtactactttctgtgtgggcagcctctgcactttatcccacgcaaacagctctgtgatggagagctcgattgccccctcggagaagatgaggaacactgtgtcaagagctttcccgaaggccctgcagtggccgttaggttgagtaaggatcgctctacgctgcaggtcctcgattcagcaacaggcaactggtttagtgcatgctttgacaactttacagaagcacttgccgagaccgcttgtagacaaatgggctattcctcaaagcctactttccgcgctgtggagataggaccagaccaggatttggatgtggtagagataacggagaactctcaagagctaagaatgcggaactcctctggcccttgtctctccgggagtttggtatcacttcactgcttggcttgtggtaaaagccttaagaccccccgagtcgtgggagtggaggaggcaagtgttgattcttggccttggcaggtctcgatccagtacgataagcaacatgtttgcgggggatccattctggaccctcactgggtgctcaccgccgcacactgctttagaaagcacacagacgtttttaactggaaggtgcgggcaggatcagataagttaggatcgttcccatctctggctgttgcaaaaatcataataatagagttcaaccctatgtatcctaaagataatgacatagctctaatgaagctacaattcccacttacatttagtgggacagtcagaccaatttgcctgcctttctttgatgaagagttaacaccagctactcctctgtggatcatcggctggggctttactaaacaaaatggaggcaagatgtccgatattctgctgcaggcgtcagtgcaggtgattgactccactcggtgtaacgctgacgacgcctaccagggagaggtcaccgagaaaatgatgtgtgctgggatcccagagggcggtgttgatacgtgccagggagactccggtggccctttgatgtatcagtcagatcagtggcacgtagtggggatcgtgagttggggatacggctgtggcggtccatccactccgggtgtatacacgaaagtttcagcctatttaaattggatttataacgtatggaaggctgagttatag

SEQ ID NO: 244761 - DNA, 1266 bp, synthetic construct
  misc_feature 1..1266: note = Description of Artificial Sequence: Synthetic coding sequence
  source 1..1266: mol_type = other DNA
atgatgtaccgaaccgtgggatttgggacaaggtcacggaatttgaagccatggatgatagccgtgttaatcgtgttaagcctgacagtggtggcggtgacgatcggcctgttggtgcactttctggttttcgatcagaagaaagagtattaccacggctcctttaagatactggatcctcagattaataataatttcgggcagtctaatacataccagctgaaggacctccgcgaaacaaccgagaatttggtctctcaggtcgacgagatctttattgattctgcctggaaaaagaattatatcaaaaatcaagtcgtgcggctcacccccgaagaggatggagtgaaagtggatgtcatcatggtcttccagtttcctagcactgagcagcgggcagtgcgtgagaagaagatacagagcattctgaatcagaaaatccgcaatttgcgggctcttccaataaatgcctcatcagtccaggttaacgctatgagttcatctactggggaactcacggtgcaggcgtcatgcggaaaacgagtggttcccctgaacgtaaacaggatcgcttcaggggtcattgcccctaaagccgcttggccttggcaagccagcctacagtacgataatatccaccagtgtggcgctacacttatctcaaatacctggctcgtaaccgctgctcactgttttcagaaatataaaaatcctcaccaatggaccgtgagtttcggcacaaagattaatccacctttgatgaaaagaaacgtgaggcgattcatcattcacgaaaaatatcgaagcgccgcacgcgagtatgatattgccgtagtccaagtttctagtcgcgtgaccttctcagacgatatcagacagatatgcctaccagaggcatcggccagttttcagcccaatctgacagttcacattacaggctttggggctctctattatggaggagagagtcagaatgatctgagagaagctagggtcaagatcattagcgatgacgtgtgcaagcagccgcaggtctacggtaacgacatcaagcctggcatgttttgcgccggatacatggaggggatatatgatgcttgcaggggggacagtggagggcctctcgtgacacgcgatctcaaggatacttggtacctgatcggaattgtgagctggggtgacaactgcgggcagaaggataaacctggagtctatacccaggtgacgtattatcgtaattggatcgcttctaagaccggcatctag

SEQ ID NO: 244762 - DNA, 1257 bp, synthetic construct
  misc_feature 1..1257: note = Description of Artificial Sequence: Synthetic coding sequence
  source 1..1257: mol_type = other DNA
atgatgtacagaacagttggctttgggacaagatccagaaacttgaaaccctggatgatcgccgtgctgattgtgctcagtctgacagtagttgccgtgaccatcgggctgcttgtccactttctggtgttcgaccaaaaaaaggaatattaccacggctcctttaagatcctggaccctcaaatcaataataatttcggacagtctaatacttatcagctgaaggatttaagggaaaccacagaaaatctcgtggacgagatcttcatcgactccgcatggaagaagaattacataaagaaccaggtggtgaggctgacacctgaggaggatggggtaaaggtggacgtgatcatggtattccagtttcctagcacagagcagagggcagtgagggagaagaagattcaaagtatattgaaccagaagatccgcaatctcagagcgctaccaattaatgctagttccgtgcaggtgaacgcaatgtcctcttccactggcgagcttacagtgcaagcaagctgtggaaagcgggtcgtccccctaaatgtcaaccgaatagcatcaggtgtgatcgctccaaaggccgcatggccctggcaagcatctctccagtatgataacattcaccagtgtggggcaacactaatcagcaatacctggctggtgacagccgctcactgtttccagaagtataagaaccctcaccagtggaccgtgtcatttggaacaaaaataaatccaccactgatgaagcgtaacgtccggagattcatcatacatgaaaagtaccggtcagctgcccgtgagtacgacatcgctgtcgtgcaggtgtcgagtcgagtcaccttcagtgacgacatcaggcagatttgcttaccggaggcaagtgccagctttcaacctaatctcacggtgcacattacaggattcggcgcactttactatggaggggaatctcaaaacgaccttcgcgaggcacgcgtgaagattatttccgatgatgtctgcaaacaaccgcaagtgtatggcaacgacatcaaaccgggtatgttctgtgccggatatatggagggcatttatgacgcatgccgtggggattcggggggtcccctcgtgacaagagatttaaaagacacctggtacctaattggcatcgtgagctggggagataactgcgggcagaaagacaaaccaggggtgtatacacaagttacctactatagaaattggatcgcttcaaaaaccggtatctag

SEQ ID NO: 244763 - DNA, 1254 bp, synthetic construct
  misc_feature 1..1254: note = Description of Artificial Sequence: Synthetic coding sequence
  source 1..1254: mol_type = other DNA
atgtaccggacagtagggttcggcactcgcagccgtaacctgaaaccttggatgatcgcggttctgatcgtgctgtccttgacagtcgtggctgtcacaatagggttattggttcattttctggtgttcgaccagaagaaggaatactatcatggctcattcaaaatcctcgaccctcagatcaacaacaactttggccaaagcaacacctatcagctaaaagacctccgagaaaccaccgagaaccttgtggatgaaatcttcatcgattctgcttggaaaaagaactacatcaaaaatcaagtggtccggctgacccccgaagaggatggtgtcaaggtggatgttattatggtttttcagttcccctctaccgagcagagggctgttagggagaaaaagatccaaagtatcctcaatcagaaaatccggaacctgcgcgcactgcctatcaacgctagctctgtccaggtgaatgcgatgagctcctccaccggggaactgaccgtccaggcaagctgcggcaaaagagtcgtgccgcttaatgtgaataggatcgccagcggcgtgattgctcccaaagccgcatggccctggcaggcaagcctgcagtacgacaacattcatcagtgcggagctaccctgataagtaacacctggcttgttaccgccgcacactgcttccagaagtacaaaaacccacatcagtggacagtaagctttggcacaaagattaaccccccattaatgaaacggaacgtgcgcagattcataattcacgagaaatacagaagtgctgcacgcgagtatgatatcgctgtggtacaggtgtcatcaagggtgaccttctctgacgatatccgacagatttgccttcctgaagcatccgcctcctttcagcctaatctcactgtccacatcaccggattcggcgcactatactacggcggtgaatctcagaacgacctgagggaagctcgtgttaagattatttcagacgacgtctgtaaacagcctcaggtgtacgggaacgacatcaagccagggatgttttgcgcagggtatatggaaggcatttatgatgcctgcaggggcgactctgggggtcctctggtgaccagggacttgaaagatacctggtaccttattggaattgtcagctggggcgacaactgtggacagaaagacaagccaggcgtgtacacccaagttacatattatcgcaattggatcgcaagcaagacaggcatctag

SEQ ID NO: 244764 - DNA, 1689 bp, synthetic construct
  misc_feature 1..1689: note = Description of Artificial Sequence: Synthetic coding sequence
  source 1..1689: mol_type = other DNA
atggaaagggacagtcatgggaatgcgagtccagcacgcacgccctccgcgggagctagccctgctcaggcatcgccagcagggacgccaccagggagggcaagtccagctcaggcatcccccgctcaggcttctccagccggtactcccccaggtagggcttctcctgcacaggcaagccctgccggaactccccctggcagggcttctcccggacgtgcatcccctctccaggcttccccagctcgggcttctcctgccttggccagcctttcccgcagctcatcagggcgatcatctagcgccagatccgcatctgtgaccaccagccccacgcgagtttatctagtgcgggcaacacccgtaggagctgtgcccatccggtcctctccagctcgaagcgccccagcgactagggcaacccgggagagtccaggaactagcctacccaaatttacgtggcgggaagggcagaagcagttacccttaatcggctgcgttttactgttaatcgcccttgtcgtgtctctcatcatcctgttccagttttggcaggggcacaccggcataaggtataaagaacagcgggagagctgtccaaaacacgccgtaagatgcgatggggttgtcgactgcaagttgaaaagcgatgagctgggttgcgtacggttcgactgggataagtctttactgaagatttattctggaagcagtcaccagtggctgcccatctgctcatcaaactggaatgactcttactccgaaaaaacgtgccagcagctgggcttcgagagcgcccaccgtacaaccgaggtcgcgcacagggacttcgccaattccttctctattttgcgttataactcgaccatccaggaatcgttacatagatctgagtgtccctctcagaggtatatcagtctccagtgcagccactgtgggcttcgcgcaatgacgggcaggatcgtgggcggagccttggcctcagactcaaagtggccttggcaggtttcactgcacttcggcaccacacacatttgtgggggaacattaatcgacgcccagtgggtgctgaccgcagcacactgcttcttcgtcacacgcgaaaaggtgctagaaggctggaaggtgtatgcaggcacctctaaccttcatcaattgccagaggcagcctccatcgccgaaattataattaattccaactatacggatgaggaagacgattatgatatagccctgatgcggctgagcaaaccactgacactgtctgctcacattcatcctgcctgcctccccatgcacggccaaacattctccttaaacgaaacttgttggatcacaggctttggaaaaacccgtgaaacagacgataaaacttctccctttcttagggaagttcaagttaacttgatagattttaagaagtgtaatgattaccttgtgtacgattcctacctcacccccagaatgatgtgtgctggagacctgcgtggtggcagggactcatgccagggtgacagcggcggaccgttggtctgcgaacagaataatcgctggtacctggcgggtgtaacaagctggggcactggctgtggacagcgcaacaaaccaggagtgtataccaaggttactgaagtgctcccatggatctacagcaaaatggagtctgaggtgaggtttcgcaaatcatag

SEQ ID NO: 244765 - DNA, 1761 bp, synthetic construct
  misc_feature 1..1761: note = Description of Artificial Sequence: Synthetic coding sequence
  source 1..1761: mol_type = other DNA
atggaaagagactcacacggtaatgcctcccccgcaagaaccccctcggcgggagcaagcccggcacaggcaagtcccgctggcacaccccctggcagagcaagcccagcccaagcatctcccgcacaggcctccccagctggcacacctcctggccgagccagtcctgcccaagccagcccagcaggcacaccccctggcagggccagtcctggtcgcgcttcccccgctcaggcaagccctgcccaagcttcccccgctagagcctccccagcactggcctctcttagtcgcagctcctccggcagaagcagttctgcaagatcagcctctgtgacaacaagcccaaccagggtgtaccttgtgcgcgctactccggtgggtgccgtacccattaggtcctcacccgcacgctccgcccctgctacaagagcaacaagggaatcccccggtacttctcttcccaagtttacctggcgtgaaggtcagaagcagctaccattgattggatgcgttctgctgctgatcgccctagtggttagcctgattatcctttttcagttttggcagggacacaccggcatcagatacaaggagcaacgggagagctgcccgaagcacgccgtgaggtgtgacggtgttgtagactgtaagcttaaaagtgatgagcttggttgcgttcgctttgactgggataaatcgctgcttaagatttactctggcagcagccaccagtggctgcccatatgtagctcaaattggaatgattcttactcagagaagacctgccagcagttgggcttcgaatccgcacatcgaacaacagaggtggctcatcgtgattttgcaaatagtttctccattctgcgatataattcaactattcaggaaagcctccacaggagtgaatgccctagtcagagatatatcagccttcagtgctcccactgcggactgcgtgctatgaccggcaggattgttggcggtgctctcgcctccgactcaaaatggccttggcaggtgtccttgcactttggcactacccacatctgcggaggcactcttattgacgcacaatgggttttgaccgcagcgcactgcttttttgtcaccagagagaaagtattagaagggtggaaagtttacgccggaacttccaaccttcaccagctgcccgaggcagcctcaatagccgaaatcattatcaatagcaactatactgacgaggaagatgattatgatattgccctcatgcgcctgtcaaaacctctcacactgtccgcgcatatccacccagcctgtctaccaatgcacgggcagacattctccctgaacgagacctgttggatcacgggctttgggaagactcgggagacagacgacaaaacttcaccatttctgagggaagtacaggtgaatctgattgacttcaaaaaatgcaacgactacctcgtctatgactcatatctcacaccacggatgatgtgtgccggtgatctgcggggtggccgtgactcatgtcagggtgatagcggaggtcccctcgtttgcgaacagaataacaggtggtaccttgcaggggtaacatcttggggaaccgggtgcgggcagcgcaataagcccggagtttatactaaggtcaccgaggtgcttccctggatctatagcaagatggaggtaagaagtctgcagcaggacactgcaccctccaggcttggcacttcgtcagggggagacccagggggtgcacctcggctctag

SEQ ID NO: 244766 - DNA, 1704 bp, synthetic construct
  misc_feature 1..1704: note = Description of Artificial Sequence: Synthetic coding sequence
  source 1..1704: mol_type = other DNA
atggagagagactctcacggaaatgctagtccagcacgtacacccagcgccggtgcctcccccgctcaagcgagccctgctgggaccccccctggaagagcaagccccgctcaagccagtcccgcacaggcttcacctgccggaaccccacccggaagggcatcccctgcccaggctagcccagctgggacacctccaggtagagcctcacctgggagggccagccccgctcaggcctctcctgctcaggcatctcctgctcgggcatcccccgctctcgcaagcctgagtagatcatcttccggaagatcatcctctgccaggtccgcatcagtgacaacatcgccaacgcgggtataccttgttagagccactccggtgggagccgtgccaatacgctcctcgcctgcaagatccgccccagccacgcgagcaacgagagaatccccaggtacttccctccccaagttcacctggcgggaggggcagaaacaactcccactgattggatgtgtcctcttactgatcgcgctcgtagtttcactgatcatccttttccagttctggcagggccatactggcatcagatacaaggaacagcgggagtcctgcccaaagcatgctgttcgttgtgatggagtagtggactgcaagctgaaaagcgatgagctgggatgtgtcaggtttgactgggacaagtcactgttgaagatatacagcgggagtagccaccagtggttgccgatatgttcttccaactggaatgattcgtacagcgagaaaacctgccaacagctgggctttgagtcagcccatcggacaactgaggtggcccaccgcgacttcgccaactctttctctatccttcgatataactcgactatccaggaaagtttgcataggtcggaatgcccttcccagcggtatattagcctgcagtgtagtcactgcggcctccgggcaatgaccggacgcattgtcggcggagcactcgctagtgactcaaaatggccctggcaggtgtccttgcatttcggaactactcacatctgtggtggaaccctgatcgatgctcagtgggtactgacagcggctcattgtttctttgtcacccgagaaaaggtgctcgagggatggaaagtgtatgcgggaacaagcaatctgcaccaactcccagaagccgcatcgatagccgaaatcatcattaactcgaactatactgatgaggaggatgactacgatattgccttgatgaggctttccaagccccttacattgtccgcgcacatccaccccgcatgtctgcctatgcacgggcagaccttcagtctcaatgaaacctgctggatcacagggttcggaaagacacgcgagacggacgataaaacatcgcctttcctgcgagaggtgcaagtgaacctgatcgattttaagaagtgtaacgactacctggtgtatgattcttacctgactcctcggatgatgtgtgcgggagacctccgaggagggcgtgattcatgtcagggagacagcggaggaccactagtatgcgagcagaataaccgctggtacttagccggagtgacaagctggggaaccggatgtggccaaagaaataagccgggtgtctacactaaagtgacagaggtcctgccctggatttactcaaagatggagtcagaggtgcgttttcgcaaatcatag

SEQ ID NO: 244767 - DNA, 1476 bp, synthetic construct
  misc_feature 1..1476: note = Description of Artificial Sequence: Synthetic coding sequence
  source 1..1476: mol_type = other DNA
atggagcgggacagtcatgggaacgcttcccccgcaagaacgcctagtgccggtgcctctccagcgcaggcttcccctgcagggacacctcctggaagggcatcacctgcccaggcctctcctgctcaggcatccccagctgggacaccccctggacgcgcttctccagctcaggcaagccccgctggcacaccccctgggagggccagcccgggacgggcttcccccgcacaagccagtccagcacaggcatctccagccagggcttcgcccgctctcgcttccctcagtaggagttcctctggtcggagttcgtccgccaggagtgcctctgtgacgacttcacccactcgggtctaccttgtgagagctacaccagttggagctgtgcctatccgctcttcccctgccaggtcagccccagccacccgagcaaccagagagagccctggtacaagtcttcctaagtttacctggagggagggccagaagcagcttcccctgataggctgcgtgcttcttctgatagccctcgttgtgtcccttatcatcttattccagttctggcagggccacactgggatccggtataaggaacaaagggaatcctgtccgaaacatgccgtccgctgtgacggtgtggtggactgcaagttgaagagcgacgaactcgggtgcgtgagattcgactgggacaaatctctgctcaagatttacagcggctcttcccaccagtggctgcccatctgcagcagtaactggaatgactcctacagcgaaaaaacttgtcagcaattaggatttgaatccgcgcaccggaccacagaagtagctcatagagacttcgccaattctttcagtatcttacgctacaacagcacaattcaggagagcctgcatcgctcggagtgcccctctcagaggtacatatcgcttcaatgcagccattgcggtctgagagccatgaccgggaggatcgtcggaggagccctggccagtgactctaagtggccttggcaagtgtccttgcactttgggaccactcacatctgtggaggcacactgattgacgcccagtgggtcctgactgccgctcattgttttttcgtgacccgcgaaaaggtgctggaagggtggaaagtctatgctggcacttctaatttgcatcagctgccagaggctgccagcatcgccgagattatcattaacagcaactataccgatgaggaggatgactacgacatcgctttaatgcggttgagcaagcctctgaccctttccggcgagggcatttgcacaccgagatcccctgcccctcagcctcagcatcctctccagccatctcacctttcagcttctgtgaatagctatccaggacccaaagctagcgcagggcagaagtccaagactctgaaagatccttatatggagcatttttgttttatcattagagaaacagaggcgcaagggctttag

SEQ ID NO: 244768 - DNA, 1599 bp, synthetic construct
  misc_feature 1..1599: note = Description of Artificial Sequence: Synthetic coding sequence
  source 1..1599: mol_type = other DNA
atggagcgggactcccacggcaatgcatcgcccgctcgcacaccttccgcaggtgccagcccagcgcaggcatcaccagcaggcacaccgccaggcagagcaagccctgcccaagcgtccccagctcaggccagcccagcaggcacacccccaggacgggcttctcctgcacaagccagtccagctggcacaccgcctggccgagcaagtccaggtcgggcttcaccggcacaggccagtccggcacaggcatctcctgcccgagcctccccggcactagcatcactttcgaggtcaagttcaggaagatcctcctccgctcggtcagcctcagtcacaacttcaccaaccagggtgtacctggtccgcgctacgcctgttggagctgtgcccattagatctagcccagccaggagcgcgcctgcaacgagagccaccagagaatccccagtacaattttggcaaggtcacaccggaatcagatacaaagagcagagagaatcttgcccaaaacatgcagttcgctgcgacggggtggtcgactgcaaactgaagtcagacgaattaggctgtgttcgattcgactgggataaaagccttcttaagatctacagcggcagctcacatcagtggctgccaatttgttccagtaattggaacgattcatattcagaaaagacctgccagcaattgggctttgaatccgcgcaccgtactacagaagtggctcaccgggacttcgcaaactccttcagcattttgcgttacaattccacaatccaggaaagcctacaccggagtgaatgcccgagtcagaggtacatcagtctgcagtgttcccactgtgggctgcgtgccatgacaggtaggattgttggcggagccctggctagcgactctaagtggccctggcaggtgtcccttcacttcggcaccactcatatctgcggaggaacccttattgacgcacaatgggttctgaccgctgcacattgctttttcgtgacaagagagaaagtactggagggatggaaagtttacgccggaactagtaatttgcaccaattgcctgaggctgcatccattgcggaaatcatcataaactccaattataccgatgaagaagatgattatgatatcgctctcatgcgtctttctaagcctctgacactcagcgctcatatccatccagcctgcttgcccatgcatggacagacgtttagtctgaatgaaacatgctggattacaggttttggtaagacccgggaaacagatgataagacttctccttttctgcgcgaagtgcaagtcaacctcattgatttcaaaaaatgtaatgattatttagtttatgatagctatctgacaccaagaatgatgtgcgccggagatcttagaggaggaagggatagctgtcaaggagactctgggggtccattagtgtgtgagcagaacaacaggtggtatttagccggagtaactagctggggcaccggatgcggtcaaaggaataaaccaggggtctacactaaggtgacagaagtacttccttggatttatagtaaaatggaaagtgaggtaaggttccgtaaatcatag

SEQ ID NO: 244769 - DNA, 1365 bp, synthetic construct
  misc_feature 1..1365: note = Description of Artificial Sequence: Synthetic coding sequence
  source 1..1365: mol_type = other DNA
atgggcgagaatgacccgcctgccgtggaagcccctttctctttccgcagcttgtttgggctagatgatttgaaaatcagccctgtcgcccctgacgctgacgccgtcgctgctcagatcttaagcctgctgcctctcaagttcttccccattatagtcataggaatcattgctctgatcctcgctcttgccatcggcctcggaatacattttgattgttccgggaaataccgctgtcgttcctcttttaaatgtatcgagttgattgcaaggtgtgacggcgtgagcgactgcaaggatggggaggatgaatatcggtgcgttagagtaggcggtcagaacgcggttcttcaggtgtttactgcagcttcatggaagacgatgtgcagcgatgattggaaggggcactatgcgaacgtagcctgtgcccagcttggattcccaagttatgtgagttctgacaaccttcgggtctcgtctcttgagggacagttccgggaagaatttgtatctatcgaccatctcctgcccgacgataaagtgacagcgcttcaccattcagtgtatgtgagagagggatgcgcctccggacacgtggtcacattacaatgcactgcatgcggccaccgcagaggatattcttctcgcattgtgggcggtaatatgtctcttctgtcccaatggccttggcaagccagcctgcagttccagggctatcatctctgcggagggagtgtcatcacaccgttgtggattatcactgccgcacactgcgtctatgacctctacttgccgaaaagctggacaatacaggttgggcttgtatctcttttagataaccctgctccttcccatctcgtcgaaaagatcgtttaccactccaaatataaacccaagagactgggcaacgacattgccctcatgaagctggccggaccgctgacatttaacgaaatgattcagcctgtctgcctgccaaacagtgaagagaatttcccggacggaaaggtgtgttggacttccggctggggagcaaccgaagacggagcaggcgatgctagtcctgtactaaaccatgccgctgtgccccttatctctaacaaaatctgtaaccacagggacgtgtacggcggaatcatcagcccctcgatgttatgcgccggttatctcaccggcggagtagactcctgtcagggcgacagtggtggacctttggtatgccaggaacgcagactgtggaaactggtgggcgctacatcctttggaatagggtgtgccgaagtcaataaaccaggcgtgtacaccagagtgacttcattcctcgactggatccacgaacagatggaaagagacctgaagacatag

SEQ ID NO: 244770 - DNA, 1617 bp, synthetic construct
  misc_feature 1..1617: note = Description of Artificial Sequence: Synthetic coding sequence
  source 1..1617: mol_type = other DNA
atgcaggctgtggggccaaagcccctgccaaccctgctgtgcgggggacgtaccggtcaccgcaccgctcgggtgctcagctttctgattaggtcctgcccatgcgagccaggcaaagggtgcgtttatggtaagccagttacactctggccaacaatctctagtgtcgtgccctctactttcctgggactcggcaactatgaggtagaggttgaggccgaaccagacgtgagaggtccagaaatagtaacaatgggggaaaacgatccccctgcggtcgaggctcccttcagtttccggtccttgtttgggctagatgacttgaagatttctccggttgctcctgacgccgacgcggtggcggcacaaatactgtcactgctgccccttaagttctttccaatcatcgttatagggattattgctcttattcttgcactcgctatcggactcgggatccattttgactgctcagggaaatacaggtgtcggagctccttcaaatgtattgaactaattgcgagatgtgatggcgtctccgactgtaaggacggagaggacgaataccgctgtgtacgagtcggcggacagaacgccgtgctacaagtgttcacagctgcatcatggaaaaccatgtgcagcgatgactggaaggggcactacgccaacgtggcctgcgcccagcttggttttccttcatatgttagttccgataatctccgcgtgtcatcgctggaggggcagttcagagaggaatttgtcagcatcgatcacctgctgccagatgacaaggttactgccctacaccacagcgtgtatgtccgggagggttgcgccagcgggcacgttgtaaccttgcagtgcaccgcatgtgggcaccgtagaggttactctagcagaatcgtaggcggaaacatgagcctgctctcacaatggccttggcaggctagcctccagttccagggctaccatctgtgtggcggatctgttatcacccccctatggatcatcaccgcagctcattgcgtatacgatctttatttgcctaagtcctggacgattcaggttgggttggtgagcctgctggacaaccctgcccctagccacctcgttgaaaagattgtctaccattcgaaatacaagcccaaacggttaggtaatgatatcgcgttaatgaagctcgccggaccactcacctttaatgagatgattcagcccgtctgcctccccaactccgaggagaattttcctgacggaaaggtgtgttggaccagtggctggggcgctacagaagatggtgctggggacgcttccccagtactcaaccatgccgcagttcctttgatctccaataagatatgcaaccaccgggacgtttatggcggaatcatcagcccctcaatgttgtgtgcaggatatttgactggaggtgtcgactcatgtcagggagatagtggaggcccactggtctgtcaggagaggcggctgtggaagctggttggcgctacctctttcggtattggctgtgcagaagtcaacaagcctggtgtatacactagggtcacttcatttctcgactggatccatgaacagatggaacgggaccttaaaacctag

SEQ ID NO: 244771 - DNA, 1035 bp, synthetic construct
  misc_feature 1..1035: note = Description of Artificial Sequence: Synthetic coding sequence
  source 1..1035: mol_type = other DNA
atgggagagaatgacccgccagctgtggaagcacctttttccttccgttccctctttgggttggatgaccttaaaattagcccagtggccccagatgctgatgcggtggcggcacagatcctatctctgctgcccctgaaattttttcccatcatcgttatcggcatcatcgctctcatcctggcccttgccatcggactcggtatccattttgattgttccggtaagtacagatgtcgctccagcttcaagtgcattgaactgatcgcccgttgcgacggggtttctgactgtaaggatggcgaggacgagtaccggtgtgttagggtgggtggtcagaatgctgtactgcaagtgtttactgcagctagttggaagactatgtgttccgatgactggaaggggcactatgccaatgtcgcatgcgcccagctggggtttcccagctacgtttcatccgacaacctgcgagtcagctctctggaaggccaattcagagaagaattcgtgagcattgatcacttgctgcccgatgacaaggtcactgcactgcatcattctgtctacgtgcgcgagggctgcgcctccgggcatgtcgtaacgcttcaatgtactgcctgtggccaccggagggggtatagttctcgcatcgtgggaggaaatatgtccttactttcgcagtggccttggcaggcctctttgcagtttcagggctaccacctgtgtggcggttccgttattacacccttatggataatcactgccgctcattgtgtgtacgatctttaccttccaaagtcatggacaattcaggttggtctggtaagtcttctcgataaccccgctcctagccatctcgtcgaaaagattgtatatcatagtaagtacaagccgaagcgtttaggcaacgacatagctttaatgaaattggccggtccactcacgtttaacggaacttccggcagcctctgcgggtctgctgccctgccactgtttcaagaagatctccaacttctaatcgaggccttcctgtag

SEQ ID NO: 244772 - DNA, 1362 bp, synthetic construct
  misc_feature 1..1362: note = Description of Artificial Sequence: Synthetic coding sequence
  source 1..1362: mol_type = other DNA
atgggggagaatgatcccccagccgtggaggccccttttagttttaggtccttatttggtcttgatgatctgaagatctctcctgttgcccctgatgcagacgcggttgccgctcaaattctctccctgctccccctcaaattcttccccataattgtcattggcataattgctctgattcttgccttagctatcggccttggtattcactttgattgtagcgggaagtatcgatgccgcagctcgtttaagtgcatcgaactgattgctaggtgtgacggggtctctgactgtaaggacggcgaagatgaataccgctgcgtgcgggttgggggtcaaaatgccgtgctccaggtattcacagcagccagctggaaaaccatgtgctcagatgactggaaaggccattacgcaaacgtcgcctgtgcacagcttggctttcccagttacgtatcttccgacaatctccgcgtgtcatcactcgaagggcagttccgggaagaatttgtgtccatcgaccacctgctaccagatgataaagtgactgccctgcaccacagcgtctacgtaagagagggttgcgcatcaggccacgtggtgacccttcaatgcactgcttgcgggcaccgaagggggtattcctcacgcatagtcggcggtaacatgtctctactctctcagtggccctggcaagcaagtctacagtttcagggctatcatctgtgtgggggttcagtcatcactcctctctggatcatcactgctgcccactgcgtgtatgacctgtatcttcccaaaagctggacgatccaggtcggcctggtgagtcttctggacaacccggcacctagtcatctggttgagaagatcgtctatcactctaagtacaagcctaaacgcttagggaacgacatcgcgctgatgaagcttgcgggtccgctaaccttcaacgaaatgatccagcctgtttgccttcctaactccgaggagaatttcccagatgggaaggtgtgctggacctctgggtggggtgcgacagaagacggaggggatgcctcacccgtgttgaaccatgccgcagtccctttgatctccaataagatttgcaaccatagggacgtctacgggggaatcatctcaccttcgatgctgtgtgctggttacctgactggaggggtcgactcatgccagggcgactccggcggaccactggtatgccaggagcggaggctgtggaagctggtgggagccacatcgtttggtatcgggtgtgctgaggtcaacaaaccaggcgtttatacccgggtgaccagctttcttgactggatccatgagcaaatggagcgcgacctgaaaacctag

SEQ ID NO: 244773 - DNA, 1314 bp, synthetic construct
  misc_feature 1..1314: note = Description of Artificial Sequence: Synthetic coding sequence
  source 1..1314: mol_type = other DNA
atgctccaggacccagacagcgaccaaccgcttaactccctcgacgttaaacctctgaggaagccccgaattccaatggaaaccttccggaaggtgggtatcccaattattattgctctgctgtcgctggcaagcatcattatcgtggtggtgcttatcaaagttattcttgacaaatattatttcctgtgcggacaacccctccacttcatccccagaaagcagctctgtgacggggagttggattgcccgctcggagaggatgaggagcattgcgtgaagagtttccctgaagggcctgccgtagctgttaggctctctaaggatagaagcactttacaggtgctcgattcagctaccggcaattggtttagcgcgtgctttgacaacttcacggaggctttggctgaaaccgcctgtaggcaaatgggctactcaagtaagcctaccttccgggctgtggaaattggccctgatcaggacctggatgtggtggagattacagaaaattctcaagagctccgcatgcgcaattcctctggcccatgcctgtcaggaagtttagtgagccttcattgcctggcctgcggaaagtctttaaagacacctagggtcgtaggggttgaagaggcatctgttgactcatggccctggcaggttagtatccagtacgacaagcagcacgtgtgcggaggatcgattctggaccctcactgggtcctgacagccgcacactgtttcaggaagcataccgacgtgttcaattggaaggtgcgggcaggctccgacaagcttggctcatttccctcattggccgttgctaaaataataatcatcgagttcaaccccatgtaccccaaggataatgacattgccctgatgaaacttcagtttcccctgacgttcagcgggaccgtccggccaatctgcctccctttctttgatgaggagctcacccctgcaacacccctttggattatcgggtggggctttaccaaacagaacgggggaaagatgtcagatatcttactgcaggcgtcagtccaagttatcgactcaacacgatgcaatgccgacgatgcctaccagggggaagtgactgaaaagatgatgtgcgccggaatacccgaagggggagttgatacttgtcaaggcgactcaggaggccctctcatgtaccagtccgatcagtggcacgttgttggcattgtttcctggggatacggttgcggaggaccatccactcccggagtctatacaaaagtgtctgcctatctgaattggatatataatgtgtggaaggccgagctctag

SEQ ID NO: 244774 - DNA, 1299 bp, synthetic construct
  misc_feature 1..1299: note = Description of Artificial Sequence: Synthetic coding sequence
  source 1..1299: mol_type = other DNA
atgctccaggatccagatagtgaccagccactcaattcccttgacgtcaagcctctgcggaagcccaggatccctatggagactttccggaaagtaggcatccctattattattgccttgctgtcactcgcttcaattatcatcgtggtcgtcttgatcaaagtgatactggacaaatattatttcctctgcggtcaacccctgcactttatccctcgcaaacaactgtgcgatggagagctagactgccctctgggggaggacgaggagcattgtgtcaagtcgtttccagaaggcccagccgtggcggttagactgtccaaagataggagcacactgcaggtgctcgactctgcaacaggcaactggttctccgcctgctttgataatttcaccgaagccttagccgagacagcatgccgtcagatgggttacagccgcgctgttgaaatcgggccagaccaggatctggatgtggtggaaataacggaaaattcccaggaactaaggatgagaaattccagtgggccatgtctaagtggctccctggtgagccttcattgcctggcatgtggcaaatctttaaaaacaccacgggtcgtgggggtggaggaagctagcgtcgactcttggccatggcaggtctccatccagtatgataagcaacacgtgtgtgggggttcaattctggacccccactgggtgctgacagctgcccattgtttcagaaagcacaccgatgtgtttaattggaaagtacgcgctggaagcgataagctgggcagcttccccagtctggctgtggctaaaattattatcatcgagtttaaccctatgtatccgaaagacaacgacattgcgctaatgaaactccagttcccactgacttttagtgggaccgtgcgccctatttgccttccattctttgacgaagagttaaccccggcaacacccctctggattattggatgggggttcaccaaacagaacggagggaaaatgtccgacattttactccaggctagcgtgcaagtgattgactctacacgttgcaacgccgacgatgcctaccaaggggaggtgaccgaaaagatgatgtgtgccggaattccagaagggggagtggatacatgccaaggcgactccggcggtccgcttatgtaccagtcagaccaatggcatgttgtggggatcgtgtcatggggctatgggtgcggcggtccaagcacacccggagtctatacgaaggtgtccgcgtacttaaattggatttacaacgtttggaaggctgagctgtag

SEQ ID NO: 244775 - DNA, 1308 bp, synthetic construct
  misc_feature 1..1308: note = Description of Artificial Sequence: Synthetic coding sequence
  source 1..1308: mol_type = other DNA
atggaccccgacagcgaccagccacttaactcactggacgtaaaaccattacggaaacccagaataccaatggaaacatttcgtaaagtaggaatccccattattatcgcgctcctgtcgctggcttccataattatcgtggtggttctgataaaagtgatccttgacaaatattacttcctgtgtggccagcccctgcactttatacctagaaaacaattatgtgatggcgaacttgattgccctctgggcgaggacgaggaacactgcgtaaagagttttccagagggccctgccgtggctgtgagactatccaaagacagaagtacactgcaggtgctggatagcgccacaggcaactggttttcagcatgtttcgacaacttcactgaggccttagccgaaactgcctgcagacaaatgggatactctagcaagccaacgtttagggcagtcgagatcgggccagaccaagatcttgacgtggtagagatcactgaaaacagtcaagaactcaggatgcgcaatagcagcggaccatgtctgtcgggaagcctcgtgtcactgcattgccttgcctgtggaaagtctctgaaaactcccagggtggtgggggtcgaagaggcctccgtagattcgtggccctggcaggtttccatccaatacgataaacagcatgtgtgcgggggatcaattctggaccctcattgggtcttgaccgccgctcactgttttcggaagcacaccgacgtgttcaattggaaggtgcgagccggaagtgataagctcggatctttcccctcgttggccgtggctaagataattatcatcgagttcaacccgatgtatccaaaggataatgatattgctttgatgaaactccagttccctctgactttcagtggtaccgtaagaccaatttgcctgccattctttgacgaggagcttactcctgccactcccctgtggataatcgggtggggatttaccaaacagaacggcggaaagatgtccgatattttgttgcaggcgtcggtgcaggtgattgactctacccggtgtaacgcagatgatgcctaccaaggggaagtgactgagaaaatgatgtgtgccggtatccccgagggcggtgtggacacttgccagggtgatagcgggggtcccctcatgtatcagtccgaccagtggcacgtggtgggcatcgtgtcttggggttacggctgcggaggtccctccacacctggagtctacaccaaagtgagcgcataccttaactggatatataatgtttggaaagccgagctgtag

SEQ ID NO: 244776 - DNA, 1374 bp, synthetic construct
  misc_feature 1..1374: note = Description of Artificial Sequence: Synthetic coding sequence
  source 1..1374: mol_type = other DNA
atgtctctaatgctcgatgaccagccaccgatggaggcacaatatgcggaggaaggtcctgggcctggcattttccgcgcagagcccggagatcaacaacatcctatttcacaggccgtgtgctggaggagtatgcgacgcggatgtgccgtacttggcgcactcgggctgctggctggcgctggtgtgggcagttggttgctcgtgctctatctttgcccagcagcctctcagcctatcagcggcacactgcaagacgaagaaattaccctctcctgctcagaggctagtgctgaggaagcattgctcccagccctccctaagacagtcagcttccgaatcaattcagaggacttcttactggaggcacaggtaagagatcaacctcgatggctactggtgtgccacgaggggtggagtccagctctcggtctccaaatatgctggtcactcggccatcttagacttactcatcacaagggagtgaatcttacggacatcaaactaaactcatctcaggagtttgctcagctgtccccaaggctcggaggcttcctggaggaagcttggcagccccgaaacaattgtacaagcggccaagtggtgtcgctgcgttgctccgaatgcggagctcgccctctggccagtagaatagtcgggggacagtccgtcgccccaggccgatggccttggcaagcttccgtggctctcggattcaggcatacttgtggaggtagcgtgttggctcctcggtgggttgtaacagcagcgcattgtatgcattctttccgcctagcccgactcagtagttggagagtgcatgcaggactcgttagtcatagtgcggtgcgtccccatcagggcgctttggtggagcggattatccctcacccactgtacagcgcccagaatcatgattacgacgtggcacttctgcgcctgcagactgcccttaacttttcagacactgtgggagccgtctgcctcccagccaaggagcaacattttccaaaaggatccaggtgctgggtgagtgggtggggccacactcatcctagtcatacttactcaagtgacatgctgcaagacaccgtggtgcccctattttcgacccagctctgcaacagttcctgcgtttacagtggcgcactgaccccaagaatgctgtgcgctgggtacttggacggacgtgccgacgcttgccagggcgattccggtggcccactcgtgtgccctgacggtgatacctggagactggttggcgtagtgtcatggggaaggggctgcgctgaacctaaccaccctggggtgtacgccaaagtggctgaatttctcgactggatccatgacacagctcaggattcattactatag

SEQ ID NO: 244777 - DNA, 2436 bp, synthetic construct
  misc_feature 1..2436: note = Description of Artificial Sequence: Synthetic coding sequence
  source 1..2436: mol_type = other DNA
atgctgctactcttccacagtaaacgcatgcctgttgctgaggcgcctcaggtggctggcggtcaaggagatggaggagacggagaggaagccgaacctgaaggcatgtttaaggcctgcgaggattctaagaggaaggctcggggatacctccgtttagtgccattattcgtcctgctggctctcctcgtgttggcctcagctggagttctgctgtggtacttcctcggatataaggcggaggtgatggtaagccaggtgtatagcgggagcctacgcgtcctaaataggcacttctcccaggacttgacccggagggagagctccgccttccgttctgaaaccgccaaggcgcagaaaatgcttaaggagctgattaccagcacccggcttggcacgtactacaatagctcttcggtgtacagtttcggtgagggccctcttacatgttttttctggtttattctccaaattcctgagcaccgacgcctgatgttgtcccctgaggtggttcaagccctgctcgtcgaggagctgttgtcaaccgttaattctagcgccgcagtgccatatcgtgccgagtatgaggtggatcccgaaggcctcgtgatcctagaggcatctgttaaagatattgccgcactgaacagcaccctggggtgctataggtactcttacgtcggccaaggtcaggtcctcaggttaaaggggccagaccatctcgcaagttcatgtctctggcatctccagggacctaaggacctgatgttgaagctacgcttggagtggacgttggctgaatgccgagatcgtctggcaatgtacgacgtagcgggacccttggaaaaaagattgatcacatctgtgtatggctgcagtcgccaggaacccgtggtggaggtcctcgcatctggggcaattatggccgtggtgtggaaaaaggggctgcacagctattacgacccctttgtactgagtgtgcaacctgtggtctttcaggcctgcgaggtgaatctgactttggacaaccggctggactctcaaggcgtgttgagcacaccatattttcccagttattatagcccgcagacgcactgttcttggcacttaactgtgccctctctggattacggcctggccctctggttcgacgcatacgctctcaggaggcagaagtacgacctcccctgtactcagggccaatggacaattcagaatcggaggctctgtggccttagaattctacagccatatgcggaacggatcccagtggtggctactgctgggattactatcaatttcacgtctcaaatctctctgacggggccaggtgtgcgagtgcattacgggctgtacaaccagtcagacccttgccccggtgagtttctgtgttcagtgaatggtctgtgtgtgcccgcttgtgacggcgttaaggactgccccaacgggctcgatgagcggaattgcgtctgtagagccacattccagtgcaaagaagatagtacatgcattagtctgccaaaagtctgtgatggtcagccggattgtttaaatggctccgacgaagagcagtgccaggagggggtgccttgtggaacatttacattccagtgtgaggataggtcatgcgtgaaaaaaccaaatccccaatgcgatgggagaccagactgccgggacgggtctgacgaggaacactgcgactgcggattgcagggaccttcaagcagaatcgtcggcggagcagtaagttccgagggcgagtggccttggcaagccagcctccaggtaagaggccgtcacatctgtggcggagccctgattgccgaccggtgggttatcaccgcagctcattgttttcaggaagatagcatggcatctactgttctctggaccgtctttctcggcaaagtttggcagaacagtagatggccaggggaggtttcctttaaggtctccagattgcttctgcatccgtaccacgaggaagacagtcatgattacgacgttgccttattgcaactggaccaccctgtggttaggtctgccgcagtgcgccctgtgtgcctcccggcaaggtctcacttcttcgagccagggctccactgctggattaccggctggggagcgctgcgggagggcggacctataagcaatgccctgcaaaaggtcgatgtgcagctgatcccccaggatctgtgtagcgaggtttatcgttatcaggtaaccccaagaatgctgtgcgcaggctaccgaaaaggtaagaaggatgcctgccagggggatagcggcggacctctggtgtgcaaggccctctctggtaggtggtttctggctggacttgtaagttggggcctgggatgcggcagaccaaactattttggggtatatactagaattacaggtgtgatctcttggatccagcaggtagtgacgtag

SEQ ID NO: 244778 - DNA, 2475 bp, synthetic construct
  misc_feature 1..2475: note = Description of Artificial Sequence: Synthetic coding sequence
  source 1..2475: mol_type = other DNA
atgcccgtggcggaagccccacaggtcgccggtgggcagggcgacgggggagatggagaggaggcagaacccgagggtatgttcaaagcctgcgaggacagtaaacgaaaggcacggggttatctcagattagtccctctgttcgtcctgctcgcccttctggtccttgcttccgccggagtgctgctgtggtattttctcggttataaggctgaagttatggtgtctcaggtgtacagtggttctctgcgggtgctgaataggcatttcagccaggacctcaccaggcgagagtcctcagcctttagaagtgagactgctaaggcccagaaaatgttgaaggagctgattacatccactcgcttaggcacatactacaactcatcctccgtgtactcttttggcgagggcccactcacatgttttttctggtttatcttgcagatccctgaacaccggaggctgatgctatctcccgaggttgtgcaggctcttctggtggaggagctgctgtctactgtgaattcctctgctgctgttccttaccgcgctgagtacgaagtggatcccgagggcctggtcatattggaagcttctgtgaaagatatagcggcattaaactctacgctgggatgttatagatacagttatgtcggacagggccaggttctgcggctgaaagggcctgatcatcttgccagcagctgcctttggcacttacagggccctaaagacctcatgctgaagctcaggctggaatggaccctcgccgaatgtagggaccgattggcaatgtatgatgtggctggccctctcgagaagcgtttaatcaccagcgtgtatggatgctcgaggcaagagccagttgttgaggtgctagctagcggggcaattatggccgtagtttggaagaagggactccattcatactatgatccgttcgtcctttctgtccagccagttgtctttcaggcgtgcgaggtgaaccttactttagacaatcgactcgattcgcagggggtgctgagcacaccttattttccgtcctactattctccacagactcactgctcatggcacctgacagtgccatctctggactacggactagccctatggttcgacgcttacgctctgagacgccagaaatacgatctaccttgcacccagggtcagtggacgatccaaaaccggcgattgtgtggtttgcgcattcttcagccatacgccgaacggatcccagtggtcgccacagctggtataaccattaacttcacatctcagatctccctgactggcccaggggtgagggtccactatggcctctacaatcagagcgatccgtgcccaggtgagtttctctgttccgttaacgggctgtgcgtgcccgcttgtgatggtgtgaaagattgcccaaatgggctggatgagaggaattgcgtgtgccgggcaacattccagtgcaaggaggactcaacatgtatatccctcccaaaggtgtgtgatggacagcctgattgtctcaacgggagcgacgaggagcagtgtcaggaaggagtcccttgcgggacctttacgttccagtgtgaagatcgatcctgtgtgaaaaaaccaaacccccaatgtgacggtagaccggactgtagggatggaagtgacgaggagcactgtgattgcggacttcagggcccatccagccgcatagtcgggggagcagtctcctcggagggtgaatggccgtggcaggcatccctccaagtgcgcggtaggcacatctgcggcggtgctctaattgcggatcgatgggttattaccgcagctcactgcttccaagaggactccatggcaagtactgtactctggaccgtcttcctcggtaaggtgtggcagaattcaaggtggcccggagaggtgtcgttcaaggtcagtcgactgctgctgcacccttaccacgaggaagatagccatgattacgacgtagccttgcttcaattagaccaccctgtcgtgaggtccgccgctgtgaggcctgtatgtcttccagcgagatcacacttttttgaacctggccttcactgttggattacgggctggggggctcttagagagggcgctttacgtgcggacgctgtcgccctgttttatgggtggcggaaccaaggttccgagacatgctgctgtcccatttcaaatgcgcttcagaaggtagacgtacagctaatcccccaagacttgtgcagcgaggtctatcggtatcaggtcacgccacgaatgctgtgcgccggatataggaagggcaaaaaggatgcgtgccagggtgattccggaggcccactcgtgtgcaaggcactgtctggtaggtggttcctggccggtctcgtgtcctggggcctgggctgtgggaggcctaactacttcggggtgtacacgcgtatcactggggtgattagctggattcagcaggtggtgacttag

SEQ ID NO: 244779 - DNA, 2409 bp, synthetic construct
  misc_feature 1..2409: note = Description of Artificial Sequence: Synthetic coding sequence
  source 1..2409: mol_type = other DNA
atgcccgtggccgaagcgcctcaagtggctgggggacagggcgacggcggagacggggaggaagccgagcccgaaggtatgttcaaagcctgcgaagatagcaaacggaaggctcggggttacctccggctggtccctttgtttgttttactcgctttgctcgtcctggcatctgcaggggtactgctctggtattttctgggatacaaagctgaggttatggtgtctcaagtctatagcggaagcctcagagtgctgaaccgccacttcagtcaggacctgactcggcgtgagagcagcgcattcagatctgagaccgccaaggcccaaaagatgttgaaagagcttatcacctctaccaggttagggacctactacaactcctcctctgtctatagcttcggtgaaggccctcttacttgcttcttttggttcatcctgcaaattccagaacacaggcgactaatgctgagcccagaagtggtccaggcactccttgtagaggagcttctatccacagttaacagctctgccgctgtgccttaccgggctgagtacgaagtcgatccagaagggctcgttattctggaggcatccgttaaggatatcgcagctctgaacagcactctgggctgctacagatattcctatgttggtcagggtcaggttcttcgcctcaaaggcccagatcacttggcaagctcctgcctgtggcacctgcagggccctaaagatttgatgctgaaactccgactggagtggactttggccgaatgccgagatcgtctggccatgtacgacgtggccggacccttggaaaagcggcttatcacaagtgtgtacgggtgctcacgtcaagaaccagtcgtggaggtactggcgtccggggctattatggccgtggtgtggaaaaagggcctgcacagttattatgacccattcgtgctaagcgtccagcccgttgtctttcaggcctgtgaagttaacctgaccctggacaatcgtttggatagtcagggagttctttccacgccatattttccatcctattactcaccgcaaacacattgttcatggcacctgacagtgcctagtctagattatggactagctctgtggttcgacgcatacgccctgaggcggcagaaatacgatctgccatgcacacagggccagtggacaatccagaaccggcgtctttgtggactcagaatcttgcaaccatatgctgagcggatccccgtggtcgcgacagcaggaataactattaactttacaagccagattagcctcacagggcctggtgtgagggtgcactacgggctatataatcagagcgatccgtgccctggagagttcttatgcagtgtgaatggcctttgtgtgcccgcttgcgatggagtgaaggattgccccaacggcctggatgagaggaactgcgtgtgtagagcaacttttcaatgtaaggaagattcaacttgcatttcccttccgaaggtatgcgatggccagcccgattgcctgaatggaagtgatgaggagcagtgccaggaaggagtgccttgcggtacctttacttttcagtgcgaagataggagttgtgttaagaaacccaacccacagtgcgatgggagacccgactgtagggacgggagcgacgaagagcattgcgattgtggcctgcagggccctagctcaagaattgtgggtggtgctgtgtcttccgagggagaatggccttggcaagcctcgctgcaggtgaggggtcggcacatctgtggaggggcactcatagctgacaggtgggttattaccgccgctcactgtttccaagaggattcgatggcatctaccgtgctttggacagtcttcctaggaaaagtttggcagaattcacgttggcccggagaggtgtcattcaaggtgagccgattgcttctgcacccttatcacgaggaggattctcacgactacgatgtggccctgctgcagctcgaccacccagtcgtcagatctgccgctgtacggccagtgtgtctgcccgctcgtagccattttttcgagcccggtctccactgctggattactggttggggagcgctcagagaggggggaccaatcagcaatgcccttcagaaagtggatgtacagttgatcccccaggacctttgtagcgaggtgtaccggtatcaggttactcctcgcatgctatgcgctggctaccgtaaaggaaagaaggacgcttgccagggagactccggtggtccactggtgtgtaaagcgctgagcggaaggtggtttctggctgggcttgtctcctggggtctgggctgcgggagacctaattattttggtgtgtacacgagaatcacaggtgtaatctcttggatccaacaagtcgtgacctag

SEQ ID NO: 244780 - DNA, 2475 bp, synthetic construct
  misc_feature 1..2475: note = Description of Artificial Sequence: Synthetic coding sequence
  source 1..2475: mol_type = other DNA
atgccagtggccgaggcaccacaggtcgcgggagggcagggggacggcggagacggcgaggaggcggaacccgaaggaatgttcaaggcatgcgaagactccaagcgcaaggccaggggctacctgcgtctcgtgccactgtttgtcctcctcgccttactcgtcctggccagcgccggtgtgctgctgtggtacttcctggggtacaaggcggaggtgatggtttcgcaggtgtacagtggaagtttgcgggtgcttaaccggcatttctcacaagaccttacgcggagagaatccagcgcattccggagcgagacggccaaagcccagaaaatgttgaaggagctcatcacctctacacgtctgggaacctattacaactcctccagcgtgtattctttcggggaagggccactcacctgttttttctggtttatcctgcagattccagagcatcgacgcctcatgctttcccccgaggttgtccaggctctgctcgtcgaagagttacttagcacagttaatagctcagcagccgtgccataccgtgcagagtatgaggttgaccccgagggactggtgattctggaggcctccgttaaagacatcgccgctcttaactctacactgggatgttaccgttacagctatgttggacagggacaggtactgagattgaagggcccagaccatctggcctcgtcatgcctgtggcacctgcagggtccgaaagacttgatgttaaagctgaggctggagtggacccttgcggaatgccgagatcgtctcgcaatgtacgatgtggccggaccgttggaaaagagactgattacctcagtgtacggatgctcccggcaagagcccgtggtcgaggtcttggcttctggcgctatcatggcggtggtgtggaagaaggggctgcattcttattacgatccattcgttctgtcggtgcaaccagtggtcttccaggcttgcgaggtgaacttgacactagataatcggctggacagtcagggcgtgctgagcaccccatacttcccctcctactattcccctcagacgcattgctcctggcacctgactgttcctagtttagactatggcctggcgctctggttcgatgcttatgcacttaggaggcagaaatacgacctgccttgtactcaggggcagtggactatccagaatcgtcgactgtgtgggctccggatactgcagccatatgctgaaagaatacctgtggtggccacggcaggtataactattaattttacgagccagatctctctgacgggcccaggggtgcgggttcactatggcctatacaaccagagtgatccctgcccaggcgagttcctctgctccgtcaatggactgtgtgtgccagcctgcgacggcgtgaaagactgtcctaatggactggacgagaggaactgcgtttgccgcgcaacctttcagtgcaaggaagattccacttgcatctctttgccaaaagtctgtgacggccagcccgattgcctgaatggtagcgatgaggagcagtgccaagagggagtgccatgcggcacttttactttccaatgtgaagacagatcctgtgtcaaaaaacctaatccgcagtgcgatggcaggcccgactgccgagacggctccgacgaggagcactgcgattgcggtcttcagggcccaagctcacggattgtgggtggcgcagtgagctcggagggcgaatggccatggcaggccagcctccaggttagaggcaggcatatttgcggaggcgcactgatcgcagacaggtgggttattacagccgcacactgcttccaggaggattctatggcgtccacggtcttatggaccgtctttctgggcaaggtgtggcagaactcccgatggcccggtgaggtctccttcaaagtgagcaggctgctgctgcacccttaccacgaagaagattctcacgattatgacgtagcattgctgcagctggatcatcctgttgtccggagcgcagcagtccgtcccgtgtgcctaccagcacgcagccacttctttgaacccggtcttcactgctggattactggttggggagctttaagggagggggctctgagagctgacgctgtggccctgttctatgggtggcgcaaccaaggtagcgagacttgttgttgtcccatctctaatgcactccagaaggtagacgttcaattgattccccaggacctatgttctgaagtctacagataccaggttacaccaagaatgttgtgtgctggataccggaaaggcaaaaaggatgcgtgccagggggactccggaggaccactggtttgtaaagcccttagcggtcgatggttcttggcgggactggtttcatggggcctgggatgtggccgacctaactactttggcgtgtacactagaattaccggagtgattagctggattcagcaggtcgtaacatag

SEQ ID NO: 244781 - DNA, 426 bp, synthetic construct
  misc_feature 1..426: note = Description of Artificial Sequence: Synthetic coding sequence
  source 1..426: mol_type = other DNA
atgccagtggctgaagcacctcaggtcgccggagggcaaggggatggcggagatggtgaggaggcagagcccgagggcatgtttaaggcctgtgaggatagcaaacgtaaggctcggggttatctgcgtctggtgccactcttcgtgctgcttgcgttgctggttctcgcctctgctggagtcttgctgtggtactttctaggatataaagctgaagtaatggtgtcacaagtctattcaggtagcctacgtgttttgaatcgccacttttcccaggacctaacacgaagggagagtagcgcttttcgctccgaaacagcgaaggctcagaagatgctaaaggaactgataacttcaactaggttgggtacctattataactccagttctgtctactcttttggagagggccctctgacatgttag

SEQ ID NO: 244782 - DNA, 1386 bp, synthetic construct
  misc_feature 1..1386: note = Description of Artificial Sequence: Synthetic coding sequence
  source 1..1386: mol_type = other DNA
atgcttttgttattccactcaaaaaggatgccggtcgctgaagcgccacaggtggcgggtgggcagggcgatggcggtgatggggaggaagctgagccggaaggcatgtttaaagcctgcgaggatagcaaacgaaaggcaaggggttacctaagactagttccactgtttgtgctgctggccttactcgtgttggcctcagccggtgttctgctgtggtattttctgggctacaaagctgaggtcatggtgagccaggtctattccggttccttacgcgtgctgaatagacacttctctcaagacctgactcggagagaatcgtccgccttcagatcagagactgccaaagcacaaaagatgctaaaggagctcataacatcaacacgtctggggacatattacaactccagtagtgtttattccttcggagagggcccactgacttgcttcttttggtttattctacagatccctgaacacaggcggttaatgttatcaccggaggtggtgcaagctttgctggtggaggaactgctgtccaccgtcaacagtagcgcagcagtcccctatagagctgagtatgaagtcgacccagagggccttgtcattctcgaggcctccgtcaaggatattgccgctctgaacagcacactgggttgttatagatattcatacgtcggccagggacaggttctgagactcaagggtccagatcatcttgccagcagctgtctgtggcacctacagggcccaaaggacctgatgttgaagctccgcctcgaatggacactcgctgagtgcagggatagactggccatgtacgacgtcgccggaccgctggagaaacgtctcattaccagcgtgtacgggtgctctcgacaagagcccgtggtggaggtgttggctagcggcgcaatcatggccgtggtgtggaaaaaagggcttcacagttactatgacccattcgtcctgtccgtacagccggttgtttttcaagcttgtgaggttaacctaactcttgacaaccgcctggattcccagggtgttcttagcacgccatacttcccttcctactattcacctcagacgcattgcagctggcatttgacagttccaagcctggactacggacttgcactgtggtttgacgcctacgccctgcggagacaaaaatacgatcttccatgtacccagggccagtggactatccaaaataggaggtatcactttctgtccagtctctggttacctttcttgccgccacctccctctcttccctcttctatcgtaacaccttctctagaggctcaagtcccaaatctgcggggagctgctcgcggtgctagtcgtgggtggggctggtgtcaggcttgttgtccgtag

SEQ ID NO: 244783 - DNA, 1527 bp, synthetic construct
  misc_feature 1..1527: note = Description of Artificial Sequence: Synthetic coding sequence
  source 1..1527: mol_type = other DNA
atggctagcgccgtgtggggtagtgccccatggtgggggcctcctcctccagcccctgcgagaccactcactgatattgacttctgtagtggagcacaattacaggagctgacgcagctcattcaggagctcggcgtgcaggaatcttggtcggacgggccaaaacccggagctgatctgctgcgcgctaaagactttgtcttttccctccttggcctggtccaccgcagagatcccagatttccccctcaggccgagctcctactgctgcggggaggaatacgggagggttccctggatcttgggcacgcccctctcggcccttacgcgcgaggaccgcattacgatgctgggttcactctcttagtgcccatgtttagcctggacggtaccgaactccagctggatcttgaatcgtgctacgcgcaggtatgcctgcccgaaatggtatgtggaacacccattcgggagatgtggcaggattgtctcggcccaccggtgccaggcgcacgcgatagcattcacaggacagaatcagaggagtcgagcaaggactggcagagttccgtagatcagccccattcttatgtgaccgaacacgaggcaccagtgtccttagaaaagtctccttcagacgtgtccgcgagtgagtctccccaacatgatgtagtcgatttgggtagcactgcccctcttaaaaccatgtcctctgatgtcaccaaagcggctgtggagagccctgtgcccaagccgtcagaagccagagaggcgtggcctactctctgtagcgctcaggttgctgcatggttttttgcaaccctggcagccgttgcagaatctttaattcccgtgcccggtgcaccaaggctggtgcatgccgcacggcatgcaggattcacaactgttcttctcgctactcccgaacccccaagacgtcttttgctgttcgatcttatccccgtcgtgtctgtcgccggatggccagaaggggctagaagccatagctgggccggtccacttgcctcagagagcgcatccttttaccttgtgcctggtggaggaacggagagaccttgcgcatcagcatggcaactctgctttgcaaggcaagagctggccctaaaggctaggatacccgctccattgctgcaggcccatgccgctgctcaggctctgctgaggccattggtggctgggaccagggccgctgcaccttatctgctgaggaccttgctgtattgggcttgtgaaagactccctgcgttgtatctcgccaggccagagaacgctggcgcatgttgcctgggacttctagacgagctagggagagtgcttgaagccggaacactacctcattacttcctgaacggacggcagttgagaacaggagacgattccgccgcacttctgggtgagttggcgagactgaggggcgaccctgcgagggccctccgcgctgcagttgaggaagctaaagttgcgagaaagggcggagggttggctggggttgggggtggggcacactag

SEQ ID NO: 244784 - DNA, 1527 bp, synthetic construct
  misc_feature 1..1527: note = Description of Artificial Sequence: Synthetic coding sequence
  source 1..1527: mol_type = other DNA
atggcgagcgcagtgtggggctcggccccttggtggggcccaccaccaccagccccagcaaggccccttactgacattgacttctgtagcggcgcacaattgcaggagctgacacagctgatccaagagctcggcgtgcaggaatcttggagcgatggcccaaagccaggcgcagacttgctgcgcgctaaggacttcgtgttttccttactcgggctcgttcatcgcagggacccgcgattcccaccccaagccgagttgctactccttaggggcggtatcagagaggggtccttggatctcgggcacgcccctctcggcccatatgcacggggaccccattacgatgccggttttactctgctcgtaccgatgttttcactggatggtaccgaactgcagttggacctggaatcatgctacgcacaggtgtgcttgccagagatggtctgcggcacccctattcgggagatgtggcaggactgtcttggacctcctgtcccaggtgcacgcgacagcatccatagaactgagtcggaagaatccagcaaggactggcagtcctccgttgatcagccccacagttatgttacagagcacgaagccccagtgtccctggagaagtccccgagcgacgtgtccgccagtgagagcccgcagcatgacgtggtcgacctcggctccacagctcctctgaagaccatgtcttctgacgtcacaaaagctgctgtcgagtctcccgtgccgaagccgtctgaggccagggaagcctggccaacactatgctctgcccaagtcgctgcttggttctttgcgacactcgcagcagtggccgagagtctcattccggtgcctggcgcacctcgtctggttcatgccgcacggcatgctgggtttactactgtgctgctggcaactcctgagcctccccgaagattgctactattcgatttgatccctgttgtcagcgtcgcgggttggcctgagggcgctagaagccatagctgggcaggacctttggccagcgagtccgcttctttttatctcgttccaggaggaggaacagaaagaccctgtgcatctgcatggcaattgtgtttcgcaagacaggaactggccctcaaagcgagaattcccgcaccactgctccaggctcacgccgctgcccaagcattgctgagacccctggttgctgggactcgggcagccgctccctatctgctcaggacactactgtattgggcctgcgagcggctgcctgctttgtatctggcccgacccgaaaacgctggcgcttgctgtctgggtctgttggatgagctgggacgtgtgttggaggctggcacacttccacactacttcttgaacggaagacagttgcgcactggggatgactccgctgccttacttggggagctggccaggttacggggagatcctgctcgggctttacgggcagcggtggaggaagctaaagtggccaggaagggagggggactcgcaggagtcggtggaggggctcattag

SEQ ID NO: 244785 - DNA, 825 bp, synthetic construct
  misc_feature 1..825: note = Description of Artificial Sequence: Synthetic coding sequence
  source 1..825: mol_type = other DNA
atgggaaaatctctgtcccatctgcccctacacagctcaaaggaagatgcttatgacggggtcactagtgaaaacatgaggaacggtttagtgaactcggaggtgcataacgaggacggacggaacggagatgtctcacagtttccctacgtcgagttcaccggcagggactcggttacctgccccacctgtcagggtaccggtcgcatcccgagaggacaggagaaccaactggtcgctctgatcccctattcggaccagagactgcggccaagaaggacaaaactttacgtgatggcgagcgttttcgtgtgcctgctgttgtccgggcttgccgtcttcttcctgtttcctaggtcaatcgatgtgaaatacatcggcgtaaagtctgcctacgtgtcgtacgacgtacagaagcggactatttatttaaatattacaaacactctcaatatcacaaataataattattatagtgtcgaggtcgaaaacatcaccgcacaggtgcaatttagcaagaccgtaatcgggaaggctcgacttaataacatcactattatagggccactcgacatgaaacagatcgattacacagtgccaaccgttatagcggaagagatgagctatatgtacgatttttgcactctgatatctataaaagttcataacatagtcctgatgatgcaggttacagtgacgacaacctacttcggacacagcgaacagatctcacaggagaggtaccaatacgtggattgcgggaggaacaccacctaccagctgggccagagtgagtatttaaacgtgctgcagcctcagcagtag

SEQ ID NO: 244786 - DNA, 825 bp, synthetic construct
  misc_feature 1..825: note = Description of Artificial Sequence: Synthetic coding sequence
  source 1..825: mol_type = other DNA
atgggcaaatccctcagccatctgccgctgcactcctcaaaagaggacgcttatgacggcgtgacatcagagaatatgaggaacggactggtaaactctgaggtgcataatgaagatggacggaatggagacgttagccagtttccctatgtagagtttactggtagggacagtgtaacgtgtcctacatgccaggggacagggaggatcccacgcggtcaggagaatcagctcgtcgccctgatcccttatagtgaccagaggttgaggcctcgccgaacaaaactttacgtgatggcatccgttttcgtatgtctgcttctgtcagggcttgccgtcttcttcctgtttcccaggtctatcgacgtgaagtatatcggcgtgaaaagcgcctacgtttcgtatgacgttcagaagcgcactatatacctgaatatcaccaatactcttaacatcaccaataataattactattctgtcgaagtagaaaatataacggcccaggtgcagttttccaagaccgtgattgggaaggctcgcctcaataatatcacaatcattggccctctggatatgaaacaaattgattacaccgtaccaacagttatagccgaagaaatgagttacatgtacgatttctgtacactgattagtatcaaagttcataatattgtccttatgatgcaggtcaccgttactaccacatattttggtcactctgaacagatttcccaggaaaggtaccagtatgttgactgcggtaggaacactacataccaactgggacagagtgagtatcttaacgtgctccagcctcaacagtag

SEQ ID NO: 244787 - DNA, 78 bp, synthetic construct
  misc_feature 1..78: note = Description of Artificial Sequence: Synthetic coding sequence
  source 1..78: mol_type = other DNA
atgggcaagagtctcagccatcttcccctgcattccagcaaagaagatgcctacgacggcgtgacatccgagaattag

SEQ ID NO: 244788 - DNA, 333 bp, synthetic construct
  misc_feature 1..333: note = Description of Artificial Sequence: Synthetic coding sequence
  source 1..333: mol_type = other DNA
atgggtaagtctctatcacatctgccattacattcatctaaggaagacgcttacgacggagtgacctccgagaatatgcgaaacgggttggtgaactctgaagtgcataacgaggatggaaggaacggggacgtgagtcagttcccctatgtggagtttaccgggagggatagtgtcacctgccccacctgccagggaaccggcagaatccctcgcggacaagaaaaccagctggtcgcactgatcccctattccgatcagagactccgacctcgacggacaaagctgtacgtgatggccagtgtcttcgtctgcctgctactgtcgggctag

SEQ ID NO: 244789 - DNA, 369 bp, synthetic construct
  misc_feature 1..369: note = Description of Artificial Sequence: Synthetic coding sequence
  source 1..369: mol_type = other DNA
atgcatggaacttttgtgattctgctccctctgtcactgattctgatggtgttcgggggaatgaccggattcctctcattcttactccaggcctatctcctgttgctgctcaccgggattctatttctcttcggcgcaatggtaacattagcgggaattagtgtgtacatcgcctacagtgccgcagccttccgagaggcactctgtttgctcgaagagaaggcactgttggaccaggtggacataagtttcggatggtctctggcactggggtggatcagcttcatagctgaactgctgaccggagctgccttccttgccgcagcgagggaactgtcccttcggcgtcggcaggaccaggccatctag

SEQ ID NO: 244790 - DNA, 570 bp, synthetic construct
  misc_feature 1..570: note = Description of Artificial Sequence: Synthetic coding sequence
  source 1..570: mol_type = other DNA
atggggcttggggctcgcggagcatgggctgcgctccttctgggaaccctccaggttctggctctcctcggggcagcccatgagtctgccgctatggcagagacactccaacacgtgccatctgaccatacaaacgagacgtcaaactccaccgtgaagcctcctaccagcgttgctagcgactcttctaacaccaccgttactacgatgaagccaaccgccgcttccaacacgacaactcctggcatggtgtctactaatatgacaagcacaactctaaagagtaccccgaaaaccactagcgtgagccagaacacgtcacaaatctcaacatcgacaatgaccgtcacccacaacagcagtgttacctccgcggcaagctccgtgaccatcactaccaccatgcacagcgaagccaagaagggctcaaagttcgataccggaagctttgtcggcggtattgtcctgactctaggagtgttgagtatcttgtatattggttgcaagatgtactatagcaggagagggattcggtatcggaccatcgacgagcacgacgctatcatctag

SEQ ID NO: 244791 - DNA, 627 bp, synthetic construct
  misc_feature 1..627: note = Description of Artificial Sequence: Synthetic coding sequence
  source 1..627: mol_type = other DNA
atggggttgggggcacgtggcgcatgggcggcacttcttctggggacactgcaggttcttgccctcctaggggctgcacacgagtcggccgcaatggcggcatctgccaatatcgaaaactctgggctgccccataattcctcagccaatagtacagagaccctccaacatgtgccctcagaccataccaacgaaacttctaattcaactgttaagccaccaacttctgtggcttcagacagctcaaacaccaccgtgactactatgaagcccaccgcagcctccaatacgactacgccgggaatggtaagcacaaatatgacgtctactacactcaagtccacccccaagaccacgtcagtgtcccaaaatacctcccagatcagcacttctaccatgaccgtaactcacaattcaagcgtcacttcagccgctagttccgtaactataaccaccacgatgcatagcgaagccaagaaggggtctaagtttgatactggaagtttcgtcgggggtattgtgctcaccctgggcgtgttatccatcctgtacatcggttgtaaaatgtattactctcgaagggggatcagatacaggaccatcgatgaacatgatgcaattatttag

SEQ ID NO: 244792 - DNA, 588 bp, synthetic construct
  misc_feature 1..588: note = Description of Artificial Sequence: Synthetic coding sequence
  source 1..588: mol_type = other DNA
atggagaatcataaatctaacaataaagagaatatcaccatagtcgacatctcacgaaagattaatcagctgcccgaagctgaacggaatctattggaaaatggaagcgtctatgtaggccttaacgcggcactctgcgggcttattgcgaattccctgtttcggcgaatattgaacgtgacaaaggcgagaatcgccgcaggacttccaatggctggtattccatttctcacgacagacctcacatatagatgcttcgtgagttttcccctgaatactggcgatctggactgtgagacatgcaccattacaaggagcggcctcacagggctagtcataggcggtctttaccccgtcttcctggccatccccgtgaatggtggcctggccgcacgataccagtccgcactcctgccccataagggaaatatcctatcgtattggatccgaacatccaaacccgtgtttaggaagatgttgtttccaattctgctgcaaactatgttcagcgcctatctcggcagtgagcagtataaactgctgatcaaggcgctccagctctctgaacccggaaaggagatccattag

SEQ ID NO: 244793 - DNA, 378 bp, synthetic construct
  misc_feature 1..378: note = Description of Artificial Sequence: Synthetic coding sequence
  source 1..378: mol_type = other DNA
atggccggtatcccctttctgacaaccgatctgacttatcgatgctttgttagcttcccccttaacacaggagacctggactgtgaaacgtgtactattactcggtccggcctcaccggcctggtcatcggaggtttgtaccccgtgttcctcgctatcccagtgaacggaggtcttgctgctcgataccagagcgcactgttgcctcacaagggtaatatcttatcctattggatacgaacttctaaacctgtcttccgtaagatgctgttcccaatacttctccagacaatgttctccgcctacctgggctcagagcaatacaaattgctgataaaagccttgcagctgtcagaacccggtaaagagatccattag

SEQ ID NO: 244794 - DNA, 489 bp, synthetic construct
  misc_feature 1..489: note = Description of Artificial Sequence: Synthetic coding sequence
  source 1..489: mol_type = other DNA
atgttacagactagcaattactctttggtgctctcattgcagttcctcctgctttcctacgatctctttgtcaatagcttctctgaactgttgcagaagacacctgtgattcagctcgtcttgttcatcatacaggatattgccgttctcttcaatataattatcattttcttgatgttctttaatacgttcgtatttcaagcgggtctcgtcaacctcctgtttcacaaatttaaaggaaccattattttgactgcagtatacttcgcactgtcgatttctctacatgtgtgggttatgaatttgcggtggaagaatagtaattcattcatctggaccgacgggctgcagatgctctttgtatttcagcggttggccgctgtcctctattgttatttttacaaaaggaccgctgttcgcttaggagacccccacttttatcaggacagtctatggctgagaaaggaattcatgcaggtaaggcggtag

SEQ ID NO: 244795 - DNA, 318 bp, synthetic construct
  misc_feature 1..318: note = Description of Artificial Sequence: Synthetic coding sequence
  source 1..318: mol_type = other DNA
atgctgcagacttccaactatagcctcgttctcagtctgcagtttctgctattaagctacgatttgttcgtgaactcttttagtgaacttctgcaaaagactcccgtgatccagcttgtgctatttatcatacaagatattgctgtgctttttaacatcatcatcatcttccttatgttctttaacacctttgtgtttcaggcagggctggtaaatctgctgttccacaagttcaagggtaccatcattttgaccgccgtgtacttcgcgttgagtattagtctgcacgtttgggttatggtcagggttgctgtatag

SEQ ID NO: 244796 - DNA, 1140 bp, synthetic construct
  misc_feature 1..1140: note = Description of Artificial Sequence: Synthetic coding sequence
  source 1..1140: mol_type = other DNA
atgccccacagctcattgcatcccagtattccctgtcctcggggacatggagcccagaaggctgcgctggtgctgctgagtgcgtgtttggtcacactatggggcctaggcgaaccaccagaacacactctgcgttatctggtgcttcacttagcaagtttgcaacttggccttctgctcaatggagtgtgttccctcgcagaggagctccgccacatacactcacggtacaggggctcctattggcgaaccgttcgggcatgtctgggttgcccgctgaggagaggggcacttttacttctgagcatttatttttattattcccttccaaatgccgtgggaccgcctttcacttggatgctcgctctcctgggactgagtcaagccctgaacatcttgctgggacttaagggccttgctcccgctgagataagtgctgtttgtgagaagggaaactttaacgtggcacacggattagcatggagctactacatcggatatctccggctgattctgccagagctgcaggcccgtatcagaacctacaaccagcactacaataacctgctgaggggtgcagtgtcccagcggttatatatccttttgcccttggactgcggggtgccagataatcttagtatggctgatcccaatatccgcttcctggacaagctcccccaacagacgggtgaccatgctggaatcaaagacagagtgtactctaattctatatatgaattattggaaaatgggcaacgagcaggcacttgtgtgctggagtatgccaccccactgcagacactcttcgccatgtcccagtactcacaggccggattttctcgtgaggatcgattggagcaggcaaaactgttctgtaggacactggaagatatcttagcggatgctcctgagagccaaaataattgccggctgattgcataccaggagccagcggacgattcgtccttctccttgagccaggaggttctacgccatcttcggcaagaggaaaaagaagaggttacagtcggctcactcaaaacttccgctgtcccttcaacttctacgatgtcccaggagccagaactccttatctcggggatggagaaacctctgcccctgcgaacagatttttcgtag

SEQ ID NO: 244797 - DNA, 762 bp, synthetic construct
  misc_feature 1..762: note = Description of Artificial Sequence: Synthetic coding sequence
  source 1..762: mol_type = other DNA
atgccccattcttctctgcatccatcaattccttgtccgaggggacacggggcacagaaagcagccttagtgctgcttagtgcttgtttggtgacgctctggggcctgggggaacccccagagcataccctgagataccttgtcctgcacctggcaagcctgcagctaggtctgttgctaaacggcgtttgtagtctggccgaggaactgcggcacatccactcgcggtatagagggagctattggcggaccgtcagggcatgtctcggctgccctctgaggaggggcgctctcctcctcctgagcatctacttctactattccttacctaacgccgttggcccaccttttacttggatgctcgcccttctgggtttgtcccaggcccttaacatcttgctcgggctgaagggtctggctcccgcagaaattagtgcagtgtgcgagaagggaaactttaacgtcgcacacggactcgcctggtcttactatataggatacctgcgactcatattacctgaattgcaagccaggatccgcacgtacaaccaacattataataacttgcttcgtggcgctgtgagccaacggctttatatcttgttgccactagattgtggagtgcccgataacctatctatggccgatccgaacatccggttcttagacaaactaccccaacagactggagatcacgccggtattaaggaccgagtctattctaattcaatctatgaattattagagaacgggcagagatag

SEQ ID NO: 244798 - DNA, 423 bp, synthetic construct
  misc_feature 1..423: note = Description of Artificial Sequence: Synthetic coding sequence
  source 1..423: mol_type = other DNA
atgccttctgctttctccgtttcttcctttcccgtgtcaattcccgctgtgctgacccagacagactggactgagccctggcttatgggcttggcaacttttcacgccctgtgcgttctgctgacgtgcttaagtagccgcagctaccgcctgcagatcggccactttctgtgtttggtcatcttagtttattgtgcggagtacatcaacgaagcggctgctatgaattggcggctgttctctaaataccaatactttgactctagggggatgtttatctctatagtgttctccgcgccactgttggtgaacgcaatgattatcgtcgtgatgtgggtctggaaaactctcaacgtcatgaccgatctgaaaaatgcgcaggaaaggcgaaaggagaaaaagcggaggaggaaggaggattag

SEQ ID NO: 244799 - DNA, 384 bp, synthetic construct
  misc_feature 1..384: note = Description of Artificial Sequence: Synthetic coding sequence
  source 1..384: mol_type = other DNA
atgcttagtggctatctccagacagactggaccgaaccatggctgatgggcctcgcaacttttcacgccctgtgcgttctgctcacgtgcctgtcatctcgcagttataggctgcagattgggcactttctctgcctggtgatcttggtctactgcgcagaatacattaatgaggcagccgcaatgaactggcggctgttttctaaataccaatattttgacagtcgaggcatgtttatttctattgtcttctccgccccactcctggtcaatgcgatgatcattgtggttatgtgggtgtggaagactctcaatgtgatgacagatctgaagaatgctcaggaacggcgaaaggagaaaaaacgaaggcggaaggaggattag

SEQ ID NO: 244800 - DNA, 1560 bp, synthetic construct
  misc_feature 1..1560: note = Description of Artificial Sequence: Synthetic coding sequence
  source 1..1560: mol_type = other DNA
ggaccagcacagcgtgcctcatcccccatcccaagcgcagggcgtcgagagggtgctcaggctgcaacacagagagtggaaaggagagatagggaccctggtggttgtgccgcatggacaccaagcacactgcccctttcccctcgcagcgctgcctccagcagtacctgcgccggagggtgcgggaagaggactgcttcctctagacggactagccgtccgagccgcatgacagctacaaccgggcctaaggttatccagacttccgctgctaactttagtctgaacaattccaagaaactgaaacctatccaaatactgagcaaccccctctctacatacaatcagcagctttggctgacctgcgtggtggagttggaccagtccaaagagacttcaatcaaaaccagcttccctatgactgtcaaagtggatggtgtggcacaggatggaacaaccatgtatatccacaataaggttcataatagaacgaggactctcacctgtgctggtaaatgcgccgagattatagtggcacatctcggttatctcaactacacccagtatacagtgatcgtgggatttgaacacctcaaattgcctatcaaaggcatgaattttacctggaagacttacaatcccgctttctcgagacttgaaatatggtttagattcttttttgttgttcttactttcatcgttacctgcctgttcgctcactccctgaggaagttcagtatgagggactggggcattgagcaaaagtggatgtcagttctgcttcccctgctgttactttacaatgaccctttctttccactcagctttctcgttaattcctggctgccagggatgcttgatgacctgtttcaaagcatgttcttgtgtgccctcctgctgttctggttatgcgtgtaccatggtatcagagtccaaggtgagagaaagtgtctaactttttatctacctaaattcttcatcgtaggactcctttggctggcttctgtgacactcgggatatggcagacggtgaacgagttgcatgacccaatgtaccagtatagagtcgatacaggcaatttccagggcatgaaagtgttcttcatggttgttgcggctgtatatatactgtacctgctgttcctgattgtgagagcgtgttccgagttgcgacatatgccttacgtggatcttcggctgaagttcttaaccgccctaacctttgtggtgcttgtgatatccatcgccatcctgtacctgagattcggtgcccaggttcttcaagacaatttcgttgcggaactttcaacccactatcagaagcccgctgaattcctgtcattctatgggctcctgaatttttatctttatacactagcctttgtgtattccccatccaaaaacgccctatatgagagccaactaaaagataatcctgcattctctatgctgaatgacagcgacgacgacgtgatctatgggtctgactatgaagaaatgcccctgcagaatgggcaggcaatcagggcgaaatataaggaagagtccgattctgattag

SEQ ID NO: 244801 - DNA, 1839 bp, synthetic construct
  misc_feature 1..1839: note = Description of Artificial Sequence: Synthetic coding sequence
  source 1..1839: mol_type = other DNA
atgggggcagctccctctcccacacaggcatcttcccgtggcggtggtccaggccctcccgcaccaacccgcgctgtttccagtagctcccgcgctcggggaggggcactgtcggcactgggaccaagtcctgccaggcctctgacaacgtccccagcaccagcaccacccccaagaagtcgccctgcccgacagcagcctgacccacagtgctgggaaaaaagagggggtgcaggcggagatacgaagggaggggcagccggaccagggcctggaagacttagaggtatggacgcagagtatcctgcatttgagccacctttgtgctccgagcttaaacacctctgtaggagattgcgggaggcctaccgagaactgaaggaagacctgaccccatttaaggatgaccggtattataggctcgccccaatgcgcctgtatacactctccaagcggcactttgtcctcgtttttgtcgtcttctttatatgttttggtttaaccatttttgtaggaatccgcggtcccaaagtgatccaaacttccgccgcaaatttttccttgaataatagcaagaaattaaagcccatccagatattatccaaccctctgagcacctataatcagcaactttggctaacctgcgtggttgagctggaccagagcaaggagacttctataaaaacgtccttccccatgacagtgaaggtggatggcgtggctcaggacggcacgaccatgtacattcacaacaaagttcacaatagaacacggacactgacctgtgctggaaagtgcgcagagatcatcgtggctcatttgggttacctgaattacacccagtacaccgttattgtgggttttgaacacctcaagttgcccatcaagggcatgaacttcacatggaagacttacaatcctgcctttagcaggctggagatatggttcaggttcttcttcgtcgtgctcactttcatcgtgacttgcctcttcgcacattcactgcggaaattttctatgagagactggggcatcgaacaaaagtggatgagtgtgcttctaccgctgttgttactgtacaacgacccatttttccctcttagctttctggtcaactcgtggctgcccggaatgctggacgacctgttccaatccatgtttctgtgcgcattgctgttgttttggctgtgcgtctatcatggaatcagggttcagggagaaagaaagtgtcttacgttctacctgccaaagttcttcatcgtcggcctcctttggcttgcctccgtgactctgggaatctggcaaacagtcaatgaacttcatgaccctatgtaccaataccgggttgacacaggtaacttccaggggatgaaggtgttctttatggtcgtggcagcggtgtatatcctgtatcttctttttctcatcgtccgcgcttgtagtgaacttcgccacatgccatatgtggacctgcggctgaagttcttgaccgcgctgactttcgtggttttggtgataagcatcgctattctatacttgaggtttggtgcccaggtactgcaggacaactttgtggctgaactttctacacactaccagaacagcgccgagttcttgagcttttacggccttttgaatttttatctctacactctagccttcgtttattcaccctccaagaacgcattatatgagagccagctcaaggataacccagcattctctatgttgaacgactccgacgatgacgtgatctatggaagcgattatgaggagatgccattgcagaatgggcaggctatcagggccaagtataaggaggaatctgacagcgactag

SEQ ID NO: 244802 - DNA, 1317 bp, synthetic construct
  misc_feature 1..1317: note = Description of Artificial Sequence: Synthetic coding sequence
  source 1..1317: mol_type = other DNA
atgccctgtacgtgtacatggcgaaactggcgccaatggataagacccctggtcgccgtgatctacctcgtgtctatcgtcgtggctgtgcccctctgcgtctgggagctgcagaaactcgaggtcggtatccataccaaggcatggttcattgccggaatcttccttctgctgaccatccctatcagcctatgggtcatcttgcagcatttagtccactacacacagccggaactgcaaaaacccatcatcaggatcctctggatggtgccgatctacagcttagacagctggatcgcccttaagtacccgggtattgccatctacgtggatacgtgtagagagtgctacgaggcttatgtcatttacaacttcatgggcttcttgaccaactacttgacaaaccgttatcccaaccttgtgctaattctggaggccaaggatcagcagaaacacttccccccattgtgttgctgtccaccctgggcaatgggggaagttctactgttcagatgcaagctcggcgtgctgcagtatacagttgtccgcccattcaccacaatagtagccctgatctgtgaacttctggggatttatgatgaaggcaatttttcttttagcaacgcttggacttatctcgttatcatcaacaacatgagtcagcttttcgctatgtactgccttcttcttttttacaaggttctcaaggaggagttaagccctattcagcctgtaggaaaatttctatgcgtgaaactcgtagtctttgtgtctttctggcaggctgttgtgatagctctcctcgttaaggtgggtgttatatccgagaagcacacgtgggagtggcagacggtcgaagcagttgcaacgggacttcaggatttcattatttgcatcgagatgtttttggccgctattgcccaccactatactttctcttataaaccctacgtgcaggaagccgaagaagggtcgtgtttcgactccttcctggccatgtgggacgtgagtgacattagagatgacatcagcgagcaggttaggcacgtcggacggaccgtgcgcggacaccccagaaaaaaactattcccagaggaccaggaccagaacgaacatacgtcactgctcagtagttctagccaagacgcaatctccattgcctctagcatgccccctagcccaatggggcattaccagggctttggtcacactgtaacacctcagactacaccaactacagccaaaatttcagacgaaattctgagtgatacaataggcgaaaaaaaagaacccagcgataaatctgtcgactcatag

SEQ ID NO: 244803 - DNA, 4152 bp, synthetic construct
  misc_feature 1..4152: note = Description of Artificial Sequence: Synthetic coding sequence
  source 1..4152: mol_type = other DNA
atgtatgccacagacagtaggggtcactcccccgcatttctccaaccccagaatgggaacagtagacacccatctggatatgtgcctgggaaagtcgttccattacgcccacccccaccccctaagtctcaggcctctgcaaaattcacatcaatccgtcgcgaggacagagctacatttgcattttctccagaagaacagcaggctcagcgggagagccagaagcagaagcgccacaagaatacatttatctgctttgccatcaccagcttcagtttctttattgccttggccataattctgggtatctcaagtaaatatgcgcctgatgagaattgcccggatcaaaacccacgcctgcggaactgggatcccggtcaggatagcgcaaaacaagtggtgatcaaggagggcgacatgctaagacttacgagtgacgccacggtgcactcaatcgtaattcaggacggagggctgctggtgtttggcgataataaggatggttcacgaaatattactctgcggacacattacattctaattcaggatggtggggcactacacatcggagcggaaaagtgcagatacaaatctaaggcaaccatcactctgtatgggaagagcgacgagggtgagtcaatgccaacctttggcaaaaagttcataggcgtagaagcagggggaaccttggagctgcacggcgcacgcaaggcatcgtggaccctgcttgccaggactcttaactcctcaggcctgcccttcgggtcctatacgttcgagaaggacttctcaagaggccttaacgttagggtaatcgaccaagacactgcgaaaatcctcgaatctgagaggttcgacacgcacgaataccgaaatgagagtcggagactccaggaatttttgcggtttcaggacccaggacggatcgtggctatcgcagtaggcgacagcgccgctaagtctctcctacagggcactatacagatgattcaagagcgcctgggaagcgaactaatccaggggctggggtaccgtcaggcctgggcactcgtgggcgttatcgatggcggatctacatcgtgtaacgagtctgtgaggaattacgagaatcacagttccggaggcaaagctcttgcacagagagaattttatacagtggacggtcaaaaattttccgtgaccgcatatagcgaatggatcgaaggggtttctctgagcggctttcgagttgaggttgtagacggcgtcaagctgaatctgctcgatgacgtttcctcgtggaaacccggtgatcagatagtggtggcatctaccgactattccatgtatcaggccgaggagtttacactgttgccttgtagtgaatgcagtcacttccaggttaaggtgaaggagactccacagttcctgcatatgggggagataattgatggagtggatatgagggctgaggtcggcatcctgacgaggaacatcgtgatccaaggcgaggtggaggactcctgttatgcagaaaaccaatgccagttttttgattacgatacatttgggggacacataatgatcatgaaaaacttcacaagtgttcatctgagctacgtcgagctcaagcatatggggcagcagcagatggggagatacccagtgcatttccacttgtgcggcgacgtggattacaaagggggataccggcatgccacattcgtcgacggcctctctatccatcattccttctcaaggtgtatcacagttcatgggaccaatggtctgctgattaaggacacgattggcttcgacacacttggccactgctttttcctcgaggatggcatcgagcaaaggaacaccctgtttcataacctaggactcttaactaagcccggaaccctattgcctaccgataggaacaattctatgtgcacgactatgcgggataaagtgttcggtaactatatcccagtgcctgcaacagattgtatggccgtgagcacattctggattgctcatcccaacaacaacttgattaacaacgctgctgctggctcacaagatgccggaatctggtatctgttccacaaagagccgacaggggagtcatccggtctgcaactgctggccaagcccgagctaacacctttggggattttttataataatcgggtgcatagcaacttcaaggctggcttgtttatcgataagggagttaagacaacaaattcttccgccgcagacccacgcgagtacctgtgcctagacaattccgctcgcttcaggcctcatcaagacgccaacccggagaaacccagggttgcagccctgattgaccggctgattgcattcaagaacaacgataacggcgcttgggtccgcggaggcgacattattgtgcagaatagcgccttcgccgacaacggtatcgggctaacatttgcatctgacggcagcttcccatcagatgaagggtcaagccaggaggtttcggagtccctgtttgtcggcgagtcgcgcaattacggctttcaggggggacagaataagtatgtaggtaccggcggaatagatcagaaacccagaaccctcccacgtaatcgcacatttccaatccggggattccagatttatgatggcccaatccacctgacaagatctacgtttaagaaatacgtgcccacaccagatcgatattcatctgccattggtttcctgatgaagaacagttggcagatcacacccagaaacaatatatcgctggtaaaattcggtccacacgtgtcactcaacgtgttcttcggcaagccagggccttggttcgaggactgcgaaatggatggcgataaaaactcgatcttccatgatatagacggatccgtcacgggctacaaggatgcttacgtcgggaggatggataactacctgatccgacatccgtcttgcgtgaacgtatctaaatggaacgccgtgatctgtagtggtacgtacgcacaagtttatgttcagacgtggagcacccagaacctttctatgactattacgagagatgaatatccatccaaccctatggtgttgcgcggaatcaaccagaaagcagctttcccccagtaccagccagtcgtcatgttagagaaagggtacacaatccattggaacggacccgctcctcgcactacctttctgtacctggtgaactttaacaaaaacgattggattcgtgtaggattatgctaccccagtaacacaagtttccaggtgacttttggatatctgcagagacagaacggttccctgtctaaaatcgaggagtacgaacccgtgcacagcctagaggagcttcagcggaaacagagcgagcgcaaattttacttcgactcctctaccgggctcttgttcctgtacctgaaggcaaaatcgcaccgccacggccatagctactgttcctctcagggctgtgaacgggtgaaaatacaggccgctactgacagcaaggatatcagtaattgtatggcaaaggcttatccacaatactatcggaagccaagcgtcgttaaacgcatgcctgccatgctcaccggattgtgtcaaggatgtggcactcggcaagtggtgtttacttccgaccctcacaaaagttatttaccagttcaatttcagagcccagacaaggccgagacacagagaggagacccatcggtcatctcagtgaacggaactgacttcaccttcaggtcagccggtgttctgctgctcgttgtggacccttgttccgtcccatttaggctgactgagaaaacggttttccctttggccgatgtcagcaggattgaagagtatctcaaaacgggaatcccacccaggagcattgtacttttatccacacggggtgagataaaacagctaaacatctctcacctgctggttcctctcggcctggctaaacctgcccacctgtatgacaaagggagtaccatctttcttgggtttagcggaaatttcaagccatcgtggacaaaactctttacgagtcccgctggccaggggcttggtgtgcttgagcagtttattcccctgcagctcgacgagtacggctgccctcgggctactactgtgaggcgaagggacctggagctgcttaaacaggcctctaaggctcactag

SEQ ID NO: 244804 - DNA, 3963 bp, synthetic construct
  misc_feature 1..3963: note = Description of Artificial Sequence: Synthetic coding sequence
  source 1..3963: mol_type = other DNA
atgtacgccaccgattcacggggacactcccccgcattcctacaaccccagaatggtaactcacgacatcccagcgggtatgtgcctggcaaagtagttccactgaggcctcccccacccccaaagtctcaggccagtgccaagttcactagtatacgcagagaagatcgagccacctttgcattctctccagaagaacagcaggcccagagagaaagccagaagcagaagcgacacaagaatacattcatctgcttcgccataacctcattcagttttttcatcgccctcgctataatcctggggatttcttccaagtatgcccctgatgaaaactgtccagatcagaatccccgtctgcgcaactgggatcccggtcaagacagcgcaaaacaggtggtgataaaagagggagacatgttgcggctcacctccgacgcaactgttcattcgatagtcattcaggacggcggtctgctggtgtttggggacaacaaagacgggagccggaacatcacgcttcgaacccactatattctgatccaggacgggggagcgctccacataggagcagaaaagtgtaggtataaaagcaaagcaaccattacactctatgggaaatcagatgagggcgagtccatgcctaccttcggtaagaaattcatcggagtcgaagccggaggcaccctggaactgcacggcgcacgcaaagcttcatggacgctgctggccaggactcttaacagctcaggtctgcccttcggctcctacacttttgaaaaggattttagcagaggcctgaatgtgagggtgatagaccaagatactgctaagattcttgaatcggagaggtttgatacacacgagtaccggaatgaaagccgcagacttcaggaatttctgcgcttccaggatcctggtcggatcgtggcaatagcagtcggcgattccgcagccaagtccttactgcaggggaccattcagatgattcaggaacgcttgggatccgagctgatccagggtctcggctacaggcaggcctgggctctcgtgggcgtgattgacgggggatctactagctgtaacgaatccgtgagaaattatgagaatcactccagtggcggtaaggcactggcgcagagggagttttacacagtcgatggccagaaattttctgttacagcttacagcgagtggattgaagaaaccccacagttcttgcacatgggcgaaatcatcgacggagttgacatgcgggcagaagttgggattttaacaagaaatattgttattcagggagaggttgaggactcttgttacgccgaaaatcaatgccagttcttcgactatgatacctttggtggccacatcatgatcatgaaaaacttcacgtcggtgcacctttcttatgtggagctgaagcatatgggacagcagcagatgggtcgttacccagtgcactttcacctttgcggcgatgttgactacaaaggtggctatcgtcacgccacgttcgtcgatggtctctctattcaccacagtttttccagatgtatcactgtacatggcacaaatggactcctgattaaagatacgatagggtttgatacactgggacactgcttcttcttggaagatggaattgagcagagaaatacactgtttcacaacttaggcctccttaccaagccagggactctcctacccacggacagaaacaattccatgtgtactaccatgcgggataaagtgttcggaaactatatcccagtgcccgcaacggattgtatggccgtttccacattctggatagcccaccctaacaacaacttaatcaataacgcggctgccggatcgcaggacgcaggcatctggtacctcttccacaaggagccaacaggagagagctcgggactgcagttgctagccaagccagaattgacaccactgggtatattttacaacaacagagttcattccaattttaaggcaggcctgttcattgataaaggggtcaaaaccaccaatagttctgcggcagacccccgagaatatctgtgtcttgacaattcagcaagatttaggccgcaccaagatgccaatcctgaaaaaccgagagtcgccgctctcattgacagattgattgcgttcaagaacaatgataatggggcttgggtccgcggaggcgatataatagtgcagaatagcgcttttgcggacaatggaatcggcctgacctttgccagtgatggatcgtttccaagtgacgagggctcttctcaggaagtgtcggagagtctgtttgtcggagagtccagaaattacggctttcaggggggacaaaataagtatgttggcactggtggaatcgatcagaagcctaggacgttgcctagaaacagaaccttccccatcaggggtttccagatttatgacggaccaatccatttaactagaagtacttttaaaaaatatgtgccgacgcctgatagatactctagtgctattggctttctaatgaagaacagttggcaaatcaccccacggaacaatatctctctggtgaagttcggtccacatgtgtctttgaatgttttcttcgggaaacctggaccctggtttgaggactgcgagatggatggagataaaaattctatttttcatgatattgacggctccgtgacggggtacaaggatgcctacgtgggcagaatggacaactacctcatacgccacccctcctgtgtcaacgtcagcaaatggaacgccgtcatatgttccgggacatatgcccaagtgtacgttcaaacatggagtacccagaatctgtcgatgacaatcacccgagacgaatatccttctaatcccatggttttaagagggattaatcaaaaggcagcgttcccgcagtaccagcccgtggtcatgctggagaaagggtacaccatccattggaacggcccagctcccaggacgaccttcctgtatttggtgaacttcaacaaaaacgattggatcagagtcgggctgtgctacccctccaacacctcctttcaggtcacgttcggctatctgcagcgacaaaacgggagcctttccaaaatcgaggagtatgaacctgtccatagtctagaagaactacagaggaagcagtccgagcgaaaattttactttgattctagcacaggcctgctgtttctgtatcttaaggctaagagccatcgtcacgggcacagctactgcagctctcagggctgtgagcgcgtgaagatacaggccgcaactgactccaaggacatcagtaactgcatggccaaggcctatccacagtactacagaaagcctagtgtcgtgaagaggatgcccgcaatgctgaccggattatgccaaggatgtggcacaagacaggtcgtcttcaccagcgatccccataagtcgtatctgcccgtgcagtttcagtctccagataaagcagaaactcagagaggggacccatcagtgatttcggtgaatgggaccgactttactttcaggtcagcaggcgtcctcctgttggtcgtcgatccctgctctgtgccctttaggcttactgagaagactgtctttccattagctgacgtctcacggatcgaagagtacctaaagacagggatccctcccagaagtatagttctcctaagcacaagaggtgagattaagcagttgaacattagccacctgctcgtaccgttggggctcgccaagcctgcacatctttacgataagggctcaacaatcttcctggggtttagcggaaatttcaagccctcttggacgaagttatttaccagcccggctggtcaagggctgggggtcctggaacagttcattccgttgcagttggacgaatacgggtgtccgcgagcaactaccgtgagaaggcgggacctcgagctgctcaagcaggcatcaaaagcccattag

SEQ ID NO: 244805 - DNA, 1131 bp, synthetic construct
  misc_feature 1..1131: note = Description of Artificial Sequence: Synthetic coding sequence
  source 1..1131: mol_type = other DNA
atgaccattactcgtgacgaatacccatccaacccaatggttctgcgagggatcaaccagaaagccgcattcccgcagtaccagccagtggtaatgctggaaaaaggttacactattcattggaacggcccagcacccagaaccacctttctctacctcgtcaattttaacaagaatgattggatccgggtaggcctttgctacccgagtaatacctctttccaggtgacatttggttaccttcaaaggcagaacgggagtctctcaaagattgaggagtacgaacccgtacactcccttgaggagctccagcggaagcagtcagaaagaaagttctattttgactcctctactggactgttattcttgtacttaaaagctaagagccaccggcacggccacagctattgttccagccagggttgcgagcgcgtgaaaattcaggccgctactgattcaaaagatatctcaaactgcatggcaaaggcatacccgcagtactaccgaaaaccttctgtagtaaagcgcatgcccgctatgctcactggcttatgccaggggtgtggcacacgccaggtggttttcacatctgacccgcataagtcatacttacccgtgcaatttcagagccctgataaagctgaaacccagcgcggtgatccatcagtgataagtgtcaacgggacggactttacgttccgatcagcaggggtacttctgctggtcgttgatccctgcagcgttcctttccgtctgaccgagaagactgtctttccccttgctgacgtctctcgcattgaggagtatctcaagacaggcatcccgcctaggtcaatagtgttgttgtctactcggggagagattaaacagctgaacatttctcatctgctggtccctttaggcctggccaaaccagctcacctgtatgataaaggcagcactatcttcttaggcttttcaggcaatttcaaaccaagctggacgaaattgtttacctccccagccggacaagggcttggggtcttggagcagttcattcctctgcaactagatgagtacggatgccctcgggctactactgttcgacggcgtgaccttgagttgttgaagcaggcaagcaaggcgcattag

SEQ ID NO: 244806 - DNA, 57 bp, synthetic construct
  misc_feature 1..57: note = Description of Artificial Sequence: Synthetic coding sequence
  source 1..57: mol_type = other DNA
atgtacgctaccgattccagagggcattctcccgcatttcttcaaccccaaaactag

SEQ ID NO: 244807 - DNA, 570 bp, synthetic construct
  misc_feature 1..570: note = Description of Artificial Sequence: Synthetic coding sequence
  source 1..570: mol_type = other DNA
atggaggaggggggaaacttgggtgggctgatcaaaatggtccatcttctcgtcctgagcggcgcatggggcatgcagatgtgggtgacctttgtgtctggcttcctattgtttagaagcctcccgagacatacctttgggctcgtgcagtccaaactcttccctttctactttcacatctccatgggctgcgccttcatcaatctgtgtattctagcctcgcagcatgcatgggcacaacttaccttctgggaggccagccagctctatctcctcttcctctcactcactctggcaaccgtcaacgctcggtggcttgaacccagaacaacggcagctatgtgggctctccaaactgtggagaaggaaagggggctcggcggagaagtgcccggatctcaccaggggcctgacccataccggcagttacgggagaaagatccaaaatactctgcactgcgccagaatttcttcagataccacggcctgtcctccctctgcaatttaggatgtgttctgtcaaatggactatgtcttgctggcctggccctggaaattagatctctctag

SEQ ID NO: 244808 - DNA, 570 bp, synthetic construct
  misc_feature 1..570: note = Description of Artificial Sequence: Synthetic coding sequence
  source 1..570: mol_type = other DNA
atggaggagggtgggaatttgggaggattaataaaaatggtccatctgctcgtgctctctggggcatgggggatgcaaatgtgggtgacatttgtgtctgggttcctcctttttcgatccttgcctcggcatacgttcgggctggtccaatccaaattattccccttttattttcacatcagtatgggctgtgccttcattaacttatgcattttagctagccagcatgcctgggcacagctgacattttgggaggcctcccagttatatttgcttttcttatcattgaccttagcaaccgttaacgccaggtggctggagccgaggaccacagccgcaatgtgggctttgcagaccgttgagaaggagcggggtcttggaggggaggtgcccggttcccatcagggtcccgacccatacagacagcttagagagaaagacccaaagtatagtgcgctacggcagaatttttttaggtatcatggtctgagttctctgtgtaatctagggtgtgtgctgtccaacggcctttgccttgccggtctggccctggaaattcgttctttgtag

SEQ ID NO: 244809 - DNA, 570 bp, synthetic construct
  misc_feature 1..570: note = Description of Artificial Sequence: Synthetic coding sequence
  source 1..570: mol_type = other DNA
atggaagaggggggtaacctcggcggattgataaagatggtgcacctgctcgtcctgtctggagcgtgggggatgcagatgtgggtcactttcgtcagcggtttcctgctgtttcgttccctgcctcggcacacctttgggctggttcaatccaaactgttccctttctattttcacatcagtatgggatgcgcgtttatcaacctgtgtattttggcctcccagcatgcgtgggctcagctgaccttttgggaggccagtcagctgtacttattgtttctgagcttgaccttagctacagtgaatgcacgatggttagagccccgtactactgcagcaatgtgggccctgcaaacagtggaaaaagagcggggtttgggtggagaggttcctgggagtcaccagggaccggacccctaccggcagctgcgcgagaaggaccccaaatattcagcccttcgtcagaatttcttccggtaccacgggctgtcttcactgtgtaacttgggttgtgtacttagtaatggcctgtgccttgcaggcttagccttggagattaggagtctgtag

SEQ ID NO: 244810 - DNA, 447 bp, synthetic construct
  misc_feature 1..447: note = Description of Artificial Sequence: Synthetic coding sequence
  source 1..447: mol_type = other DNA
atgctcccgaggggcctaaaaatggctcctcggggtaagcgtttatctagcaccccccttgaaattcttttctttctgaatgggtggtacaacgctacctacttcctgctggagctctttatttttctatataaaggtgtcctgctcccttacccaacagcaaatctcgtcctggacgttgtgatgctgctgttgtacctgggtattgaagtcatccgtctgtttttcggcacaaaggggaacctgtgccaacgcaagatgccgctgtctataagcgtcgccctcacttttccgtcagctatgatggcctcatactacttactgctccagacttatgtgctcagactggaggcaataatgaatgggatcttgctgttcttttgtggctcagagctccttttggaggtccttaccttagctgccttttcatctatggatcggatttag

SEQ ID NO: 244811 - DNA, 438 bp, synthetic construct
  misc_feature 1..438: note = Description of Artificial Sequence: Synthetic coding sequence
  source 1..438: mol_type = other DNA
atgctcccccgtgggctcaagatggctccgagaggcaaaagactaagcagcacaccactagagattttattctttctcaacggatggtataacgccacctacttcttactggagctgtttatcttcctctacaaaggcgttttgctcccttaccctacagccaatctcgtcttagatgtagtcatgctgctgttgtatttgggcattgaggtaatcaggctattcttcggtaccaagggaaatctgtgtcagagaaagatgcccctgtcaatctcagtggcactgacctttcccagcgcaatgatggcatcttattacctgctgcttcaaacatatgtgctgcggctggaggctataatgaacggcatactgctgttcttctgcggatcagagctgctccttgaagttcttacactagcagccttttctcggatctag

SEQ ID NO: 244812 - DNA, 942 bp, synthetic construct
  misc_feature 1..942: note = Description of Artificial Sequence: Synthetic coding sequence
  source 1..942: mol_type = other DNA
atgaggacagattccggagccaggctggaagaggggcatctgcgccctccgagagccctacctccagtaccctcaatcgatgatattcctctgagccggcctaaaaagaaaaaaacccagcctgctgaactccagtacgcgaacgaactgggagtggaagacgaggatattataactgatgagcagactacagttgagcaacagtcggtgttcacagcgccaacggggataagtcagccagtcgggaaagtgtttgtggagaagagtcgcaggttccaggccgctgatagaagtgagctgatcaagactactgagaacattgacgtatcaatggacgtcaagccgagctggaccactcgggacgtggccctcacagtgcatagagccttccggatgattggcctattttctcacggatttcttgcagggtgcgccgtatggaacatcgtggttatttacgttctggccggagatcagttgtctaacctatcaaacctactgcagcagtataagactcttgcataccccttccaaagtctcctgtacctcttattggctcttagcacaataagcgcttttgaccggatcgacttcgctaaaatatccgttgcgatccgcaattttctcgccttggaccctaccgctctcgctagcttcttatactttacggcgctcatcctctcactgtcccagcagatgactagcgaccgcatacatctgtacactcccagtagtgtaaacggttccctgtgggaagccggtattgaggagcagattctgcaaccttggatcgtcgttaacctcgtcgttgcactccttgtcggcctttcgtggcttttccttagctatcgcccaggcatggaccttagcgaagagctgatgttctcgtccgaagtcgaagaataccccgataaagagaaagagatcaaagcttcctcctag

SEQ ID NO: 244813 - DNA, 1203 bp, synthetic construct
  misc_feature 1..1203: note = Description of Artificial Sequence: Synthetic coding sequence
  source 1..1203: mol_type = other DNA
atgggcaagaatcccgtgaggccaccgcgtgcgctgcctcccgtgccaagccaggacgatatccccctgtctcgtcccaaaaagaagaagccacgcactaagaacacccccgcaagtgcctcactggagggactggcgcagactgctgggagaaggccttcagagggaaacgagccttccacgaaggagcttaaagagcaccctgaggcacccgtgcaacgtagacaaaagaaaacacgcctgcccctcgaactggaaacatcctctacccagaaaaaaagctcctcaagctccctgctaaggaatgagaacggtatagacgccgaacccgctgaagaagccgtgatccaaaaacctcggaggaagactaagaaaacccagccagcggagctccagtacgcaaacgagttgggtgtggaggacgaagacatcatcacggatgagcagacaacggtggagcagcagagcgtttttactgctccaaccgggatcagccaacccgtgggtaaggtcttcgtcgaaaaaagtaggcgcttccaggcggctgatcgatccgaacttatcaagacgacggagaacatcgacgtgtctatggacgtgaaacctagttggacaacgcgtgacgttgctttaacggtacatcgcgctttcaggatgatcggcctgttctcacacggcttccttgcgggttgtgccgtgtggaacatagtcgtgatctacgtcctggcaggcgatcagttgtccaatctatcaaatctgcttcagcagtacaagaccctcgcctatccgttccagtctttactgtatcttcttctcgctctgtctacaatctccgcctttgatcgtatcgacttcgccaaaatatctgtggctataaggaactttctcgcattagacccaacagccctcgccagcttcctctattttacagcacttattttaagtcttagtcaacagatgacctcagaccgcattcatctgtatactccttcctcagtcaatggatccctttgggaagcgggaattgaggagcagatcctgcagccttggatcgtagtgaacctggtcgtggctttattggtgggactgtcctggctctttctctcctacagaccgggaatggaccttagcgaggagctcatgttcagctcagaggtagaggagtacccagacaaggagaaggagattaaagcttcctcttag

SEQ ID NO: 244814 - DNA, 1227 bp, synthetic construct
  misc_feature 1..1227: note = Description of Artificial Sequence: Synthetic coding sequence
  source 1..1227: mol_type = other DNA
atgaggaccgattccggagctaggctggaagagggacacctgcggccaccacgtgctctgccacctgtaccctctcaagacgacattcctctgtcccgccctaagaaaaagaagcccaggactaaaaatacccccgcaagcgccagtctggagggcttggcccaaacggcaggacgaaggccctcagaggggaatgagccaagcacaaaagagctgaaggagcaccctgaggcacctgtgcagcgtaggcagaagaagaccagactacctctcgagctggaaacctcctctacgcagaagaaaagttcaagttcgtctttactgcggaacgaaaacggcattgatgccgagccagctgaagaggccgttattcagaagccacggagaaagacaaaaaaaacacagcctgccgagctccagtatgccaatgagctgggggttgaagacgaggacatcatcactgacgaacagaccacagtcgagcagcaaagcgtgtttaccgcaccaacaggcatcagtcagccagttggcaaagtcttcgtcgaaaagtcccgcaggtttcaagcagctgatagaagtgaattgattaaaacaacagaaaatattgacgtgagcatggatgtgaagccctcatggacgaccagggatgtagccctgacagttcacagggccttcaggatgatcgggttgttttcgcatgggtttctggccggttgtgccgtgtggaacattgtagtgatatacgtcctggccggtgaccagctctcgaacctttcaaatctgctccagcagtacaagaccttggcatatcccttccagtctctgctttatctgctgctggcactgtctacgatctctgcgtttgacagaattgacttcgcgaagattagcgtagcgattaggaactttttggccttggacccaacagctctggcgagcttcctatattttacggcattaatcctgagcttatcacagcagatgactagcgaccggatacacttatatacaccttctagcgtgaatggatcactgtgggaggccggaattgaggagcagatccttcaaccatggatcgtggtaaatctggtcgtggcactcctagtgggtttatcctggttattcctgtcctaccgcccaggaatggatctaagtgaagagcttatgttttctagtgaggtggaagaataccctgataaggagaaggagatcaaagcatcatcctag

SEQ ID NO: 244815 - DNA, 1293 bp, synthetic construct
  misc_feature 1..1293: note = Description of Artificial Sequence: Synthetic coding sequence
  source 1..1293: mol_type = other DNA
atgactcattgcgcttgcgcaagagataggagagaaggatggggagctaggtgtctgggccgaaggcccccacgtcccgcaaagagacgcatggggaaaaatcctgtgcgaccaccacgggcacttccccctgtaccctccatcgatgatatacccctcagccgccctaaaaaaaaaaagcctaggactaagaatacccccgcttccgccagtctggagggattggcgcagacagccggacggcgaccctcagagggcaatgaaccctctacaaaggaattaaaagagcacccggaagcaccagtccagcgcagacaaaaaaagacacggcttcctttggaactagagacttcatcaactcagaagaaaagctcctcctcctcgttgctcaggaatgaaaacgggattgacgctgagcccgctgaagaggcagtgatccaaaaacctcgcaggaagaccaagaaaacacagcctgcagaattacagtatgcaaatgagctgggtgtcgaggacgaggacatcatcaccgatgagcagacaacagtggaacagcagtccgtctttacagcaccgaccgggattagccagccagttggaaaagtcttcgtcgagaagagtagaaggtttcaagcagccgaccgatccgagcttatcaaaaccacagaaaatatcgatgtttctatggatgttaaaccttcatggactacacgtgatgtcgctcttacagttcacagggccttcagaatgatcggcctattttctcatgggttcctggctggctgcgcagtgtggaacattgtggtaatctatgtcctggccggagaccagcttagcaacctctctaatctgttgcagcagtataagacattagcttatccttttcagagtctactctatctgctacttgctctgtcaacaatcagcgccttcgataggatagactttgccaaaattagcgtagccattcgaaacttcctcgccctggacccaaccgcccttgcctcattcttgtactttaccgcgctgatcttgagcctcagccaacagatgacatcggaccgaatccacctctacaccccatcttctgtcaatggcagcctgtgggaggctggcattgaagaacagatactgcagccttggatcgtggtgaatttggtagtggccctactcgttggactttcatggctgtttctctcctatcggcctgggatggatctgagcgaggagctgatgttcagcagcgaggtagaagaataccctgacaaagaaaaggaaattaaggcttcaagttag

SEQ ID NO: 244816 - DNA, 1227 bp, synthetic construct
  misc_feature 1..1227: note = Description of Artificial Sequence: Synthetic coding sequence
  source 1..1227: mol_type = other DNA
atgaggacagattccggagccaggctggaggagggacatctccggccacccagggcattaccacctgtcccttctatcgacgacattccactctcgcggccaaagaagaaaaagccgagaaccaaaaacacacctgccagcgcctcacttgaaggattagcacagacagctggtaggagaccaagcgagggtaacgagccttcaacaaaagaactgaaggagcaccctgaagccccagttcagcgccgacagaaaaagacaagattgcctctggaattggaaactagctccactcagaagaagtcttcgtcctcatctttactgcgtaacgaaaacggcatcgacgcggaacctgccgaggaagccgtgatccaaaaacctaggcgaaagaccaagaagactcaacctgccgaactccagtacgccaacgagttgggagtggaagatgaagatattattacggacgaacagactacggtagagcaacagagtgtcttcactgccccaaccggaattagccagcctgtcggcaaggtgttcgtcgaaaagtcaagacgattccaggctgcagataggtccgaattgattaaaaccactgaaaatatcgacgtgtcgatggacgtgaaaccttcatggaccacccgggatgtggcgttgactgtgcacagggctttccgtatgatcggtctcttcagccatgggtttctcgcaggatgtgcagtgtggaacattgttgttatctacgtgcttgccggtgaccaactgtctaatctgtcaaatttgcttcagcagtataagactctggcctacccttttcagtctctcctttacctcctcctggccctctccactatctcagcatttgaccgcattgacttcgcaaaaatctctgtggccatcaggaacttcttggcactcgaccctacggccctggcatcttttctgtatttcactgctctgatcctgagtctgtctcagcagatgacaagcgacagaattcatctgtacacgccaagttctgtgaatggttccttgtgggaggcaggaattgaagagcagatacttcagccgtggattgttgttaacctggtggtggccctgctagtgggcttatcgtggttgttcctttcctatcgacccggtatggatctctctgaggaactcatgttctctagcgaggttgaagaatatcccgataaagagaaagaaatcaaagcatcctcttag

SEQ ID NO: 244817 - DNA, 1101 bp, synthetic construct
  misc_feature 1..1101: note = Description of Artificial Sequence: Synthetic coding sequence
  source 1..1101: mol_type = other DNA
atggcactgcctcccggtccagcagcccttcgccatacactcttgctgcttcctgcgctcctttcgtcaggatggggggagttagagccccaaattgatgggcagacatgggccgagagagcactgagagagaatgaacggcatgctttcacctgtcgggtggcgggtggtcccggtacaccgcgattggcctggtatctcgacggccagctgcaggaagcttccacttccaggctgctctctgtcgggggagaggcctttagtggcggaactagtaccttcaccgtgacagcccatcgcgcacaacacgagctcaactgttctctccaggacccaagatccggcagaagcgccaacgccagcgtcatcctgaacgtgcaattcaagcctgaaatcgcccaggtcggagcaaaatatcaggaagcacaaggccctggactcctggtcgtactgttcgcactagtccgcgctaacccacccgctaacgttacctggattgaccaggatggccctgttacagtgaatacgtccgactttctggttctggacgcacagaattacccatggctcactaaccacactgtacagctgcagctccgaagcctcgctcataatctgagcgtggtcgcaacaaatgacgtgggggtgacctccgccagcctcccggcacccggattgctggccacgcgagtggaagtcccacttcttggaattgtcgtggctgctggcctggccctgggcacactggttgggttcagcacactcgtggcctgcttggtatgtaggaaagagaagaagacaaagggccctagccgccacccaagcctgattagctccgactctaataatctgaaattgaataatgttcgtctgcctagggagaatatgagtctcccctccaacctccaacttaacgatctaacacccgactcccgtgcagtcaaacctgcagatcgccaaatggcccaaaacaattcacgtcctgaactgttggatcctgaaccaggcggtctgttgacatctcaaggattcattcgactgcctgtactaggctatatctaccgcgtatcttctgtaagttcagacgagatttggctttag

SEQ ID NO: 244818 - DNA, 657 bp, synthetic construct
  misc_feature 1..657: note = Description of Artificial Sequence: Synthetic coding sequence
  source 1..657: mol_type = other DNA
atggctcttccccctggcccagctgcgctcagacacactttactcctgcttccagccctactgagtagtgtgaaacctgagattgctcaagtgggggctaagtaccaggaggctcagggtccaggcttgcttgtagtgctgtttgctttagtgagggcaaatcctcctgcaaacgtcacttggatcgatcaggatggaccagtgacggtcaatactagtgattttttggtattagacgcgcagaattatccttggttaacaaatcacactgtgcagctgcagctgcgcagtctggcccacaacctgagtgttgtggcaactaacgatgtcggcgtgacaagcgcctccctgccagccccagggccatctcgtcaccccagtctgatttcttcggattccaataacctgaagttgaataacgtgagactcccccgagagaatatgtccctgccttccaacctccaactgaacgacttgacccctgacagccgcgctgtaaaacctgccgatcgccagatggcgcagaacaatagccgtcctgaattattggatcctgagcccggaggacttctaacgagccaggggtttatccgcctgccggttcttggctatatttatagggtttcgagtgttagcagcgacgaaatctggttgtag

SEQ ID NO: 244819 - DNA, 1056 bp, synthetic construct
  misc_feature 1..1056: note = Description of Artificial Sequence: Synthetic coding sequence
  source 1..1056: mol_type = other DNA
atggccttgcctccaggaccagccgctcttcggcatactttgttactgcttcccgcactgttatcttccgggtggggagagttggagccacagatagatggccagacctgggctgaaagggcacttcgcgaaaacgagaggcacgccttcacctgcagagttgccggtggcccaggtacgcctaggctggcttggtatctcgacggacaacttcaggaggcgagtacttctagactgttgagtgttgggggtgaggctttctcaggaggcacctccacatttaccgtaacggcgcacagggctcagcacgaactgaactgtagcctgcaggacccgaggagcggcaggagtgctaacgcttcggttattctaaacgtgcagttcaaaccggaaatcgctcaggttggtgcgaagtaccaggaagcgcagggaccgggtttactggtagtgctgtttgccttggtcagggccaatccacccgctaatgtaacatggatagatcaggacggccctgtgacagtaaatacctccgactttctcgtgttggacgcccagaattatccttggttgactaatcatacggtgcagttacagttgcgaagcctggcacacaaccttagcgtagtggctactaacgacgtgggcgtaacatccgcatccctgccagctcccggactgttagcgacccgggtagaagtacccctccttggcatcgtagttgcagccggtctggccctgggcacactagttgggttttctacattggtggcctgtctggtttgccgcaaagagaagaagacaaaaggacctagtcgtcatcccagcctgatatcatcagactcaaataacctgaagctaaacaacgtgcgtctgcccagggaaaacatgtctctgccgagtaatctgcaacttaacgacctaacacccgatagccgagccgttaaacctgccgatcgccagatggcccagaacaattcccgacctgaactgctcgaccccgagccaggcggactgctgacgagccagggtcgtagaaaccaggataaggatgcctag

SEQ ID NO: 244820 - DNA, 969 bp, synthetic construct
  misc_feature 1..969: note = Description of Artificial Sequence: Synthetic coding sequence
  source 1..969: mol_type = other DNA
atggcactaccacccggtcccgcagctttgcggcacacactgctcttgctgcccgctttgcttagctctggatggggcgagttagagccccagatcgacggccagacgtgggcggaacgggctctgagagagaacgaacggcacgcatttacgtgtcgtgtcgcaggtggaccagggacacctcggctggcgtggtacctcgacggacagcttcaggaagcctctacgagtcggctattgtcagtcggaggtgaagccttttcaggtggcacaagcacatttaccgtgaccgcgcacagggcccagcatgaactgaactgtagtctgcaggaccctaggagcggccgttcagccaatgccagcgttatcttgaatgtgcagttcaaaccagagattgcccaggtcggagcaaagtaccaggaagcacagggcccagggctcctggtggtcctctttgcattggtgagggccaacccgccagccaatgttacatggattgaccaggacgggcctgtcaccgtgaacacttctgattttctggttctggacgcacagaactatccttggctgaccaatcacactgtgcagctgcagctcaggtccttagcccacaacctgagcgtggtggccacaaacgatgtgggcgttaccagtgcatccttgccagccccagggcctagtagacatccttctcttatttccagtgacagcaacaatctgaaattgaataatgtgaggttgccgagggagaacatgtcactgccatcaaatctccagctgaatgatttgaccccagatagcagggccgttaagccagctgaccgccagatggctcagaacaactcccgaccagagctgttggatcccgagcccggaggccttttaactagccagggctttattcgcctgccagttctggggtatatctatcgggtctcatccgtcagctcagacgagatttggctctag

SEQ ID NO: 244821 - DNA, 969 bp, synthetic construct
  misc_feature 1..969: note = Description of Artificial Sequence: Synthetic coding sequence
  source 1..969: mol_type = other DNA
atggctctgccccctggcccagccgctctcaggcataccttgctgctcctgccagccttattgtcttccggatggggagagttagagccccaaatcgacggtcagacatgggccgaacgggcactgagagagaacgagcggcatgccttcacatgccgagtggcaggcggacccggtaccccaagactggcttggtacctggatggccaacttcaggaagcctctacatcacgcttgctgagtgtgggcggagaggcgttttccggcggaacttcgacttttaccgtgacagcccaccgcgctcagcatgagttgaactgttccctgcaggatccccgttccggacggtccgctaatgcctccgtgatcttaaatgtgcagttcaaaccagagatcgcccaggtgggggctaaatatcaagaggctcagggcccaggcctgttggtcgttctcttcgcactggtcagggctaatccacccgcaaatgttacttggatagaccaggacggccctgttactgttaacacttccgacttccttgtcctggacgcgcaaaattacccatggcttacaaaccacacagtacagcttcagctacggagtttggcacacaatctgagcgtagtggcgacaaatgacgtgggtgtgaccagcgctagtctgccggctcctgggcctagcagacatcccagtctcatctcctcagacagcaataatctgaagcttaataacgtgcgattgcccagagagaatatgagtctgccctccaacctgcagctgaatgacttaacccctgacagcagagccgtgaaacctgccgataggcaaatggcgcaaaataactctcgccctgaacttctggatccggagccaggcggtcttctgacgtcccaaggctttattaggttgccagtgctgggttatatttatcgggtcagcagcgtgagtagtgacgaaatctggctatag

SEQ ID NO: 244822 - DNA, 921 bp, synthetic construct
  misc_feature 1..921: note = Description of Artificial Sequence: Synthetic coding sequence
  source 1..921: mol_type = other DNA
atggcattaccacccggtccggctgcactgagacacacactgttactgctgcctgccctcctgagcagtggatggggggagctggagccccagatcgatgggcagacatgggctgagagagctctgcgcgagaatgagcgacacgccttcacgtgcagggtggcaggcggtcctggtacaccacgactagcctggtatctcgatggccagttgcaggaggcttctacaagcagactgctctcagtgggtggggaagcttttagcggcggaactagcactttcaccgtgacggcgcacagggctcagcatgaactgaattgtagcctgcaggatcctcgaagtggacgctctgctaatgcttccgtcatacttaacgtgcagttcaaacccgagatcgcacaggtgggtgccaaataccaggaggcacagggtcccggactcttggtggtgctgttcgccttagtgagagctaaccccccagccaacgtgacctggatcgaccaggacggtccagtcacagttaatacgtctgattttctcgtcctggacgctcagaattacccatggctgactaaccacaccgtgcagttgcagctgagatcgctggcccataacttatccgtggtggccactaacgacgtgggcgtgacctccgcctcactcccggctcccggaccaagtcgacatccctccctgattagcagcgactctaacaacctgaagttgaataacgtgcgtttacctcgagagaacatgtcactgcccagcaacttacagctgaacgacctgacccccgactctagagttaagccagccgaccggcaaatggctcagaacaactcccgaccggagctgctggatccagaaccaggcggactcttgactagccaggggagaaggaatcaagataaagacgcgtag

SEQ ID NO: 244823 - DNA, 1146 bp, synthetic construct
  misc_feature 1..1146: note = Description of Artificial Sequence: Synthetic coding sequence
  source 1..1146: mol_type = other DNA
atggcgttacccccaggcccagccgcattacggcacaccctgctattactgcctgcactcctgagcagcggctggggggaactagaaccacagattgacggccagacgtgggccgaacgcgcactccgggaaaatgaacgacatgcatttacatgtagagtcgccggaggccctggaacaccgaggctggcgtggtatctcgatggccaactccaggaggcgtcaacctcccgcctattgtctgtcgggggagaagcattcagcggcggaacgtcgacgttcacagtgactgctcatcgtgcccagcacgagttgaactgctctcttcaggacccgaggtccgggaggagtgcaaacgcttccgtaatcctgaacgtccagttcaagccagagatcgctcaggtaggcgcaaagtatcaggaggcacaaggccctggcctgcttgtggttttattcgcccttgtcagggccaatccaccagccaatgtgacctggatcgatcaggatggccctgtgaccgtgaatacttcagattttctcgttctagatgctcagaactacccctggctcaccaatcacactgtccagctccagctgagatctctggcacacaacctcagtgtggtggctaccaatgacgtgggcgtgacgagtgccagtttgcctgcacctgggttactggcaacacgtgtggaagtgcctttgctggggatagtggtggccgctggacttgccctgggtaccctagtagggttctcaactctcgtggcgtgcctggtgtgtagaaaagaaaagaagacaaagggtccatctaggcatccgagtctgattagtagtgactcgaacaacctcaaactgaacaatgtgagactccccagagaaaatatgtctctgccttccaacttgcagctcaatgacctgacaccagatagccgagtcaaacccgcagatcggcagatggcccagaataactctagacctgagctattggatcctgagcctgggggactcctgacatcgcaagcatgcttgctgcaccatggtacaccagctctcacaaatccctggctgccccatcagcaggaaggggcactgccaggcggatggtcaccgcaggcccataacagtactgtatggaagctttag

SEQ ID NO: 244824 - DNA, 810 bp, synthetic construct
  misc_feature 1..810: note = Description of Artificial Sequence: Synthetic coding sequence
  source 1..810: mol_type = other DNA
atggcactgccgcctggcccagccgctctcaggcatacgcttctcctgctgcccgcactgttgagcagtggatggggggagctagagccacagatcgatgggcagacatgggctgagagggcactccgtgaaaacgagcggcacgcatttacgtgtagggtcgctggaggcccaggtacgccaaggcttgcgtggtacctcgatggccaactccaagaagcctcgacctctaggctgttgagcgttggaggtgaagcctttagcggcggaacctccacatttaccgtgaccgcccatcgcgctcagcacgagttgaactgttctctgcaagatccaagatccggcaggtctgccaacgcctctgtaatcttaaacgtgcaatggttactggctacccgagtggaggtccccctgctggggatcgtggtggcagcaggactcgcccttggtacccttgttgggttctcaacactagtagcttgtcttgtctgtcggaaagagaaaaaaacaaagggcccaagtcggcatcccagcctcataagcagtgactcaaacaacttaaaactgaacaatgtgcggctcccccgtgagaatatgtcactcccatctaacctgcagttgaatgatcttacgccagattcacgggcagttaagccggctgataggcagatggcgcagaacaactctcggccagagttactcgatcccgaacccggaggcctgctgacttcacaggggttcattcgtctgcccgtgctggggtacatttatcgggtgtcttcagttagcagcgacgagatctggttgtag

SEQ ID NO: 244825 - DNA, 669 bp, synthetic construct
  misc_feature 1..669: note = Description of Artificial Sequence: Synthetic coding sequence
  source 1..669: mol_type = other DNA
atgttatggctcctgttctttctagtcaccgccatccatgctgagttgtgccagcccggtgccgaaaacgcctttaaggtgcgcctctctataagaaccgccttaggcgataaggcatacgcatgggacacaaacgaggagtatctatttaaggccatggtggccttttcaatgaggaaggttcctaatagagaagccaccgaaatctctcatgttttgctctgtaacgtaacccaaagggtgtctttttggtttgtagtcacagatcctagcaaaaaccacaccctgcccgctgtggaagtgcagtctgccattagaatgaacaagaaccgcatcaacaacgcttttttcctcaacgaccagacactcgaattcctcaagatcccttcaaccctggctccccctatggatccgtccgtgccaatctggatcataatatttggggtgattttttgcatcattatcgtcgccattgcccttctgatcctctctgggatttggcagaggcggagaaagaacaaagaaccctccgaagtggacgacgcagaagacaaatgtgaaaacatgataactatcgagaatggaatcccaagcgatcctctggatatgaaaggaggtcatattaatgacgcttttatgaccgaggatgagaggttgactcctctctag

SEQ ID NO: 244826 - DNA, 252 bp, synthetic construct
  misc_feature 1..252: note = Description of Artificial Sequence: Synthetic coding sequence
  source 1..252: mol_type = other DNA
atgctgcgcaatttgctggcgcttcgccagattggccagcggactatctcgactgcatctcgcagacattttaaaaacaaagtcccagagaaacagaaactttttcaggaggatgatgagatcccattgtacctaaagggcggtgtggccgacgccctgctgtatagggccaccatgatccttacagtcggcggaaccgcctacgccatttatgagctcgccgtcgcctccttccccaagaaacaggaatag

SEQ ID NO: 244827 - DNA, 729 bp, synthetic construct
  misc_feature 1..729: note = Description of Artificial Sequence: Synthetic coding sequence
  source 1..729: mol_type = other DNA
atgtattacgggctcagcaacttttatcagaatcaccggaggtacgtcaaatctagagacgatagtcagctgaatggcgattcctctgccctcctcaacccgagtaaggaatgcgagccttatagaaggaacgaagataagccgattgcgccatgtggcgcaatcgcaaatagcatgttcaatgacactctcgaacttttcctcattgggaacgactcttacccgattccaatcgcactcaaaaagaaaggaatcgcctggtggacagacaaaaatgtcaaatttcggaatccacccggaggtgataatctggaagaacgctttaaaggaacaacaaaacccgtgaactggctcaagcctgtatatatgctggacagtgatcctgacaataacggatttataaacgaggacttcatcgtttggatgcggacagccgctctccctactttcagaaagctttaccgtctgatcgaacggaagtccgatctccaccctacattgccagccggaagatattctctcaacgttacctataattacccagtgcactatttcgacggaaggaagcgtatgatactttccacaataagttggatggggggaaagaatccattcctgggtattgcgtatatcgctgttggctccattagttttcttctcggtgtggtgctgctggtgatcaatcacaagtaccgcaactccagcaacactgctgatatcaccatttag

SEQ ID NO: 244828 - DNA, 978 bp, synthetic construct
  misc_feature 1..978: note = Description of Artificial Sequence: Synthetic coding sequence
  source 1..978: mol_type = other DNA
atggcgatgaactacaatgctaaggatgaggtagacgggggtccaccctgtgcccctggcggtacagccaagactagaaggcctgacaatacagccttcaagcagcagcggcttcctgcctggcagcctatcctgaccgcaggcaccgtgctgccgattttcttcattattggactgatatttattccaatcgggatcggaatattcgttacgtccaacaacatccgggagatcgagggtaacgtattcatgtattatgggctgtctaacttttatcagaatcacagaaggtatgtgaagagcagggatgattctcaactcaacggcgattcatcagctttgttgaaccctagcaaggaatgcgagccttatcgcaggaacgaagataagccaatcgcaccctgtggcgcaattgccaattccatgtttaatgatacactcgagctatttcttatcgggaacgacagctaccccatcccaattgccctaaagaaaaagggaattgcctggtggacagataaaaacgtgaagtttaggaacccacccggtggtgataatcttgaagaacgcttcaaagggactaccaagcctgtgaattggctcaaacctgtttatatgctcgactctgacccagacaataatggcttcattaatgaagactttatcgtatggatgagaacagccgctctcccaactttccgaaagttatacaggcttatcgaaaggaagtccgacttgcaccctacgctcccagcgggaagatatagcctcaatgtgacttacaactaccctgtccactattttgacggcagaaaaaggatgattctaagcaccatctcttggatgggtggcaaaaaccccttcctggggatcgcgtacatagctgttggatccatctcattccttctgggagtggtgttactggttattaatcataagtatagaaacagctcaaatacagctgacatcacaatctag

SEQ ID NO: 244829 - DNA, 234 bp, synthetic construct
  misc_feature 1..234: note = Description of Artificial Sequence: Synthetic coding sequence
  source 1..234: mol_type = other DNA
atgtactacggcctatcgaatttttatcagaatcatcggaggtatgttaaatcccgagacgactcgcagctgaacggagatagctcagccttgctgaaccctagcaaggaatgtgagccataccgccgtaatgaggataaacctattgcaccatgcggtgcgattgccaattctatgtttaatgacactcttgagctgttcctcattggtaatgattcttatccaattccatag

SEQ ID NO: 244830 - DNA, 1038 bp, synthetic construct
  misc_feature 1..1038: note = Description of Artificial Sequence: Synthetic coding sequence
  source 1..1038: mol_type = other DNA
atggccatgaattataccgccaagactaggcgccctgacaatacagccttcaagcagcaacgcctccctgcctggcagcccattctcacagcaggaaccgtgctacccatttttttcatcatagggctcatcttcatcccgattggaataggcatattcgtcacaagcaataacattcgcgaaatcgagattgattatacaggaactgaaccctcaagcccatgcaataagtgtctgtcgccggacgttactccctgcttttgcaccatcaacttcaccctcgagaaatccttcgagggaaacgtgtttatgtactatggactgtccaatttctaccagaatcaccgtaggtatgtgaaatcgcgtgatgattctcagttaaacggggattccagtgcactgcttaacccctccaaggagtgcgaaccctacagacgtaacgaggataagcctattgccccttgtggagccatcgctaactcgatgtttaacgatacgctggagctgtttctgatcggcaacgactcataccccattcccattgcactgaagaaaaaaggtatagcttggtggaccgacaagaatgtgaaattcaggaatcccccaggaggggacaacctggaggaaaggtttaagggaaccactaagcctgttaattggcttaaacccgtgtatatgctggattccgacccagataacaatggatttatcaacgaagatttcatcgtttggatgcgcactgcagctctaccaacttttcgcaaactgtaccggctcatcgagaggaagtccgacctgcatcccacgcttccagcagggcgttattccctgaatgtgacttacaattacccggtgcactacttcgacggccgaaagaggatgatcctgtcaacaatctcttggatgggagggaagaaccccttcctcggtattgcgtatattgcagtcggatccatttctttcctcctgggggtagttctgttggtaattaaccacaagtaccggaattcctctaatacagcagacatcaccatctag

SEQ ID NO: 244831 - DNA, 1056 bp, synthetic construct
  misc_feature 1..1056: note = Description of Artificial Sequence: Synthetic coding sequence
  source 1..1056: mol_type = other DNA
atgacttggtccgctacagcaaggggagcccatcagccagataatacagccttcactcagcagcgtctgccagcgtggcagccgcttctctcagccagtatcgctctgccactgttcttttgtgctggtcttgcctttattggattgggcctgggcctctactacagcagcaacggtatcaaagaactggaatacgactacacaggggacccgggaactggaaactgtagtgtatgtgccgctgccggtcaaggtagggctctgcctcctccttgctcatgcgcctggtacttctccctgcctgaacttttccagggccctgtgtacctttactatgagctcaccaatttttatcagaataatcgacgttacggtgtctcgcgggatgacgctcagttaagcgggctcccgtctgcccttaggcaccccgtgaacgaatgcgccccatatcaacggtctgccgcagggttaccaattgctccgtgtggcgcaattgcgaatagtctctttaatgactcctttagcctgtggcatcagagacagcccggagggccttacgtggaggtgccactcgaccgttcgggcatagcatggtggacagattaccatgtgaaattccggaatcccccacttgtcaatggaagtctcgccctggcatttcaaggcacggccccaccccctaattggaggcggccagtgtacgagctgtcacctgatccaaataacactggattcatcaatcaggacttcgtggtttggatgaggaccgccgcactgcccactttcaggaagctgtacgccaggattcggcagggaaattactctgccggattgcccagaggggcatatagagtcaatatcacctacaactatcccgtgagggcgtttgggggacacaagctgctaatcttttcttccattagctggatgggcggtaagaaccctttcctcggcatagcatatttagtggtcggcagcctgtgcatcctcaccggctttgtaatgttagttgtgtatatcaggtatcaggaccaggacgatgatgatgaagagtag

SEQ ID NO: 244832 - DNA, 1056 bp, synthetic construct
  misc_feature 1..1056: note = Description of Artificial Sequence: Synthetic coding sequence
  source 1..1056: mol_type = other DNA
atgacatggtcagcaactgcgagaggagcccaccagcctgataacactgcctttacacagcaaagactgccagcctggcaaccacttctgtcagcttcaatcgctctgccccttttcttctgcgcaggtctggctttcatcggactcggccttggcctgtattattccagcaatggaatcaaggaactcgagtacgactatacgggtgatcccggaacggggaattgctcagtctgtgcagccgcaggccagggcagggcacttccgcctccatgttcctgtgcgtggtatttctccctgcccgaactgttccaagggccagtgtacctgtactatgagctcaccaatttttaccagaacaatcgcagatatggggtgtccagggatgatgctcagctcagcgggcttccatcagcactccgccacccggtgaatgagtgtgccccataccagagatccgccgctggtctgccaattgccccatgcggggctatcgcaaatagcttgttcaacgattcattttcactctggcatcagcgtcagcccggtggaccctatgttgaggtgcctttggatagatccgggatagcatggtggacagactatcatgtgaagttcagaaatccacccctcgtcaatggaagtctggctctcgcctttcaggggaccgcacccccacctaattggcgtaggccagtttatgaattgagtccggacccaaacaacactggatttattaaccaggacttcgttgtgtggatgagaaccgctgcgttacctacattcagaaagctgtatgcccgtatcagacaggggaattattccgctgggctacctcggggtgcatacagggtgaacataacgtataattaccccgtacgggcatttggcggtcacaagctgcttattttctcttccatcagctggatgggaggaaaaaatccatttctcggtattgcctacctggtcgtgggatctctatgtatactgacgggtttcgtaatgttggtagtttatattcgttatcaagaccaagacgacgacgatgaggaatag

SEQ ID NO: 244833 - DNA, 342 bp, synthetic construct
  misc_feature 1..342: note = Description of Artificial Sequence: Synthetic coding sequence
  source 1..342: mol_type = other DNA
atggaagagcgagcacagcattgtctgagccgcttactagacaattccgcacttaagcaacaggaactccccattcaccgactgtattttacagccaggcgcgttctgtttgtgttcttcgcaaccggaatattctgcttatgtatgggaatcatcctgattctaagtgccaggtccacacaggagatcgagataaattatacgcgcatttgtgccaactgcgcaaaactgagggaaaatgccagtaacttcgataaagaatgtacctgcagcattcctttctacctgtccggtaagatgatggtgggcgaaattcaggaaactcgcctcacgttacattag

SEQ ID NO: 244834 - DNA, 207 bp, synthetic construct
  misc_feature 1..207: note = Description of Artificial Sequence: Synthetic coding sequence
  source 1..207: mol_type = other DNA
taattatgtatgggaatcatcctgattctttcggctaggagcactcaggaaattgaaattaactatacccgaatctgcgctaattgcgccaagctccgggagaacgccagtaattttgataaagagtgcacatgtagcatccctttttatctgtccggaaaaatgatggtgggggaaatccaagagactcggcttaccctccattag

SEQ ID NO: 244835 - DNA, 1203 bp, synthetic construct
  misc_feature 1..1203: note = Description of Artificial Sequence: Synthetic coding sequence
  source 1..1203: mol_type = other DNA
atggccgctaattacagctcaaccagtaccaggagagaacatgtcaaggttaagacctcctctcagccagggtttctcgagcgcctctcagagaccagtgggggaatgtttgtggggttgatggccttccttctgtcattctacctgatattcactaacgaaggacgagccctgaagacagccacttccctagccgaggggctgtcactggtggtctccccagattctattcactcagtcgcccctgaaaacgagggcaggctcgtgcatattattggtgctcttcgcacaagcaagctgctctccgaccctaactatggcgtgcacctccccgctgtgaagctccgccgtcatgtggagatgtatcagtgggtcgaaacagaggagtctcgcgaatataccgaggatgggcaggtgaaaaaagaaactcggtacagctacaatacagagtggcgcagcgagattattaactccaaaaactttgacagagaaatcggacataaaaatccttcggccatggctgtggaaagtttcatggcgacagcccctttcgttcagatcggcaggttcttcctatcaagtggcttaatcgacaaggttgataacttcaaatctctctcgctttccaagcttgaggaccctcatgttgacattataagaagaggggacttcttctaccactccgagaatcccaagtacccagaggtgggggacctgcgggtgagctttagttacgctggattgtcaggggacgacccagacctgggacccgctcatgtagtcaccgtgattgcaaggcaacggggagatcaactcgtccccttctccacaaagtcaggggacaccttactgctgttacatcatggagacttttcagctgaagaggtttttcaccgcgaattgaggtctaattctatgaagacatggggtctcagggctgccggttggatggcaatgtttatgggattgaatctgatgacgagaattctgtacacgctggttgactggtttccggtctttagggatctggtaaatatcggactgaaggcattcgccttttgcgtggctaccagcctcactctgctgaccgtggccgctgggtggctgttctacagaccattatgggcactgttaatagccggattggctctggtacccatcctggtggctagaacccgtgtgcctgcaaagaagctcgagtag

SEQ ID NO: 244836 - DNA, 546 bp, synthetic construct
  misc_feature 1..546: note = Description of Artificial Sequence: Synthetic coding sequence
  source 1..546: mol_type = other DNA
atggcttcagccggatccggaatggaagaggtgagagtatctgtcctcacgccgctcaagttagtgggcctcgtttgcatcttcttagccctgtgcctggatctcggagccgtcttgagtcctgcctgggtcactgcagaccaccagtactaccttagtctatgggaatcttgtagaaagcctgcttcactggacatctggcactgcgaaagcaccttgtcatctgactggcagatcgcaaccctcgccctgctgctagggggtgcagcaataatcctgatcgcattcttggtgggactgatcagcatctgtgtgggttcaaggcgccgattctacagacctgtggccgtgatgctctttgcggctgttgtccttcaggtgtgcagtctggtcctctacccgataaagtttattgagaccgttagcctgaagatttatcacgagttcaattggggctatggactcgcatggggcgctaccatcttctcttttggtggcgcaattttgtactgtttgaacccaaagaattacgaggactattattag

SEQ ID NO: 244837 - DNA, 2745 bp, synthetic construct
  misc_feature 1..2745: note = Description of Artificial Sequence: Synthetic coding sequence
  source 1..2745: mol_type = other DNA
atggggccttttaaatccagcgtgtttatcctgattctgcacctcctggaaggagccctgagtaactcgctgattcagctgaacaataacggctacgaaggcattgtggtagccattgaccctaacgttccggaggatgagacattaatccagcagatcaaggatatggttactcaggcctccctctacctgcttgaagccacaggaaaacgcttctactttaagaatgttgctattttgattcctgagacctggaagacaaaggccgactacgttcgaccaaagctggagacatataagaacgctgacgtgttggtcgctgagtcaacccccccaggaaacgatgagccatacactgagcagatgggcaactgtggcgaaaagggggaacgtattcacctgacccctgacttcatagccggaaaaaagctggccgaatacggtcctcagggcagagctttcgtccacgagtgggcacacctgcgatggggagtgtttgatgaatacaataacgatgaaaagttttatttgtccaacgggaggatccaggcagtcagatgttcagctgggatcaccggaactaacgttgtgaagaaatgccagggcggatcttgttacactaaaagatgcacctttaataaggtcaccggcttatatgagaaggggtgcgagttcgtcttacagagcaggcaaaccgagaaagcctctatcatgtttgcccagcatgtcgactcaattgtcgagttctgcacagagcaaaaccataacaaagaggcccctaacaagcagaaccaaaagtgcaacctacgatcgacctgggaggtcattagggatagcgaggattttaagaaaacaacccctatgaccacgcagccacctaatccaaccttttctcttttgcagataggccaacgcattgtgtgcctcgtgctggacaagtccggatccatggcaactggcaatagactaaacagactgaaccaggctggccagctgttcctcctccagaccgtggagttaggatcatgggtgggaatggtgacttttgacagcgctgctcatgtacaaaacgagctgatccaaatcaatagcgggagcgaccgggacacgctcgctaaaagactgcccgctgccgcaagcggtggcaccagcatctgctcagggcttcgcagcgcctttactgtgattcggaaaaagtatcccacagatggatctgaaattgttctcctgacagatggcgaggacaatactattagtgggtgtttcaacgaggtcaagcagtcgggggctattatccataccgtagctcttggcccaagcgctgcccaggagctggaggagctgagcaaaatgactggaggactccagacctatgcgtcagatcaggtgcagaataacggtctgatcgatgcctttggcgctttaagttccggcaatggcgcagtgtcccagcggagcatacagttggaatcgaaaggccttactctccagaacagccaatggatgaacgggacggtaattgtggactccaccgtcggcaaggatactttgtttctgatcacttggaccatgcaacctccccagatcctgctgtgggaccctagcggacagaaacaggggggatttgtggtggataagaacaccaagatggcctacctgcagattcccggtatcgctaaggtcgggacctggaaatactcactgcaagcttccagccagacccttactttaacggtcaccagtcgcgcatcaaacgcaactctaccaccaatcacagtcacttcaaagactaataaagacaccagcaaatttccctctcccctcgtggtgtatgccaacatcaggcagggcgcttctccgattctgagagcaagcgtcacggccctgatcgagtccgtcaatgggaaaaccgtgacactggagcttttggataacggagccggagcagatgcaacaaaggacgatggcgtgtattctagatattttacaacgtacgacaccaatggacgttacagcgtgaaagtcagggctctcgggggtgtgaatgccgctagacggcgtgtaatacctcagcaaagcggcgcactatacattcctgggtggatcgagaatgatgagattcagtggaatccccctagaccggaaatcaacaaagacgacgtgcagcataagcaagtttgttttagcagaactagctcaggtggatccttcgtcgcctccgacgtacctaatgctccgattcccgatctattcccccctggccagatcacagacctgaaagctgagattcatgggggaagcctcatcaatcttacgtggacagcccctggagatgactatgatcacggaaccgcccacaaatatattatcagaatctccacatctattctcgacctgagggacaaatttaatgagtctttgcaggtcaacactactgctttgattcctaaggaagccaactctgaggaagtctttctgttcaaacccgagaacattaccttcgagaacggtaccgacctgttcatcgctatacaggcagtggacaaagtggatctgaaatccgaaattagtaatattgcgagagtatccctgttcatccctccgcagacgcccccagagacccccagtccggacgaaacaagcgccccatgcccgaatatccatataaactccacaattcctgggattcatattctgaagattatgtggaagtggatcggggaactgcagctgagcatagcttag

SEQ ID NO: 244838 - DNA, 1674 bp, synthetic construct
  misc_feature 1..1674: note = Description of Artificial Sequence: Synthetic coding sequence
  source 1..1674: mol_type = other DNA
atggccaccgcagtatctaggccctgcgcagggaggtcaagagatatactgtggagagtgctgggatggaggatcgtggctagcattgtgtggagtgttttgttcctgcctatctgcaccacagtgttcatcatcttctccaggatcgatctcttccatccaattcagtggctgagcgattctttcagcgacctttactcttcctacgtgatattttactttttactgttgagtgtagtgatcatcatcatctcaatcttcaatgtagagttctacgctgttgtgccatccataccatgcagccgactggccctgatcggtaagattattcacccccagcagctcatgcatagtttcatacacgctgccatggggatggtcatggcttggtgcgcagcagtgataacccagggccagtattcctttctggtggttccgtgcactggaaccaactcttttggaagtcccgctgcacagacttgtctcaatgaataccacctttttttccttctcacaggcgcttttatgggatattcatacagtcttctgtatttcgtgaacaatatgaactacctgccatttccgataatccagcaatacaagtttcttcgctttagacgctcactcctgctcttagtcaagcactcatgcgtggagtcgttgtttttagtgaggaacttttgtattctctactacttcctggggtatatacccaaggcctggatcagcacagcaatgaacctccatatcgatgaacaggtccataggcctctagacacggtctccgggctgctgaatttatcgctcctctaccacgtctggctgtgcggagtcttcctgctgactacctggtacgtgagttggatactcttcaaaatttacgcaaccgaagctcacgtgtttcccgtgcagcctcccttcgccgaggggtctgacgagtgtcttcccaaagtgctcaattcaaacccacccccaataattaaatatctcgccctgcaggacctgatgttgctgtcccagtacagcccatctcggaggcaggaggtgttctccttatcccagccgggagggcacccacacaattggactgcgatatctcgggaatgcctgaacctcctcaatgagatgaccgagttcagtaatccatccccttccacatcaatcagtgccgaaggaaaaaccatgcgacagccaagcgtgatttactcttggattcagaacaaaagggagcaaatcaaaaacttcctgtctaaacgcgtgctgataatgtacttttttagtaagcaccccgaagcaagcatccaggctgtcttttctgatgcacagatgcacatttgggcactggaggggctgtctcatctcgtagccgcatcctttaccgaagatcgtttcggagtggtacaaacgacgctgcccgctatcctcaatacactacttactcttcaggaggcagtggataagtactttaagctgccccacgcaagcagcaagcctccaagaatcagtggttctctggtagatacgtcatataaaactctgaggttcgcctttagagcttcccttaagacggctatttatcggattaccaccacatttggcgaacacctgaatgcagttcaggcctccgcggaacaccagaagaggttgcaacaattcctcgagttcaaagagtag

SEQ ID NO: 244839 - DNA, 2025 bp, synthetic construct
  misc_feature 1..2025: note = Description of Artificial Sequence: Synthetic coding sequence
  source 1..2025: mol_type = other DNA
atggcaaccgctgtctcccgcccatgcgctgggcgatctagggacatcctgtggcgtgtccttggttggcgcatcgtcgcttctattgtgtggtccgtgttatttcttcctatttgtaccactgtcttcatcattttctccagaatagacctcttccaccctattcagtggctctccgatagcttcagcgatctatactccagctatgttatcttctacttccttcttctgtctgtggtgatcatcataattagtatatttaatgtcgaattttatgcggtggttccatcaattccatgctcaaggctggctctgatcgggaagatcatccatcctcaacagcttatgcacagcttcatccacgccgctatgggaatggtgatggcctggtgcgcagctgtcattacccagggccagtacagctttctggttgtgccttgcaccgggacaaattcttttggttccccggctgcacagacttgtcttaatgagtatcacttattctttcttttaaccggggctttcatggggtacagttacagtcttctttactttgttaacaatatgaattatctgccattccctatcatccagcagtacaaattcttaagatttcggaggagcctgctccttctggtgaaacactcctgcgttgagtcactcttcctcgttcgtaatttctgcatcctgtattacttccttggatacataccaaaggcctggatctctaccgccatgaacctgcacatcgatgaacaggtacaccggcctcttgacaccgtgtctggactcctgaatctgagtctgctgtatcatgtgtggttgtgcggggtatttctcctcacgacctggtacgtttcttggatattattcaagatatatgctacggaggcccacgtgtttccagtccaaccccctttcgcagagggctctgatgagtgcctgcccaaagtgctgaattctaaccccccaccaatcatcaaatacctggccttgcaagatctgatgttgctttcccagtatagtccttcgaggcgccaggaagttttcagcctgtctcaacccggaggccatccccacaattggacagcaatttcccgagaatgtcttaaccttttgaatggcatgacccagaagctcatcctttaccaggaggccgcagcaaccaacggcagggtaagcagcagttaccctgttgagcccaaaaaactaaattctccggaagagacagcatttcagacacccaaatccagccaaatgcccaggcccagtgtgcccccactcgtgaaaacatccttgttttccagcaaactctcgacgccggatgtggtaagcccttttggcacgccgttcggctcctcagtgatgaaccgaatggctgggatttttgatgtaaacacctgttatggatccccccagtccccgcagcttatccgcagagggccaagactgtggactagtgccagtgatcagcagatgaccgagttctcaaatccttccccaagcacatctatcagtgcagagggaaagacaatgcggcagcccagtgttatttatagctggattcaaaataagagagaacagatcaagaatttcctatccaagcgggtcctgataatgtacttttttagcaaacaccctgaggccagtatccaggcggtgttttccgacgcccagatgcatatttgggccttggagggattgagccacctggtggcagccagcttcacggaggacagatttggcgtagtacaaaccactctcccagccattctcaatactcttttgactttgcaggaagccgtggacaagtattttaagctcccacacgcatcatcaaaaccacctagaattagcggatctcttgtagatacctcctataaaacactgcgattcgcattccgtgcaagcttaaagactgccatatatcgaataactacgacctttggtgaacatttaaacgctgtgcaggcctctgccgagcatcagaagcggctgcagcagttcctggagtttaaggaatag

SEQ ID NO: 244840 - DNA, 1020 bp, synthetic construct
  misc_feature 1..1020: note = Description of Artificial Sequence: Synthetic coding sequence
  source 1..1020: mol_type = other DNA
atgctactctcccagtactccccgagcaggcgtcaagaagtgttcagcctgtcacagcctggcggtcacccccataattggactgctatcagccgggaatgcctgaatctgttaaatggaatgacccagaaactgatcctttaccaagaggcagcagctaccaatggcagggtcagctcatcttatcctgttgagcccaaaaaactgaatagtcccgaagagaccgccttccagactccaaaaagttcccagatgcccagaccttccgtaccccctctggtcaagacttccctgttcagctctaagcttagcacaccggacgttgtaagtccatttggtaccccatttggctcttcagtgatgaataggatggcaggtatttttgacgtgaacacatgctacgggtcaccccagagtccgcagctgattcgcagaggacctcgcttgtggacttccgctagtgaccagcagatgacggaattctccaaccccagtccctccacatccatcagcgccgaaggaaagaccatgagacagcccagcgtgatctacagctggatccagaataagcgcgagcagattaaaaatttcctgtccaagcgtgtgctcataatgtacttcttctccaaacacccagaggcatcaatccaggccgtttttagcgacgcacaaatgcacatttgggcactcgaaggactcagtcacttggtggcggcttcgtttaccgaagacagattcggggtggtgcaaaccaccctgccagcaatcctcaacaccctcttgacccttcaggaagctgttgataagtatttcaaactgccgcacgccagttctaagcccccacgcatctcaggttcattggtagatacatcttataagacgctccggtttgcttttcgggcatctttaaagaccgctatctacagaattaccactacattcggggagcatctaaacgcagtgcaggcgtccgccgaacatcagaaacgactgcagcagttcttggaatttaaagagtag

SEQ ID NO: 244841 - DNA, 1629 bp, synthetic construct
  misc_feature 1..1629: note = Description of Artificial Sequence: Synthetic coding sequence
  source 1..1629: mol_type = other DNA
atggctacggcagtgtcaaggccttgtgctgggaggtccagagatatcctttggcgagtcctcgggtggcgcattgtggcttctattgtatggagtgtgctgtttctcccaatctgtacaacagtgttcatcattttctcacggatagatttgtttcatcccattcagtggttgtctgactcttttagtgacttgtatagttcctatgtgatcttttacttcctgctactgtccgtagtaatcataattatttcaatcttcaacgtagaattttacgccgtggtgccaagtatcccatgctcccgattggcactaatcggaaagataatccacccccagcagctgatgcactcctttatccatgctgccatgggtatggtgatggcctggtgtgctgcagtgattacacagggacaatatagcttcctggttgtgccttgcacaggtacaaactccttcggatcacccgctgcacagacctgcctgaacgaatatcacttgttcttcctgctgaccggcgcttttatggggtattcgtactcactgctttactttgtcaacaatatgaactacctgccttttcctattattcaacagtataaattcctgagattccgccgtagccttctgctgctggtgaaacacagctgcgtcgagtctctgttcctagtgcggaatttttgtatcctctattacttcctcggctacattcccaaagcttggattagcaccgccatgaacctacatatcgacgagcaggtccatcgtcccctggacaccgtgagtggcctgctcaatctgagcttgctttatcatgtatggctgtgtggtgtgttcctactgaccacctggtatgttagttggatcctgttcaaaatctatgccaccgaggcccatgtttttcccgtgcagccaccctttgccgaaggctccgacgaatgtctaccgaaggttcttaattctaacccgcctcccatcattaagtatctggcccttcaggacctcatgctcctgagccaatacagcccaagcagaagacaggaagtgttttccctctctcagcctgggggtcacccgcacaattggacggccatctcacgagagtgcttgaatttattgaatggcatgacacagaaactcattctgtaccaggaggccgcagccactaacgggagagtgagctcttcctatcctgtcgaacccaagaagttaaattcgcctgaagaaaccgcctttcagactccgaaaagcagtcagatgcctcgcccttctgtaccacccctagtaaagacctccctgttttcctccaaactttctaccccagacgtggtgtctcctttcggaactccattcgggtcttcagtgatgaatcgtatggccggaattttcgatgtgaacacctgttacggctctcctcagtctccccagctaatacgtcgcggtcctcgcctgtggacttccgctagcgatcagcagatgacagagttctcaaacccgtcgcccagtaccagcatttctgccgaagctcccagaggcctccactctggatgcttttttcggtgtcctaatgcatacctcggtattcgccgatccgttgctctgtcatccagcattatctaccgtggatag

SEQ ID NO: 244842 - DNA, 1332 bp, synthetic construct
  misc_feature 1..1332: note = Description of Artificial Sequence: Synthetic coding sequence
  source 1..1332: mol_type = other DNA
atgaggctgacccgcaaacgactttgcagttttctgatcgctctatactgccttttctccctttacgcggcttatcacgttttcttcggcaggagacggcaagctccggctggctctccgcgaggcctgcgaaagggcgctgcgcctgccagagagagacgaggaagagaacagagtacacttgagtcagaggagtggaatccctgggagggggatgagaagaatgaacagcagcacagatttaagactagcctacagatactcgataaaagcaccaaggggaaaaccgatcttagcgtgcaaatctggggcaaagccgcaattggactttacctgtgggaacatattttcgagggactactggaccccagcgatgtcacagcccaatggcgggaggggaaaagcatcgtgggaaggacacagtatagcttcattacgggcccagccgtgatccccggatacttcagcgttgacgtgaacaacgtggttctgattctgaacggacgggaaaaggccaagatcttctacgctacacagtggctgttgtacgcacagaatttagtgcagatccagaagttacagcacctagcagtggtgcttctgggaaacgaacattgtgacaacgagtggatcaacccgtttttaaaaaggaatggagggtttgtggaactgctgtttatcatctatgattccccatggataaacgacgtagacgtgtttcaatggcccttgggagtggcgacctacaggaatttcccagttgtggaagcctcatggagtatgcttcatgacgagcgcccatacctgtgtaactttctggggaccatctacgagaactccagccggcaggcactcatgaacatcttgaaaaaggatggaaatgataagttgtgttgggtatccgctcgggagcactggcagccccaagagaccaatgaatctttgaagaactatcaagacgcattgctacaaagtgatttgacgctgtgccccgttggggtgaatactgaatgttatcgtatatatgaggcttgttcctatggcagtattcctgtggtcgaagatgtcatgacagccggaaattgcgggaatacgtcggtccatcatggggctcccttacagctgctgaagtctatgggtgcgccattcatctttatcaagaattggaaggagctgccagccgtactggaaaaggaaaaaaccatcattctccaggagaagatcgaaaggcggaaaatgctcctgcaatggtatcaacatttcaagaccgaacttaagatgaaattcactaacattctcgaatcttcctttctcatgaataacaagtcctag
